United States Patent Application Publication US 2019/0348154 A1 - sequence listing, part 21

SEQ ID NO: 79329 - DNA, 672 bp, Citrobacter koseri
atgcgggattacgaacaggacctgcaccatcacgagctgtacagcagatacgagaagccagagcagaatgggaacgtaaaaaccgacttgctggcgacagagacggcgtggcggctatgggaagtcatgggggagatattttcgaaccgctggacgcagaagaacggaacggagccttcggctatctggattgcccagatcggctcgatgactgaaagccagatcaaactggtctgtcagcagtgcatggagcgttgcgcagtcgggaacacctggccgccggatcttgccgagttcgtttcgctggtttctgagagcggggctaacccgttcagtctcacgtcagaccgggtgatggctgaatacaagcgctggcgtaacgaatcataccgttattccggcagtgacaaatatccgtggccgcagccagtgctgtaccacatttgcgtcgaaatgcgcaggactggcgttgaacgccagatgacagagggggagctgaaaaaactggcagaaaaattactcacgaagtggacaaaacatgtcagcaatggcctgtccgtcccgccgattcgtcgccagctggcggcgccgcaccacccggcagggccaacaccggcacaattgctgatggaggaatacagacgccgcaaagcggcaggcttaatcaactaa

SEQ ID NO: 79330 - DNA, 417 bp, Citrobacter koseri
atgaccaaagaactttcacaaaaagaccaggtggcggtagttgttcgtcacattcccgggtgtgtattgcgtgatgtctgtgaagcgctggatattgccgccggaacggcagggcgtttcctgcgggcgctgactgtcagcgggacgataacccgcagccacaacggtacacagtacgtctatgacgtggcgcccggcgcggtaatacctgacgtaacgctgccgttcatggaagaaaagagcgatcccgtaaaaacgcaggcagttgaaagcatcgccagaaatctggagtcccgtgggctgtggcgccgcgcggcaacggtttataccgacatgttggctattgccagcaattctgtcgaagtggcccgtatcgcgcagcggcgcgaagaatgcctgcgtatggctcggaggtga

SEQ ID NO: 79331 - DNA, 336 bp, Citrobacter koseri
atggaaaaagtaaccctgagaagtaaagaccaactggcggtgatcgcgttccttgaaacaaacaaaatcgcctcagtcctgaagcttgggcgccagatgggatggagtaacaaacatactcacgcaattaccgggcgcctgatccgtattggtgttttgaagaatgtcggtaaaccaggaaagccgctgtaccggcttgttcagcgctggcagacaaaagtcaggttgcctgagcaaaatcagcccgcgccacagtcgctgcttataaccgatgtttgtcgccagaactggcagggctatcagatccacaaaattttcgggagcgcacgggcatga

SEQ ID NO: 79332 - DNA, 276 bp, Citrobacter koseri
atgagcataacgaaaactcacacaggcattgtgatcaccaaagacggtccgaagcgtaaaaaattgcatgaaacggaaagaatgtgggtggtcggcaagaatgagttttaccacaaggaaacggggcgccgtcactttgccgagaatactcgccgtcgtctgctgctggacagtatcgacccgattaacaagatggagtatcgggaggacggttcgattctgtatcaggttggtggactggacggtgaagtgctgtttgaggagccagcagcatga

SEQ ID NO: 79333 - DNA, 477 bp, Citrobacter koseri
atgacagacacggcaacaattcttgatatgtgctgcgggtcgcgcatgttctggttcaacaagcgcgacacccgcgcagtgtttactgatatccgcgccgagcagcacaccctttgtgatggtcgccgccttgttatcagccccgagctgattgctgatttccgggcgctaccgttcgccgatgagtcgtttcctgttgtagtgtttgatccgccgcacctggagcgcgttggtcagtctgcatggatgggtaaaaaatacgggcgactgaacaaaaaaacgtggcgttctgacctgcgagccggattcaaagaagcttttcgcgtactgcggccacacggagttctcatattcaaatggaacgaaacgcagatcccggtaagccagattctggcgctgaccgacgagaaaccagcaattggccagcgtaccgggaagaacgacaaaacccactggatcattttcgttaaggactaa

SEQ ID NO: 79334 - DNA, 243 bp, Citrobacter koseri
atgacaaacgataaaaaactaacaggccttggtgtgaaccatcctgcaaatggtccgcttacaaccgagcggctaagccacgttcgcgacgtgttacagcgccacctcaaatactcaaatggcggatgtatggattacatcatcgctgatgctgtacgtgcgattgatgaactgctggaaacaaagggtgcaaagccgccggtattaccattattaacggagactccacatacggggaggtaa

SEQ ID NO: 79335 - DNA, 336 bp, Citrobacter koseri
atgacattcagatattatttaaaaaatattgtatggggtgtcctgcctttgtttatgtcactttacgactggtttaataaccctgatagcgcactatctttttatttattactattttgtgcagtaagtttttttctgtaccctttttcaaaggttactatagagaatttatttcttaaatttacaacaaaagaattttggcacagtggtttctttcaagaaacacaagcaaaaccggctttagaagcagtgttcttttgcatttgttatatcctagcaatccctgttggactgctaggtgttgtattagttactattcgtaattatggtaactaa

SEQ ID NO: 79336 - DNA, 1572 bp, Citrobacter koseri
atgtctgattcagttacagtttcttattacaaagatggcctgccctataatgctaaaggtgaagttattattactattacagggaaaccgcccgaagggactggtggtggtggttcggtctccaccggaaactacggtggagcaacatcacagattggtcactctctggccaaatggtcgactaaaaaccttcagaaaacaaaagccgcccaagcgaagcgagagctagaattcaggcagatcgtagagaaagccaaaacatctctggcagcaatgacaaataaactaaacgcaatcactgctcaggccgtagccgcagcacacagtggcccgtctgctgtcgatctggctcacaataataacgcagctatggaagcagaagcgaaacgcctggcacttgctaaggcagaggcaaaggcacgagaagacgctcgtaaagccgaagaagcattaaaaatagctcaacagaaacatgaggaggaggctaaacaactcgcagaaacagaacggaaactaaaactggcagaagaggaagaaaaacgaattgcagccctaagccaagaagcaaaagatgttgaatatgcaaaaaaaaatcttgaagattctaagtctaaactagcatcagaagaccagaacatctcatctctccgcaaaaaaaatgattcatacaaagtctcattgaataatgagaacaaacagatcacatccaaacgcgctgaacttgaaaaattacaaagtgaattacttcaggcagtagaaacctcaaaaaaacttcagcatttagcaaatgacccaaaccaaagccgcttattttttaatgcaagatcaaatatagttagaatatctaatttaaaggataaaaaggaatctgaaatatcaagctcagagaaacgcattaatcaactgaataatgaattaaaaaacactcaaaaatctttagatcaggctttatctcggcggaatcaaaatttaaaagaaattagtagtaatgagttaaagttaaaagtcgccaatgaaaagctatcacaggcattaataaaagatgctattgataccaccgttggtttctttaaagatataactgagaaatatggtaaaaaatactcagacctcgccaaaaacctggcagagaaagcgaaaggaaagaaaattggcaacgtaaatgaggcttttgcggcttacgagaaatataaaaatgtacttgacaaaaaattcggagcaaaagacagggaggcaattgttaacgctctaaaatcagcagattatgctgatttggcaaagcatcttaaccagtttgccaagtatctaaaaattacaggccgcgtttctgccgggtatgatatctattcagatattcagaatgctttgaaaacaggccaatggaaacctctcttccttactctagaaaaaatttccttcgatgccggggtcgcttatattgtggctatcatgtttagtattatagccacaacatctatcggtatttttggggtcgcgattgtaacgggaattatctgtgcatttgttgacaaaaatgatttagagcttttgaataattcattgggcctataa

SEQ ID NO: 79337 - DNA, 420 bp, Citrobacter koseri
gtgaaaaaaatctctaccgttatgttatgtaccatgctggccgctatgctgatgaccactgcctgcactccgaagacaagtgcagagcgccatgcccgacagtatgtttacgcagcggatgatgggtttaacccaaatttttatgtcaaaaaagccgatagcatcaggatgatggtgccattcttcaggcagttccaggagatgggggcaaaagacagagcagcaggtgtgtcacgggaggaagcgctgcaacgggttagtcagttccgcagcgaggagtttctgaaatctattcggtcagaagaaaaatttgcgggcagaacctacaccgacagcagtacgccctcaccgaaagaactagaggttatgggagatgcgatttctgccacttatatggacggctatgaggggcgaaaatag

SEQ ID NO: 79338 - DNA, 234 bp, Citrobacter koseri
atgaaaattgaattaaccattgatcgtactaagaaacttcctgatggcgcagtgccagcactagaagctgaactgttacgcagactcagtcagagctatgaagatgtgaaactaacagttcgtcgcgccggagctgacggtctgagtattctggggggggataaaggggataagcaatgcattgaggagattcttcaggagacctgggaaagcgccgacgactggttttattga

SEQ ID NO: 79339 - DNA, 246 bp, Citrobacter koseri
gtggaagtattagaagaattaccaaaaaaaggctatgcagttatcagatgtcacgatggggttatcgttgccaggctgcactcatttcctgaatgtgaacgtgcgctgatgtaccggcgcggtaacatggtgtctttcatgccgctaaaggacgatgagattatcggaacgccgagtctctttacccagatgctggaacgcgctggttatcgcgtttctctgaattctgttacacttccgtcatag

SEQ ID NO: 79340 - DNA, 201 bp, Citrobacter koseri
atgaaacggagctggttcactcatcacgggctgaccactgagcaggccgacgagctggtggaacgataccgggcaaagggcattaaaacagagagaagtctggactctgatccatgtttttggattgtcagtgcattactgactgaaaacgccagcccggcgcgcactaaaaaatcgtatcgctcgcagatgtgggggtga

SEQ ID NO: 79341 - DNA, 381 bp, Citrobacter koseri
atgcacgtctacgacattacgccgctcggtaaacccagaatgacacagcgggataaatggcagaaacgcccgccggtgcttcgttatcgtgcgttctgcgatgaagtcaggctgaacaaggtctcactgcctgagtcgggttatcacgtcacattcatacttcccatgcccgccagctggagcaggaagcgccgcgccgaaatgagcgggaaaccgcaccagcagaaaccagataaggacaatctcgaaaaggcgttactcgacgcgatatttgacgacgacagccgcgtgtgggacgggcgcgtcacaaaaatatggggagaaaaggggcaaataatcatccgggagattattgaatgcgcgcactgctcaaacccgtaa

SEQ ID NO: 79342 - DNA, 1035 bp, Citrobacter koseri
atgcgcgcactgctcaaacccgtaatcgttcgtgaaatggggctgataatgctgaagccaggcagtgagttgctcggtttgtttcatcatggtcgggtgctgatagaaaagccgccagagtatatgacgcgctggccatccgggaaaatccctgatgctcgccagccactggcagaagacagcgggctggtgccgttttttactgatgaacgggtgatccgtgctgctggaggaattacggcgctggaggaatggttacgacgtcgggtaagccattgccagtggtcgcattcagagtatcaccacagcgagctggtcaatatgcgacacgagccgggggcaatacgtgtctgctggcattgtgataaccagctgcgggagcaggcaacggagcaactttcggcgctggcccgcaagaacctgatcgagtgggtgattgataacgtattagcggcgctaaggtgtggtaaagacagagagctttcacttgcggaattgtgctggtgggccgtgtattccggcgtcgccgcagcgataccggaagggatggcgagccgcgctctggcactgccgaacgaaccgttgcggtcagtctataaggaaagcgagatcgtcccttcggttccggcctccagcattctggaaaaacgcctggaattgctgccgggtgatgttattccggtaataccggcgacaaagccagctgtgacgctgaccgttgatccagaatccccgcaaacccttatgaagcggccaaaacgtattcgctgggtaaatcctgaatatgttcggtgggtgaaaacccagccgtgcgaatgctgcggaacgtcatcagacgatccccatcatcttattgggcacgggcagggaggaatgggaacaaaagcccatgacagctttacccttccgctgtgccgtgaacatcacacagaactgcataacgatccggtcaagtttgaacgtaaatacggttctcagcttgaaatgttgaaaaatgtgctggaccgggcgttcgcgcttggcgtgctggggtaa

SEQ ID NO: 79343 - DNA, 342 bp, Citrobacter koseri
atgcgagatatatacgaagttttagaacgttggggcgcatgggctgcaactgacagtagtggtgttgactggcagccagttgcggctggttttaaaagtttaattccttacgggaaaaaatcacgtgttcagtgtgacgatgatgaagggatcattattgatggttgtgttgcgaggttgtgcaagcataagccggaagagtatgaactcatcattgctcactttgtgattggtatttcgttgagaactatcgcaaaaaaacggagatgttcagacgggactatccggaaggaattgcagactgctattggatttgttgagggatgcttatctgtcatatga

SEQ ID NO: 79344 - DNA, 1044 bp, Citrobacter koseri
gtgaacattcaagcagtagacgtattttgtggagcgggtggtttaacctacggtttgagaaccgcggggataaatgtgtcgcacggaattgatattgatgaatcttgcagatatgttcttgaaaagaataataaaagtacaaaattcatccataagtcagttacagacataacatctgacgagatttcatcgttttatgacaaagacagtatcaaattgttagctggttgtgctccatgtcaaccattttcaaaatatagaaaccctaacagtcgtaaggatgactcaaaatggcgtttattaagtgaatttgaaagactagttactgatattaaacctgaacttgtgactatggaaaatgtacctcaattgcgtatacattctgtgttcagtcgctttgtgcaaacactgaaatctcatggttatcatgtttggtatgatgttgtaaattgctctgattatggccttcctcaaaacagacggcgtttgattctattggggtcaaggctgggtgaaatatcctttgaccagatcaaggttacacgtaagactactgttaaggatgctatagcgggtttaccaaaagttgatgctggagagaaaattaatgaagacattcttcattgctcacctaaacttagagatgtaaaccttgaaagaattaagcattcgattccgggtggaacttgggatgattggcctgaagatattagagccgaatgtcataaaaaagcgtctggattaacgtataaaagtgtttacggacgtatggtttgggatgatacaagcccaacgatcacgacgcaatgttatggatatggtaatggtcggtttggccatcccgagcagaatagagcaattactttacgtgaagcagcaattttgcaatcatttccaatgaattataatttcttatctaaagatatgcctttttcatttcaaaaattaggtacgatgataggcaatgctgttccacctatcatcggacacgcaattggtgaaacatttatgaggcacgttgagcggataaataaccgcttctag

SEQ ID NO: 79345 - DNA, 693 bp, Citrobacter koseri
atgagtttaattgatttaagagaggagtacgaagagcgagcaagtgatattacagaaatgttatcacttgcaaattctattgaagccactcgtagccacttagatgccacatcacaacaagatgcaatttcctcaatagatactaaagttaatattctgaaatcatctgtacatatgatgttatataatcaagtggaaaatactgccagaggatgcatcgaagcaatttatgaccatttgcaagatagtgcaattagttattcttcacttaaggacaaatttcaaataaatatattgcatagaatcgtaaatgacaatgaaagtggtaagtcattgtacagaaaaattgggaatgatatatcaagaaagataatttctgcttcaattaatattcgcaaagagtttaatggaaatgtttgcaagacagtattatataaaatcactcaagattatggaataacagtagcaaattctcctgaatgtagaaatggcgttgaattggatttactgaaggatattcggaatgaactggcacatggcagtacaagtttctcaaggaagggtcaggacgaccctttagaagaagtaattcagcggtcaaatcgcatagatatttatttacgcttacttattagctcaaccgaggagtatattgctagaagcggttatttatccgctcaacgtgcctcataa

SEQ ID NO: 79346 - DNA, 1158 bp, Citrobacter koseri
atggcaacccttagagaactcaaaggtgaacttgaacaactgaccaatgaagctgacaagtctaggaaacaaacggaaatcgcagccctagtcactaacgcagataaccacatacgtttggctcaaagaaatattggttataatgttcgtgaatggactattgaactaatagttcaaaagtatggtacaaacttagacattgataagaatgaacttttcattcctgattatcaacgagactataagtgggatgttaaaaccgcatcaagatttattgaaagtattttattagacttccctattccttatctttatattgctgacgtttttaacgaggatcctgatttagatggaagagtagaaatcattgatggttcacaacggattcgctcaatatattatttctgcaatgatgagtttgaattacatgatttgaaagaacttaaaattctagaggggtttaaattttcagatctcttagctagccgccaaagacgccttttacgtggttcacttcgttttattgagctgaaaggagacgttgaggagcaacatcgtagggatttattcgagcgaattaactctggtgttaagagactggaggcaatggaagtaagacatggttctgatgctgctgcctctattttttatagaaatgtgattactccgtgttctataaacccgcttttctcacaattagcaccattatcagatcgtaaacgttcgaatggcgatcatagggagttagtgttacgcttttttgcatacttaaacaatcttgagaattataaaggttatgttgctccatttattgatgaatacttgaatgagcaagctgaaacagttacagaggatcaagttattggttatatcaatgatttcaatcagatgctcagttttgttgaacaacattttccaattggctttaaaaaaacaccaacaagtaagacgactccaagggcgaggtatgaagctattgctgttggcaccgcattagcattaaaaaatactcccaatctaagtgcacctgctgagccagttgtagattggttatttaatgaagagtttgaaactattgtaacagctgatagcgcgaataatacgacccaacttaagaatagaatattttatgttagagataaattattaggattctga

SEQ ID NO: 79347 - DNA, 393 bp, Citrobacter koseri
atgtccgatcctgtaactggttccggcgcgatgctcggaggtgggctggtgggttccgtaatttacggaatcttcactcataccgattttggcgttgtgtttggtgcgtttggcggcgcggttttctacgtcgcaacggctgcaaatcttacccgtggtcgtctggctgcatacttcatgacatcgttcattgttggtgtgcttggggccggattattagggtcaaaactctcagcatggacaggctacagtgatcgcccgcttgatgcgctcggcgccgtgattgtatcggccatcactattaaggtgctgacattcatcaacagtcaggatctgaacagcctgttcggtatgctttcgcggcttcgcggaggagggggcaatgttaaatga

SEQ ID NO: 79348 - DNA, 279 bp, Citrobacter koseri
atgttaaatgatccttctgcattctttaatgcgttaatttgtggggtgatcgtggttgcgctgatgttttaccagcgcggcagcgcgagacatcgccctctgatatcgctggtggcctacttcacagtgctggtatacgccagcgtcccattccggtatctgttcggtctctatcaggaatcgcactggatggtagtcatcgttaatttgatcatctgcgccgccgtgcttaggtcacgaggcaatgtggcgcgtctcatagatactctgaggcactaa

SEQ ID NO: 79349 - DNA, 276 bp, Citrobacter koseri
atgacgctggagatgattatcgggctggccgcagcggtgattgccgctatcgctggtgcttttggttttggtcacgcacgcggcaccagtaaagcggaagccaaagcagacaagcagcgcacagaagaacgcgtggcagccactgaagcagttgcagagcgccggatagagacaacaaaaggagccggggatgtacagcagacggttaatcatcttcctgatgacgatgtggatcgcgagctgcgcgacaactggacccgccccggtggtcgttga

SEQ ID NO: 79350 - DNA, 330 bp, Citrobacter koseri
gtgagaaaaggatttgtttgcgtatttttcctctgcacctttcttatggggtgtagtggtcatgtggaaagtaatcaaccaaaactgctgacttctgcattcccggcatatccatattatgcgatggcgaacaggatagaaggctttgtggaagtaaaatacgatatcgggagtgatggaaggatttcaaaaatctggattatgaaatctgaaccacagcatcttttcgattcatcagttatttctgctatgtcgaaatggcgttatgaaaaagataagccgacccggggaatgacaaagaatattaagtttaagttacggcatttgtga

SEQ ID NO: 79351 - DNA, 675 bp, Citrobacter koseri
atggcttttggcccacctcttttacgtcagcgtctcaccccactggtgcgttgccttggcggtatgttgctggtctcttcctgtgtcgcgaacgcgcgcgagtatcgcttttcgccttctgcgctggaggggaatatgctgacgcagcaggatatcgatctttccttattttctaaatccagtgcgcaattgcccggcgtctacgcttcccgggtcatgattaacgatgtgcgcctggatgatgcggatatcacctacctcggcacgcctggcggcgaactgacgccgcagctcacgccggatatgctaagaaaatggggcgtggcggtcgataaatatcctgaattagccgcactcaatgcggcgaagccactgcctgaaccgttgagcgtgtatatcccacaggcgctggcaacgctcgatttctccgttatgacgctgcgccttagcatcccgcaggccgccattgccggcacgggtaaaggttatattgatccgtcacgctgggatgacggcgtccccgtcgcctttgtcgactacgccttttccggttcacaaaaccaggacgacacgcaaaacagcaccactaaccagtacctgaatatgcgcagcggcaccaatattggcggctggcggctggcggctgcgcaattacgccacctggagcgacactga

SEQ ID NO: 79352 - DNA, 324 bp, Citrobacter koseri
atgaaaactctacctgcaacaactccgcaggcggcgaagccatgcctgtcgcccgtgactatctggcaaatgctacttagtcgtctgctggaacagcattatggcctgacactaaacgatacacctttctgtgatgaaaccgtcatacaggaacatatcaatgccggtatcactctcgctaatgccattaactttctagtggaaaagtacgaactggttcgtatcgatcgcagagggtttagctggcaagaacaaacgccatatctcacgattattgatatcatgagggcccgtcgcgatctgggtttaatgaatcgtaattag

SEQ ID NO: 79353 - DNA, 222 bp, Citrobacter koseri
atgaaaatcatcagcaaacgccaggcaatgaccctgtaccggcaacatcctggctcccgactgtttcgcttcagtacgggcaaatataaatggtcaggcagtatctgccattatgctggccgcgaggtggaggacatacgcggcgttctggccgtgtttgctgaacgtcgtcaggaccgcaatggtccctatgtcattcttcgaagcgtcactctcaattaa

SEQ ID NO: 79354 - DNA, 471 bp, Citrobacter koseri
atgaaacgttacttatctgtcttgttcgccgtactggcattcactggcgtcgcacacgcgatccccaatatgtgggccagcggttttggtatgggcgtgaccgaatacattatcagtagccctgagaaggtgatttttaacctcaactgcaccggtaatccggatgaacagaacattctgcagcatggcgtattagtgaccctgcctaatggtacgatgctggattctcacgacgacgggacggaaataacggtcgtcatggataacagtcagtatccgctaccgtcattcctcggctggcgaaacggtgacaatgcctgggtgtcatttattgacgcgctgggtcagtcgtccaatttcgatgtttacgtcaacaataataaagttggctccttcagtccgggtctgaagaatacgcaaaaagagctgtctgacctcagtgagtgccggaccacacactacagcgattaa

SEQ ID NO: 79355 - DNA, 459 bp, Citrobacter koseri
atgaaattactcacttcagccttaatggctattgccgttgggtttaacatcaaccatgtgcaggctgatgtcttcagtggcttccaggggagtatcgatggcgggatccctgcctacactcgcgatatcaatgcgaacaataagccttactggtgtacccagcgtaagttgctgcagaagaattgttccgttatctccatctcttccaataagcgggttgccattgttaccagccacactggtagtaaggcctgcccaggtggcttctacggcgtcgtagaccgtgctaacggtgacgcgatggatgtctttccaaccaaaggtcaactgaacatcgaccaggtttgttctaccgattttaaagtgggctttattaatcctactaaccgtaacaccctggcgtctgttgctttgtactacaaaggcaaaatcgtcgaggttctcgactattcagaataa

SEQ ID NO: 79356 - DNA, 708 bp, Citrobacter koseri
atgactcaggctgaacgtcgccatgaccggcttgcggtcagactgtcgatgattattggtcgtctggtggcgggtgaaacgctggatatgtgcaagctggccgccgagtttggtgtgtcggtccgcaccctgcgccgggatttccgcgaacggctgatgtatctggacctcgagtatcgtcagggccggtgccgtctgctgtccggcagtcgccagcgggaactggtagtgatgacttttgcccgccagtcaggcgtcgaatcgctgtttccggaactggatggtcatcttgtcagttcacttctgagtggctcgggcgaatctccctgtctcatctggcaggggagcccttctccgacagtcaccgatagtggagtctttacccggctggtgaatgccgtccaggaatgcaggaaagtgaccctgcgatgtaacgggtgttgctatacagatgtcgctccctaccgactggttctgtatgacggtggctggtatctgacaggaacgcaccagactcgcatcatcgcgctgccactggcggatattcgggctgtcacttcccatcccgacagttttactcctgaagccaatgtgcgggacatcctgtctcgctccgaatttttacaagcgctacctcattttaatgtttttcattcactgctcggtgacggcagttacgggcaacttatccataaggaacaggtatga

SEQ ID NO: 79357 - DNA, 876 bp, Citrobacter koseri
atgactaaacctcacggccttcaggccttcgaacaaccgctggcgtcgctgcccgatacgcttcgccagcttattcttgaacgcattcagagcctcacccactacgagccggtgattggcatcatgggcaaaagcggggccggtaagtcctcgctctgtaatgaactcttccggggtgaggtctcccccgtcagcgatgtgaacgcctgtacccgcgacgtactgcgattccggttacgcagcgggcgtcacagcctggtggttgtcgatttgccgggcgtgggagaaagcggacagcgggaccatgaatatcgcgccttgtaccggcgtatgctaccagaactggatctggtgctgtgggtcatgaaggctgatgaccgggcgctgtcggtggacgagcagttctggctcggggtaatgcagccttatcagcaacaggtgctgtttgtgctgaaccaggccgacaaaatcgaaccctgccacgaatgggatacccgtaccagcacgccttcagcacagcaacgggttaatcttcaggaaaagcaggccgccattgctgcgatgtttcgcccccgtcatccggtctgtgtggtgtcagcctgtagtggatggggcgttgaggagatggtggcaaccatgatgcgctgcctgccggatcgagccaccagtccggtagcgacgcaactgcatgggaggctatgcacagagccggtaaagtcgcaagcccgtaacgatttcggtgaagcggtggggagggtgtttgatacggcagaatcatcgtcgctcctgcccgctcccctgaaaactgtgattcgtaccgtacgtgatgctgtgttatcggttgcccgggtcgtctgggactggattttcttctga

SEQ ID NO: 79358 - DNA, 1053 bp, Citrobacter koseri
atgaaagtagtgaaggggttggtaagagaactaaattggttaaaaaaagaacagcgagcgtgtcacttttttttgttccatttgattacggatttttcagcacgggcaaaacagggcattgctctgcaggttaaggacagttcagatttgagcgaacaacaagactgggctcaatcattgatgtcagagtttgatggccctttacagcaggcagaagctggggagcttccacctccaccagaattaccagaggtattaattccacaacctggtcattatcttggaattgaaactgcacatgaaaaaaccgtgtccctggagaattcttcgatagtaaatattaatttcatcgatggtaaaaaagtggttgacagtaagaattctaacaaccttccgccagtaaacttaatccatgcaaatggtgtttctaatacgtattcaaagaacagaaaaaatatacaagatagttttcttagtgttattgatcaattacgcatcagatatagcactaataatcagatcctaaaattaatatctgaaatcactgccttatggacagagcaatataacagattcccgtcccctttttcctggcttaattataaaaacaaagatcattgccagtggctttgggatgaaatgcataaacgttgtattggcattccatttcaaccccggaatcaaacccagagatggaattttgttatcgcgacattcgataactggaaaggctggacaatacctcaggaggagtatttaacaataaaaaatccaaagcgaaaaccaggaaagctactatctggcggtctggatccaagcaacaaagaaattggacacaaaatgatcctgcttgaagaactcaaaaatgcatgggagcaaaaggaaagaagagccagaagagcgaaggaaccaaccgctgcgaagttgacaaaagcggctcaaaaaaagcttgagtttattgcgcacttagagaaaagcacatcaaaggacattcttaatgacttgattaataatgcttttaatgatgcgaagagtaaatccctgcaatcataa

SEQ ID NO: 79359 - DNA, 207 bp, Citrobacter koseri
atgactacccgcccctcactgaccgaagaccagttcgttgacatggcatttatcaccagtctgctgcaaatgacagataagtggatttataagctcattaaggatggagtctttcccaaacccatcaagctgggccgaagctcacgatggttaaaaagcgaagtcgaaaactggctacaggaaagaatcgaccagtcccgtaaataa

SEQ ID NO: 79360 - DNA, 594 bp, Citrobacter koseri
atgaaagattacaagcctcgttacgaagaactttataaatattatcaggtctggttgaccgattttacgaagctgacggtcagatcgggtatgtgccaccagaatatataccactatcataccctgacggttggcagccttaagtttccgggagaggaagagattattgctgttgttccccagtgtctgcaccggattatttatggcagagcagcagcaccactgactgttaatgatgacctgagcgttagtttatttactcaggagcatctgctggctcaccatcccatgctggaaggtattctgttgtctgagtgcgtgcgtttaaaacagcgtcctctggcaaacaagctcatcagtttgttccgccagttcagcggtagcgagctgcgtctgaagctggtctggctgtgctggtacgatttgatgctgggtaattgccttgatgactggaccgacaacctcaggttcaaaaaagacaaagagatggatatctggatcaatgaccggcaggctgaaaaccttgcgctgaccagtctgatggacgagtacgtctgctttgcgtggcgaacgacagctgaaccactgagttag

SEQ ID NO: 79361 - DNA, 258 bp, Citrobacter koseri
atgaaagaatttatcctatgcaaaacaaaatgggaaccagactggtatctgaaatctcttctgaacaaccatatcaatgaaatggttgcccgctactcctgcatgcgggctctacgggttgctctgttctatcagcaccatgctgcgaaatatcatctgcaggatcaccgccaacttgaaatggatctccgcatgctgatggcgacaatgatgcaggtggacattgacgttggtgataaagacttaagcatcaactga

SEQ ID NO: 79362 - DNA, 570 bp, Citrobacter koseri
atgaaaccttacaatgccaatcccaactacgtaatgaacggccagatcctggaagacataaacgcacacatggaagcgatgtttcagcgtttcgctaagctgctacccttcaggattgattttgcttaccggaaaaacaccgccagtttcgggcatgcctgtaaacatgctatgtgtacagaaatccgtcacctgcttgccgaaacagaaaacgctctggccggttattactgggtgatggaatacacgccgaagaaaggtctgcatatccatttactcggttatctgaacgggcagtatcaccagaacccttaccagctctcccgaacgatgggggatatctggaaaaggtcaaccgaaggagacggataccactacctgtgccggaaaaaagagaattatccggtccggatcaaccaggttatccactataccgataccctcgcaattaatgccctgcggtatgccatcagctatctcgcgaaaattaaacagaaagaggatggcattattctcagccgaagcactgtaccaaagaaaagtaacaggggcaggccgcggcagggctga

SEQ ID NO: 79363 - DNA, 399 bp, Citrobacter koseri
atgtacgcaaaatcctttatcgctctcgatggtaatggtcgtctgattggtgcacgtaccgcgcagacagccccttatgatcgctattcctgccacctctgcggcagcacgctgcaataccatccagaatacgacacggagcgaccatggtttgaacatatcagccacaacatgacggaaaatggacagcaacactgcccttacgcaaagcctgataagcatgaggctaggttggtacatcgtttgcgaatatttgtgcctaacgccacccctatagtgctcagagacagttggcattgttcgctatgtgattccgattatcatggggaacgttactgcattagctgccaaacagggcgttttagcctcaagctgagtgcagaatcatgctatgtgtga

SEQ ID NO: 79364 - DNA, 1605 bp, Citrobacter koseri
gtgataaaaaagattaaaatctcaggttacagaatctacaagcaattgattttagagccaaattcaaagctcaacctgatagttggggggaatgaggttggaaaatcaaccctaatggaagcaatagccttagcgctaacaggcagaatcaacggaaaaggagctaatgatgaattaaatccgtattggtttaatacagagctagtcgctgattttgttgaaagaagacaaagaggtgaaaacattagtctacctgagattaaaattgagctcttttttgataatacgccagaattacaaaatctatgtggagctattaatagcgaccatccaacaaatgcatgccctggtgtattattcaatgtactgcccaatagtgaatataatgaggagatagagcaatggcttataagccctactaaaatattacctgtagaattctaccgtatagaatggcgttcttttgctgatgagaaacttctcaataggcctcggcaattaacaactgccatcatagattctaaaactgttaggtcctccacatcaatcgactatcatttaaggcaaataattaatgatcatcttgctccaatagaaagggcaaaaatatccttatcgtacagacaagttaaagcatctatggccggaggtgtacttggtgatatcaatgaaagaataagcaaattaaatgcctcattacatgataaaaccatcattttagatatggatcaaagtagtcgaacctcttgggaaggcgttgtatcccctcatgtcaatgaggtccctttttctatgtctgggcaaggtcaacaagctgccatcaaaatttctctgtctatgggacgtcacgctgaaaagacaaaatttgtgatgatagaagaaccagagaaccatctttcacataccagtttatcaacactactttctcgaatcgaaaagttatccagtactagtcagcaattgttcattacaacgcatagtactttcgtattgaatagactcggactagattcgttaattttaattggcaatgaatctgtaagcagaatcaatggcctatctccagatactgtttcttatttccagaaactgcctggttacgacacactcagaatggtcttggcaaaaaaagtggtattggtcgaaggcccatctgacgaaataattttcgaacgttttttcaaagatacataccagctgcgccctatggaggtcggtattgatgttataagcatgaggggactatcactagcaaaatgtttggagttatgtgccgctctcgataggcctgttgcctctctccgagataacgatggaatttcaccagaagatcttgcgctcccagttcaaggatggctgaaaaaaaacagaagagagctatttattggaagtgtagttacagggacaacattagagccacaactaattcaccacaatggtgaaaagttacttcgtgaagtattaaacatagaagatagagcagatcttttaacatggatgagtagagaaaaaacagaaggggccttgagaatttcggtctcaaaaaaggcactcacaccacctaaatacatgagcgatgcgataaggtttatttatgaacaatga

SEQ ID NO: 79365 - DNA, 1071 bp, Citrobacter koseri
atgaacaatgagttaatcttggctgtagcaggttcaagaaaaacacaaggaatcattgatcattgtgcgagaatagatggtcaaaaaagagtattagttttaacatttactcaattcaaccaaaatgaaattcgcaatcggttatctcattgtgcaggaaacagctcacatattgaagtgcttgggtggtacacttttttaatccgacattttgccaaaccgttcctcccctataaattccctggacaaagaattttgggatttaactttgatggaaggccgtacatgatggcaaagggtatcaacagatttttagataaaaacaaccatgcttacgcttgtgagctagctcgactaagtgcagaactgattaatgcaagccaaggggcattaatttttagacttgaatctatgtatgatgaaatacttattgatgaagttcaggatttgagcggctacgatttagacatattagattctttgttagcaacggctatcaatttgaaaatggttggagacatgcggcaagctgttctttcaaccaatccaagaggaagtaagcataaaaaatatcaaaatactaatatgctttcttggtttttggaaagagaagagaaaggaataataaagataattgaacgttttacaacctggagatgtcatcatttaatatctgattacgccgatactattttttcacctgaatggggttttcctaaaacaaaatctgaaaatcacactgttacatgtcatgatggggtttttcttgtaatgaaggagcatgttgaagattacatcaaagcatttaaaccgcaatgcttgagaaactcaaaaagcagcggtaaggcctataatttcgattttattaatttcaaagcatctaaaggttcaacttttgaacgaatcctaataattccgacctcaggaattgaagcctttattcagaaaaatgagtatcttgaaagcactgcagccgcaacattttacgtagcagttacaagagctcagcaaagcgtggcaatcgttgtagggaagcctggtcaatcaaaattaccgatatggaaaccgtaa

SEQ ID NO: 79366 - DNA, 1218 bp, Citrobacter koseri
atgattggctattcttgcgatgtacttgagcatataacactgctttttaagcggtttgaaacatactactttgagggagatcttgcccaaggacttatacaattaaatttagataattacttattttgccttgaatatagtcgagtgtcattaataagttcaatcttttcgataaaagatagaggtgatctaaaaaaagaatttgttgacttggaaaattttaatgcaaagttttttgataaaaatttcacaatgatcgtaagtgtggatatgaattatctacgctctttggggatggctatttataaagatctaaacgaggcgataaatttaaaccctaaggctaaagaaaaatttatattactgagatcacccgaaggaaagatagagttatacccagatgaaatagtaaaaggtaaagtgctgcattacatacaaataagtcgagtttgggatgttttagttaactcatctgatgatagtgatggtaactcttgtacatttcttggtgccagaaaatcatttgttacattgcaatatgattttaatgatttagactatgatttggatggcttttctaaattaatgaaattaatggagagcgaggatcacaaagaagaaaaaaataaaattctatcaaatactatttattcttttacatctaataaagatattgatttccgatttagaacgatattgaaacgattttcgatatttgttgaacgttttgaagaaaactatcatgcttttgcagtcggatttagtttcgaaaagataagaaaagagtatgaagaaaagtttagggattatttatcaaaaataaacaccgttcttactgaatccctaacaaggtcattagcaattcctgcatctacagttttaacgtttactgcgataaaaaataatccagatagtatagtgcaggatatcttgttgaattcagggactttttttgttgctttgtttgtgctttttacaacatacttcacagttaaatttcaattgagttttttaaatataacaagagatgagtttttagggttgcttaatcgttttgaagcagagttagactctgtagatttatctgaagctaagggtaaatttaatatattctcctctcaagttggggtgataaaaaagctattaatatttattcttgcaatgagtttgacaaatttcattattaatcttatctcttttgctattgttttaatttaa

SEQ ID NO: 79367 - DNA, 1014 bp, Citrobacter koseri
atggcgaaaataaaaagatttattgttcatcagtttacgcgagacgctgggaaacatgcatcacttaaacctcggcctgcggaaaataaccttgatgagatcaccgacgaagtggggattacgcttcttaatttatttaataaaactgggcttaagtcaggtttttttgatcaagaaggtggacttacaaaatttgagcagacacttgaaagaaactatgatgagcaaaaagagtttgttgatttcagaaaaatgacggttgaaatgtcttatcttttattggatgagttaaatcagggttcaggtaaagcagccaaaccaggatatattgttttttttaactatgaaaccaacgggaacagattcttatctatcgtcactttacaagaaactcaggggatgattttagaaaatctctcattcaagtatattgagcgcttagatcttgatcgtcttcatcttggtgcaagaataaatctaacagcatggtctgaggggttggccgaaagatttatttcatttaggataggacgtaattctgaaatgagagactacttttctcgttttattggttgcaaggaatttactgcatcgaagattgaaacagcaacactcgtaagtgctataaaaaaatgttgtgatgatctttatattgatgatttagatgctataaatgaaaagttaatattagcgaactcatactgtagagataatattaatgaagaaggtaaagttaatgttgagaatttagggcgattcctttttccagaaaatgatggatttcttcttgaaatcattcaaaatgagccatttaatttaagctttgaggtcagtattgataaaagtgagttaagagggcttgttcgttataaggggaaaacgaaaaaaatgagtattagtttcgattctgacttattgggttctaaagtattctatagtgataaaggattactgtttacagaaattccgatagatcttaaagccgagctcgataaaagagaaaatgtaaaataa

SEQ ID NO: 79368 - DNA, 1176 bp, Citrobacter koseri
atgaagctgacagctcgtcaggttgaaactgcaaaacctaaagataagccttacaaactcgctgatggtggtggtctttaccttctggttaatcccaacggtaaaagatactggcgactcaaataccgttcgctaggtaaagagaagctgctcgctattggcgtttaccccgatgtttctttagctgaggccagaagtaagcgtgaggatgcaaaaaggacattagcggctggcaacgatccttctcttgaacgaaaaattgaaaaacttagtcgtcaacaagacgcagaaaactcatttgaggctatcacgcgggagtggtatcagcgccgctatgaccgctggtctgtctcctaccgtgaagagatgctgagaacctttgaaaaggatgtgtttccttatatcggtcaccggccaatcaaagatatcaagccgatggagttgcttgcagtcctttctaagatagaagcacgaggggcaacagagaaagtccgcaaggttcgccagcgttgtggagaggtctggaagtatgccgttgtgaccggcagggccgagtacaatccagcacctgatctagccagcgccgtgactcctcatgagaaagagcattatgcttttttaacccaggatgaactgcctgagtttcttcggactctgaacacctatgccggtagtgtgattgttaagattgcgatgcaattacttattttgactggagtaaggcctggggaattgaggcaagcggagtggcaggagtttgattttgagcggaaggtttggaacgtaccagcagagcgaatgaaaatgcgccgacctcatctggttccgttatcaagccaggcaattgacctgcttaatcagcttaaacccatgactggggcaggaacgttgctgttcccaggacgtaataatcctaagaaaccgatgagtgatatggcattaactgtgttggtaaggcgtatcggctatgccgggcgcgttacagggcatggattccgccacacgatgagtaccattttgcatgagcagggattcaactcggcctggattgagttacaactggctcacgtcgataagaactcaattcgtggaacgtataaccatgctcaatatctggaggggaggaaggagatgatgcagtggtatggggattttatatttaaatcaattggttag

SEQ ID NO: 79369 - DNA, 687 bp, Citrobacter koseri
atgttacgcctgcaatctgcctctttgcgcccatctctgctggcgctggcaatcgttagcaccctgccaggagcggcttacgcgaccacagacgatatcaccgtcactgcgactggtaatgcgcgcagcacctttgaagcccccatgatggtgagcgttatcgatacgtccgatcccgaaaaccagaccgccagctcggcagccgatctgctgcgtcctgttccagggatcaccctgagcggaagcgggcgaaccaacggccaggatatcagtatgcgtggctatgaccgtcgcggcgtactgattctggtggacggcgttcgtcagggaaccgataccgggcacctcaacagcaccttcctcgatccggcgttgatcaaacgtattgagatcgttcgcggcccttccgcactgctgtacggcagcggcgcgctgggcggcgtgatctcttatgaaaccgccgatgcgaaagatctgcttcaggaaggccagaacagcggtttccgcgtctttggcactggcggcaccggcgatcacagtctgggaatgggcgccagcgcctttggccgaaccgataaccttgatggactggtggcgtggtccagccgcgatcgtggcgacctgcgccagggcgacggctccacggcgccaaatgatgaatcgatcaataacatgctggcaagctga

SEQ ID NO: 79370 - DNA, 1248 bp, Citrobacter koseri
atggctctgagtgatgtgaaagttcgttcggctaagcctgaagcaaaagcctataaacttactgacggcgacggcatggttttgctggttcaccctaacggctccaaatattggcggttgcgttatcgctttggtggtaaagagaagatgctggcactagggaagtatcctgaagtttcgttagctgatgctcgatcgcggcgagacgaagcgcgtaagctcttagctaatggcgtcgatcccagtgagaacaagaaagccgttaaggtagagcaggaacaagaggcgataacgtttgaggtggtcgccagagactggcacgccagcaatcaaaagtggtcggcatcgcatagtgctcgtgtattgaaaagcctggaagataatctcttcgctgctatcggtaagcggaacattgctgaattgaagacacgggatctgcttgtgcccattaaggctgtggaatcatccggacgactcgaagtcgccgcccgtttgcaacagcgaactaccgcgattatgcgctttgctgtgcagagtggtttaatcgactacaaccctgcacaagaaattgccggtgcggttgctacggcaaaaagacagcatcgtgctgccctggagcttaatcgcattcctgaattgctttaccgcatcgatcactattccggaaggccattaacccgatttgctgtcgaactcatgttgttggttttcatccgttcaagcgagctgcgttttgcccgttggacagaagtggattttgaaacggctatgtggacgatccctggtgagcgtgaaccgctggaaggtgtaaagcattctcagcgtggttcaaagatgcgaactccccatcttgttcccttgtcacgacaagccttagccattctggaaaagatcaaaagcatgaatgggaaccgagagctgattttcgtgggcgatcacgatccgcgtaaacccatgagtgagaacacggttaataaggcgctgcgggtgatgggctacgatacaaaaacggaagtctgtggacatggcttcaggaccatggcgtgtagttctttgattgaatcgggattgtggtcgagggatgcggtagaaaggcagatgagccatcaggagcgtagctctgttagggctgcctacatccataaagcggaacatctgggggagcgcaggttgatgttgcagtggtgggcggattatctggatgcgaatcgggaaataggggtaagtccgtttgattttggaaagtaa

SEQ ID NO: 79371 - DNA, 249 bp, Citrobacter koseri
ttgccgctgctatttacccgaaacattctgattaaaaccgctctgagaggctctaacaaaatgaacgagaaaaaatatcaatccctgcgtaaaaagtcaataagtaagggggggaatatggcttgtattgttatgctggtacacgcgctctccttttcctcattgcagatggatttagatgtacgtgtgggggatgtgaattggaaacactcgattgtgcttaaaactactggaggaaagggagagtaa

SEQ ID NO: 79372 - DNA, 555 bp, Citrobacter koseri
atgccctttaaatcggcgatacaagatgctggtgagcaaggctcctgttatcttatccagacgaaagatattggacttgacggcattttagatctaggtgctttaacctctgttatcccagagggtaatcctgagaagcattatcttttccctaatgatattttattacgtctgcgggggcctgtgttttctgctgggattatcgaaggaagtttaggcaaaccaatcattacgtccaatcagttagcagtaattagatgtaatgataatctaatactgccacattatttacattggtatataaactctacttctggaagtaaacatattcgcagtttgagtgaaggtacgagtattagtaaacttaattcaaaaacagtttctaaaatgactgttaaactcccaaatttgggggttcaagaaaagattggttctattaatagaaactggaataaacaaaaaacagtttataattcactaatacaaaatggtgatatgctctttgatggtatatgtgaaagtatcattaatagcgaggagttagaaaatgagtga

SEQ ID NO: 79373 - DNA, 1482 bp, Citrobacter koseri
atgagtgagatgaaggcgcttcatgaatcacttttacttgcttgtgatttgtttagagggaaagttgactcatcttcttataaagattatatattttcaatgttattgctgaaatatatttctgatgttaaggctgactatgaatatgatttaattaatgaagaatattctgggttgttagagattgtttctcgagtaccagaggatgcgagtttttataaaatatatcatgaggctaagaatcatggtgattatattggagagaggattgacgactcgctgaaattaattgatcaggctattgattctgtctgtcaaagtagaggtggttatttattcgagtctatacaatttgcgacggttaattttggtgcaagatcagcgagagatcgaatgcttgttaatttactcgctatttttgcacgtcctgaaatgaattttggttatattcaaggtggtaatgaaaagataaaagtagcatgtagatatctttttgaaaagattgcatctgactcggcgatgaggggtggagatttttatactccagaaggtatttcgttactatttgcagagttattgcagcctaaggatggagatagtatttgtgatcctacttgtggatctggttctcttttaattaccctaggggaaaaaataaaaaaatcctttaaaagcaataactataccttgtttggtcaagaggctaatagatccagttgggccttggctaaaatgaatatgattatccataacgaaattaatagtcggatagaatggggggatgtaatatctaaccctcagcttctggatacagataatagattgatacagtttgatgtagttgcttctaaccctccattcaatattatcggttggaatcatgatgatttaatacataatgattatggtcgttttaatttaggttttccacctcagtctaagggtgattatgcctttattttgcacatgatttcaacacttaaaagtgcaactggtagaatggccatactggtatctcacggggtattgttccgtggaggtcaagaggagagtataaggaaaaatttagttagtgaagggttgttagatgcggtaataggtctaccagataggttgcttcttgggacagggataccatgcgccattttgatcttcaggagagataaaaaacattctaatgttgtgttcatcgacgcatctgatttggctaaacccgtaaaggggcgcaatttaataacaaatgaaatcattgagaaggtatcagaatgctactttgaaagaagtagtatcagtaatttttcacatgttgcttcttttgatgaaatacaagaaaatgattttaatttaaatatatctcggtatgttaagaagcatgaagagcaggcttttgttgatcttgagagcttacgtcaacagcgtgaggaactactatcaacattgcatgaattagaaagagaaatgaaagattttattgataattga

SEQ ID NO: 79374 - DNA, 714 bp, Citrobacter koseri
atgccattggttacttttggtgagctcactctcgatttgcagcgtaagccaatcaaaaacctgcatatcagcgtactgcctccggatggccgagtgagagtatcggcccccgtctcactgtcagacacagctatcaggatggctgttgtcagaaggctggtatggatccgacagcagcaagcacaatttcaggctcagccgcgccagagtgaacgagaaatgtgtagtggcgaaacacactacctttggggaagaggatatcggctggatgtagttttagtagataagcccgctgaagtgaaacttcagggtcgttggatacgcatgaaagtacctccacattatgatacggcccagcgggaagctgttctcaaccagtggtatcgcggtattttaaaacaaagactgcctaagttaatggcaaaatggcagcaggaaattaaagttgaagccagttatgttggcatcaagcgaatgaagactaaatggggtagctgtaacccccaaaccgcacgtatctggatcaatctcgaactggtgaaaaaacctcctgaatgccttgaattcattgtggttcacgagctagttcatctacacgaacgcaagcacaatgagcgttttataggcctgatgaacatgtacctcccgaactggcgcgaacacagagctaagttgaataagatgcccttggcttataatcactggggatattga

SEQ ID NO: 79375 - DNA, 3096 bp, Citrobacter koseri
atgaacagtgttggtcaacgtgaacgcatgacacaaaaacgtgttatccagttattcaccgatcatctcggttatcactatcttggtaactggcacaaaagagaagacaaccagaacatcgaaccaggcttagtttctgcctggttaacaaagcgcggcgtttcagaagtcctaatcgcccgagcattacggcaactggatcgagccgcaagcctcggtgaaggccgtatcctctatgatgcaaacaaagaggtgtatcgcctgctacgctacggcgtgaaggataaagaaggtgctggtgagcagaatcaaaccgtgtggttggtggactggaaaaatccagaagccaatgattttgcgatagctgaagaagtgacctacaacggtgaaaataaaaagcgcccagatttggtgctgtatgttaatggtattgcgcttggtgtcattgagctaaaacgttctacagtgtcagtttcagagggcatccgccaaaacctcgataatcagcaaaaagccttcatccgcaacttcttcactaccatccaactggtgatggccggtaatgatttagaagggcttcgctatggtgtaattgaaacgccggagaaatattaccttcaatggaaagaagccgctgaatccccacacgccaacatgcttgatcgtcacctggctcagatatgcaataaacagcgcctgctggaattgatccacgactttatcgttttcgatgctggagtgaaaaaaacctgccgtcataaccaatattttggcgttactgcaacgaaaccgtttattcaacgcaatgaaggtgggattatctggcatacccagggcagcggtaaaagcctgacaatggtttggctggcaaagtggatcagagaaaatattaccgacagccgagttttgatcattaccgaccgtacagaacttgatgaacagatcgagaaagtgtttaacggcgtggaagaagacatccttcgcaccaggagcggcgcggatctggtgactcgcctgaatcaaactaaaccctggcttatatgttcgctggtacataaatttggtcgtcaggaggaggatgacaaagacgctgacacggacgattttatcgaacaaataaaacgaaatatccctgccgattttagcccgaagggaaaattattcgtgtttgtggatgagtgccaccgaacccaatccggcaaattgcattcggcaatgacaagcattttgccagatgcacaatttatcggtttcaccggtaccccgctgatgaagaaagataagaagaagtcagtggaggtcttcgggccttatatccacacttataaatttgatgaagcagtcaatgatggggttgtactggatctgcgctacgaagctcgtgacatcgatcagcgggtcaaatctcagaaaaaagtcgaccagtggtttgatgctaagacatctaaactttctcgccttggccaacagcaactcaagcagaaatgggcttcgatgcagaagctgttgtcgagccgctcgcggctggaacagattgtggctgacatccttctcgattttgaacaaaagccacgactcgccgacggccgcggtaacgctatgctggtttgttccagcgtctatcaggcctgcaaatgctatgagatgtttagtgaagctggttttgccggtaaatgtgcgattgtgacgagctaccagccaaatgccagtgagattaaaggtgaggagagcggtgaaggactgactgagaaactggccaagtacaacatctatcgcaaaatgcttgcggagtattttgaacagcctgaggctgaagcggccaaacgtgtaagtgattttgaaaaagaggtcaaacaacgcttcattaaagaaccgggccagatgcgccttctgatagtcgttgataagttattaactggatttgatgctccttcagcaacttacctctatatcgacaagaaaatggccgatcacaaccttttccaggcgatatgtcgcgttaaccggttggatggtgaagataaagaatatggctatattgtcgactataaagaccttttccgctcattggaaaaaacagttcaggactacaccgcagaagcctttgacggttacgacaaagaagatgtagccggtttactgaaagatcgattgcaacaagccaaaatagatcttgatggtgctctggatgccgttcgcaccctttgcgaaccagtaaaaatgccacgcaatcaactggattatcagcattatttttgtggagaatcaggtgcgtcgatagagcagttatctgagaaagaagctttacgtctgacattgtatcaatccgtggcgaagcttatccgtgcttttaccaatttggcaggtgagctaacagatgctggttatagcgagcagcaggcaaatcaaatccgcatcgatgttgagttttacacaaaagtccgcgatgaaataaaaatagccagtggcgatttcgtggacatgaagcagtttgagccaggtatgcggcagatgctggatctttgggtagatgccgatccaagtgaaaccctcatggattttgaggaactagggctgcttgagttgattattgaacgcggagaagaagcactggatggacttccagccgacatgcgtggcaaccaggaggcgatggctgaagcgattgaaaataacgttcgcagaaccattgttgatgaaaacccagtcaacccgaaatactacgaaaaaatgtcggtgttgcttgatgaactgatcgcacttcgacgtcaacaggcaatctcctatcaggagtatctggagcacgtacgtgaactggcgaaacaggttaaacatccgcagtcaggtagtaaaagtacttatccagcaagtattgatacactcgccaagaaagcgttgtttgacaacctcgggcaggatgaagtcttggtgacaaagatagatgctgcagtccgtcacaccaaaaaggccgactggtatggggatcgttttaaagaacgcgagattagtttcgctatcgcggaagagatcaaaggttattcagtgacggtcgcagatgtaatggccctggtgaaggcacagaaggagtatcgctga

SEQ ID NO: 79376 - DNA, 2010 bp, Citrobacter koseri
atgagtgatgcaaaggtagcatcctttacggtcagatcattactgggtgatgcatctcgttaccttatccccatgtaccagcgtaattatgcctggggagagggggagatcactcaacttgtgcaggacatactcgactaccaacaaaaatgcctgcatagcctataccctcaaacttactacatcggtacgttagtcgtgttcactcgtcctgatggggacgcagagataatcgacgggcagcaacgtttcacgaccttatcccttcttgctaactggttaaaaaaacatgcgggacccacgctggatatgagctggttccaagggattaacttagggtttgagagcagacctaagtctggcgaaacctttgctcggctctggcaaggcgtcgaaccacataaactgcggagcaaggaatttaatgaagggctgattaaaggctacgaacttattggcaaggttctacgcgacttgaaattagttggtgactcattaactcatttttgtacctatctgttcgaccatgtacaaattgcccgaatagaagtgcctgccgataccgacctcaatcatttttttgaggtgatgaacaatcgaggtgagcaactcgaaaagcatgaggtggtgaaagcacgactcatggcggtactcaaccaaataacagatcctcaggaaagacaaagcagccttaacaccctttcacgagtctgggatgcctgcgcaaacatggaacgttatatccaatacggtttcacaccagatgaacgccattctttgtttggtaagaaaaattggggactgtttgtaccctctgatttcaactcactgactgacatgcttatcccaactgcctcgggatctgaaacggcccgctcactggctgacatcatcaagtcatcttcaatcgtaagtggtgatagaagtgaagaagatgaaggtagctcagagcgttttaatagtgttatcaatttctccaacttcctgctccatgtgttgcgtgtctgtagccaaactggaaaggacagagtggatgttccgcttgatgacaaacaattaatcgaccagttcgaacttcggttattaaagcagaatgacccggttaaaacggtacaggatttcgtctttgcacttctcaaatgcaaatacctttttgatcagttcgtgataaaacgagagttcgcgaaaggtagcgatagctggagtttgaagcgcctgcgttggtattcggaaaagagcaccagctataccaatacgtttaatgaaaatgatggtagctatgtagacatcaaccgacagattctgatgctactttccgcattccatgtttcaacccctactctggtttataaacactggttgaatggagctttgtactatctgtttaatgcccattccgctgaaaaccagatagacgcaaggaagtacctcggttatctggagcatctcgcctccgcgtttgtctttcaaaacttcctggcagagcaagaaccaaaatcatattttgagattatctacggtaaagaggcacctctccaacctgtggtactgtcggacaagactcagaagaagatgcgctttggtatgatagcaaacaacctggtattcaattacctggactacttactttggtgtcgtgacagaaataaagctgaggtagtgaaacgttttgaatttaccttccgaagttcagtagagcatttctaccctcagcaccccatggatggttttaggacattaccagatacatcgttgcattccttcggcaaccttagcctgattagccacagcaagaattcgcgacttagtaatttccagccaaaacaaaagcaagagtacttcgaagcgaaccttgaacgtaatgaaattgatagtctgaaactgctcgccatgatggagctgatgaagaagaacaatcagtggggggaagaagaaatcgccactcacgaagcggaaatgctggcagtgttaaccagtggtagtgatagcgtatttagggaggtgttatga

SEQ ID NO: 79377 - DNA, 1434 bp, Citrobacter koseri
atgaaacacccccttgataagacagttctgtccgtcaagggtcttttgagcctgactgacgtagccattccggcctatcaacgtccttataaatggacggtaaaaaatatcagcgaactgtttgccgatattaacagtcatctcgataaattggcttatcggttcggctctgtggtgtttcatcacactgagaatgatgaaaaaaacaagcttgatatcgtcgatggccagcaacgaacgttgacattaatgctggccgtatgggccataatcgaaacccgacttgctgaattggaacgtcaggatttgcaggaagcgctaacccagctaaagccctccgttgaaggttttatgggacggcaacgctttgccagtcaggtatcggaatacaatctgcaccagaattatcaggagctaaaacgtagggttagccatcgagaattcagcgagcaacatattgattttctcctcaaccgctgccagttggtggtctttgtgctgactgacctttctgaagcctttcagttcttcgactcacaaaatgcccgtgggcgggatctggatcctcacgatctgcttaaagccttccatctacgtgaattcgccagccatgaggtagaattaaaagctgtatccgttgcccattgggaaggattacctagcgatgacctggctaatcttttcgcatcttatctctacagggtacgtcagtggtcgcagggaaattcagcgcgtttctttggtaagaatgaagtcggcctattcaaagggatcaaccttgatcagattggtcagttcccttatgtggaatctttgcgtatggctcaccattttgtggatgactataacaatcaataccagcgcaagattgatggccagaaaatgcgtttccctttccatctcgatcagatgattatcaatggaagacgctttttcgaaatggcggaacactaccagcaacaggtatcggcaattatcacaagtgagcatgtcagcactcacactcaaaagtcgttaatgattcagggcacagtccttggtgaaatggcaacccggatactaagaacgttaaatagctatagaaatcgccatcgaacaggggatcaatatatacgcactatgtttgattgcgctctgatcttttatatcgacaaatttggtgggcagtcgttatctgcagcgattgaaaaaagctttatctgggcctacagatgccgaatccgacagcaggtggtacagctagcgactatggataagtacgtactggaaaataatctgttccgaataatcaaagaagccagagtacctggtgatgtactatctataccattactcacaattcgggcttcagaaaataataataaccgccgtaccggtaaccatgagcaagacgagctggtgaggctattcaaggagatgaactactatgagtga

SEQ ID NO: 79378 - DNA, 1230 bp, Citrobacter koseri
atgagtcttttaaaacaaagaaaaaatatcccagatgattggatcaactgcgaactcggtgaagtgcttaccttgcagcgtggatatgacttaccacatcgcttaagaaaggatggtgaagtacctatcatatcatcttcgggagtaagtggacgacatgataaagccatggtatctcctccgggtgttgttactggacgatatggaacaatcggtgaaattttttatgttaatgagcctttttggccattaaatacaacactgtacgttcgtgattttcgaggaatgacagctgaatatgcatatcactatttaaaaacaataaattttgcatcacatagtggtaaaagtggcattcctggagtcaatagaaatgatgttcataaagaaattgtttatttcccaattaacaaaattgaacaaactgctatcgttaatatactcaccgataccgatgtgctgattaccgagcttgaaaatttaatatccaaaaagcaggccatcaaaaccgccactatgcagcagttgctgactggccgtactcggctgacacaatttgctcaatatcccaatggcaccattaagaactataagtccagtgagttaggactaatacctgaggattgggaagtcgctcgtctagcacaggtggcaaaagtgatagatccacatcctagccacagagctccaccagaggagtcttatggtgttcctttcgtaggcattggtgatttgaatgaatcaggtgaactaatcaattctgaagtaagaagagttaatcaaagcattcttcaagaacattcagaaagatataccttacataatcaacctataggtcttggtagggttgcttcgattggtaaagtcatccgtttacgtctaggtaaagagccttatgctatttcaccaacattaggtgtaattgatggtttcgcctgcactaatgattttttattttattatttgaaatcggagtctgtaacagagcagtttagccgggtgatgagcggttccactagatcctctgttggtatgaacgtcctaaaagagatattagtcgtaaaaatatcaattgaagaacaaatctccatcgctgccattctctcagatatggatgctgaactcaaagcgctagagcaaaagctcgcaaaattccgtgctataaagcaaggaatgatgcaacaactgctgactgggcgtatccgtttacctttggaacagcagccatga

SEQ ID NO: 79379 - DNA, 2457 bp, Citrobacter koseri
atggctatcaagaagaacgaactttactcctccctttgggcgagctgcgacgagttgcgtggcggaatggatgcttcacagtacaaagactatgtgttaaccctactgttcatgaagtacgtctctgacaaagctaagggcaacccttacgcgatgattgaagtgccggaaggtgcaagttttgacgacatggttgctctaaaaggcaacaaagaaattggcgaaaaaattaacaaaaccatcagattactggctgaggctaatgacctgaaaggtgttatcgacattgccgacttcaatgatgaagacaagctgggtaaaggcaaggagatgatcgaccgcctttccaagctggtggcaatcttcgaagggttggatctctcagccaaccgcgttgacggagacgatctgctgggtgatgcctatgaatatttgatgcgtcactttgctacagagtcaggtaaatccaaagggcagttttacactcctgcagaggtgtcacgcattctggcgaaagttattggcatcagcaagcagacaccacaggatgctaccgtttatgaccctacctgtggctcagggtcactattgttgaaagccagtgacgaagcaggtcccaagggactgaccatttatggccaagagatggattatgcgaccagcgcactggcgcgtatgaacatgatcctgcatgacaacgccactgctaaaatctggaaaggtaacaccctggccgatccacactggaaagatggcaacgataatctgaaaaccttcgactttgctgtcgctaacccccctttctccaacaaaaactggaccagcgggctggatgctgcgaacgatccttttgaccgttttgtctgggggactccgcctgaaaagaacggcgactatgctttcctgctgcacatcatcaagagtctcaagagcacaggtaaaggcgctgtaatcctgcctcacggcgtactgttccggggcaatgctgaagcgcgtattcgtgaaaatctgctaaaacagggttatatcaaaggtattattggcctaccagctaacttgttctatggcacagggatccccgcctgcatcatcgtcatcgataaagaagacgctcagctccgggcgttcaatgctaatggcgaaagtcagcaaggcatctttatgatcgatgccagtaagggctttattaaggacggcaataaaaatcgcctacgcgcccaggacatccataaaattgtcgatgcatttaatcgtgagcaggaaattccccgtttcagccgcatggtaccgctgtcagaaattgcggccaacgactacaacctcaatatccctcgctatatcgacagtagcgagccagaagatctgcacgacctttctggtcatttggctggaggtattcccgatcgcgatatcgatgctctcagtgcttactggaaaattttcccgacgctacgacaggatctgtttgaacccgctcgcacgggctacagcaatgcccgagttgaggccgataaagttaaaagcactatacttgagcacccggaatttaccgcattcaaagcgggagcactgataccctttgaaaagtggtttgcaggttgtcagcttgaagaaattgctcgcggtgactcaccgaaacagctaattgaagaaattggcgagcgacttctctctgcatatgcgtctgaagccacagctgacactccattgctcgagaactacgctatctatcagttactaatggactactggatggatgtgatgcaggacgacgtttatgtcctgagccaggatggctggcaagcaggcaaagtactacgtgagttggttgtagaaaaaggcgaaaaactcaaagaaacaccggatctggtcattggcaagaagaaatataaggctgaactgttgccgccagcccttttggtggttcgctatttctctaccgagcaacaaaagcttgagcaactgcgggtggcttatgacgaagcagtacaagcgctggaaaatttccttgaagaaaacaacggtgaagatggattacttgctgatgcgatgaatgacaaagagaaagtaactactgccagcgtcaagacgcgacttaaaattaccaaggatgaagaagaaaaggccttactaaaagccgctcaagcattattcgatgctgaaactaaagctaaaaaagcgcataaagaagcacaggaaaagctggaccgcgcagtttttgctcattatacaaagcttactgaaaacgagataaaaattctgatagtacaggataaatggaaagcaagcctgaatagtgctctggaagcggaaatagagcgtgtcacacagcggctggccaaacgcgtcaaagaactggaggagcgctatagcgtagctttgcccgtccttactcaaaatgttactgaactagaggtaagagttgcagctcatctcaaggctctaggcttggagtaa

SEQ ID NO: 79380 - DNA, 300 bp, Citrobacter koseri
atggtgctctatctcgataaccaacaccgtttactggagagcgaaacgctatttgccggttcggttaaccatgtccaggtccatccccgtgaggtagtgaagtcagcgcttcgcttcaatgctgcagcagtcgtgctggtgcataaccatccatccggtgatccggagcccagccaatgcgatcgcaacattacgggcaggcttaaagatgccctggcactggttgatgtgaacacgctcgatcatctggttatcggatcagatggcattgtgtcgtttgctgagcgaggctggatatga

SEQ ID NO: 79381 - DNA, 342 bp, Citrobacter koseri
atgaaatctactgattcagagagcgattcatttctcaagtggggtctgaatcgtaatgtgacaccttgctttggcgctcgtctggtacaggagggaaaccgactgcactatctggctgaccgggccagtatcaccggtaagttcagcgaagcagaatgtcttaagctggatgtggcattcccgcattttatcagccagatggaatcgatgctgactactggtgaaatgaatcctcgccatgcccactgtgtcaccctgtaccacaatggtttcacctgcgaagccgatacccttggcagttgcggctacgtatacatcgccgtttaccccactcatcgttaa

SEQ ID NO: 79382 - DNA, 342 bp, Citrobacter koseri
atgaaaactctacctgcaacaaatccgcaggcggcgacgctatgtctgtcacccgtggcagtctggcaaatgctgcttgcacgcctgctggaacaacattatggcctgacactcaacgacacaccattcagtgatgaaacggtaattcaggaacatatcgatgccggtatatctttggccgatgccgttaattttctggtggaaaagtacgggctggttcgtattgatcgcaggggattcgattggcaagaacagtccccatatctgcgggcagtcgatattctgcgggcgcgacaggcaactggtttattgaaaagaaatcgtattagcgcggcacggtga

SEQ ID NO: 79383 - DNA, 1008 bp, Citrobacter koseri
atgggcaacagaatgtggatgatccgcggtgacggcggcaagctctatgacgattttcgcgataagcaaattgtaggcatcggttggtctcagctggctccattagtcaaacccggcctgtcccgagcccagttgctcgccttataccaagaggcagatcccttaacaaagttgggaactgcgcgttctggtgcatcgcaggtctggcgttttgtgaatgagatccaaaagggtgattgggttattacctattcgccagccaaccgtacttatttgctaggcaaagtcacttcagaattccaatatcatcctgaatgggtggaagaggggatggggatcgctcggcaggttaaatggaatactcaagaaatcgatcgcgatcgactgtctgtagctaccaagaacacattgggttctacgctgacggttttccagcttccagaatatgcgctagaagagcttttgcaggataagaaacccactgtagatgtgattactcagaatccagttgcgatggatgaagatgaggtcgtttctgatccgcttcgcgatatggaaatgctggcgtttgagggtatcaaagatcgcatcaactctcttgactgggatgagatgcaaaatcttgttgccggagttttacgcagtatgggctataaaacgcaggtgtcacctgcgggagccgatcggggtaaagatatcattgcttcacctgatggattcggttttgaaaatccacgtattatcgttgaggtaaaacatcgcagggagcaaatgggaagccaacagatccgtagctttattggcggtcgccataaagacgatcgcggactttatgtcagtaccggtggttttacaaaagatgctcgctatgaggccgatcgttcgacgataccactgacgctctggacacttgatgatctcgtccgtgctcttattgagaactacgagcaagtcgatatcgaaactaaacttttggtgcctctgaagaaaactttcctacctgcctga

SEQ ID NO: 79384 - DNA, 1239 bp, Citrobacter koseri
atgtctaacatagaggaaacactgccaggaagtgcgatcagttcttggggcggctttgtttaccaagggaaagtagctctttatcactgcctgaaactattaacggtaaaatcatttcaacagagaataattgataattttgagttgcaattagatagcacagatgactttgctatttattgtgatggcaaggtgatctcaactcatcaagtgaaagcaaagctatcgcaatatcgttctgaatatgtcaaagctatttataaagcagcatgtatagctactgactgtgatgaaaatacaatcagatattttcatgtagctaaagaacttgataattttgaaaattatacaagtaatgatggaaaaatagttgagttttacagttatggcgatagtaaatactgtttactatcaaaaataaatgaattgattgatgagcaaattgaattatttttagataccaataatttgattaaaacaaaaaatttaattattgaaaaatccactttactctcagagcttataactaataaagtaattgtaattcataacttagttcacaatggacaaaaacaagactacgcagcatatcataatagaatagcaagtagctttttttgggaattactaacatctcccccacttaatcggacagacgaaatatatcaagcattattaaccaaagaaaaaataacaaatattattgaaactgagttccataatgatttggacgcttttagcgagaagcaaattgaatcgatatcaaacgttttcagatttatttatagcttgaattataactctgccatacaattgcatacctctttacagcctcacagacaaaacaatgttataaatgaagatgatgtccgggattatcttgatgtagtatcagcaatatcccacataccaaaactaatgggcttgcctcattattctaaaaaaataaataaatacctcccaacagctttgacaattagagatggaagaagacgaaatacttcattccaagaagagttgaaaaatcacataagggataatgctacacttgcatcattgctttatgaatataataacataatagcctataaagtatcagatgatacgataatttcagcaacctcagaaaaaatcacaaaaattaacgactctaaagagaacaataaccatattgttagggaatttaatttaagggttatatctactgataaagcagaggcggaactaaatgctaaataa

SEQ ID NO: 79385 - DNA, 1257 bp, Citrobacter koseri
atggcgcgtcagacaaagccccttaacaacaccgaagtcaaaaatgccaaagcgactgaacgtgccactatcctgtatgacggggatggcttagagctactggttaagcccggaggctcaaaactctggcgattccgctattacaaacctttcactcgcaaacgcgcaatgattagctttggtgcttaccctgctgtatctctctctgaggctcgtcaatttcgtgaagatgcccgtcttctattgagcaaagatattgatccgcaggagcataaaaaaaccgagcagttgcgggaaaaaagtgccacagaaagtacctttgaaaaggttgcaggagactggtttaaaaccaaagaatcagcggggctggcaactcatacgttaaacgatatctggcgttctatgagtaaatatgtattcccacatattggctctatgcccattgctaacatcacggctcagcagttcatcggagcattagagccaacacacgctgccggaagactcgaaacggttaaacgtctaagtcagcgtatcaatgaagttatggattacgcccttaattctgggctggtatctgtaaaccccgcagcacgaatcgggcgaacattccataaaccaaaggtaaagcaccgccctgccctacctccagagcaactcccccttttgatgaaaactctggcatttgccagtatcggacgacaaactcgctgtcttatcgaatggcaattactaacaatgatccgacctgccgaagcgtcaacgactcgctgggatgaaatcgactttgccgcaaaacaatggcgtatccctgctggtcgcatgaagatgaaacgtgagcatatcgttccactttctgagcaagctttggctattctggaagtgatgaagcccatcagtaagcacagagattatgttttccccggctaccggaatccacttgaacctatgaatagtcagacagcaaacatggcgcttaaacggatgggcttcaaagatctgttggtggctcatggaatgagagcgattgcctcaacagtgcttaacgagaaaggttttccaccagacgtgattgaagctgctttagctcatatcgatactaacgaagtcaggagagcctataacagatcacagtatctggaacagcgtagagagatgatgatctggtggggtgagtatgtagaagcagcatcctttggaaactcatcaatcagtgttattggcaagttaacctcaacagaaggatataccgattaa

SEQ ID NO: 79386 - DNA, 729 bp, Citrobacter koseri
  misc_feature (645)..(654): n is a, c, g, or t
atgaataatgtcattgtattcaaatctcactccgatttagatgcagaaagaaatgttcaggaatttatcagcttttgccgtggtaaattaaccgtgttcggagcagagctgaaatgggattcgcctgtctggaaaggtattgccatttttagaaaattggacactggctgtggcgcatttaaagatgaatacctgttagataaaaactttgtaaattttgcaaaaagctatattcgatatcagcaggcactgaacccagttaaaaagcctggtacggcaataacggtgttgaagtgcctggaaaaagcacttttacaggttcatcagaatgcttatgtctataatacttcggtcattgttcttgatgaagctttgcagattgcaggtcagcattatggaaaaaatttcctgtataaatgtggctatgagattgaaaaactggctaagtttttatctgaatatcattttgtgaagtgtggcttccttgggtgggtcaatccggttaaaccccatactaaaaataattatcttccagagaaagaaaatgaagacagaaaaaataaattaccggatgagcgagctttacttgctatagccgaaattttttcccgaccggatgaagaactcagtgagagagatctgttnnnnnnnnnngtttacagcctcagcttttgcgctactgatgtgttcaccaagccgtgcctcagaaatactggccttgcgtgctga

SEQ ID NO: 79387 - DNA, 1362 bp, Citrobacter koseri
atgaatgatttaaaatgtcaggaagatagagtatttttaaaagcaaaacagtctgactattcattttgtatcaatgatggaaagtggagattaaacagaaatagccttgttaatgttggggcagtatctcttctccttgcatcaaaattaattgatggatacctaaatacgcttgctttttatgcctgccgatatagccccagctatgtatcgaaaataaataattccatgaataattttattagtaaggtatcccctgattatattgatgaatcggttatcttaaactacagagcttcactgtctaaaggggaaatgcagcatttagtgagtttgagatgttttttcaccagatggcattctctgggatactatggcattgatgaaaaagtaataacacttctgaaagcaacaaggttaaaagttaaacaggcaggaaatattataagacaggataacccagataaaggggcattgactgataatgagcatgagactctgaatcaggctatatacagtgcttacaggaataaaaaaatagcactacatgaattttcttcggcattgttagcgagtttttcagggcgaagaccattacaaatcacgtcattaaaattgaaagatatagtaaaagaaaagacacgcaatggcgaagtgaggtttcttataaatattcccagggttaagcaaggtcttgagttcaggcagtctttcaggtcattgaatattaataaatctatgtttgatatcctcagccaacaagccagtgcctctgttgcacttattgaatctcaaattggcagagtacttaaaccagcagaaaaggacgaggttcccgttttccttgacagaacccattgtaagatgctggtcggaagagagaaaatcttagacttactagtttctgacagacttcatgcatcaaaacatactgttgatattatcctgaaaaaaatcattaaaaaagaaaatgtgatttcggaaaaaacggcacagcccatgaaaatgagtgcgcgcaggcttcgttataccattgggacaagactggcccgtgaaggatgtagcgtacaggttattgccgaactgttagatcactcttcaatcgccagtgcaggaatttatattgaaaacctgcccgataatgccgaaaaaattagtcaggcagtttctaaaaaactggcctttcttgctgatgtttttcttgggaaagtggtgggggatagagccaatggcaatcatggtttattgacgaaaaaaacatgttcatcctgcgtcgatatttcaacaataccatgtcatagctgtatttatttcagaccattacacaataatgctgataacaaagaggtgatatatgaataa

SEQ ID NO: 79388 - DNA, 1212 bp, Citrobacter koseri
gtgaaaaaatacagcgttaattcttttgtttttgaaagtggagaaaggttttgccatgtgatagataaaatatcaggagagcctttatattatccgaacctctatataactacacaagtcagaaacagatcaaagtcgatcaacacgatggaggctattggcggaaatctggcattactatatcgatttttttctctcagaggaatagatatcagagaaagaatagctacgttgcaatttctggctcttaatgaaattgatgatttggctgatttcgcttcgaaaaacttcaaagacaaaagaacaacatttttgcatgagcgtagtgttgttaaagaaccgacaaaatatttcaggttgactgttattattaattatcttgaatggctgtgtgaagttcacacaatcggaactaagagtaaagataatcaaaaaatgatggacatttttattgataaactaaaaaataaaagaccatcaaatgaaagtggatataaaaatcaaatccatgagaaaacattaagcagagaacagcttgatattttatttgagatagtcagacctggctgtgaactcaatccttttgctgatgaagttcagtcaagaaatcgattgattatattactgcttttttcttttgggatcagggcaggagagttgttaaatcttcgcatcagggacatcgatttttcttctggaatgattgtaataaaaagacgacccaatgataagtttgatccaagagttaatcaaccacttgtgaagacttgtgagagaatgttttctgtgggcaatacattaatggcagagttatttaattatattatgcaggataggcgtcatgtgaataattcaaaaggtaacgactttctctttattacatataaaaaaggatattcacagggaaaaccattgtctttttctgcgtatcataaaattattaatatgataagcgagacttcacctgaactggccgaactaacaggacataaattaagacatacatggaattatgagttttcctcactggtagatgggatggatgagactttttcggaggaaaaggaagaacaaattagatcgtatcttatgggatggaaaacgggttctggaacggcacaaatttataacagaaggcatttagttgaagaggctcacaaaacttctcttgccatgcagaaccaactgatggagggatacattaatgaatga

SEQ ID NO: 79389 - DNA, 207 bp, Citrobacter koseri
atgaatcagctcaatacacgccttattcgccttcccgaagttctaaatcgtacaggttatggaaaagcctggatctatcatctcatcagcaaaggatgcttcccatcgccagtaaaaattggatctcgtgctgttgctttcattgaaagtgaagtagacgaatggattcaattgactatcgaaaaatcaagaaagcacgttgcctga

SEQ ID NO: 79390 - DNA, 852 bp, Citrobacter koseri
atgaaaaactggtcagttgagcatacgaaagaggtgaagaagtggcttgatatcgatacctatcgtaagttcgaagaacttccgcttatacacctctaccatgagctgctggcaaggacattgttcttcaaaccttaccacgaagagttcgaagcgaaagccgtgaacctctatattgaccgaattttcagcggaaaaccgtttcttattacagagcaacatctcggatacctcacgagagaggacaccctttaccaacccccacatttctttttgaccacgacagaacggctggctcagctcagcatcgttggattacggaattcattatttttctgggatggaagtgatgagtattcggttaaccgtgaattcctcgatagccctgtatcagaagctctccccaagttgttcagggatacggtcatggtcgaaattgaccttgcgaatggaactgatgaggaaatagctgaatcactcaaagctgcgctacctcaatggcgtaaagtacggggcattgaagccgatacatctgattcgatcaggtttggctatggcaccatcaagaaaatcatcaattacagactcattcccatgattgacatcctggtatggtcaaaattgcataaagtacgtatatcagaagaccgcctttcccgcctgttgtatacagatgacgatgatgagatcaacactcgcctgaaccaccaaatcagggatacggacaaaccacttgctttgaaggcggcgagtataccttttattcgccagtttcatctgttcatcaataagaacagccatttgaaaaagatcagagtttcagaggtgatgaaaatctcagattctgactaa

SEQ ID NO: 79391 - DNA, 1020 bp, Citrobacter koseri
atgatctccttcggcgtatatggcgatgtgtcattggcacaagcacgtgctaaacgtgatgaagcgcgttcgatgttagctaaagggatcaacccaagtgaagccagaaaggcagataagattgctttgcagttcgcgcatgagaacagctttgagtctgtggccagagaatggcactcatcgaaaaaaaccacctggtcagaggggtatgcaaaagaggttctcaactgcatggaaaaggatgttttccctttcatcggccaacgcccaattgagcagattgaaccactagagctgctaaccgtcctgcaaaaaatagagaaaaggggtgcgctagagcaaaccagcaagatccgccgccgttgtggtgaagtgcttcgttatgctgttgccactggtagagcaaagtataattttgcaccagatttagctattgcactcaacaaacctaaaactcaacacttcccgttcctgactgaaagcgagttgcctgagttcgtcaatgctctggataactatcagggcagtttagtcaccaaatacgccacgcagctgttgatgctaacaggcgtgcgaacaattgaactacgaacagcggaatgggctgagtttgatttaaataatgccttatgggagatccccaaagaacggatgaagaaacgccgcccacatctggttccgttatctactcaggcgatcagcatcctgaaaaagctgcaagaaataacagggaattacagcctagttttccctggacgaaacgacgtgaggaaaccaatgagcgaagccagtatcaacaaagtgataaaactactgggctatcatggccggttaactggtcacggatttaggcataccatgagtacaattttgcacgaacatggttttgaaagcgcctggattgaaatgcaacttgcgcatgttgataagaactctattcgaggtacctacaaccatgcgcaatatattaagcagcgccagattatgatccaatactactctgatattgtctattcatga

SEQ ID NO: 79392 - DNA, 1863 bp, Citrobacter koseri
atgagactcaaatcgctaaaagtaaaaaattttcgtgctataaatggtgagagtaatgttttgcagtttgataataacaatattgtttttttgttcggtaaaaataatattgggaagtcgagtatgttgcatgcgtataaatattttgcagccccaactcaaaaggcattaattacagattttcttgattatgatgagggcaataacattgtaattgaagcagtctacatcaaagaagattcagatacccaaaattttgcagagaaaggtcttgataaatgggttagtgccaagactaatgaaattaggtttaggaaaacttggataaaaagggatcaggtggcgaaaaaagaaacctttaaccctagcgaagaggttaatggttttgtggataatggttttggaggtttggagcaaatactgactaatgctactccggtaattatttttatagaggccatccctaacattaaagaattaactgattggttagataaacagataaaaagtaatctattggcaaaaataaaaacatcttataatgaagaatatgaagaagcagctaaggcagtaaaacggttacaaggtaaaatagaaagtgcgaattttttaggtgaaatgagcaatgcggcaaataaatatttttgcgaaacatttccttccttggaaatgaggattgcatcactaccctataaagaatcagatatcgctaagattttcgaaaaagattttagcgttactattggacctcgtttaattcaagagcaggagcaggagcaggagcaggagcaggagcaggagcaggagcaggagcaggagcaagaacaagaacagactgctcttacggaagaacaggtaaaagtagctgttgaacaggtttcattgatcaaagagcagatagcggaaattgaaacaaggggaaatgatggttacaggtcttttgatctacaaggacatgcactaattagacaggcactagttacccttttaggactttttaaaaatacggaggatgggaaaaaacatattattctttttgaagagcctgagctttatttgcacccaagcaataaaagaaaattcagagagactctatataaacttgctaatggggataattatcaagtaatctgcgtttcacacgatcctcaattgattgatctcagtaaaccacatacatctttagcaaggtttattaaaggtgatgatgggaagactgagatatatcaaactgatgaggacttattcgttaaagatgttgagacaaaagatagagttcagatgcttaaccgctttaatcctcatctttgtgagagtttcttttctgatgaggttattttagtcgagggtgatactgaagcaattataacgaggcagttactattagagcatttcccagaaaaagaaatatttgtagttaatactggatcaaaaaataacattcctttctttattaatgtattgagcaattttaagataaaacagcatatcattcatgattctgatgaacgttacttgtatgagaaaggagttgttaaatataataatggtggcgaaaaaacatctaatagtgcatggacaatgaatgaaaaaatatgggatgcaatgcaaattgcgagtgcaaggaatggctgcgaaatcaataggtatgtttcaataaggaattttgagcatgcacataattattcacacgattccaaaaagggcaagccgttatccgcctttgaatatgcgaagacattagatattaatgatgattccttatcaatcgtcaaccaacttaaaaaaattgtcggtgcgatagaaaatgatgttgtctatgatcagcaatatttggaagacaaagttgtagagccattttga

SEQ ID NO: 79393 - DNA, 273 bp, Citrobacter koseri
atgaagatgataagaatgtactgccccacatgtcaggcagtagcgcggataggtaaaacaaacaggaaacacccacaactgtacgatgtgtactgctattgctctaatgtggagtgcggtcactcgtttgtgatgaatgttgctttctcccattccgttagtccaagcgcgctgaacgggcaggggagggttaaagagctaattgatgccattccacccgaggaacgggaaaaggctttaaagttgctgctggctgcgcaaaagaatgggtaa

SEQ ID NO: 79394 - DNA, 2688 bp, Citrobacter koseri
gtgaaaacactgtctgtatccactatttccggggctgcgattgggcgctggccttatatcctgtcagcattaggtatcaaagtaccgtccgcaggacatcatggggcttgccctgcctgtggtggcaaagatcgctttcgactggacgataaagcggggcgtgggacgtggttttgtaatcagtgcggtcatggcgatggtcttgatctggttcgtctggtgacaggaagaaagataaaagaagccgccgggatggtatctgaggcgcttgcattaccagaaatacaggagaagcccgctttgcccgccaggaaaaaggccacaggaaaagaagcgggtgcggagcgatatacccgactcagacagcagtcctgcaatggtgagccggtctatctgacaaacaagggcttacacgggtattcacttcccttgctgtcacaacctttgaatctggcaggaataacattttcctccggttcattactgctgccgttgacggatatttccgggaacattaccggtggtcagcttatcaatcctgacggggataaaagtctgctgcccggtagccagctgtctggcgcattcattgccctgacagatttacccgctgaaacacctgaacaggtgattatcactgagggttttgccacggcgcttaccgtcagtctgctgactgaaggatggatcgtggcggctgtcgctgccaccaatttactgaaggtgacggagcagatccgaaaacgctggccggaaacccggatcattctggccggagataatgatctggctgacgggaaagaaaacaccgggcgtattcaggcagagaaagccgccaaagcggtggatggctgggtaacgctccctccggtacgccataaggctgactgggatgactatcggcaggaagtggggaaagaacgggcgagagatgcctttcgtgaagaaatgacgctgcatggcaaagggcagacccgtttaccagaagggttccggctgacaaaagaatatttgtggtacgacaagctggttaataagtctgatggtgatacggagatacgcaatatcaaaatttgcagcccgttgcgggtgacggcaatcaccagtgatgctgatgggagtaattacgggcgtttgctggaatgggaagataccaacggaaacagccgtaaatgggcaatgccgatggagatgctgggtggcagcggggaagaactgcgccgcgttctgctggttaacgggctttcttacatcaacattaacggtatggccagagcattcctgatggaatatatctcgctgtgtaaaccggacagaaaagttacctgtgtaaataaaacgggctggcacggcggggtttacgttctccaggatgaagtgatagggcgcgaagctcagtcagtcatcttacaaacatcgagcgtgcaggggcgtgattttcgtgtcagcggtacatcagaggaatggcgtgaaaatcttggccgttactgcataaagaatgcccgtctggcctttgcggtgagcctggcatttgctgccccccttctgaaactggttggtatcggcggtggaggttatcacctcaaaggggaatcgacggacggtaaaaccacgacgatgaaagtggctgcatcagtatgtggtggaacagatttctggcatacgtggcgggcgacggggaatgccttagaaggaacggcgagccgccgcaatgatgccacgctgatgctggatgaaatccgggaggttgacggcagggaggcggggaatatcgcttatatgctggctaacggacagggcaaagccagagccagaacagatggttctgtaagggaaaccaaccgctggaatctgttgtttctgtcaaccggggaactgtcactggtggaacatgcggcaagcgccggggaacgtacgtatgccggggttgaggtcagaatgatccagatcccaagcgattcgggcaagtatggcgtgtttgaagaacttcatggcttcagtagcgggaaaaccctggctgagcatcttgagcagcatgtagcgaattatcatggtgcaccattccgcgactggctgcattgcctgaccgctgatctgccggaactgaccagccaggcgaaagccttattgaaagagtacacccggaggctgacgccggaaaatgccgggaatcaggttggccgggctgttacccgttttgctctggttgctatggccggggagctggccacaaaagtgggcatcacaggatggccggagggagaggcctttcgtgccgctcaaagttgtctggctgcatggatggctgaccggggccatacagctaatcaggaagataaagcggcacttgaacaggtacgggacttcatgacgcgtaatcagttcagtcggtttgctgactggaatgacgacaggaaccggcctgtttcaatgatgggattcagaaaagtcgataaaggagacaacgtgacagagccggttgtgacgttctacgttctcccgtcaggctggaaggagatctgtaaggggtttgattcgcgtaaggtggccaggttgtgtgtggatgcgggctggctgaaacccggtgaagatggccggacgcaaaacagcattcgcctgccagaaatagggcttaaacgtgtgtaccagttcaatacacaggtactgggaagcgccgaacctgagtaa

SEQ ID NO: 79395 - DNA, 411 bp, Citrobacter koseri
atgaataataatcaaaatttaaaggcgcatgctttacgaacagcagtcttacggtactacattgctgatgcattcatttccttaatggagcgtgttcataatgaacctgtttatattgaagatggcgaacgaatagaactcacccacgaaaaagtggtgagcaatattatttaccatattgaaatgccctgggtgaatgagtttggggctgatgctggttgcatactggccgcagagaaactggaaaaaatgcttaaaccgggctttatgtcagaaaatattcgcctgtcagtttttggtgtcacagagatgcgtgaggtttaccgggatattattttcggtgcacctgatggcgaactacccgaaggttttgaatttgtgaagccggaaggtcaggaggtgctgctgtga

SEQ ID NO: 79396 - DNA, 237 bp, Citrobacter koseri
atgaaatccatgaattttaagcaaggctgcatattgagtgaactgggggagagtcgtctgttacgggcggcactggccagtgagtttcttgcagaggttctgtctgttcccacagtgaatggagcgagaactgtttcagcagaaggcgctgcggctttagtggcctgtattgccgaacaactggatggcgttgttaaggaaaccagcacaattaagggagagatgcgcgatgaataa

SEQ ID NO: 79397 - DNA, 573 bp, Citrobacter koseri
atgccagcgttaattaatccaggcaatgatcagttttcggttataaatttcttgcctcaccaggaatgcgcgggatatagtttaaaggttgccgcaaaatcggcagccgggcgtggaaacccgagtaatctaacggcgacaccagacgcgccatgcgtctttttttgtgtctttgcctttgtgcacctgttacctgtacagcggtttctttactgttgtagctatcgtgtaatggtggctcaggcggggctgacctcggtcaggccggtatccgttagagccggtatttccacccccgtctgggctaccacccatgagcgtggaaactccggtggtagcgttacccgctatctaacggaggttgccattatggctacagtccctgctttatctcaccctgaatttacctttgtctttctggctgtccgccgtacagaccgtgatgcccgtccacgtcctgtgcgtgtaatcgcagactgtgaacatgctgcacgcctcaaacttgccactgaatttatcctgagctttgctgcccgtatccctgtgaaaaacgccggggaggtggttgcatga

SEQ ID NO: 79398 - DNA, 1005 bp, Citrobacter koseri
atgtatgccttcaaaactgaaaggccggacgtagcacgtcgttatcataataaattcgttactggtactaactatcaggaggaatcaaacagacgctttgcattaagcgaacccactgaaaatatactgcgtacctcaattctggaatccgggtggcttattaaaaatatcacgctacgtgatgttaacgccgtatcaggtaatgccgtcaatattggtgccagtgaactgcataccggacgtgtggatggtggccgtttccacaaaaaaatggcagtcaatggtacggagttctttctgacagagacggatacctgcgcccggatcagctattccgatatgtctcatatttaccataccggcgtgccggatgagtttgagaaaacggttgagagcttttttgcccagacatatgcgctggacatgctgcgggtcggtttcaatggtgtgtcgattgcaaatactacaaacccggaaatcaataaaaaaggcgaggatgtcaatattggctggcatgcactggcgaaagcctacgggaacggaaagcaaatcatctctgagccagtcatgctgggagagactggcacctggaaaaacattgatgctctggccaaccatctgattactgatcttattgctgagcagtttcgtgaagatcctcgtctggttgtactggttggggcagagctggcagcacatcaacgcctgaagttatttaatgccgcagaccgcccggctgatatgaatgctgcacagatggctacaagttctgttgctggccgctttgcgtttattcccccgtttatgccgggtaagcgtctggcagtaacgacgctggataatctgcatatttacactcaggcgataacacgttggtttcgtgctgagtttgatgatgaaaacagtgaatacgtacattcctacctgcgcaatgaaggctatgcactcggtgaaccagaactgtacgctgctgtcgatgagagcgccctgacgtttgcggattga

SEQ ID NO: 79399 - DNA, 861 bp, Citrobacter koseri
atggttgacaatgtttttaagaaaaaattggcatcaattaaaaacgaacatgtgtcggtgttagacagttacaaagtaagtccatttaaggagaatcatagcaacacggcctgtattgtgcgtattattgaaatatattcactgaataagctgcgcgctaaaggtgaaaagctgtattcacttacggggttaacagtacctgatacggaagctgtggcgaatgagatcaacctgctcctgagccgttatgcccagttgtgtcgtcaggaagaggaagagttatctttccggcagcgtgaagtgacaaatgcggaagttgcatggaaaagcacattctcaaaaaacggcgtcagtagcattgctgaagccaaaacgaataaaacggggcatgctgaacgcgcggatgctgaacggtgttaccatctggctgtttcccggctgaatgagcaacatagccggctgagcacaatcaagcttttaccgggcgtactggccgatgaagttaactacattggtaagggagtcgagaagcgtttactgaacatatttcctcaatccggccagatccctgctgattttatttctgtatttaatgacggtgacgttgtccgtgatattaaatttattacagatgcgctcaaatctttgtctgattccgtgagtgaaattattagccgttgtagcgttccaactgatcgttatgtattaaataacggtggaatggcaagaactatggcttacagggagtactatcgagcagataatcatgtattacgttcagtcgtaagtgaccgggattatgttgagcatgtaatgaaatacaatcgggttactgagtacaaaaataaaatcttttcttaa

SEQ ID NO: 79400 - DNA, 228 bp, Citrobacter koseri
atgagcttattgcctcgggaaaacgcacccaaaaaaagctatagacttctgagaatatcagaagtgattaatttgactggcttacccaagtcgacaatttatctaaagataaagaatgatgaatttccgaaccaagtctctatcggttctcgttctgttgcatgggtggagcatgaagttaatgaatggatagagaagaatattctcaatagaaaattaaactcctaa

SEQ ID NO: 79401 - DNA, 363 bp, Citrobacter koseri
atggaaaatacttttaataaaattaataaaaatgaatcacatcaaaatttactaagaacgcattgcatcagtgttcgacttaaccatgaagaactacagcttctcaatgcaagacgtggcgaaaaaagcaaaggtgaatggcttcgtttaactttcctaaataaacttcctgtagcgattcctgctataaacatggaagcatggaaatcactggctgacatgtctcagaaactaaacagacttgtcctacaccttgacaccaagagtaaaggaagcatcctgacgcaaacagaactattcgcagtgaagcgccagatttcggagtttcgcatgaacctgattacggctgacttatggaagtag

SEQ ID NO: 79402 - DNA, 861 bp, Citrobacter koseri
atgagtattctcacaatgagacgtttttgggttgcggtgtccctgcccctgtttgttgcatggtttttttcctcaggagcactaattttgctttggtggctctggctacctattagtgcccctttgcttatttgggcgtttctcacttacagatgcaacaggaaagaagaggaagaagctaaaaccctcagggtaaatatgtcagggactggtaaaacagaagcatttcccctaaataatggaaaaaaatatatgctttttctgaagttctttatgatgaagcgtgtgtggatcgctatcgccatcccaatgtttatcatctataaaagtggatttggtggacaaagccttttttggagtgctgggctactttggatgcccatcagtgctattttattttttactgccctaaactcctatctactgaaattaagtaataatgcaactgtagataattttaatgacaatgatgacggatgttatagccacacgctctcgcattcttcaatgcgtattgacagcaggaaacgaacaattgccctcagggatggcaataatgaaaaaacctattcatttgatgatattaaatcatggcggtacaacatcagtcatggtgatgcaattgagggcgctggattaagtctgacagcagctaatcttaataatatgaggttatctgagaaccgggctgaaacaggcttctttattaaagtaagagatatccagaaccctgagtggcagatccatttcttcccaaaagagggatcttttaaatctcagaaaggtattaaaaatcttgaaaaacagatgagccagtggatggaagtatttgaccaaatcgtaaatgaaaataaaggataa

SEQ ID NO: 79403 - DNA, 291 bp, Citrobacter koseri
atgaaaaaaatcatgatgctggttttaacttccatgatgctgacaggctgcaacagtgaaccatctgatgcagatatttcacaagccatgcagagttttatgagtgagatgcatggcacactgaattcttccaagaaaattgcctgtaaagataaagagagtgatggcagttatctctgctctgtagagttcgatgcaaaattaccaatcgtaggcgacagagcatcgagactggaattaaagtttattaaatccaatgacgaatggaaagcaatggcaccatctaaataa

SEQ ID NO: 79404 - DNA, 435 bp, Citrobacter koseri
ttgaatgaatcattcgctacaccagatgatgttttcaacatagacttagaacagatcaatcgaaaagataaatatttcttatacaaaaagaatgaagcgaataatcttagacttaaagctttaaaaaaagagcttaacgatttgttagatatggataaagccttaacaaatgctaaacagaaaattaccacattaaaggaacaactcactatactaaacaaagattattctaaaaaaaccatcgctgatatagaattaacgttccatatttatagcggtagacttatccaaaactaccaacgtggcttaggactatttatagatgaagggaatggggatagactgaggttctgcacagcagaaaaatcagaacatgtcaatgagttctggacagctatcggcattaagcttggcctttttcctatcactcaataa

SEQ ID NO: 79405 - DNA, 159 bp, Citrobacter koseri
atgagtgaacagcaaagagaacaaagcatcaaaaaaatccgctcactctggcaaatggctaaagatgctgtggatgatgatcattatggtgccgatagatgggttgctcactacgaaaaagtgttgtccattttagacaaaaagatcccgaaaaattaa

SEQ ID NO: 79406 - DNA, 1020 bp, Citrobacter koseri
atgaaaagtatagtgattgaaaaacctgacacgctggttttagcggagcgtcctatccctgagcctgcggccggggacgttcgggttaaagtgaaactggcggggatctgcggttctgatagccatatctatcgtggacataatccttttgcaaagtatccgcgtgttatcgggcatgaattttttggtgtgattgacgccgtgggcgaaggtgttagccacgccagagtgggggaacgcgtatcggtcgatcccgtcatcagttgcgggcattgctatccctgttcaataggcaagcccaatgtatgtacctcgctggttgttctgggcgtacaccgtgacggcggatttagtgaatatgcggtcgttccggcaaaaaacgcgtttacgatcccggatgccattgctgataagcacgcggtgatggttgaacctttcaccattgcggcgaacgtcaccgggcaggttaatccgacagagaacgatattgcgctgatttatggcgcagggccgatgggactgacgacggttcaggcgctgaagggcgtttataacgttaaagaggtgattgttgccgatcgtattgatgaacgactggagatggcgaaagaaagcggcgccgactgggttatcaataatggacagcaatctctgcaagatttcctggatgaaaaagggttaaaaccgacgctgatcgtcgatgcggcgtgtcatccgtccattttacaagaagctatctcgctggcgtcgcccgccgcgcgcattgtactgatggggttctccagcgatccttgccagattgtgcagcaggggattaccggcaaggagctgtcaatttattcgtcccgtttgaatgcgaataaattcccggtcgttattggctggctggaaaaaggtctgatcgatcccgataagctcgtcacgcatacgtttaattatcaccatgtcactgacgcgattgaattgtttgagaaagaccaacggcactgctgcaaggttttactcacattctctgaataa

SEQ ID NO: 79407 - DNA, 429 bp, Citrobacter koseri
atgagcaattacgtttacagtccgtcaaaaaacgctttctttctggtatctaaaatggcagagcacaagttggagggtaattggcccgaagatggcgtggaaattagcgatgatttattcatccagtacacatcaacaccacctgacgggaaagagcgcggtgtggacagtgatggaatgccgtgctgggtggatcaaccagagccgacaacaaaggagttaattgctgccgcagaaagcaaacaacagcaattaattaacgaagctaacggttatatcagtagccgacagtggcccggaaaagcggctattgggagattaaaagatgatgagctgacacggtacaatatctggcttgattatctggatgcgctggaggcgattaatacctctgaaccgcaggaaattatctggcctgaacgcccgtaa

SEQ ID NO: 79408 - DNA, 843 bp, Citrobacter koseri
atggcaacattacttttagcagtgattttggttagtggttttatatatgtaaacctatcactttcaacacgttacagatataagcgttccaatggctgggacgcttatttttttgtcgccgcctggggaattgtgttctttctgctcggtggctttttaaccttcgtcctgaatattacaggcgggttccgctggctatccaatgagcttaatcttacgccggatagcttcaacggcatgttgtctacttcatccgacaaagcccagcgtatcaatgaaatcaagcagattgcatgggttgttatttcaattgtgctttctgcaatttctggccttggtaataagttgcgtacaaagagcggtgatcgccgctgggatgcactggctaaggctgtggggaataactcttttgagtcattgctgatggaagcatcagcacgacaatttccgatcatcgcgacactctcatcgcgaaaaatctatgttggcctggtgacgtgtccggcgctggaaaatgggctgtcggaacacctggaaatactccctatgttaagcggctatcgtgataaagacgatctcacgataagcatcacgacgaactatcatcagcactatcttgaaagcggcgttatcggtgggatgtcgcgcctgaatatccaggatttccgtgtgctaatccctaaagatgaagttgaaaccatctcgttttttgacactgaaacgtataacaaatttaaagaagacgaagcgcgcgaccggaaagactgccgcaagttgggtggtaaaaagccatccacacgcaggagaaggactgctggcgacgcagagcagggtagtgcatga

SEQ ID NO: 79409 - DNA, 219 bp, Citrobacter koseri
atgtcaagtatcgccgcattgaggctgggtaatccagttgaacgtttggcacgggttctgaaagagaaccaggacaagctcaatctgagtaaagatggttttgtgtccgtagatttgtccaacgaagaagctatgaaagccatcagagatcagatggataagcttgaaggcatcaaaacgagcactgtcaaagcaaaacattattacagaacccgataa

SEQ ID NO: 79410 - DNA, 846 bp, Citrobacter koseri
atgagcactatcctgaaatgggcgggaaataaaaccgccatcatgccggaactgaaaaagcacctgccagcaggtcagcgccttgttgaacctttcgcaggttcgtgcgctgtcatgatggcgacagactatcctcattatcttgtcgcagatattaatcctgatttgattaatctttatctgatgattcagaaagaccatgaggctgtcattcagatagcgagggagttatttaaagaatttaattcggatgttcagtattaccgtgtccgccagcattttaattactccatttctaatgaggtagaaaaggcggcatattttctgtatttaaatcgccatggctatcgtggattgtgccgctataatttgagcggtcattttaatgtcccttacggtaattataaaaatccgtattttcctgaaagtgaaatacgcacttttgccgtgaaagctaaacgtgcaatgtttatttgtgccagctttgaggaaacactggcgctgctgcaggcaggtgatgttgtttattgtgatccgccatacgatggcacatttagcggttatcacactgccggttttacagaggacgatcagtatcatcttgcgtctattcttgagcgccggtcatcagaaggtcatccggttatcgtgtccaacagcgacacgtccctgactcgttcgctttatcgtaactttacccgtcaccgtatcaccgcaaagcgcagcatgggtgtggctgcgggtgatggtaaatctgcatcagaaatcatcgccacgaagtcagtgtgctggttcggtgctgattttgccagaggtccagaccgtaccgttgaggtgcgcgtatga

SEQ ID NO: 79411 - DNA, 339 bp, Citrobacter koseri
atggctttcaaagctgaagatatcactgtcaatatgagcgtcgggcaacgtgccagtgcgttaaaccacatatctgcattacgcagtgctctatatggtgactgtaataaggagcttaatcggtttattaacgaaatgcgtgataaacgtgatgaaaagtacgaactgaataatcgtgcgcttggagcattattctttctggcaaatattagtaaggagcgtcacagcgttgaatttagtgagctgacgagtgacgagatatccgcactaattagtgtgatgaatcatcttcgcgcagtcgtgagtttatttccaaaaaatctgactctatctagttag

SEQ ID NO: 79412 - DNA, 201 bp, Citrobacter koseri
atgctgactaaagaaccatctttcgcgtcacttcttataaagcaaagtccagcaatgcactatggtcacggctggatcatggggaaggatggcaagcgctggcacccgtgccgctctcaggatgaactgctggaaggtttaaccagtaacaggaaaaaaatgtcatggctttcaaagctgaagatatcactgtcaatatga

SEQ ID NO: 79413 - DNA, 615 bp, Citrobacter koseri
atgtcaaacacaaaagaaacccctggcgtgatttcaaagttcaatttttcatcacaaagtggtgggagagaggccataacacgcattctgcaagcttatggatttagcacaaggcaagctctatgtgatcatctcggcgtatctcaaagcacaatggcgaaccgctggatgcgtgacactttcccacatgactggcttatagcctgccatctggacacaggtatacccttgctttggctaactactggtaagggcaccccggaagctatgccaaatgaagatcatggattgactttgcaattaaatgaaatcacaaatggggttttaaacaccgcagccacgattcgttatgacctacgcctaattcctcaaaacaccacagatccgtttcttgtcaaatttgaatcgacgacttatctcgtcagtgaatgtaaagatgaaatcaatgacggcacttggctgattgagatagatggctttgcgagcatcagacaggtttaccgtctgcctggcgggcgagttcgtgtagaaaatggtcctgcatcatttgagtgtgcggcctctgatgtaaaagttttagggaaagtggcaagcaaaatagataacgtggactga

SEQ ID NO: 79414 - DNA, 549 bp, Citrobacter koseri
atgagagttttagtcacaggcgttttaattttgtcatcatttgctgcaatagcagcacctgaacaattcaaaaacattaatgacttgatggaaaactataatgattatccaacttataccgtagacggtaaggattttccatctttcaaaattttgtctgaaaagcctttacacatccaaatctcgccgcgcactttatcagggagttcaacgaaagatattaagtacgaatcagacaaggcagccatttacgcagcatatcgtactttgtaccaaacgcctgcagacggagtcaaagtcacagtattaccgatttcaattactccccagcctcgaaaggttgagtatatgacggaagataaatatgattttagcattacaaaaaagcaggcaataaatttactccgcaaacacggcaatatattgaatgaagaccagttaatgtccgccaatggtgaatggagcaaagcgtttgaaaagtgctgttaccttgaagaaggtaagcccggtttatcaatatttgctaaagagttaatcacgcaaaggtaa

SEQ ID NO: 79415 - DNA, 273 bp, Citrobacter koseri
atgacgaacctggcgcgtcttcccattcctcccgtggcgcaccttgacggcgtgagtcagcattacggggcaacggtggcgctgaacaacatcacgctggatatccccgctcgctgtatggtggggctgattggcccggacggcgtcggtaagtcgagcctgctatcacttatctccggcgcgcgcgttatcgagcagggcaatgtgcgggtgctgggcggcgacatgcgcgacgcgacgcaccgccgcgatgtctgcccacggatagcctag

SEQ ID NO: 79416 - DNA, 147 bp, Citrobacter koseri
atgaacgaaaatatcccattaacaagcggtgaaaaccccgcgttgagcgttttctcttctacccatttcacgatgaaaaaatgtagtattttcaatgtgaaacggtataaattcgttctcaaattacagtcaggacgcgtatgttga

SEQ ID NO: 79417 - DNA, 150 bp, Citrobacter koseri
atgaatcatttggagttcatagaaaagcacgtccgggaagagttgatccgccagggcttcaccgtagcggtggctcagggggggggcatttcaggccgtcgatatgtacaagcgaatgagtcaggcaagcagaaaggggaggatttttga

SEQ ID NO: 79418 - DNA, 618 bp, Citrobacter koseri
atgacaacccaatatggattttttattgactccagtcgttgcaccggttgcaaaacctgcgaactggcctgcaaagactacaaagatttaaccccggacgtcagcttccgccgcatctatgaatatgcgggcggcgactggcaggaggataacggcgtctggcaccagaatgtctttgcctactatctttccatttcctgcaaccactgcgaagacccggcctgcacgaaagtgtgcccgagcggcgcgatgcacaaacgcgaggacggttttgtggtggtggatgaggacgtctgcatcggctgtcgctactgccatatggcctgcccgtacggtgcgccgcagtacaacgccgccaaaggccacatgaccaaatgcgacggctgtcatgaccgcgttgccgacggcaaaaaaccgatctgcgtcgagtcctgcccgctgcgcgcgctggactttggtccgatagaagagctgcggaagaaacatggcacgctggcggccgttgcgccgctgccgggcgcgcacttcaccagaccgaacattgtgattaaacccaacgccaacagccgcccgaccggggataccacgggttatctggcaaatccgaaggaggtgtaa

SEQ ID NO: 79419 - DNA, 846 bp, Citrobacter koseri
ttgaacaactggtcactagagcatacaaaagaaatcaaagcttggcttaacatagataactatcgcaagtttgaagatctctcattgatacacttctatcacgagttatgggcccggaatctgttctttaaggagtatcgggaagagtttgagagcagaactcttatgggttacttctcaaagattttcaccggtaacccttttttgattccagaagggcaacttggatacatgactcctgccaacaaactttttcagcccccccatttttttctaacaactcttgatcgccttgctgaaacgagcattattgctatgcaacgcggaggttttgtttggcatgaaggtaacaattattctataaacgcagagcttcgagaggaatcactttcagacattatgccagatcagtttacacgaacagtcatgatcgagattgatttggcaagtggcacagacgaagagattgcagagtcgcttaaagctgcattaccgcaatggcgtaaaattaagggtattgatgaaaacccattggaatctgttcgttttggatacggaactatcaagaaactcatcagttatcgtgtaatacctatgttggatatcttggtgtgggcagccgttaaaaaaatccgtgtttctgacgacaggttatccagactactatatacagacgatgacgaagaaagcgaaatgaggcagtccagccaaatcaaagataccgacaggcctttggcccttaaatcctgcacaactgactttatccgacaattcctttacttcatgaacaaaaatagccatttgaagcaaatgaaagtctctgatgtaatgaaactatcggattag

SEQ ID NO: 79420 - DNA, 315 bp, Citrobacter koseri
atgaatattgagaaatttttgagtgaagaaaaccatatgtgcaatttaggcgatgatcttttttacaagatcttcgaactcggagcgatttacgatttacctgataatgaatttaacagaaagattgtttactggttaagccagtatttagtggggaatctaagagaaccgttagattcgatctttgagcttaatattttcgaacagttttatgtttatgagacatggttctcgctaattaaatgcccagatgaaattagaaatttatcgaaacggataattcgatatcagattgggttgaaaaccattctttga

SEQ ID NO: 79421 - DNA, 357 bp, Citrobacter koseri
atgacaaccgtttttaccaccctgaaaccgtatctcaaacaggcggtggcgcagaacgccagaaccggtctgccggtcatgcgcccgctgttcctgcactacgaggacgatgcgcagacctacaccctgaaataccagtatctgctgggtcgcgacctgctggttgcgccggtccacgaacaaggacgccgcgactggacgctatatctgcctgaggataactggatcaacgcgtggacgggcgaaacgcttcgcggcggcgagattaccgtggacgcgccgctcggcaagcctccggtcttttaccgtgcagagagcgagtgggcatcactgtttgcctctttacgcactatctaa

SEQ ID NO: 79422 - DNA, 870 bp, Citrobacter koseri
atgaaatcttgggtaaaaatgaatagttggacatcagatgacaccaaagcagtgaaaacgtggtttgatttggacaaatatcgaaagtttgaaaacatttctattaatatgctttaccatgaaatatgggcgagaacctattttttcaaaccagtaatagaagaaggaatgcagaaaacagtattgaaaaattatatgcagatattggatggtgatccttttcttatcaaagggaagcacttaaattatatggatgccgaaaataaattatatcaacccccatacttttttattactactgttgatcgaatagcaaatatcagttttgattgtatgagaaaggctttattcattagagcaaatacagaacaatataaaattgattccactattgaaaatgaatatatttccgaaaaaattcctgaacagtttcctactacgattatgttagaaatcgatcttgcgggtggaagcgatgatgagatagctgaggccctgcgagtatcattaccacaatggcgaaaagtaaaaggcgttaaacctgcaccacttgatgcagtcagatttggttatggggcaataaaaaaattaattagctatcgaattatccctatgcttgatttgctcgcatggtcagaaagaaaaaaagtacttctgtcagacgacagattatctcgattgctatacacggatgaagatgatgataaggcgattcgccaaggatatcatataagagatgctgatcggcctttcgcaatgaaaactgtagaaattgattttttgagacaatttaacttttttattaataaaaatcagcatgttaaagaaatgagggtttcggatgttatgaaactgtcagattctgagtga

SEQ ID NO: 79423 - DNA, 204 bp, Citrobacter koseri
atggaaaatcaagctcgtctcatccgtttaccagaagtcatgaagaaaactggatttggtaaagcgtggatctatcgtcttatcagccaaaatcggttcccacagccagtaaagatcggtgttcgtgctaccgcttttgtcgaaagcgaaatcgatgaatggattcaattaattatcgaaaattcaagaaagcatgtcgcttaa

SEQ ID NO: 79424 - DNA, 597 bp, Citrobacter koseri; identical to SEQ ID NO: 77427

SEQ ID NO: 79425 - DNA, 657 bp, Citrobacter koseri
atgatctctcctatacctaaaaacaatgaaaacctctggcttgctttggttaaactctttttaattaagagggttccatctaattttaatacaagacagaaactattgcgagatttccttcaggaattaaatgttgccgcaccgtatacagagtctttgtctcctaaaaaaatattgaagataataaataaaatatcattatccgtagattacaattgtgaaattgatgtttggttgagagagattataacgagcttttgccattctattaacttgagtataagtatcgatagctactattatcaagaaatggatcttttgattaatgccacattgaaaagaatgttgaagtataaaatggcttataaagcaaatgaattacatttatttttcaattttagaagcggtgttaaaatcacaacttgtcattcaacaaaaggagatgagtatgaagtagtcatttgcactgggttactaaatggaaaaatacctaattggaatgatattataaattgtagctcagagcatcaaaattatgttgcccgtagacttttatatgttgtttcttcgcgtgcaaagaaacatttatacatgatatcagagagaggttacaaaacaaaaaggggatatccatatcagacaacaccacagctatga

SEQ ID NO: 79426 - DNA, 1230 bp, Citrobacter koseri
atggcaaaaatcgctaagaaactcactgacactgaaatcaaaagcactaagccaaccgacaaagaaatcaacttgtttgacggtgatggtttgatcctgcgaatctctgctctcgcaaaaggagggaagaagaattggtatttcaggtatgcagtgccggtgagtaagaaaagaaccaaaatgagccttgggacctatcctcaccttacactggctagagccagagccttacgagatgaatacctttccttgcttgccaatggcattgatccgcaagtccataacaacgataaagctaatgccttaaagaatgctactgaacacactctccaagccgtggcaaggaaatggttagatgaaaaggtaaagacctcaggtatctcacaagaccatgcagaagacatctggcgaagcctggagagaaacatctttcccggcttgggtaatgttcctatcaatgagatccgccccaaactcttaaagcaacatcttgaccctattgagcaacgaggagtactcgaaactttacggcgaatcatttcccgattaaatgaaattttccgttatgcaacaactgaggaacttatcgaattcaatccggctgacaacctggggcaacggttcagtaagcctaaaaaacagaatatgccagcattacccccttccgaactcccccgcttcctagttgctctaaacaatgcttctatccgtttagaaacaaggctactgattgagtggcaacttctcacatgggttcgccctggtgaagcagttcgcacaagatggtcagatattgatatagaaaccggcatgtggaacataccatcggattttatgaaaatgaagaagcctcacaaagttccactaagcaaagaagctttgcgagtcctggagtcaatgaaagcgataagtggacatcgtgaatgggtgtttccaagtataaaggctcctcttagccatatgcatgaacaaacagctaatgcggccataatccgtatgggctttgggggagagcttgtagcccatggaatgagatctattgcacgaacggccgcagaggagtcgggtaagttcaggacagatgtcttagaagcggcccttgcccattcgaagaaagatgaaatcatcgcagcctataatcgtgcagaatacttagcagaacgagtagttctcatgcagtggtggagcgattacgtcattgctcaaaaatttaaggctattgcggcgtaa

SEQ ID NO: 79427 - DNA, 357 bp, Citrobacter koseri; identical to SEQ ID NO: 77522

SEQ ID NO: 79428 - DNA, 726 bp, Citrobacter koseri
ttgaagcttgatatgcactgtcatttggatctttataaagatccaagtgatattatccaaaagtgtacagagaaaggactttatgtcctttctattacaactacacctaatgcctatattggcactcatcgactgtctgctaataacagtagaatcagaacggcattaggtcttcatcctgaactagcccatctaagacaccatgagttagatattttcgatattttactcccacaagctaaatatgttggagaaatcggacttgatggtgggaaagattataaagagcattcggaagtacagcttaaagtatttaaacatatacttaaaaaggtacataaccaaggtggcaggattatgtcaatacattcaaggggttgtgctgaagaggttgttgaacaacttaaaggaattgatggtattcctgtatttcattggtttacgggttcagaatctgaattaaggagcgctattgatattggtgcatggttctctgttggcccggcgatgttaaactctattaaaggacgacggatattacaattgatacctaaagatagattattaactgaaactgatgggccattcgcaaaatatgctagtaaacggctattcccttgggatgtagatatagctattgaggggatttcgaaaatatggggatgtagctcagagtatgtagaatataaaatcgaagaaaacttcaggaatatccttcagttatga

SEQ ID NO: 79429 - DNA, 1341 bp, Citrobacter koseri
atgaatatttatgttgaatatgatcatgcaaaattaccattggcagacgaaaaaactgtttctgtgcagatttattcgcgtgatggtgtagttattaaaaatggcattaagcctagagatgatattgcaactataggtaagccaatatttgatgctataaaaagactgggagtaagtatatcagatgaagttatggactttttaactatctctcttgcagtaactgctgccgatacatttattataagagataattgttttgatggctggacaagaaatataaatctatttgtttcattaaataacccagtaatttgggaaaaaaacaaaccacttttagaaaaagctttacaatttttgagtggtgatgtatggaatttcaattttaaaggtgatggtcctaagccaccgcaaccattcaaagctgttaatgggcgaaaattgattaatttagaggggttagattgtgtgtcattattttctggaggtcttgacagtgctataggtgttatagattttttatcttcgggaagaaaacctttgctaatcagccattcgtataaaggggataaaactaaacaagatcaaatagcccataaaattcgtgagaagggcaccttttcaagacttcgttcaagtgccaaccctattggcagggggatgacaagagacattactatgagaacgcgaagtttaaacttcttagcgtttgcacttgtaggtgcatatgcggtaaaacagattaataatcataaagatctatcaatatttgttcctgaaaatggttttatctctttgaatgcaccattaacgcatcggagagttggctcgcttagtacccggacaacacatccgtatttcattggaatgattcaagaactttttaataatcttggcttcggtgtaagattgattaacccttatcaattcatgaccaagggtcaaatggtgagtaattgtaaagattctaagatgctttctgaaattgtggatctaaccgtttcatgtagtcattggaaaagaaaaaatcaacagtgtggatattgtgttccatgtatgattagaagagcagctttaatgaaaggtactctaaaagaatctataagttatcatcatgcctcatatccaaccctacgtgattttgttaaacacaaacaagatggtcgtgatgatgttatcgcggtatcagtagccttagataaatctaaaaaaataaatttgaaatcatgggtattaaagtcgggaaagcttaaatttgaggatcttgataagtatgaacaagtgttctcagatggcttacttgaagttgaagatttcttgaaaaaggaaaaggtgatttga

SEQ ID NO: 79430 - DNA, 744 bp, Citrobacter koseri
atgggtacatctcagtcaagtaaaggtcctaaaaatggaaacgaactcgtaccaccttgggctgatcaaacaaaaaatgggacaaaccaaaacctaagtggatttagaactttatttggtagatttgctcgtaatagagattccgtcgcattgaaaggggctttgtctcgttatgcaagacaagtaacgggcggttctgaatcagctaatgctcgtttaggaaatattataggcgctggtggggggttatttgaattattgaatgaaggtattaccaatgattctggtatgaagccactggtagatcttgacagtcttaaaggactaccctgcgaagatgtgattgctaaaatatcacattcattgtctgatggtagtgaagatgcagacaaaatacaaaccgccatgaatgatgcgttagttgaagcattgaacggtaaatccacctttgacccatccgatataacagacgatgtgattattgagacaatgatttgttatttgactgacagtatttttttgcagattactatggatgccggtaaagcatggaataatgctcaaaatgcaaaagaattacaggtggctgaaaattctttgcatgagttgattagtgcgactgtagacaatatcatggaaccaaaattaagtaaaaatataagatctttttcaaaagctgattttataattatccaaaaggatgttatcacagaagtttggaatgaatggaaaggatatgaataa

SEQ ID NO: 79431 - DNA, 1770 bp, Citrobacter koseri
atgtggtctgatgttgaatcaagtgtagactatttgaactttggagaagtctcaagtttggctgtggatattttaaagtcaaataatatgcttccggtgtctattgggatctttggaaactggggggcaggcaagtcatcattattaaaaataatagaaaaacagatcagtgaagaagatggtgaagatattttagtagtaaactttgatgcttggctttatcagggttatgatgatgctagagctgctttattagaagtaattgcaataaaattgaatgaagcagctcaaggtgatgaaaatattgttaaaaggacattcaatctctttaatcgcgtagataaggtcagagctttagggctaacaattgaaggcattgcactggcacatgggattccaactggtgggatagtttcacggggattaaacgcaattaaagatgtctttaataatggcatcaatgaaggtaattataaagagtccattgattcaggtaaggaaatagctaagattggattaattagagaaaaggagatagctactcctccccagcaaataaatttatttagagaagaatatagtagtatacttaaagacttaaataaaaatctgattgtatttatagacaatttagaccgctgtttacctcaaaatgccattcaaactcttgaagctataaggctatttttattccttccaaaaacagctttcgtgattgctgctgatgaagatatgatacgaacttcggtttctgaatactttaaaggtacatctgcaagacaccatattgattatttggataaacttattcaggtacctataagagtgccgagaacaggtcttctggagattagatcatatctttttttactccatgcagtaaatgcaggaatagaggaagatttaattgaagatctacgactggctttagagaaatctttacaagagtcatggcatgaagatccgatgaagaaagaagatgctcttaaggttctaaaatgtgaaggaaacatagagttagctattgcttttgatcaagttgatcgaatcgcacctattttcgcaacatctcctataatccatggaaatccacgtattgtaaaaagattactcaacatagttaagatgagatcaaatattgctaagagaagaaagatttcgcttgatgaaaatgttataacaaaacttgttatatttgaacgttgtgctggcgaggaagccgcaaatgcactctattccatgatcgatacaaataaaaatttcaaaaagataattagtgaattagaaagtaaaaaattagatgaacttcctgattcagtgccttcggtatggaagaaagatgatacaacaagtgattttattcttaaatggcttgagcttgaaccaaagttaagtgataaggatttacgtgcggccgtatatctttctcgtgagactatgcctgcgggacattatgttcttggtctttcgccaaaagcaagggaggcattgaatattttggtagcaaccaaaagaaaaagttcacaagcggcttcgagagctttgaaagatatttctaatgaagaattcattccggtaatggaagggataattgaacatcttagaaatataacagaatggagcagccagccagatggttttgctggagccatattaatcgctgacaataatatagatgcagctaaaatacttaaaagattcatcgctggtatcaatgaacaacctcattggatgaatatgcttataaaagacaaaacatggaataaataa

SEQ ID NO: 79432 - DNA, 630 bp, Citrobacter koseri
atgaaaaaatttaattttgctgctctacttccgggatttttggcacttaataattctgtatgggcaagtgattcatctaccggagcaagtgatttgcctggtatgactcttaatgaacatgatttagtgatagcaccacttaacaccgaagttccattctacattgcagggcatcgcagtcatagctcccatcggagccatagttctcaccgatcatcatcaggcggcgggtactatggtggcaacactccttattatccaaaaacatacagctcaccaagctcatctggttcttcaagttcaggaacaagttcctcatcgtcctcttctgtgcgttcgcttcgttctaacgacaataattctactactacgaattcagttggaactacagaagctaaccgtgcaagtaatgggctgacttctggtacagagaagcgtaagcgcttaatcatgcgggtccaattcgctttgctggacaacggttattacaacggaaatattgacggcataatggggccctccacaaggcagtctataaaaaattaccgaattgcaaagggactaccaacgcctgcaactgaaacactcgatcctcaattattgaactcattaaatattctggctcggtga

SEQ ID NO: 79433 - DNA, 648 bp, Citrobacter koseri
  misc_feature (585)..(594): n is a, c, g, or t
atgtctgaggttattaggaacgatatctttcattttgcttcaaaaaagaatgtgcccacggggttctatcggttatgcaaacaaaaaccaatgaaccctttattctttttacccaatttactggtagttgctgaaggcaataatgatgccattcaaccatgctttgatttctctgttattagcactgaattatatgagtcaattgaagatggagatattgggataatcaacaatggcaatatgatacgcgtaattctgtcccgcagagccaatcataatactgtcttagtaacggaacgctgcaataacttgtgtctgttttgttcgcagccaccaaagaaatcaaatgatgactggctacttacccaatcagctcttgctatagcttcatttggtttggatggagttgttggggtcagcggtggagaacctttgctgtatggagatgatttccttcacttcattgattttatcatcgagaattcaccagatactgctttgcatgttttaacaaacggacgcaaatttgctgatatcaactttactcaggaaatggcaaagcgaagcaaaaagatcaaaatcacnnnnnnnnnncctttggtatcccgctctactcatcaagaccacttgtgcatgatcatctggtag

SEQ ID NO: 79434 - DNA, 846 bp, Citrobacter koseri
atgcttgaatggacgagagataggaacataacgttctctgtttcgcttgatggtgaggaagttgttcacaacagtaatcgaattcttggtcatgggcttgcttacagtagaacagtgtcaggggtagaggctatcaaacggtctttaggcgctggtcgcgttgcaacggttactacagttactaaagatctcattaggcatcctgaatcaattgtccaggctcacttgtctcttggcctcaaggacatgtttatccgacctgttagtccctatgggtttgcacaaaaagcatcgttcacattttctatgcgggaatacttcagtttctatgcctcgttgatagatgaaatccttaagatgaataatgaagggataagggttgtggaacattcggcctccattcatctgaaaaggatcttcaatcccggctttagtggttatgcggatttaaagtcgccaagcggggtcgtgcttaacagtattcttttcaattatgacggtcgagtatatggtagcgatgagagccgtatgttgcagaaggtgaaccctgaaacggagttcagtgcgggtgaagttaaaacgctatcattttctaagagtccttactataacgcagtgttgagttcatcgttcaattttgctctgccaggttgtgatacatgtgcatatcaaccattttgcggtgcagatccatgccagaacataagtgtacagggtgagcctgttggtgataggagtcgttcaacgttttgtcagtatcacaaggggatgtttaggtatctgatgaactgcatctcagaaggtggtccgaaggctgagatgctaaaaggatgggcatatgtctga

SEQ ID NO: 79435 - DNA, 531 bp, Citrobacter koseri
  misc_feature (515)..(524): n is a, c, g, or t
atggaattgatgccattcaattttgacagattgcctaatggacaggtgtttataagcaatctcgctggttttcatcacttcattgatgagcaagagctgcttgatctttctgatgagcaaatcaatgcggaacaatcaaacgcactcgaaagcaagctatttataactaacgaaatctcatcggctataactccctatgctttaagttctgcttttgcaaaacgattgatgaatgaactggcggtcaggccaattttcatgattgtgcccacattacgttgcgaccatacctgcaagtattgtcaggtcagtagagcttccgtgaacgcctctggttatgatctagatcccgctctcatccctgatatcatttcaactatcaaaaaactatcgacaccaccttacaagatagagatacagggtggagagccactcttgcggttcgatttaattcaatctatctatgagcaatgtgctgaaacgctgggaagcaccgattttgagatggttgtagnnnnnnnnnngtcttga

SEQ ID NO: 79436 - DNA, 273 bp, Citrobacter koseri
atgtgcgaaaggatgtttaaaaaagatgtttattctgaatgggttatacgcaatagcctgtattggatgacttctcttactcaatggaagctttgtgaagatatatcctcctggacaatctcttttgaaaacgatagtcccgaatgcctctatgaattcgagaggctgctgaatgattacactttgcgagaaaaactacagcataaaacaggggcgttgagagattctattgtccataaagtgcttcgcagtgtcgatgaaaggctttcgtaa

SEQ ID NO: 79437 - DNA, 591 bp, Citrobacter koseri
atgttagataagttattcagacctacaatgagtttttttaaaactgacattgttgattctgattatataaaaggaaattttaatatctttaaaagacatggttatgtaaatgaagatggtagcccatatttgctaagaacacatcaactgaggcatcttctcaacacatttgctcaaataaatggtatggatgaatttagtattgctcgctggtctggacgtaagcttatttctcaaaatgtttcttatgaccacagatcgcatcttcaaatgtctaaagtaataagagaacaaaaattatcagtgtgtattaatgagcacagaataaaggatattccagtagtggatcttaatgagtttgattcacttagtagtggtgcagtacttgtatcaaaatatggctactgcaagcactcatatgcgtttaagccgtgtgaacattatccgattgataattctggtttagataacgaaacgatttcaaacattcacgataaaattttaaaaagaacactgtatgataaaaatgatgggaacataaatgctgatagatggtatgaattccataagagaataaaaaaaggagaataa

SEQ ID NO: 79438 - DNA, 399 bp, Citrobacter koseri
atggctaagcatataaatggttatcatgagaagaagattgttgatgttattaacacatggtctatagatgaaaaactaacctgggatgctttgtgcgacaggttagtaaggattattgggaaaagaccatcaagacaatccttaagtagtcatgtaaggattgcagaaagcttcagtgtgaaaaaagccactatcaaatctggtgcaatacacactgtaaaacctgctaatttaaaagtggcttctcaacgaattagaagacttgaagcagaaaatgaagctttgaaggcattaaatgaacgctatttagagcagttcaaagtatggctttataatgctcaccttaaacaaataacgattgaagaacttaataatccgttacctgcaaaatacctttaa

SEQ ID NO: 79439 - DNA, 414 bp, Citrobacter koseri
atggataaaacaaatattaacttaatggaaaggtatctacttctgcttgatcgattcgttgataaactcgctggatctggtttctcagagcaacgtattatagaacaatcatatcttttttgtgcaggattttatatcaaataccaaagtggtatcgaaaaaatgaccttctccaacagggaggttgttttaacctttctgctactttcatattatagtcatataaataaactggatgatgatttgatcaacaaagagcgtatgaaacatgtatgttcttcattgattaactttatagtcagtaatggtagccgaacagagaaagtctatgctaatgagaaaaggaaatatgaggcttcaactctaaaaagagaattatcgaaaaaggataaaaggaaaagatatggattgtag

SEQ ID NO: 79440 - DNA, 1173 bp, Citrobacter koseri
atgacgattgcaaaggatagttcgactgatgaaatcattcatggaaatgatctccgtggaatggatgatttttacattaagacaacgagttttgaatgcccatacgagctatgtaaaattaaagccacaccttgtagttttactatgaaacatgttaatcaatcatattttagatatggtgataaacataaggatggctgtggtattcatgatccaagatataaaaacaatcatacttcaaatgacgaaagaaaacataattcgccacctgctccggttatatcacttttaaaaattgatgtgaaaccaagaggtggtattaaaaataccagaaatagtaaaaatgaaaatcacaagactgaaaataaaggaaatgaacatcctgtatcttcatcaagtattaagccagtcgtagactattacataaataatagcaatcattatgaacagctatcaatccctccatatggcacgcgatcttataaagatacattccaacttattttttacaaaaacaacatacgttattacaaacctgctatttattatggtgtaatccagtctaatattcgtctgcatgaagattcagaaaagcattgtcttactttccttgcaagggataagaaaacccaaaaaccatttacgcttgaaattgatgtttctgactggaatgaaagtcagaaagatgtgttttggaaagaatatgaaaagcaaaggaaggaagctgataggtattataaggggcttaaagataaaaggaatgctaaaaaattcctgacggttttcttttttgggatgccggatgaaaatgataaatttctatttaagacaaaccactttaaattagtatatgtggctttcttgggtaaatttgaaagctcatataatgacagtaattattacattgaaaatgatctgtccgtatcatcattgaatgaacaacccatttcattatctgatatagaccataaaaatcatgaatataatattgaaacttcattagattttagttctcctttgccagagccagagccagagccagagccagagccagagccagagccagagccagagccaataaaatcctctttaaaggaaaatattgagactgtagaaatgaagagtaaagtttgggggaggctgaaaaagataatcactttctttaaaaagtga

SEQ ID NO: 79441 - DNA, 375 bp, Citrobacter koseri
atgaaaaaaatcataatcgtaggattcgtttttctgaccttggcaggttgttcttcagtaggcaaccagtcattgaaaaatgagacgcaggaaagtgtgaaaaccaaaattgttaaaggcaaaactacaaaacaggacgtgttagcatcgttcggtgaacctgacagccgttctttgatcgatggtgaagagcaatggtcatacactatgtataacagccagtccaaagcaacctctttcatccccgttgtgggactgcttgcaggtggagcagactcacaaactaaatctctgacagtttctttcaaaggcgaaaaagtcagcacatacatctttaatgctggaacaagcaacgtgaagactggcattttttag

SEQ ID NO: 79442 - DNA, 669 bp, Citrobacter koseri
atgagcatctccgctacaaaaagcaggaagaaagaagctgaagctggtctttctgatgatcctcggcaaacggaaatcacgacacccaattttgtgctgtttggtgaaactttcacatttattgagactttctctgccactatcattgactccgatccaggcaatggtcatatctgggtaaaaaccaacacaagggatgagaagcagatttctgactatggtattcctttcagaagttcacacactatccataaatacgaacttcgccaatatagtgaggatggttcgtatgatgcatataaagatgcgcttatcgttaataagcaaacgggtgaacacgaggtaaacttaaaaagaaaaaccattattatccccgcttttctgacaatgctatttcatactgcctccacagcagcgtattacagagcaatgcctgttccaaagtttctcaccgttattttcattttactttgtgctgctgcacttatttcatttctcacactaccctggggatttaaagacggctacatgtggagcgaccacaaatacatgtggtttacatatcttttctcaagagttggaagttttatttgtatcaatttgatgaaaagaagaagccagaaatttgaaaatgaacttagaaatcttattgagtcagtaaagcgctaa

SEQ ID NO: 79443 - DNA, 1242 bp, Citrobacter koseri
atgaagggaatgcaaaaaatccgcaggggtaagagcttcgctggtgtcgtgctttacgcattaaaaccagcttctcatcatagaaaagatccgatagtgattggcgggaacatggatggaagcgctgctgaagaactgatagttgaatttaataccacaaaagcgcttcgcccggatgttgctaaacccgtctggcacaattcgcttcgcttgccgaaaaacgaagcgcttacagatgctcagtggtcagagattgctgatgattacatgtcccgaatgggcttctctgaaacgcacctcagatgctatgtccttcatgatgatgcggccggccagcacatccatatcatcgccagtcgcatcgaactcagttcggggaagctctacttaggtaaaaatgagaaccttatcagcacacgtatcatagaagagctggagcaggactaccagttaaccagaaccaaaggatcgaaagcatctccagcggcgccctcacctaaaccgaagctcaaaaaatctcgtaatgagatgatgatagaaaagagaactggtgagctatgcccaaaagcaatcatccaaaacgcccttaatgaactgcttggcagcaggcaatctattgtcggcttcgtgcaacagcttcttgctcaaaggatcaaggccatcccaaatattgctttaacagggaaaatgaacggcttctcattcgaatactgcggaatttctttcaaggcatctcagcttggcaaaggatattcttggccagctttacagggcaaactcgattaccagccggaacgcgataatggtttcctgttctcactgataaaatctgttagtgaagcgccttgtatgttcataactacagatactcctgaaatcacaacaagagaggttcacagccctatagaagcacttatcctcgataaccgagctgctggtcaggacgaatacactaacgcttctgtaaagcagtttcacttagaagatggtgctggtgctaaagaatcgttaaaagaagcccccgaccgaagctatgcagtttcagcattcaggtggttggaatacatcccctacctcgatttaatttatcgtatgttgaaaaacctcaaaataccaacccttaaacgccctcgaaaacacaaaaccatcactggcgtgagagtggtagagattatgcctatcccccaaaaaaatctcatcgaatcagcacctcaatccagaagagcatcgctttcgatgtaa

SEQ ID NO: 79444 - DNA, 438 bp, Citrobacter koseri
atgttcgaaagtaatacttttaataagatcgttgtaagtaagcattcccgtaatggaagcgttaacgaagcgaagctctcacacaaccagcttcgttctcattgcatcagtgtcagattaaatgatgaagagctaacgcttctcaatgagaaacgaggccgtcatcgtaaaggcgagtggcttcgcttatctttacttaataaacttcctgctgtcgttccagccatcaattttgaagcctggaaaacccttggtgagatttcgcagaagctaaacaagcttgtggctcatcttgatagcaagagctatgaaagctctctgacgcaaactgaactcttcgccgtaaagcgtcaggtctcagagcttcgcttgcatttaattaccgctgacctgtggagagcttcccatgaagggaatgcaaaaaatccgcaggggtaa

SEQ ID NO: 79445 - DNA, 282 bp, Citrobacter koseri
atgttaggtagggcagagccttacatagctgtccctttggcaacttttgataaaggaatgatgttattcgcaaaggccttttttatcatttacgaagtgtttaataataactttaacaatattaaaaatgatcctaaacctaatttcaaaaaagatgaaatcctgaataaactttcgcaggaagatatagcagttatacgaaaagaatgttatcccgatgctgacgataactgcatcaaagaaatagtatatgaattattagttaatagattaatattctga

SEQ ID NO: 79446 - DNA, 264 bp, Citrobacter koseri
atgaaatcatactcaatccttactgttatcctgactacatttcttctaaccgcatgtaacagtgaaccatcagaaaaagatatttattctgctttaagtaaatggatgggaagccaactgacctccgtaaataaagtagattgcacaaaggaatctgataaaagctataaatgtaatgtagtgatggatatcagtggttcaaaacaagcagcatctattaaaatcctaaaaacagatgacggctggcaatttgtaggcaattag

SEQ ID NO: 79447 - DNA, 429 bp, Citrobacter koseri
atggacaaaaacataatcaatccagattttactctggaagagcaacttatcattataattgataaatatatcgctaaacgatatcaaccgaacgataaaagtttctcataccaactatacctccttttcgtaggctatcacttaaagtatttctatccccaaaaactttatactcgctctaatcgcaacatagacaacatcatgacgatgttcagttctgtatacaaatgtctgacaagtaatcttttgcagaagttaaacaataaagaggcagttcttagggagctaaattctctcgttaattatattgataacaatcgagaaaaagcagaggaaatttatgctgttgtaagaacacagtatgaagtgaaggttatcgagaaagagttaacccatgaggttgttagagtaagaaatgttagattataa

SEQ ID NO: 79448 - DNA, 399 bp, Citrobacter koseri
atggcaagaaaattttatgataaagaaataaaagctattgttaaacttattgagacctggagtaagcctgattttacttgggattctttatgcatggcttgtaaaaaaattttaggtaaagtaccaacacggcaagcattaagccagcatactgagattgtcgttgcatacaggaccagaaaaaggtctggtatggctaaatgtctaaatacgaagttacctggtagtctgagccttgcagcgaaaagaatagaacgactagaaaatgataattcggcactaaaatatgaaaataataatttactgctgatgattcaaagaatgcacgaaaatgcttacaggcataatatattggcttctattcttgaagaagaattgccgcagagagcaagaaaatga

SEQ ID NO: 79449 - DNA, 1293 bp, Citrobacter koseri
atgattatttcacatgccaattttgcaatttcaacttcttataaaatttatttggatttgaaaacattatgttcgtttatgtctaaacataaaatgctgtctgaatcgattacacgatggtcatatccatttgaaacacacgatatttataaaagtacaacaatggattctattttgaatttatcccaccaaagaaaacttccagatgagcgggtcatagatttcattggtagaatatttacttctaatccagtcgatgaaagagatatattcacatcttcaatttttgcattactcatatgtgctccgtcacgaatcagtgaaattatgcttttggaagatgattgtgaggttatcattgaagatagtaatggcactttaagatatggtctgcgatttttttcattgaaaggttttggatacaatactaaatggattccagactgtatggttcccgtagcttcaaaggctatcatgcgattgaaaaaactgacagggaatgcaagagttgtctcacagttgataaaagcaggggaatttaatttatacgaatcattaaacagaagtgcatttgaatgtttaacaattgaagatctccacaagcttggctttgtcataaatcaatcaactgtctgtcaagaaaatttaaagttcttgtcgagtgttagggctggtatcgttagtgtaaaagcattttggatatatttaaaacgcaaaaacacgaattctaaacaaaagagtaaaaaatatcatctcgataattatgttagcttgctttctattaataataatctattgaattctaacaaaggagccgatatctttacaactgtaaaggcaacttcaaatgatttcagaacagacttccgtaatgataatgtcaataacatctttcataggcatgttaattttaacggtgagagtactgatttcagttttcatagtcaccaaatcaggcacttaattaataccttagctcaaaggagtatgttgtctgagatacaaattgcccaatggtccggtagaaagagtgtcaagcagaatgcagtatatgatcatatgtctcacgacgagctatcagaactatcaagaaaaatactgagaagagacatattagaagaagcaaaaaattcaaaaatttcattctatgaagaatctattattatggattcaattaaagataaatttgaaaaactcgaattaaaaatccaaaattcagatccagtgaaaagaaaatatattctggaaaaaataaaagagttaaggttgaaagttgagagaatattaatgtga

SEQ ID NO: 79450 - DNA, 2115 bp, Citrobacter koseri
atgtgtagtaaaactatgctaagggcccaatcgattactatgtatatcaataaattagctattagaaactataaaaactttcgaagctcaaatttctactttgttaaaggctcagtgaatacaattatcggtgaaaatgcttcgggaaaaacaaatttatttaatgcgatgagattaattctagatgattctctcccaatgaattctaggattctatctaatgaggacttctaccgtggattatccgaaccctttggtcattggatcataattacgctatattttgatgatttaagtgagtcggaggaagaacaggtccttgccaactatacagtaaatgatggtaatgataagtctataaaggaaggtaattatacttttatatatcgacctaaatttcatattcgacaaaagctttatgagttaacattagaagatgacaatgtggaagcaagatctgcttcttttactgaatttgcatctaaccatattatttctaaagaaacatatgaagcagtagcttttgttagaacaaaggttgatttgaataatgacgaaatttataaacaagtagttggtgattttgatagttactccttttcaaatcctaatgatgatgatgctactgtattaggggttaagaagccaccttactttgccttaggcagcgaagtcgcttgcacttatgtcaaagcacttaggaatgtagttgcagatcttaaatattataaaacgaatccattgtataaattacttactttaaaaagtaaacaaattgatgatagaaaagatattgtagaaaatgttaaagagatcaatggtaaaatttcagctatacctgaaattgagagattgagtaataagatatctgcttcattacttaatacagtaggttcgacttattcccctaaaatattagtatcctcacaacttccagaagatttcacagaattaattcaatcacttggcttagtggttgaagattctctggattacaatggctcaggaaagattgatgatctgagtcttggtggagcaaacttaatttatcttgctttaaagttatatgaatatgaagaaataagggatagtgaagagcatattactcacttcttgttaattgaagagcccgaagcacatattcataaccatatccaaaaaacccttttcgataacttcaattttaaaaatacgcaagtgtttgtatctacacattcaacacaaattagttctgtatcaaaaatatcatcaatgaatatactatcacgccaaaaaggattcactgatgtatatcatccatcgtttggtttgacgccgaaagaaatttcttccgtagaacgatatcttgatgcaattcgtagtgaccttttgtttgctaaaagtgtcattctggtagaaggcgatgcagaacttattttaataccagcaatggtaaaagaaactttgggaatcagcttagatgagttgggcataagtctgatcaaagtagatggcactgtttttaaacatatttctaaccttttccatgaaaaacggctgaaaagaaaaaaagtagctgatgatatttttgatgcggattttgtcgaatctctggtagatgccgaagatgatgggttacgaagaaaagaagagttagataaatatattgaaggtaatgagtttattacggttcattacgcagaaaatactttcgaaactgagcttgttcgctacgatgaaaacaataacttgtttttagaggttatgaaaacagagtataaaaaagaagcgtattttaaaaaggctgaatcagatgtaaattcatctgatctcagagttcgatataaaagagtattaaagtttgcaaagaaaatagggaagggatggttggctactgaaatggtagagcatcttagtgttgataatcgtgttcctgattatattttacaggccattcaatttgttcttcgagatagaaatgtcgagcctatatatcaaaaaatgcttgattacaatatgtctttaatgggggttaaagaatttgactgtataaatgccgaaaaggatttttctagtaaaatgatagaatataagaaacatttcaatgacagttttgtaagactgttggagttatag

SEQ ID NO: 79451 - DNA, 429 bp, Citrobacter koseri
atggcaaataaaaaatcgcagtttttgaacactaaggatgcaaaacattcaacttcaaagtgtaacttactaccacaggaattacgaattcattgtgttagtgttcgtcttaacaatgctgaattggccaagcttaatacattgagggagcattattcgaaaggagagtggcttcgtatggcttcccttcaaaaattgcctccagttataccagctattaataccaaagcctggatagctttaactgacatatcacaaaaactaaatcgaattgcgatccatatcgatggtaagagcaaagatagcaagcttactcatacagagcttttcgccgtgaagcgacaactcgaagagcttcgcaagaatgttttaagtgacggtatatggagcctcccgaatgaagggtatgcggaagatcaagaggggtaa

SEQ ID NO: 79452 - DNA, 1125 bp, Citrobacter koseri
  misc_feature (1074)..(1119): n is a, c, g, or t
atggaagcaatagcaaatgctttgcttttatttgaaagatacaatgctgatattaatgtggaagcttttaatacagtaaatcttgatatcgaaaaacttgtctcgaacaaagggtacttattcggcttaatgaatgcactcacatacagaaaagacttaggaaatgttacaagcattcttaaagaacaacatgtctctaaaagagccctttatttcaagataatgacaattgaaaattacgtcaaatggttttttgataacattgctatcaataatattgactcttctcgttatgaaacaatcagtcgagcatttgattttataaagccaagaatagagaacggaaagaattacaatattgaaagcgaaagcaaatcattgacaaatgagcaagttacaactttgactggtatggtaagtgttaaatctaagattaatccattttcggagcatgtaaggtttcgaaataatctaataattgaaattttgttagagacaggtattaggggaggggagctacttaatattaagttggttgattttgactatgtccacaaaagtctatgcatagtaagaaggccagatgatcaaaacgaaccacgattaaggcaaccattggttaaaactttagaaagaaaaataccattgagtatagaattgactgagttaatacagaattatattagtgatttcagaggtaagcagtgtcatgcaggggagcatgactatctgcttgttactcatagcagtaaaggtcaattaggtcatgcattaactatttcaggttatcagaaaattttcgaacaaattaggaaaaatagtaatgtattgagcgatattgtggggcattcgctaagacatacttggaatgtgaaattctcagaaatgatgctcatgaattcgaactctcaggaatatattacttatgagaaagtaagaaattatcttatggggtggaaaaagaatagtacaacctcagatatctataaccaagcatttatagcacaagagagccgaaaaataatggctgttattaatccactaaaaactataatagaggataagtctaatgtnnnnnnnnnnnnnnnnnnnnnnnnnnnnnnnnnnnnnnnnnnnnnngtctaa

SEQ ID NO: 79453 - DNA, 306 bp, Citrobacter koseri; identical to SEQ ID NO: 76836

SEQ ID NO: 79454 - DNA, 570 bp, Citrobacter koseri
atgagaacccacgaccggggttcgacaactggcggcagccagttggacagactgcgaacgcagagagcgggctgcccgcagggcgagcgaagcgagtcaatctccccctcaccgccatattcagaaaaagagctcgtacgaaagtacgggcttttttttcgcatattgcacgtactgtggggggatgagaacccacgaccggggttcgacaactggcggcagccagttggacagaccgcgaacgcagagagcgggctgcccgcagggcgagcaaagcgagtcaatcccccctcaccgccatattcagaaaaagagctcgtactaaagtacgggcttttttttgcctattgcacgcgctatccggctgacaagggcaccgtaggcccggtaagcgttagcgccaccgggcgctcgaacatcgccggatggcggcgcaagcgccttatccggcctacaaaaacatcccaagaccgatacgcgttagcaccatcgggcacccgcacatcgccggatggcagcgcaagcgccttatccggcctacaagaacaccccaggaccggtaagcgttag

SEQ ID NO: 79455 - DNA, 342 bp, Citrobacter koseri
atgggtaaatatgctttattggccggggtattcgtttcgttaccttcttttgctgcattccaatgcggcggctacaagatgacgctaacggattcagaaggcctcgtgcgcattaatggtgagttagtgacgagtcaaaaagtcaagtatcttggcgcacaaggtgatgaatcaaaagctgtatggaacatggggctgatgcctgcgcgcgatggtaacaattacggttttgagtttgttaagcgtaatggaaaatctttcctgaacgttcaactactgcaaaatagcatggacgcgcctaagctcgtgggatctttcccttgcgagaaaattaaggattaa

SEQ ID NO: 79456 - DNA, 741 bp, Citrobacter koseri
atgaaaatgttatgttcggtaatgttgctggctttaacgcttccttttacttcgtttgctgcaaataaaaatactgaattaagtcaaaatgaaaaggtcatgcttaaaaatttctttaagtatgacatgcaacattatgttgattcagaaagtcatatattcccttatgatatgaaactcatttcagctgataagattgcagaggattatgatgcaaacgaggctagaggagacaaaaattacaaggggcaagccattgtaattagcggggcggttgagagaattagatcaactttaggtgatgttccagcagtggaactaagaactaatattggtatcaatggcgtttccttatattttgccaaaaaatatgaaagtttagcgattgatttgaacaagggcgatacagttaagtatgcttgtttaggtgacggggctgttatgggtagcccgatactcagacgctgcgtcccggttagtgtttatgtcgatgccgtttctcaaaatacctataaagaaatgctatcagaattaaatggctatgctggcgggaatgatacggttaatgagttcttattattcgttaaaatgatttctaaaatcactgatgattataagctttgttctgcaactgattcttcatgcattattaatctgattaataaaacccctattgaaaagcgcaaggaaataggagttcagatatcgaaagagttaggtataaaaatttcagcgaaatag

SEQ ID NO: 79457 - DNA, 444 bp, Citrobacter koseri
atgagcattgagattgccaatattaagaagtcttttggtcgcacccaggtgctgaacgatatctcgctggatattccttcaggtcagatggttgccttgctggggccgtccggttccggtaaaaccacgctgctgcgtattattgccgggctggagcatcagaccagcgggcacattcgttttcacggtacagacgtaagccgtctgcacgcgcgcgatcgtaaagtcggctttgtttttcagcactatgcgctgtttcgtcatatgacggtgttcgacaatatcgcctttggcctgacggtgctgccgcgtcgcgaacgtccgaatgcggcggccattaaagcgaaagtgacgaaactgctggaaatggtgcaactggcccatctggcggagcgttttccggcacagctttccggcgggcagaaacagcgcgttagcggttga

SEQ ID NO: 79458 - DNA, 129 bp, Citrobacter koseri; identical to SEQ ID NO: 31785

SEQ ID NO: 79459 - DNA, 225 bp, Citrobacter koseri; identical to SEQ ID NO: 31777

SEQ ID NO: 79460 - DNA, 267 bp, Citrobacter koseri; identical to SEQ ID NO: 31778

SEQ ID NO: 79461 - DNA, 546 bp, Citrobacter koseri; identical to SEQ ID NO: 31780

SEQ ID NO: 79462 - DNA, 327 bp, Citrobacter koseri; identical to SEQ ID NO: 31781

SEQ ID NO: 79463 - DNA, 177 bp, Citrobacter koseri; identical to SEQ ID NO: 31782

SEQ ID NO: 79464 - DNA, 345 bp, Citrobacter koseri; identical to SEQ ID NO: 31783

SEQ ID NO: 79465 - DNA, 510 bp, Citrobacter koseri
atgaacagtcttttaacgctggcgaaggacttagagcagaaatcgaaagcgcagcagcagagtaccggcgaaatgctgaaagccgcattcagcgagcacgagaagtctgtcagagcggaactgagcgaaagcgggaagagaatcagcgccgccatccgcgcccacgagcagggtatgagcgcggccatgcagtcgaaccgcctgagcgtgatgcgtatggtcgggcggacatggctgaccatcacgatggtgtcaggactgctgttcgccagcctgagcggggtgttgtggtatcaggggagcctgatagcgtcaaatctggccgaaatcgaccggcagaacgcagcgctgtcgaagctgaacgcgaagacctggggcgtgacgtacctggaagacagcaacggacgttttctggtgctgccgaaggggacggccgtagacaggacgcagagctggacggtcgggaacgggctgtcgaagcagaacgcgctgagactggtgaaggagtaa

SEQ ID NO: 79466 - DNA, 213 bp, Citrobacter koseri; identical to SEQ ID NO: 33452

SEQ ID NO: 79467 - DNA, 189 bp, Citrobacter koseri
atgattcagccgtcgtttaaggatataagagcccactcccgccagcgtcagtcgctggcaggtcagatattgcagaccgtagagaacctgtcattacgcacccacagtgatgaggataagtacgttctgcaatatttgcccggtatgtcaaaaagggcatcaatgattcagacagaatacgcagtatga

SEQ ID NO: 79468 - DNA, 141 bp, Citrobacter koseri
atgattattctcgggacaaataactcgtgctcgggaatgacgcacttggctaacttactcttgggtataaagttatttgtcattctaagttttctaatgttctcaattaatctgaatagctccttgcacaagagctcttag

SEQ ID NO: 79469 - DNA, 1917 bp, Citrobacter koseri
atgtatttaaaatcagtctatataaatcaatataagaatcttcaagatttcacactacaattcaacagcaaaaatgccatcgatatttttgttggtaaaaatgggagtggcaagtcaaacttgttcgaggcgctaattgaaatttttcgccatttagatcaatttggtaagcaagaaaatgatattccatttgaatatattataagttatgaaattaataatactccaattgaaatagaatgggcaaatggtaaactcagaataaataatgatattgaccgtaaaactctaggtcaaacccttttccctgatcacatactaatttactactcaggacacaatgccactgtttctaccttagcgggtcattatgaagaagtattccgccgtaaaatcagaggggctaatatcaatgattcgcgtcgatttataagtataggccctgaatataaatcattgctactatctttgttattattacaaccagagggtaatcctgcgcgcaaatttatatttaataaccttggcatagaaaccttaggactttcaaaaccaggcactaaggaaactacagaagcactgcttcggatagaattatgccgccctgaatacgccacaggcagggacgaatttaatattgatcttaacgatgaatcggatcgttactggaaagccgaaggaattacaagagacttccttaatactctgaatacctgtatttggaataacgatgacaacctcaccgttacggaaggatatcttgcaaacgaagataaatatatattttttctttctatagaaaaactaaataataatttcgagaataaagtgcaagaactattccgtaattttgacaatcttaagactttgggtatgttagctgatatttctgtaccattgaaattagtttcaggcctagaagggaatgtaactcatttcagtgatggtcagtttcaatcagtctatatttactcaatcatagagttatttaaaggtaaaaattgtttgactttacttgatgagccagacgcttttctccatccagaatggcaatttagttttctaaaacaagtaattgagattactgacttaaactctgagagtaatcatattttaatgagtagccatagtgcagttactctaatacctcacaatcaaaaaaagataaaattttttgatattcaaaatagcaaagcaaattgctatgaattaccaaaagttattgccataaaaaaactaagctctgacttaataaaatattcagagcaagaacaacttcttagcataatcaatgcggttcaaattgaaaataaacctgtactttttacagaaggcagtaccgatcctgtcatattaaaagaagcttggtacaaactatatgaaaaggaaatgccctttattcctttttatgcgttcagttgtacttacattaaccagctaataactgacaaccgaatacataatgagatgaaaggattaccagtatttgcattatttgattttgataaagcttatgaccaatggaatggcttaaatggtgatattttggcagcagaccctactcgtgggcttataaaaaaatggaccaatggtgaatcctatgcattaatgttaccaataccatctaatgcagatattcgccgccaagttatcaaaaatgcagccactaatgaaacttttggtggtgactcctgttgtgagattgagcatattttctatggtcagccaatagcttcatcttattatcgtagcgaaccgtgccctggtggaagtaaaatagtttttaagtcagataaagataaaactcatttcgcaaaagacattgtcccgatgttaccagcagaaagttttgaaccctttaggcctatttttgagtttattcaagaaaaatgcaaaacctcacaacataaaacctaa

SEQ ID NO: 79470 - DNA, 1695 bp, Citrobacter koseri
gtgattagtctattaacaaataattttgagactacattttcaactcctgaaagtgtcgctaagttacgagatgtaatcttgacattagcgatgcaagggaaaatcgtcgagcaagaccccaacgattattcagctattcatcttctggaaagtatcttagatgaaagtaagaatttatctgggaataataaaagcaagcggtcgagtgagttgaaacagactgttcaaaatgtatcaccatatattttaccaaagggttggacatggagtaaaatagggcttgtaggtaatatttttaatgggaacagtattaaccctgatgaaaaagaaacaaaatactcgggtgttagtggtatcccgtatattgcaacaaaagatgtaggatatggttttgattctctagattatactaatggaatctatattcctagtaccgaaaaaaaatttagaattgccaacgaaggtacggtattaatctgttcggagggtggtagtgcaggtaaaaagtgcgggatcacgaatagaagcatatgttttggaaataaattatttgctcttgaacctttgggaggaattccgccaaagtttattctttactactacctctcaccattctttaggaaaagtttttctcaagttatgactggtattattggaggggtatcactttctaaatttgtagaattacctatccctattccaccaataaaagaacagttccgaattgtcaacaagcttgataagttaatggaatactgtgataagcttgatgatctcttttccaagagagaggatatcaggtttgcagtacacgatgctaccaagcattttctactcgaagatggtaacaaaagccaaagcaaagcttggcagtttcttgtcaatagtttcaatgaaatttataacaggcgagataatatttcaaatttgcgctcaacaatactcaatttagctgtagctggccatctttcagaaaaaaaagaaagtgatcgatcggttgagcatttattgtctgatatacggtctgaaaggctaagacttaagctaagaaaaacagtagaaagcattaattcaacatgtcctcttgggtatgagataccgtcgcattggacatggttacgtcttgaggaaatattaacctttggacctactaatggtatttctccaagagcagtaaactatgaaacaaatgttcgttctttgacgttaagtgcgactacttcaggtgtttttaaagaagaacactcaaaatttatagacacagagataccagaggattctcatctctggttaaaagatggcgatatattagtacaacgtggtaattccctcgaatatgttggtgtccctgcggtttaccgcgggaaagacagaatttttatatatccagatttgatgatgaagatacgagtctccatacatattaatactgactatgtatattacgtcatgagttctgaaccatgccgccagtatttacgtgcacatgcagcaggtacgtctataactatgccaaaaattaatcaaaaggcacttaaaaaccttcccattccaataccaccacttgatgaacaaaagcgtattgttgctactatcaagcgattactggattattgtgaagatcttgaacaacatctggtttcagctgaaaataaacaaaaagagtttcttgacgctatcctcgctcaggtatag

SEQ ID NO: 79471 - DNA, 1479 bp, Citrobacter koseri
atgtctttagcaatgctaattaagtcaattcaagacattatgcgtaaggatgttggcgtagatggcgatgctcagcgcattagtcagatatgctggcttttgttcttaaaaatttttgacgacaaagaagtcatttggtctaaatctatccccgggtataaatctccactacaaaaaagatttaaatggtcaagttgggcaaaggactcaaaaggaataaccggcgacgagcttattgattttgttaataatgagcttttcccttctcttaaaaaactggctgcattagcaaatgtatcgcctcatggacgagttataggctccgtatttgaggatgcctataattatatgaaatccggtaacttattgcgtcaagtgataaacaccatagaagacgatgtggatttcacatcttctagtgaacgtcatctttttaatgacatttacgaaagattactttctgatctacaatctgccggtaacgctggagaatactatacaccgcgtgcagttactcaatttatggttgacgttcttaatcctgttttaggtgagaaattgcttgaccctgcttgcggaacaggtggttttttgacatgtgctattgaccatttaaataagcaaatcactacaccagaagataaatttaaattacaagaaagcatctatggcatagaaaaaaaaccactaccacacatgttagctataactaacatgatgctgcatgggattgatattccaacaaatataaagcacagaaatacattacaacttccattaaatagttatgggccacaagatcgtgtggatgttataattacgaatccgccttttggaggaatggaagaggatgatattgaaaataactttccaaacaaatatcaaaccagagagactgctgacttatttatggcattaataatgcatttgttgaagccggatacaggtcgagcagcagttgtgctaccggatggttttctctttggtgaaggagtaaaaaccacgctaaagcgcgaattaataaaagagtttaatctacatacgataattcgcctcccgaaaggagtcttttcgccttatactagtataacgacgaacattttattttttgaaaaaaatgggcctactaaggatgtctggttttttgagcacccttaccctgatggttataaaaattattctcgaacaaaaccactgacaattgaagagtttgatcttgagaagtcttggtggggagggagtgagcgcaaagggcgtaaacagaataaacacgcatggaaagtatccgcaaaagatattattaaaaacaactataatcttgacatcgtaggtaaaaaccctcaccaagtattggtggaacatgcctccccagaagagttaatgattgaatataaaaatattgctcatcaaatagaaaatatacaaaaatctttgaaagaagaactgattgcatgtttcaaactaagaggtggaaagtga

SEQ ID NO: 79472 - DNA, 213 bp, Citrobacter koseri
atgagccatttagaagaccgctggttatcagtagacgaaataggaacgtacttaggtgtcagcaatgacacgatataccggtggattgaaaagcatgcaatgccagctaatcgtgtaggacgtttttggaagtttaagaagatggatgtagatgcttgggttaaggaaggtggcgcatcttctgattataagcaaattagcaaaacagactaa

SEQ ID NO: 79473 - DNA, 135 bp, Citrobacter koseri
atgaaaactaccatgacgttgttattcgtctctatagtcctgcctttttcagtctgtgttcaaaccgtgacgacaacaggcgatacggagcagacggaagaaaaaaattcgccagcaggcttacagggattataa

SEQ ID NO: 79474 - DNA, 1278 bp, Citrobacter koseri
atgagctttgcacttctatggtatgaactgcgtaacttaggcagctatggtgaggatgggggctttatcgaccttcggactacggctaaagattccaaaacacaactatgggctgatgttcatggtcaaaaagtaaatttaattactgctataatgggagcaaatgcttctggtaaaactactcttttaaaacctttatctttcctaacatggttgttttggtctatacctgctaaattaagcgatcaactctatctgaatataaatcgaactactcctgaacctggtttagtcaaagttgggtttgtctttaacggaaaagtttatacttatgagatagaggcttgggaagggtttattgcttatgaaaaattatttgtaaaaggtaataacaataaagatacttacatttttaaacgtgaaatggatcccgtgttatccttccaggggatgactgaagatgagcttgttataaataacgataaagacgcagaaaagattttaaaacttgttaagtataactacgttgaaaaaagagagttgtttccttttggaggtgttgaggctaagaggactcccgcgaacacaagtataatgtctgctgcgcgtaggattggtgtcagtttagctgcagatattgctgaggccattagctgtacaactaatgtcagtgctgcaggtagattgctttatagcgaacagattatggcaaatgcttgcgagtttctctatgaaaatagagacgtctttctgcagttaaaaaaaataataagaggatgggatctgggactaagcgatattactattgagttaaaaaaagaacaagatagcaatggtagagaagaggaatattacgttctttatggtgtacatgagagagaggatggtgaaacatatgatttacctttcactttggaatctgcaggtaccagaagcgcctttctgcgcttgcaacaaattttacaaagtttgcaggaaggaaaaacttgttttattgatgagttaggtgatgatttgcatcctcatatggtaaaaccaatactggaactatttgccggaagagatactaaccctcattgtgctcagttagttttcacttgtcataaacctgagttaattaattatttaggtaaatatagagttattatttgcgaaaaaaaatacaacaaaagtgaatgttttagattagatgaattcccgtcttctgaagcgagagtcgatgataatcttgcagctaagtacttagctggtacatttggaggagtaccagatttatga

SEQ ID NO: 79475 - DNA, 537 bp, Citrobacter koseri
atgagtagaaaagctaggaaagtcagaggagttcagcaaactagattgatcatgtgcgagggcattacggataaaagattcgctgaacgtctaaaacaaatctttaataaaagagggaacggtgtttctgttcgaattgatgaggcaggcggcggtggtccaaaatctgcgattatggctgctataaatcatgctgggcaatttgataagaagtatgtttttattgattccgatctacctattcctgcagatgcacttgctgcagcgagaaggaaggacatgttgattatcatgtcaaaacctctttgtcttgaaggatttttgttgagactgatgggacaagcgtgcgaaataaatgattcgaagcatgcaaaattgattttcaatcagacatatggtttggttaatggtgttagccaagcttggtatgaggagtacataactcatgaacatcttattgtaataatgaatgaccaagatcatgagtgttataatactatttgtcaattgtcatctacttttgaactggttgattaa

SEQ ID NO: 79476 - DNA, 756 bp, Citrobacter koseri
atgatccactatcatggcgggcctattactcctgatacgtgcgctctaaaggcgtggaaagcgcgccatgcgttcatcagttttgcgcactccggacagataaatctggccgctgaatattgtcagtcttttgccctggacaatggcgcattcaccgcgtggaaagcagctggcaagaacaaaatcgactggagcgattactacgagtttgttgcgcgctggaagaaccatcctggatttgacttcgccattatcccggacgtcatcgacggtggagaggatgagaacgaatcgctccttgacgaatgggcgcacggtgaattttttggcgttccggtctggcacatgaatgagagcgacgagcgctttataaggctctgttacgagtatccgcgtgtcgcaattggttcatgcggtgactatgacgtcaagcgcccaaaccttgccgtcgcaagaatgaaaaacctgattcaccacgtgattgatgagcacggccagccggttacgaaactccacggattgcgcatgctaaacccgctgatattcacaaaattaccgttagccagcgctgacagcacgaacgtcgcccgcaatatcggcattgataaagcatggtcaggagcttatgcgcctgccagcaaagagacacgcgccgcgctgatggttgagcgcattgaatcgtacaacagtcccggctctcttgcgtactgtgagcaacgtgaccggttcgacatgcaactgcaattagcagtgtga

SEQ ID NO: 79477 - DNA, 393 bp, Citrobacter koseri
gtgcaaccaaaattcagcgcggtgcagcgcgcatataacacggagaaactgaccatgacgacctcaaaaaacgtcactgagttacaaccacgcatgaccagagagcaactgatagatgcagctcgtaccgctgctaaatatctgccagtagcctctgctcaactgatgaatgaactggctacacgtctcgctacaacctgcgatgcactatgtgaatcaatggaacagcgtaatgcactggctattgaaaacactgtacttcgtgaggacgtaacgagttgggctaaagaatgtgaccgcattgttgaacgtcacaccaaaacacgctgcaacatgcatctgcttgaagcacagagagagttacgcgacatgactccagttaagagggtgtga

SEQ ID NO: 79478 - DNA, 513 bp, Citrobacter koseri
gtgatagctgaactgtcggcggctatggccgccataaaggagaccgctggtctcgcgagagtcattaatgacgcgaaaacggatgctgaagttaaagcggcaactattgaactccagagtaaattaatcacgcttcaggcagagtgcttctcccttggtgatgtgatccgtctacgtgatgaagaagttgtccgtctcaaaaatgtgatcactgaatatgagagttttgaaaagaaaacagaagattttttcctcgatagatttgaaactgatgctttagtctattctgagaaaaaagtgatcggaggagaggaaacactcatccattactgttctcaatgctttaatcaaagggttatatcgatactacagccaagttctcaaacattttatgatgctgcacgagaacaacattatacgcagttgcattgtcaaaaatgcgatgctgtttatggcaaaaacaaaatgcattttaaagaattgaattacggcagcaccgtaagttgggaataa

SEQ ID NO: 79479 - DNA, 714 bp, Citrobacter koseri
atggttcagcaaataaacggggttaatgtcccggcaccagctcctttgctggttaacggtcgcgtaacgatgagtagtcgcgaaatcgctgttcttacttcgaagcgtcactttgatgtaatgcgtgatatcgaaaccatgttttcacagcttggagaggatgtgacagggtgtgcgcaaaacttcgtacacccccagaacggacaaacataccgggaataccgtcttgatcgtgagcataccgagtgcctggtagccggttacagcgcgccgctgcggatggcgattatccgccgactgcgtgaactggaagagcgcgccggggccattccgcaaactttgccggaagcgttgcgtctggctgccgatatggcagagcagaatgcggcgctggtaagcaaggcgcaacaggacgcgccaaaagtggcgttcgtagatcagtacgtagaagccggtggtgcgaaaagcctgcgggagaccgcgaagatcctcaatatgcctgaaaaggcgatgattgacgctctgctgcgcgacaaggtccttttccgtcagtccggcaatctgcttccacacgcactgcgccagcgcgatggcctgttcactgtaaagaccggttcatctgagtttggtcatgcctatacgcagacccgcgtaacgccccgcggcgtccagtggatagctgatcgctacgcttccgaactgatgagaggctga

SEQ ID NO: 79480 - DNA, 1860 bp, Citrobacter koseri
atgcgtgaaattatcgttgataactttgctggtggcggtggcgcatcaacgggtattgaactggcgatcgggcgcagcgtggatattgcgatcaaccacgacgaaaacgccattgcgatgcataagacgaaccacccggacacactgcattactgtgaatccgtatttgacgttgatccggtagccgccaccggcggtaatcctgtcggcctggcatggtttagcccggactgccgacacttctcgaaggccaaaggcgcaaagccagtgaaaaaagagatacgcggcctggcgtgggtagtggtgcgttgggcgctggcgaaacgcccgcgcgtcatgatgctggagaacgtggaggagttcaaaacgtgggggccgctgctggcagacgaaatgcgcccggatacatcccgcgcgggcgaaaccttctcggcgtttgtcggcatgctgtctgatggcatcccagcggatcatcccgccctggcggaggtgtgcgagtttctgtccataccggaaggtagtgagcaggcgcagcgccttattaacgggctgggctacggcatcgactaccgcgagctgcgagcctgcgacttcggcgcgccgacgatccgcaagcgattctttatgattatgcgttgtgacgggaaaccgattgtgtggccggaaccaacgcacggggatccgaaatcaccggcggttcaggctggcaagctgttgccgtggcgcaccgctgcggagtgtatcgactggaccactcctgcgctgtcgatcttcgaccgcaaaaagcccctggcagtgaatacgctcaagcgcatcgcgcgcggcatccagcgattcgttatcgacagcgcgtcaccgttcatcgtgaagtgcaaccacaccagcaccaaaacgcattatgactgtttccgggggcaggcgttgggcgaaccgctacagacgatcacaaaaactcatggttacgctatcgcagtaccacatctgactccgttcctggctggcaacggcggcagtgaataccaggctaagccgcgcccgctggataaacctgctcacaccattctgaagcaatcccgcgcctgtcttgttgcgccagtgatagcacgccagtttggggccagcaccggccaccgcgcagatgagccgagcgcgactattaccgcaggtggtggcggtaaatcgcaacttgttacatcgacattgatccagatgggttacggcgaaagaccggggcaggatccgcgagtgttgcagcttgaaaagccgctggggacagtaaccgctggtggtaacaagttcgccgtggccagcgcatttctggcgaagcactacggcggtaactactcagggccgggcgttgggctggatgagccgactcactcagttacgacggttgatcatcatgcggtagtgacttctcatctggttcatttgcgagggttctgcaaagacggtcaaaaaatggatcagccggtgccaacgattaccgccggaggccagcatgtgggggaagtgaaaaccactctggcagttgagcactacgacgaacagcgcgcgcagcagacgttggcgttcctgcgtgaatattgcggcgaagactgtaccggtcttgtggatatcgacgggatcacataccggattgttgacatcggaatgcgcatgctgcaaccgcatgagctttaccgcgcgcagggcttcccggactggtacatcatcgatcgggattatcgcggcgtgaaatatgcaaaggataagcaggttgcccgctgcggtaatgctgtgccgccaccgttcgccgaggctttggtgcgcgcgaatctgccggaaatgtgtgtagatcagcagagggaggttgcgtga

SEQ ID NO: 79481 - DNA, 1041 bp, Citrobacter koseri
gtgagagcactgcttacccctgaaattgtaccacgccttggcgtggtgctgttcaagcctggtcgcgagttaatgagcctgttttccggcgggcgtgttctcgttgctgctgaacctaaaaatatgacccggctgccgtcaggccgggtgccagatgcccgccagcctctggctgatgatcaatctctggtttcgttcttcactgatgatcgggtgatccgcgccgcaggtggtttgtctggtcttgaatactggcttttacgtcgggttaaagagtgccagtaccctcattcggactatcaccataaagagctggtcacaatgcgtcatgctcccggttcagtggtgctttgctggcactgtgagaaccggttacgtgagcagacgacagaacaacttgcagagctggcacgccgtaacgtgatcgcgtgggtcattgatactgtgctggtggcgcttgggtacaaccgggaaagagagctttcactcggtgagctgtgctggtgggcggtttacgctggtgtcgctgatgccatcacagaaagcatggctgccagtgcgttgcagttacctgttgagcctttgcagtccgtttacaaagaaagcgatatcactccttctttgcccgccacaacgatttttaaggagaagattaaaccaatacaacgctgtactttgcccgtagagcatgcagggcaacaacaaaaggttctggcattgaaagccgatcctgaagcccctgagtctttcatgttacggccgaagcgtcggcgctgggaaaacaaaatctacacagactgggtgaaaactcagccgtgcgtctgctgcaataagccagctgacgatccccaccacctgataggtcacggacagggaggcatggggacaaaagcgcatgatctctgggtgttgcctttgtgcagaaagcatcacgacgagttacacgcggataccggggcattcgaagaaaaatacggctctcaactggagttgatatttcgttttatcgatcgcgcgctggcaataggcgtgctggcatga

SEQ ID NO: 79482 - DNA, 363 bp, Citrobacter koseri
atgcgcgacattcaaatggttttagagcgttggggtgggtgggcagctagtgatagttcaggagtcgattattcccctatcgcagctggctttaaaggacttctgcctcagacaagcaaaactcgtctttcatgcaccgatgatgatgcccttatcattgaaggttgcttagcccgacttcaaaagcgaaagccttatgagcattcactactggttgcgcattatttgtatggtatttcgaagcgtaagatagcaagatcgcgcaagaaggatgaaaaattgatacgtatcgagatacaaatggctgaagggtttattgatgggtgcctttctatgctgaatgtaacacttgatatggattaa

SEQ ID NO: 79483 - DNA, 864 bp, Citrobacter koseri
ttggatagctctaccactttcaaagtcttctacgatgcagaagatgaagaattagcacagcataaaattgatgcaaaaacgctaagtttatcaataggatcgatggctgaccttatatcgaaggcggatcggaatcttaatgatgggcaggaaacagtcaagttgatggttacagccccagctgctccaggatcaatcggcgttatttattcgatgctggaattggtccctcatgcagtcaatgtcgccaaagccattggactaactgttgctggtggtgctttagctgggggatctgctcttgcattgattcggcaattggggagtagaaaggttatttctgttaccagaagggtcgatacacaagaatcagtgttagagcttgatggcgaaaaaattgtttgtaatgaggctgttgcaaagttagtgactgaccctgagatacgacaagctttagttaacgttgttagagcgccattggatggtaaagagcgcccgatcttcaagattactgatgataacggagaagagattctcaggcttgaaggtgaagaaactgaagaaatcaaaccactaccacgtggcactttacttgaaaaagagatttctattgatgaggttaacgtcagattcattcaagtaaactttgaagggaataaggggtggagaattgattatctcggtgatgagcattcagtaagcctagatgacaatgctttcctttctcaggttcaggctgcaacagttcaattctcgaaagaagatctgtatgttgttgatttagaaacgactaaaacatttactgcgcggggagtaacaaaccgttatgctatcaaaaaagttaaacgtagacgaccagcttag

SEQ ID NO: 79484 - DNA, 663 bp, Citrobacter koseri
atggcgcgtgaatccagactgcgacgggatttacccgtcgatatcgatgtggatgccatctggcggattgcggagcacattggtgccacccataagcagtttcgggcggcgtattcccgcgcgctgaaacgcaccgccgccacgctgcgtaagaaagcggttgctgacatgaaggacggtctggcgccgcgcagcctggatatggtgcgccggcgtctgctttcctttcgccttgatcgtagttctcagtcgaaactggataattttcgtctctggtttggtctcaatgccatcaaggtcaaagacctgaaaggccggattaacgggcggttgaggccacaccatacccggcgggataaatccaccggacggtttattaaggcgcggcgccaggcggaaaacgcgggctttaccccaaagggcagcttgctttcaccgcgcacgtatgaaaacggggaggtggcgcgatcccgtcgggaaaacaggcggacggtgattattcgcgatcctgacacccggcggacccgcgaagcggaaattgatatttatgagccgatgctgaactacatcgaagataacgcctttgccgaggcgatggagattttcatgcatcactttgaaaccgatctgcgcgggcgagtgaaagcccgtatttctgtctga

SEQ ID NO: 79485 - DNA, 555 bp, Citrobacter koseri
atggccgagccattgctgctggggcagtatcacgatgctgtcaccggcgcactgagaaaaattgactgggtgcgtgacgccgatgcctatccggaaaaaaatgtcccccgctttaccgggctgacaacgccggcggtgtatttctccattaacggctgggagcagggcgggggcaacgaggggcagctcaacgttaatttgtcctgcgatttgttcgtagtggtggatgcggccggcgcgggtgtcagccggccggaaattttcctgcgcacggcggccgcagatatcacccagtggattgatggccagctgttcggcctgaccagtctggagcctgccgtgtttatcgatgcgtcacgcgatgagtttgatccgcgcatggatgattatctggtctggcgtatttccttcactcagtccgcggcctttggtgcggatccgtttgcgcagatcaatgccccgctgaatgccgtctggcttggtaaggcgccggatatcgggcgcacgcatgtggacgactaccagctgatatacgaggccaaacccgatgagtga

SEQ ID NO: 79486 - DNA, 624 bp, Citrobacter koseri
atgagtgatattgagggcgatttacaacgccgcctggcgaatattgtccggcgcggggttattcattccgttaagcatgacggtataccgaagtgccgggtggacctgggcgacatcaccaccacctggctgccgctctgccagggcttttcgggtgctaaccgggctgactccaatccgtatgcggtcggggatgcggtcacggtactgtcggaggcgggcgagctgaataatggccgggtgtttcccggctggaataccggcggtctgccggtgccggagggcagcgacagcgagcatatcacccgttacggcgacggtaccgagatccgctatgaccgtgctgcgcatgccctgaccatcaccctggttgagggcgggagctacaaaattatcggaaaaggcacgctggacggtccggtggaaatcaccaataccctgaccgtgcaggggaaaacgcagataaacgccgacatgaacgtggccggaaatatcggtgcaacaaaggagatttcggacggtaccgggaaaatgagcgggatccgcgaaacctacaacggccataaccataaagaaaatggtgacggcggtggtaccacaaatccccccaatcaaaaaatgtga

SEQ ID NO: 79487 - DNA, 1470 bp, Citrobacter koseri
atggcgaatttacatggtgtggaaacgatcgaactgacatccggtacggtcgcggtcacgacaatccagacggccattatcggtctggtgggtaccgcgccggatgcctcagccgggacaccggccgcgggtaccgtcgggacgcccattctggataacgttgtggagtttgccgcgacgatcgccggcagggcgggcaatgtcctgctggttgaggcggtagccggtgttcctgatgcagaaaatcccgccgcggtggatacgacggctgtgtgggacgcaacggctttaacgctgtccatcactctgggttgtgatgacaccggaaaactgacggcaaccccggcagacgttgctgctgccgtcgacgcggtggcggatgtgaagatgacggctaagggtagcggcagcggtattgtcacgccgttcagcctgcagttgtccggtggagaggatgagccgttcccgctgaatatgccggtggcaattgtcggtaccacgatgctgtcccgcctgggtgataagggcacgctgaaaccggcgctgaccgaaatcaacgaccagcgaaatgccctgacggttgtgatccgtgtcgccgaagatgctgacgcagcaaaacaacgggcggcggtgctggccgggattggtgcgctgtcatctgctaaatcggtgacgacgtatcaaccccgtatcgtgatagcaccgggtttcagtgaagatgatgccgtgggcaaggcgctggagaccgttgcgggcaagctgcgggcggtggcgtatgttgactgcgctgcgggtgccacgctgcaggaggtggtgcagcgccgtcagtcctacggcctgcgcaccgagctgctgcgcccgcgcgtgcaggtcagtaacgccgacggccagctggtctaccgaccgtattctgccttcgcggcggggctgcgtgcccgcatcgactttgagaagggctggtggtggagtaagtccaaccaggacatcaacaatatcctcggcgtggagcagatcgacgagttcattctcggcgatgaaaactgcgacgccaacctgcttaatatgcagaacgtctccaccataatccgtcgggccgggtttaagcactggggcaaccgtctgtgtggtaccaacccgcagtggcgttttgaatcggtccgccgtaccgctgacgtcatcgaggacagcattcaggagacgatgctggagtacgttgaccgtccgcttgaccgtgaaaacgccgacgacatcattggcaccatcaatgcctatatgcgccagctggtcgggctcggtgctatttttggtggccgcgcctggctggatgaggagctgaacaccgcagagagcatggcggcgggcgtgctgtacatcaactatgacttcggtccgaaatcgccgactgagcttatcagcctgcgtgtccgggtgaataacaactacgcgcttgaggagatgctggcagcatga

SEQ ID NO: 79488 - DNA, 507 bp, Citrobacter koseri
atgagcgaaaaaaacacgttacgcgtctggaccttcttccggcaggggatccgcattcagggcgcgcatgaattcacgccgccgacgttgtccatcgtcaaaaccgatctgcgcaccggcgcgcaggatgcaccttctcccgtggatgacggcatggaggccctgacctgccagctgaaattctacggtatcgatacggacatgctgaccgcctttgggtttgtcagcggcagccgcccgcgctttacggcctatcagggctatctggcgaacggtaccgcgcttggcaccatcgaggaaatcgaaggctttgtgcagaccgtcacgccggatgcgcggggcaaagacagcctgtctgaaaacgcgatcacggtggatatcgccgtgagctattaccgccagaccaaagacggtcgggagctttttgtcatcgataccgagcgcttcgcgcggcgggtgaatggtgtggatgtgctgtctggccttgcggcaaaagttcgcctttaa

SEQ ID NO: 79489 - DNA, 288 bp, Citrobacter koseri
atgtcttttcctggagaaacccgcgtcatcaaactgtattcccccgttccccttgagaacggcggactgctcgatcaggtgacgatccgcgagccgctcgttcgtgatcgtattgctttttccaaggatcgcggcagcgaagaagaaaaagaggcgcgcatgattgcgctgctgtgcaacctcggtgagcaggatatctggaagctgacggcggcagattatgcgcagctgctggacgcgtttaatgtttttatgctcccgcccggggagcgtccgaaagaggcctga

SEQ ID NO: 79490 - DNA, 1809 bp, Citrobacter koseri
gtggccggactaagccagaaccttaaggccgttattacctttggcggcaatatcgacagctcgtggagccgttcagcgaacggtctgcaaaagagcctgaaggacgtcggtaagcagtcagaaaagctgacgaaagaccaggctaagctcgcggcggaaatcaagcgggcaaagctcgccgggcaaagtcttggcgaccttaaacggcgttacagtgacgtttcgcgtgaaattcgtaaaacggaatccgagcagcagaagctgaaccagcagatgcagaaggcacagcgactggcggcattcaagggagccggtaaaggtctgtttcgccgtgggctgggtatcgccggtcagcttggcggcatggtggcgccggggctggcgatcggcggcggcggggtggtggcttccgcgctgggcaccctgattgccccggcggccaccaacgcggagacggcccggcgtgccggtgtggcgaaaagctatggtgttgacatcccgacgtttgatgcctgggacacgctcgcaaaacagtacgacatgaacggggagaacatcggcgatctgttcgaggagtatctgcacaaggcgggggagtacaagcagaacggcaaacagggatcgctgcaggatgcgtttgaaaccctgggatttaaggctggcgattttgccgggctcagcgacatggcgcagtttgagaaaatagtcgagcgcgcgctcagcctgcaggatgaatcaaaagcctcgtttgcgctggattcactgtttgggggcgaggccagcaagcttctgatgctcatgaagcagtccgggaaaagttaccgggatctgatggacgagcagcgcaaatacaacctcgtcacgaaagagggtgcggaaggggcaatggagggcaaccgcgcggtcatgagcctgcgtaccgttttctcctcggctctggcagaaatctccggccagctgggtaatgagcttgcgccggacattcgccgactgacggacgatatggcggagtggtttaagggcggcgggataaagcggattgtcagcttcctgcgcaatgacctttatcctggcgtgctgacgttcggccagggcattgtgttcgtcgggaaagtggcctatgcgctggcgaaaaaactttcctggcttttaccggatgagcgaagcgatcagcgggatgtcctcaaatcgctggcaatgacgggctcggtcgatatcgcccgcatgacggcacagagcaacggacagggagaatggtttgaccagcagctgaaggaaaagccggatctgccggacgatgtgaaaaaatcctggcgggatacgcggggttttttccgtaacgacgatgacacctttaactccgccctcgataagtatatgaccccggagggtaacggtacgctatttggtccggatggtttcatgaagccggagcgccagcagcctgacgcacccggttccggtccggcggcatgggataattatcccggtcccttgctggcacccttcccgccagcgacatcacagcctgccgacccgcttgccggtaacgctgacgtcagccgggtgaatacccgcgcggatgatgacggccgctgggatacgttgctgcaaaaactcgactcagcggaagccgcacccgcaccccggcagctgacagacaaccgccgctttgagtttcactatgaaatccacggtgcaccgggacaggacgaacgggcgatcggtgatgaggttgtcgacgtaacgaaaaccaaccccatttttaagggtgacagcagcatgctggacggagggcaaatctggtga

SEQ ID NO: 79491 - DNA, 471 bp, Citrobacter koseri
gtgagtgaaattattccggtttttgaagacttcgggcaggcaggagccggcgcggcgcgtggagcacaggctgcccgggtgatgatgatgctgggcgattttgctttctccatcgataccacggcgtataaccagctgacccgcgaggccagctggcgatggagcgagcaggagcgcatcggcaaacaggacctgctgcagtataccggcaagccggggcgaaccgtccggctcgcgggtgaatctcatgcattcttccgcaagggggtggatgccgttaacgatctctacgatctcgccgaccagaacaagccacagcaactggtcagcggcgaaggggatgtactgggctggtgggtggtggtcgacttctccgacacgacaaaccgcttcctgcccggtggcggccaccgaaataaaaactggacgatgacgctgaaacattatgccgacgacatatcaaacccgtga

SEQ ID NO: 79492 - DNA, 216 bp, Citrobacter koseri
atgccgacgacatatcaaacccgtgacggcgacgtgctggatgccgtgtgcgcagcgcgttacggcacggaaaacctgtcttataccgtgacacaggtacttgaagcgaatccggggctggccgacatcggcgcagtgtacccggcgggtttgattatcaccctgccggatctggcaccgccggtgcagaactcagccttcagcctgtgggattaa

SEQ ID NO: 79493 - DNA, 1119 bp, Citrobacter koseri
atgactgaacagattgttaaaccggaatacgcgccggcgttcagcgtcagcgcggagggaaaagatatcacccgagcgctgcagcaaagcctgacagagatgacgctgaccgattacggcggcgccacggcaaaagcggatgagctgaaaatcacgctactctcagaaaccctccctttgccgacaaaaggcgcacggctacgcgtggcgctgggcttcaacgaccagctggtggataagggctggttcgtggtatctggcatcggcagcagtggtccgccacggcgtgttgaaatttatgccacggccgcacccatgaatgcgcaaaaacagcctggagacgtgttaagccagaagacccgaagctgggataatctgcgactggcagatctggttaaaaccgtggccaccgaaaatgggctggtacccaaagtggccacggaacttgctaatatccatattgaccatgttgatcaggtggcggagtctgatgccaacctgctgacccgactggcccggatctggaacgcggtcagcaaaccatccggcgggtactggctttttctccggcagggcgtaacggctaatgcctcaggtgaacagaccggaaaactggttatcactcccgaggaagtctcaaactggtcatacaatgagggcgagcggggaagttcgacggggaaagctaccggcagcagcggtaagtcatcgggcaaaatcggtgtgcgctattacgatgaagcagacggaaagaccaaaaccaccacggttgatcatgacggcccttcgatggctaatccctatacccagcccgcaaaggccactgctgaccagcaggctaaatcgaaaaaaacgcaggcccggcgcaatgagcagaaaatgacgttgacgggaccgtgccgcccgaaacatgttccgcttacggcagaatccggcgtatccacgtccggctttggcgaacgggaagatcgagcctgggtggtggaatcgctggtgtattccctgacgcctgccgggttcagctacacctacaacctggtggttgatattcgcaagcctgccaaatcctctaaaaaatccggcagcaaggataaaaccggcccggattatttcggttaa

SEQ ID NO: 79494 - DNA, 363 bp, Citrobacter koseri
atgaacggtgtaaacagccggaccggtaaacgcctgtccggcagcgatcatttgcgccagtccgtcagcgatatcctttccacgccgctcggcagccgtgtgctggttcgtgattacggcagtgacctgttttcgctggtggacaaccctcgcgacgatcttacccgactgcggattatcgcggccacggcttcagcactggcacgctgggagcccagattacgggttacgcgtgtgatggtcactttcccggccgatgaaacagggtgtgttgtcgatatcgaggggatcaacaaagagaataatcttcccgtcagcaccggaggcatacagatttatggcaagcagttacgacgtaattaa

SEQ ID NO: 79495 - DNA, 639 bp, Citrobacter koseri; identical to SEQ ID NO: 73495

SEQ ID NO: 79496 - DNA, 426 bp, Citrobacter koseri
atggttgcccatggcatcaatcccgcgcagaaaaagcaggaagaaaagcttaaacagaaagacccaacgacagtcaaaacattcgccaaacgctggctgaccgatatcgttgaaaaaagtaaccgcgatccgcgcaacatcactcgcattatcgagaaggacataattcccatcatcgggaagctggaactcgaagaactcacaactgcacacattcaggtcgtgctcgaccgcatcaagcaacgaggttcggatcacgtcgcgctactgacgcgaaacgagcttaaacgcatgctggcctatgcgatttccaggggaatcatcttcaacaacccggcagccgcatatcgcacaagcaacaagccgcgacgtggcgctaacagcagaagagatcggcatcctgctacgggggatctacacctctaa

SEQ ID NO: 79497 - DNA, 603 bp, Citrobacter koseri
gtggcgctaacagcagaagagatcggcatcctgctacgggggatctacacctctaacatgaaccgacgccacaagctggccctgcacctgctgatcatctgcatggtgcgtaaatcggagatgattgaagcgacatggagtgaagttaacttcaacgcgctggaatggcgtatccccggcgaaagaatgaagatggataacccgcatattgttccgctgtcaaaacaggcgctggcaatattcgaagagttaaaatttctggccggagattcttcatacgtcttccccagtcgtaacgactaccgacaaacaacgcttaactgcgcggtgcgtacgctggatctgaacgtcagggactttgttcttcatgacttccggcgtactgccagcacattgctacatgagcaaggctacaactcagactgggtggaaaaatgcctggcacataagatcggcggcgttcgcggtgtctacaaccgtgcggagtacctgaatcagcgccgggagatgcttcagtcctgggcggactttgttgatgcacagattgaggaggggcggaaggtggttatcgggaagtttgggaaggcttatgagagctcataa

SEQ ID NO: 79498 - DNA, 1653 bp, Citrobacter koseri
atgaccatgggcttggataacatggacaatagtaattctggcggcgttggggcaaaaaaagggtttttatttcaggattatgtcgctgccttatatgtaaccgaaatgcttcgcgataaacgaattaaaggtgtatgttgtgaagttaaagacgatgtagatataatttatgaaaatcatgtgcgttttattcaaataaaaacaactgattgtgataaaaaatggagcactaaagaactctgccagcgtaccaaaaagaaagattccaatcgttataatcaagattcaattgttcacaaatcattaaattgtgattcgtcagataaatttaaggcaatgtttggaataatcagcactagagatgttgattcgactctgctttatttaaagattgaacatgataaaagatttgataaaacatcccagagagataaattaattaactcaattacaagacaaataaaagagtttagatcaaataataataacgacattgcatattgggtggataattgtgaatggaatacatttcataacagtgaccacattaaattattatgtttaagtaatataatgaaatgtgctagtgaaaatggattttatcttgatccaaatcatgatgatgaaattatattaaactctattttggctaaagtaactaaactaagcacattatctaaaaaagaatttttaagtaaagataaaacatattttagagtggatctgattacatggtttcaagctgaaatagaacgtattagcgaagaaaaaccgcataaagtgtacaaaacaaaatctaataacttaccaacaatattgaatgaattaaataaattaaaagattccacgattgatactattagcggcacaagctattatcagtcttataatagattgagctatcgatttgatttcatttctacaaatttagtacagtggcttccagagttactacttagaccagaagagttatctacaatcactccaacaaatatgatttccagagtgcgggatgtttataaaaccatcagcgagaacaatcatgatattaaaaatataatttctcgagttttactacattctttagttcggcaccattgttcaagccaaccaattcctgctcatctttacactgaaaagaaaggggatatgatcgatttcgataatattcatatagtaattagagaaaacgatccagatgagatgtggttcggcctgagtttatggtgtgatggaaatatagaaaaaacagttggtttatttgcatctaaggttctttctttcgtagatgtaacatgtgacacacaaagaaaaataatattagacataaaatcagatgagtatttagttaaacatgatgttaattgtgtactggacccagcaacatcaataactgatcatttatctagaatatatttcgttgtttttattggatacattagtgaaacccagacattagaagttaaaaaagattatgaagaaaatctaaaggaagaagttttattaaagtttaaaagcatcatcgaagaactaattcataaccatgattccgttatagatttaaactttataatatatatgtatcccttgccttgtattgacagtttggtggactccttcaaaaataaaatggttggtgatataaatggataa

SEQ ID NO: 79499 - DNA, 2169 bp, Citrobacter koseri
atggataatttatatgagatagcgaaaaacaatttatctgctgataatgaacatttcgatgcctttgaatatataaaaacaataaatacattattagataatccagtccaaaagacacaaggtcgtgatcttacgattcgagcattaaatgaaaaaagtaaattttctcatcatataaaacaactaagagcaatgatcagaaaatctggtttatacccatatttatacagtgaatttgacgatttagactcagatgaaaaattagccactgaaatatatcgctcgccaaatagtgatgattttatttttcattcaatgcaaatgactgtattccatttgttaatgaatggtgctaaccttgccctcagtgcaccaaccagcatgggcaagagtataattattgactcattagtttcatgtgaaaaatataatacaatagtaattgttgtacctacaatagctctaattgatgaaacaagaagaagattacacaaaaaattctccaacatatatgagataatatatcactctgcacaagaaagaaacaatgagaaaacaatatatatattaactcaagagagagttaacgagcgtgaagacttgaatgaggtagacatctttgttattgatgaattttataaattatcattcaagaacaaaaccagtgaaaaatactatgatgagcgagtaatatcgttaaatgtcgcattaagtaagttacttactgtttcaaaacagttttatatgataggacctaatattgattttcttcgtggccttaataacattaatgaagattttattttcctatcatcagattttaacaccgttgctttgaatatttttgaatataatatactgcctaataatgaatcattaaaacaattaacaacacttagtattatagaaaaaaacaatggtcaatttataatatactgtaaatctccaaaggttgcagaatctattgcttcttttttaataaaatcaggggtatcatcagatactaatgaagaggaatactcactttggttggaaaaatattattctcaattttgggtttatacaaaggcaatcagacatggtataggtctacattatggaactctgcctagagcaattcaacaatatacaattgatttgtttaataataaaaaggttaatatattaatttgtacctctacaataattgaaggagttaataccaatgctcaacatgtgattatttatgataacagagatgggaacaatagtattgataaatttacacataataatataaaaggacgagcaggacgtatgaaacaacatttcattggaaatgttcattgtcttgaagaatctcctgagggaaaaatagaagacagtatagttgaaataccaataggactacaagacgacacaacacctctaaatctcatagctggtatgcaagacgaacacgtatctagcctttctgaagatagactggaagagtatttatcagcaaataggctccctaaagaaataataaaaaaacatgcttcatatgaaatcaataaatttttagagttattcaatgaaattgactggttaaaagacagtgaaatttcggatttgtgcttccagagatatcctgataaaaaagcaatgaaccagatcagcaaaaatttactgattacatcccgacaaacatttacaagaaattcggtatctactgagatcgagcatataagcggaatgttattttcatatataaacgcagaaacacatcaaacatactttgactctcaattaagtagaatcataaatagccaaatctcagagccagaaatttcggaacttataaatagagagttaaaaataatcagaaatgtattttcttattcaatacccaaatctttggctttgcaacaagatataatcaatttcatatgccaaaaacgaaaattgaacttaactgctgattatagttttattattaatatttttgaaaaatttcacttaccgggtaacatatccgcacttgaagaaatgggcgttccacttcagatcttacaaaaaatcaactttcctgatgacgccattgtagatataaataaatgcatcgaatatataaagaatgtttattttttaaataaaacactaagtaggttagaacggaaatttattgagagagcattaattatttaa

SEQ ID NO: 79500 - DNA, 543 bp, Citrobacter koseri
ttgccgatgggggaagggttttgtaggcccggtaagcgaagcgccaccgggcatggcgacggatggcggcacaagcgccttacccggcctacgggagagggattttgtaggcccggtaagcgaagcgccaccgggcataacgccggatggcggcgcaagcgccttatccggcctacgggagagaggttttgtcggcccggtaagcaaagcgccaccgggcatggcgacggatggcggcacaagcgccttacccggcctacgggagagggattttgtaggcccggtaagcgaagcgccaccgggcataacgccggatggcggcgcaagcgccttatccggcctacgggagagaggttttgtcggcccggtaagcaaagcgccaccgggcatggcgacggatggcggcacaagcgccttacccggcctacgggagagggattttgtaggcccggtaagcgaagcgccaccgggcataacgccggatggcggcgcaagcgccttatccggcctacgggagagaggttttgtcggcccggtaagtga

SEQ ID NO: 79501 - DNA, 162 bp, Citrobacter koseri
atgtggacgcccgaagaactggaattcgtaaagacctactatggtattgttccaacagcaaagattgcagaaatcctgggacgaacttttgacgcggtcagatgggcaagacagcagtccccggacggcatgatgatggtacttgtttaccgcatcagttga

SEQ ID NO: 79502 - DNA, 1215 bp, Citrobacter koseri
atgcccctcacagaccttgaaatcaggcgctctaagccgcgtgagaagtcctatacactcaacgatggcaatgggctgtctctgctcatcgagccgaacggatctagagggtggcgttttcgctaccgtttcgatggtaagcccaagatgatttcgttgggcacgtatccggatgtaactctcaatgatgctaggcgcaaacgtgatgatgcccgtaggttggttgctggcggcataaatcccagcgatgtacgcaaagaagataagctggcgaagctgagccgcaatcaaaataccttcgaggcaattgcccgtgaatggtacgccaagcgcatagaccgatggtctgaatcctacggcgaagaaatgatgaaaaccttcgaggctgatgtatttccgtttatcgggcaacgtcctatcgccgatatcaaaccgatggagctcatgtcagttctttctaagctggatgaaagaggagcgacagaaaagttgagaaaggttaggcaacgttgcggggaggtgtggagatacgcgattgttactggtcgagctgattataacccggcaccggatctagccagcgcgttcacccctcataagaaagagcattacgcttttctcaccagtgacgaacttcccgaattcttccgtacgctgaacacgtatagcggtagttcggttgtaaagttggcgatgcgcttgcagattcttaccggcttacgccctggcgaattacgccagggagagtggattgaaatcgattttgataaacgtctatgggaagtaccacctgcgcgcatgaaaaagcgtcgacctcactgcgttcctttatccgaccaagcgatcgccctcttggagcagttacgcctcgtcaccggcaactatcggtttattttccctggtaggattcagcacagtaaaccaatgagcgaaatggcgatgaatgtcttgatacgtcgaattggatatgcgggaagagtaaccgggcacggtttccggcacaccatgagtaccatcctgcacgaacagcgctacaacaccgcgtggatagaaacgcagctggcacatgtcgacaaaaactcaattcgaggaacgtacaaccacgcccagtatctggatggccgccgcgaaatgctccagtggtatgccgactatatggaggccttggaaaacggcgaaaatgtagtgcatggaacgtttggaaaaagcgcttaa

SEQ ID NO: 79503 - DNA, 597 bp, Citrobacter koseri
atgcgagaaaacatcctcaacatgccccatcatcttcgccgacaacgtgtggtcactgctgagcaggctgcaatggctatggctggcgtgtacagttgttcacgcttagatgagttgaaagctaaattccctcctgagatctacaacattgcttccagttacttgaggataattttgagtgctgtaaacgctgaagaactacatcccaagagaacatggtctagctcacctggcggagatatcactggagctgatttttattccaatgatatttggccttgggctgttaaagaaatatcagctacagatagttggtttggatgtgatctagatagctctagcgaaaagtaccagcctttacgaagcgggtggggcgactttgctggcaaagatacagcattaaaactgatcgctggaatggctattgcgcttgaaaaatcaggtggcaaatatgttcgcggtaaaaatttgaacaaatccgaagttgctagaagtgcttcaagaagcatattggagcatggcgatggcatcgatgtgacagataaagcattgactatgctaattaatgaagctctgaacacatacgcttccaaatag

SEQ ID NO: 79504 - DNA, 198 bp, Citrobacter koseri
atgtcccaatcccttatccgcttacctgaagttcagcgcagaaccggctatagcaaggcttggatctatcgactcatggctgagcaacgtttcccctcatccataaagattggtactcgagcaatcgctttcattgaaagcgaaattgatgaatggattagtgagcgcattgaatcgtcacgcagccaaacgaactga

SEQ ID NO: 79505 - DNA, 246 bp, Citrobacter koseri
atggctactaccccaacccaaaaactgcccaaattcacctggcttttcctcggtacgccgaaaggccggacctgcactcccgttgttatccgcatcgttgccgacagtgagcaagaagcccgcgagtgttattcccgctgggatcttatctttgccgccaaaattcgctctgaatgttcgctttatcagtacagcagcggcgcgtttgaactggatgttgcgaaattgggaggtagccatgtttaa

SEQ ID NO: 79506 - DNA, 876 bp, Citrobacter koseri
atgtttaacctccagaccctgacagctaaagcccgcgagctgcgcggcaacgtggtaaaagccactaccacgaaaggctcccgcaccatgacgcccgtttacgaacgggaagagcagcgcaaactgcgcgaacgcatccagcagacccagccggactgggttttactctggtgggatattgcgaccgttaccggctggcgtaccagcgacgtgtgcaacttccgttactcctgcatcaactgggaaaccggcattgcaacaatcatcgtcgcgaagcagaccaaagcagcagaagccagggcgacccggaaggggatcgagattgttcgccagcagcgtaaggatgctgcccggcttgctggcgatcacattgcctacatgcaatgggatagcgtgagctgcgacgaactggccgccggcatgacggaagaagaacaggcgatcgtgtttgagctggtggcgaaggctgaagttaagcacgacaccaaacagctgccgccgggcatcatcaagcggctgcgtgaacgcatggagcgcaatcttatcggtgacgacctggtattttcccgcagccagattgaaagtaaccgttgccagtctctggaaggtagcgtgagccgccagacaatctggaagaaactgcacaacgtaatggtgtggtttacccgcgtagtaaactcgcgtctgcgtctgagtgcctactccagccgcaaaattgccgcctttaatctcatgtccgccggcggcgaacaggggttgctggtcgcctctgaaatgctcgggcacagtaacccggcaattacccgaacttacctccagttaggcagtaaggcctccgccattcaatcccgtctggccatggaggtatctgtttga

SEQ ID NO: 79507 - DNA, 204 bp, Citrobacter koseri
atgactcctgtttacgatctggttcgccgggccgacggcaaaaacgttttcagtttcccggccggcggtcgctatctggtggacacgtcaaatggtcttcagtcgatgcgcccccttatggacgacgagatcatttttacggtggagagtgccgcgcgctttctgaggaaaattggttatcaggtaatcccgccagcggcgtga

SEQ ID NO: 79508 - DNA, 315 bp, Citrobacter koseri
atgacgattaaaaattccggcttagctgctggtggccgcgctcaccctgaaatcaggccgggcgataaatggaaggacggtcggggcaacatcgtaattatcgaaagttaccgattcgacagagtgacatattgccgcgaagggtacagctcagcgtgtttttgcacgccagaaagactggtgcgggaatttgaatttgtttcttccgcgccgggcaccggtggaagagatatcgatcggattatgcgggtgcagggcatcgaacgaattcgggttatgcgggaaatcatcagggagcgagggaacagaaaatga

SEQ ID NO: 79509 - DNA, 1764 bp, Citrobacter koseri
atgaagaatgcaccaaaccttaaaaagcagccggcggatctcatggaggagtcaattatctttgccggcgctgatgcctggacgttcgccaaagcatggcaggaaatgaacccgattggcgacacggtgccgccggttgtgctggataaaaagcagctggcggagctggagaatatccggattgtggatgatggccggctctatgcccgggtttgtcgtggcgggcatctgaccgaacgacagataaccattctcgcaacaaagctggcggtggccggcgtggagcgcgcgcaattctactctgaaggttatcagcttctggaggactggacgccgcagttgccgcgcctcaaagccgatgcggaagccggcaaaagcatggtgatcggcaaaccgctgacggatgttaacctccgcgacctggctgataacgaaaaggcgctcatactggccgcgcgttacaccggcattgcgatcaatgaaaacagcgagggcgtatacgtctaccgtgccggcatctgggagaaaacgtcactgctcgagctgagccgcgaaatggtggctatctacaacgagaacaaaaccaacttcagcaagcgcgcgatcaacaacgttatcgacgccctgaaaatcgttatcccggtaatgggggagccgcggcgcagcctgatcccctttgcaaacggcgtctacgatatggaaaccggcgttttctccgaacacagccaggataactggctgaccaaccataacggcgtgacctacacgccggtggtgccgggcgaaaacctccgcgaccacgcgccgaacttccataagtggctaagttacgcatcagatagagacgcaattaagatgcagcgcatcgctgcggcgctctttatggtgctggcgaaccggtacgactggcagctgttcctcgagataaccggtgagggcggcagcgggaaaagcgtctttacccatatcgccacgatgctggccggcgcgcataacaccgccagcgggaacatggcggcgctcgacagcgcgcgtgggcgggcgcagttcgtcgggaaaagcatgataacgcttcctgatcagcccaaatattcaggagagggcaccgggataaaagcgataaccggcggggatgccgtggagatagacccgaagcacgaacaccagtacaccgccgttctgcgggcggtggttgtggccacgaacaacacgccgatgattttcaccgaacgtgctggcggcgtttcccggcgccgcgtaattttccagtttaaccggcgcgtcagcgaagaggataaggatcccgaactggcagaaaagatatccgctgaaattccggtggttgttcgtcggctgctggcaaccttttcggacccggaaaaagcgcgggcgctgctgctggaacaacggaacagcgaagaagcactggaggtgaagcagaaaacggatcccctgtacgccttctgtgcgcatctggagcgcctggctgattgcgtgggaatgctggtgggcaaccgtaacccgcctcatcgcccctgcatttacctctatcacgcttatctgacgtttcttgaggctaacggtttcgacaagccgctgacgctgaataaattctctgagggaatggaaagcgccatgcgggagtttaatcacgagtaccgcaaggagagaaagactcgcggcgtggtgacgaacgtcgaactttcagagagtgcggaggactggctgccgcaggcgcacccgttagctgaggataaaggataa

SEQ ID NO: 79510 - DNA, 174 bp, Citrobacter koseri
atgagcaaggttaacgttaagcccgttttgctgaacggggagcagattcaggctctgaaaaccattcaggatagggaacgccagaagtcgggcatggggttcgcgccgtcaatccatgctgttgcgcgcaaggtatttgatgcggggctatcaaaaatggaggcagggcaatga

SEQ ID NO: 79511 - DNA, 786 bp, Citrobacter koseri
atgagctactcaatcaaaattgggaaacacagcatcgagctggcgggttatgccggtaaggttgttgcgccaaatacccagatggccgctttatttcgtggcatggcgggcgaactcaccagcctgaggacaacggcgcagcaggccgaagctgaggcggatttgctggacgttatccgcaacgatccggacttgaacgaacaggcaaaaaaccgcagggcaggtgaagcccggaacccggacacgctcaaagactttacccgcggggtggctgccgtaagcgagcaggccgcaaacattctcgattacctgaagaacaagctcccaccggttaatccactggcatctgatgatgttcagggattcatgcgtgacagcgaaatgcgtcaggcattcgcccgactggatcgccgcagccaggaaaaaatgctgctgtcgatgcacagtggaaagcatcaggagctggcggacgccttactaagggcgcacgcagtgtgttcgggactcgatacggaacagctaaatcgtctcggcttctcccgtattgcatcagagaacgggcaggtgattagcgcggttgccgatctggtcgacgcggtaaggaaggacgtcgcacaaattacagctgtgcgaacctggtataacaatctcgtttatgggaagaacgacgatccatcagacgtacagccacgcatgaccggccttgaccagttaagcgaacatgtcagcgcgatgctcaaaggcagccagcagcagacacgttcagaagataagcaggccgcctga

SEQ ID NO: 79512 - DNA, 522 bp, Citrobacter koseri
atgctgttaagtaaatcagcctacgccaggcatatgggcgtcagccggcaaactgtttacggctggatagcccgcggtgaaattgtaatttcagacgataaagtggatgtcgaagcatcgcaggctaaacaaaattctgctggtgctggtgctggtgctggtgctggtgctggtgctggtgatcatcacaatgcaatgacgtgggcgcaggccgccgcgtgggtatgggggcatgacggcgggaaagcgctgccgggtgatattgatgctggccagaggatagaggcagctgccgctgagctgggttttgatgttcagcacgagcccgatgaacaactgctgattctcttccggccggatgaagaaacccacagcttctatggcaaagaccgtgcagcaggcgctttacggtttcttcgttcggagctggcttacgttgccacaatgcaccccgatacgctggatgactggaacaaaactggtttaatgtcactctgcctgcaggacggcgaaaaactgtaa

SEQ ID NO: 79513 - DNA, 2550 bp, Citrobacter koseri
atggatgctatgttaaatagccttaagcttgcaaattcagctaacgaatcaataagcgatgaaacgtatgaacgcctcaaaagactgatttcaacaggtaatgccattgtatttgtaggtgcaggattttcaaaagaatcaataaacataattggaagtaccccgcctttagcgaaagatcttgctttgcaaatttcaaataagtcagcaaactatttaaaagaaattggtgccgactctcattatattgaagaaattaaacaatgtgatgatttaatggtggcttcagatttctttcttaacaatatccctcaaaaagacgaacttctacaattacttaaagataattatacaattaaagatgttacgcaagagcagatagatgtcttcagtatgaagtggcgaaggatatacactacaaactatgacaatgctattgaactttctttgataaaatcaggaaaatcggtcactcctctaacgctcgaagatgcaccaaatcagtacaagtcagctgaagatatctgcctccacatcaatggaagaattgagcgttcaaaagaaagcgatcttgattctgctataaaactaacaacatcatcctatctttctccggagcagttcctcacatcgagttggtataggcagtttaaagccgatatagacaatgcaagtgctatagtttttcttgggtattcgatgtatgacattgatattcagaaaattttctttaatgattcctctattaaaagtaaaaccttttttattaccagggaaggtaccaccaaattccaaaattataagttagccatgtttggagaagtgataaatattggtgtaaacgccttttcccatattgctgccaagtgcattgaagaatcacatcaagacaaagaagttggtttgataaattctttagagctctatactcctggggaggaacatgatgaaataagagataatgacatcgccaattttatgatctttgggaaagtgagcgatcgatatatagatgaagtcactctcaatgataatatgcatgacaagataattttacgtgaagaagttagtaagattattgaacatattgaaacagataatgatattttaattgccagcgatttaggtaatggcaaaagtataatgactcgaatgttaatgtcgaaattatcaaggaaaggatatctctgtttttattatttgtataatgaatttagcttcagtaaggacattgaacgattatctaagttggggcaaaaaattgttattttcatagatgattatagtaactgcattgatgatactcgttatgccatagaaaaccgtaaggacaatatacagcttgtactgactacgcgtcattttggctatgaaaatactaagcaacatttattaacaatggatatgagtagttttaaaactcatagcgtcgattatttatcagattccgaagttgataatttcgtacatatagttgatcacttgggggcatggggcgaaaaagcaggcctttctaggcatgaaaaattatcagaacttgatgaaaatgctaggagccaactttcgttcttgctattatcaatcctcaaatccgaagctatacaatctagaattcgagaaatatctaatcttgcactcaatgataaagaatataaagaaacagtttttgccattctattattagatgtcataggtctcccattggtaagatctttaatttcagatgtggcggttaatgaaaaaatttacagcgcggagtttactgaaaatgaaggcgttaaaaacttattcatcataagtaatggcatggttaagactaaatctagcacgctgtctagattccttatagcgaatatttttgaacataagtatgttgtaaatcaattgcttaaggttattgagcatttgtatgttattaataaagatgcaaaagatcatagattacaaactttgattacttcactactgagattctctattatcgaaaagcttctcccacaaagacgtgtggaaataaattatttttatgagaaagttaaacatattattcccaatctaataaatgatccgcatttctgggtgcaatatgcaatgtctatgataccattcaaagactatccaagtgctgatagatatttagccactgcctattccttggctgcaagaaaagataactatcatacaaaaaatattgatacgcagcgtgcaagattacatcttttggtctctcttacaaaaactggaaatgaggcataccttgagtttgaggccggtgacaaccttatacgaattattccaaatgatatttataaataccgtcaggtacttagatatagggacatatatgaaaaagtttatccaacttttaatgctaaacaaaaggtattttatgagcatgctataaaacgtattataaaagaatcagaaagccctgagttggttgaggatttaacttataaaattggtgtgaattggctcgataagttgcgtggcaatttaaaattgatagtggaaaatatacagaaaaatagacctaaaggtaaaaaataa

SEQ ID NO: 79514 - DNA, 528 bp, Citrobacter koseri
atgcatcatttttatgaactggcttataggtgcacctatttttcgttaaatgcgataaacgaagtctatgaaagaaccgtcgatgagttgtcagaaaccggatcgacaccgcctgtcaaaaatctccaggcgctcaatctccagaagatgattcatgcggttgggttgttttcaatttttgaagctcatttacagcggaggttgggtgccaaaaacggttacagagaagcagagttaatacttgaacaagcagggcaagtagcattgaaggaggatttccataattgttatcttgctatcaacgccttaaaacatggtgatggagcaagttataggctcttgctaggtaaaattagctcattaccttttgtggtggaaacaccaaatgtacctgttttcgaagagggtgatgtgtccggcattgatgggctggtgaaagttgatgatgcctttatcgaatattgtcttgaattaattgaaaaagtctctgtttgcattacaacccatcgccctgatttcatgctttga

SEQ ID NO: 79515 - DNA, 348 bp, Citrobacter koseri
gtgagctgcaagccgcagcgtgagctgcaacagctggacgcgcaaagcccgctgattgtcgatgaaggccgttttcaggcatcctggcgcggcaagatgctcgacctgacccccgcagagtttcgcctgttgaaaacgctgtctcacgagccggggaaagtcttctcccgcgagcagctgcttaatcatctctacgatgattatcgcgtggtgacggaccgcaccattgacagccacatcaaaaacctgcgccgcaagctggaatctctggacgccgaacagtcgttcatccgtgcggtatacggcgtcgggtatcgctgggaagcggatacctgccggattgcataa

SEQ ID NO: 79516 - DNA, 174 bp, Citrobacter koseri
atgtctgaagtcagcggttacaacactggtaatttcactccagagtcagcgggagttgttgcggataagcttaatgaaattgcagagctaattcgtaatgatccgtctcttctcattcagttggaatggaaagagtcagaggattcaaaagaaatcagcatcatgtataagtag

SEQ ID NO: 79517 - DNA, 342 bp, Citrobacter koseri
atgtcgagcattgcttcgtggagctataccgccacggcgaccatctggcgcaaactggaaggcaatgacgaatacggcgacccgctaggctatgccgaacctgagcaaatcatctgtgattacgagggcggactcagcaagaagctagccagcctgggcgctgaaatcgtcgtgaagaataccgtctggacggagtttgcgctggcggccgctggtgattacctgctgattggggtttcgactgaagcagacccggttgtggccggtgccgacgaggtgcgccaggttatatccgctacgccgacacgttcgaacgcctggcggatgattacgccatcctga

SEQ ID NO: 79518 - DNA, 174 bp, Citrobacter koseri
atgacgtacaaatcagttaagcacgggctgccgcgctctttcacccgcgtctgggtgatgaccgacaccgggcgggagacgactggccacgtgaaatcggatggcgagtggttcatcaactgcccgcgcatccgggcgaccggcgcgaaggtgctgcgctggaaggagggctga

SEQ ID NO: 79519 - DNA, 1197 bp, Citrobacter koseri
atgaaacgcaaccgcgttaacgtgctgaccgtcgtcaactccgcttcaaacatcaccactgaaaccatcgacggcaagccacatatcgtggttcgcggcatcacgcctgtcgtggacgatatcgtgatgaaccggaagttgtacccggcagcagaaatcgaaaaggcctacaacacgctcgagcgtaacccgatgccgctgggccacccgaaagtggacggcaagcatgtgtcggcacgtgatgtccgggcagtgaatgagtaccacgtcggggcatggcttcagaacgtcagccacaaggacgggaaggtgatgggcgacatgtacgttaaccgccagtacgccgagtccagcgacaagagcaagcgcctgattaaccgtttggatgagatgctggccggcaccaactccgacccgattcacatttctaccggcctgctgtattccggcatagccgccaacggcgaatcgaagggcaagaagtacaacgagatcgccaccaacatgatgttcgaccatgtggcggtgctgcttgatgagcctggcgccggaacgccggaggagggcgtgggcatcttcgtaaatgctgagggtgatgaagtcgaaatcgaggtcgtcaatctcgaagagtccaattccccagaccagcaagaccccgcattcaaatcatttttcaaccagctaaaggcgttattcggcgccaacagcgattcaacccagaaggaaacagacccgatgaaagagctcatcgttaatgcgctgaaggccaaaggtaaatcggttgacggtaaaaccgatgccgaactgatggacgcatacaaccaaatgctggcagaaaacgccggcagcaaagaagaaacgcctgaagagaaggccgcccgtgagaagaaagaagcggaagacaagaaggctaaagagcagaccaccaacagcgaagagatgccagcgtgggcgaaggtccttactgagcaggtctccgcaattaatagccagatcaatgccaactctgacaaagagaaaggcgaaaagcgcgccgctgtaaagctggcaataaacatgagcgacgacgaagttgcagatctggacggtaaggcgctcgacgccatgtacgccaagtgccagacatctttcggcctgaacggtgcattccgcaaccaggctaccaatacccaatcagtcagcgaaatgccggagtaa

SEQ ID NO: 79520 - DNA, 183 bp, Citrobacter koseri
atgagaactgttcaagaaatacttgactctatgagccctgagctgcgcaaaaatgctatgcaggccctagaggagtccagcttctttgcagcatctttggctcaagttccttccccgtctgctttaaatggaaaggcagaaacattagatagctttatggaaatgcctatttcctttgcttaa

SEQ ID NO: 79521 - DNA, 570 bp, Citrobacter koseri
atgaaccggcaagaaatcgaagttgttaatgaacttgcgctagtttcaactcagcaagaacttgatgctttagaaataaaattatctctcaattttttaagtgaagctgacgcgctacagattgaaagccttcgtggaaaagtgctggattggagcggttggttccaaaatgaacacgaaaatcttaccaacaagtttaccttgtcggtatcctcaaagggtagaccaccgatcaccatcggtgccgcagtgttctcttatgatatggaaaatcagttggtcaacatccatatgattgagcactttaagcgacaagtccatgatgatcatcttgttaaacgtatgggttttgtagctcttaacgttgctcttgtttttgccaggacagcgaaagcatctgtgatacgcgtggttaatcctttaccatacgctgttccttactacaagcacctctcattcgactttgtaaaatcagacttgatggagtctacgcttcaaaacatcgatgaaacgttacgccgtttaaaagaatcgcgcgggcaacatgattttgaggctgatgatgattaa

SEQ ID NO: 79522 - DNA, 1476 bp, Citrobacter koseri
gtgagtaacactacagaaatgcaagtcctcgctgggctcattgtgaacagccttaacgaggttggccgcgcacgccagttgtatgcatcagggcttgggaagtcaggtaacacgaaacgatatcatctctggtgcgaatttggttacccggagcgactcgacttttaccacttctacaacatgtatgaacgtaacggctcggcgttcggcgcggtgcataaattgctcgatgcatgctggaccgataccccggtgatcgtcgacggcgatgagacgaagaagtctaagaagtcgacgccgtgggaaaagaaagtcaccaagctcatgaagaaacattgggcgaaagtgaaggatgcggatcggcgaaatctggttgggcattactcagcacttacccttcagtttgcagacagcaaggaatggtgggagcccgtcgaccgcagtgtaatgcgaaacactcgtgagcgcggcctggtcaagatgattcctgcatgggaagcgcaggttaaacccggtgagcttgagcaggaccaaaagtcgccagactacggcatgccgaagttttactatttccaggagcaacaggtcggcgataacggaaacatcactgggccaatgcggtcgattaagattcacccagaacgcatcatcatgttctgtgagggatcagaagatgaaacgtcgctggctggcattccattcctgcgagctggttacaacgacctgctcgatatggcgaaaacgtccggcggtagtgcggaaggggttctgaagaacgccagtagacagctcggcattaacatgtcgaaggagacaaatctcaagaccatcgtcgacgaggcgaagagaactggatattcaggcttagctgaggcgctgaatgctgctattcaaaagcttaactcaggtacagattccgctctggttacccaggatggggaggcgaaagtactctctgtcgccgccgccgatcctggcccaacatggacagtgtcagctaaccagttctcatcttcagttcagatgcctttcaccatcttgtttggtcagcagacaggaaggcttgcgtcagatcaggacaaaaatgactttgccaagcgctgtaatggtcgccgcaacgggtttcagactgaccgggcaagtgcagttatagaacgcctgtggactgtggaagttatcgaacctccgaagtctggcgaaatcacgttaacctggtctgatctactcgcgccaagtgagaaagaaaagatcgccaccatgaaggaaatggcggcagtcgcgaaggatactcaacaggcctatggcacaccggctgttgacgaaaatgaggtcagggaagcaggagaacttgagccgcgtgaagatgttaagccgcctgacccaaataaaaaggtaacgaccgatgatcctctttccgatgacaccggagcaaaagacgaaagtagggacaccggtagttccgcgcagcaaggttga

SEQ ID NO: 79523 - DNA, 396 bp, Citrobacter koseri
atgagcaggttaaccgcaaccatcatcgctgtggtcatctgcatcatcgtatctcttggctgggctgttaatcactaccgcgacaacgccacagaatacaagaagcagcgcgatgttgccgcgctggatgcgaagtacacacaggagttattcgatgcgcaaaacaccattagcgatttgcgtagggatgtcgattctggcgctaaacggctgcgcgtcgccgcagcctgtgacagcgtgcgtaaagccacctccgcccccggcgtggatgatgcagccagcgccagacttactgacgccgctcaacgggattatttcaatctcagagaacgaatcgcaaccaacaaaatcctaattgctggtttgcagaattacattaaaaatcaatgtcaataa

SEQ ID NO: 79524 - DNA, 489 bp, Citrobacter koseri
atgaacagcaccctgcgaaataaaattgctgcctccatcggtggcggtgcgattgcgatcgcaacagtcatgctgtcaggtaaggatggcgttgagggaagggagtatgtcgcataccgtgacgtcgttggtgtaattacagtatgcgatggacacacaggttcagacatcattcccggaaagcgatactccgataaagaatgcgacgcactaaccaggaaagatttaacgcgaactgccgcacaggttgatccgcacatcaaagtgccgactactgaaactcaacgagcagcgatttactctttcgcgtacaacgttggcgctggaaacttcaagacctcaacgctcctgtacaaaatcaaccagggcgatatcaaaggtgcatgcgagcagttaaggtgctggacttacgctggcggaaagcagtggaaagggctgatgacccgccgcgagattgagcgcgaagtttgcctgtggggtgagaaatga

SEQ ID NO: 79525 - DNA, 261 bp, Citrobacter koseri
atgcatcacatctatcgcgtacaagatacacaagtggccaactttaggcttgaagcacataagcaccacccagcactttcaattcatcttatcagtactggaaccagcattaatgcaggcaaattctttaactctaatattgaggtttttgttgcgatttctgacacccaaacacttggcgctttgaactcagatttaatgctaaacgcagcaacaaaaaatagcttcaccccgctaggaagcgcagagttttatatttga

SEQ ID NO: 79526 - DNA, 489 bp, Citrobacter koseri
gtgaatgacgcagccaaagccgagaagcaacggaaagataaaaagcgccgacttgggggggagaaggccgaacgtaagcgtctggctgagcgttgtcaggcagtgaaaccactcagctacttcattaagcaggcccagcaggcctttaacgagttcatccgctaccgtgacaggcatctgccatgcatcagttgtgggcgtcaccatgaagggcagtatcacgccggtcacttccgcacgaccggcgcaaaccctgagttgcggtttaatgaagacaactgtcatcgccagtgcgccccctgcaataaccatctgtcaggaaacctaattgcctatcgaccggcgctgatcaccaaaatcagccaggcccgctttgatgcccttatggggccgcacgaattacccaaatggaaacgtgaagactacatccgaattcgtgatgagtaccgggcaaaactcaaagagttgaagcgtcaggaggctgcatga

SEQ ID NO: 79527 - DNA, 249 bp, Citrobacter koseri
gtgagtaattcagctttgcaaacgtcagaagataactggtatgacattgtaagacggtctgacggctgcgtggtgtttagctttccttcgtcgggcaggcatcttatctatcgcgtcaatggcatggtttccatgcggcctttgctggatgatgaagaagtctttactcccaatggctttatgcaatttattcgccgtctcggctaccgggtaacgccaccttctgataatatgaaatcaacggtctga

SEQ ID NO: 79528 - DNA, 198 bp, Citrobacter koseri
atgaaaactatggtgcgccgggagatccccggcgttctcaacctgagaaaaaaccattttcacttctgctggtcaaacagcttcctcaacatccaccagcagcaggttttccagctctataatccgattggtggtgtattgcagaagttgatccatcatgcctcctgctgcggtgctgctggcagtggcatccagtga

SEQ ID NO: 79529 - DNA, 633 bp, Citrobacter koseri
gtgctcaatgtatccgaccatctactctttcttatcagcgcagtaaacctgaacatcaacatcgcgatccggcatccgctcgcttaccggaatccatctgcctggcaacttgtaagcgtcacttacaggttcatcgttctgagcatcacgcagagcacaaaagactttattacgcaattcgttgaactcgtcagagcgaataaccctgcgccagtccagcgcatgagcgtacaggaaatcactggcgaggttagcaccacgaccagcgcgcaggaatcggcaactaacgttgatgccgttgccgacgatctacgcgatcgcattgatacagcaagctccgttgttcaggcaaaagccattcgcgtggatatcgaatcacagaaagtgttgctgggaaccgccctgtacaccgaactgaaaaataaggcggtgaaacgttactaccaggtcgatgcgcagaacaaggtcggggctgtgatcaactcacttccaaatcccggcgaaccggaagccacagcgatgttcgctaaagctgaaagtacgctcaccgcagccaaacgtcatctgggcgatgaactgtatgaccagttccgcatcaccctggacgacatgaaaccggaatacgtgggctaa

SEQ ID NO: 79530 - DNA, 621 bp, Citrobacter koseri
atgaatcaatacagtctggaattagagcacgctgagttccatgaaaatggcctcgcatcgaaagctggctgggtaaaaacctatatcgcacatcctgagacgggtgagtttcttggagcgacgatggagaatgttcaaattgatgtgagcgtatcagccggagccttcacggatgcgccagagttgccgtctgagccggggctggctgtcgtgagaagcaaagatggaaagtcctgggaaattgttgccgattatcgtggcagcacagcatacagcacggaaacgcgccagtcgtttgagattgatttcactggtgagttgcctgagtcactgacactacaggttccacaaacggaatttgacaaatgggacggcaaaaactgggtgacggatacagatgcacaaaaggcatcggcagtgaaagaggccgaaaatcaaaaagcagaatgtctgcacgaagccagcgagaaaattgccgcgttacaggatgcggcagaccttgatatcgctaccgacgaagaaaggtcgcaactgctggcgtggaaacaataccgcgtgcaactgaacagaattaatcctgaggatgcgccggatattaactggccggagaaacctgagtag

SEQ ID NO: 79531 - DNA, 633 bp, Citrobacter koseri
atggcggcacaggtaccagttgaaaaaatcatcccggcgtatccttttgtgcaataccgcgatgatccaaatattgtggcgttctttgacgcttataacgagatagcgcaggaataccttgactcactaaacggcttggggctgccgtgttggacgtctcctgcgctgacagggcagctacttgattgggctgttttgggtatttacggtgaggaaagaccacttctacaagtatcggaagatgctattgctcgcggcgcatataacaccattgagtacaacagcatcccctatgctggcatgaaaaattatgttccgggttcggcatcttatgttcctgacgattatttcaagcgaatactgacatggaatttttataagggcgatggctcgcactttagcattggctggctgaaacgccgtgttgcgcgttttattcacggtgctaacggcatagatccgccattacaaagtacgttcgatgtcagcgtaacggtggattcaggaaggttctcgattgttattccagattacgggaataatgttgggtatttcctcaaagacgcaatcgatcaggcgttggtcaaactcccctttatttacacctattcaacaacggtggttgaacaatga

SEQ ID NO: 79532 - DNA, 1233 bp, Citrobacter koseri
gtgtcagatctaccaattatcatgactgaggcgggggcgcagcccacgccgccaaaaacgctgttggcgaatcttatcagcagagttgcacaaaaagtaccaggttatacggcaaatctcccagcagggttgatcaccgaccttgcaagcaccgcaaccggcgctatagcactcatcgaccaggctcgcgtcgatctgatcaactctgtttcgccatatggtgccaatattccgttgttgatgcagttgggcaacacatacggagtgcagaagggagcggaaacgaacacctccgtttatgaggtcttcagtgggcctccgggctttgcgatcccaaaggggtttatcatatctgacggtaactatcagtacgctgtagtgcgcgatacggtaataccatcaagcggccagacggaacccgtttattgtcttgcgacgatagaaggctcctgggccgtaccggaaggctcggtaactcagatcatcacgtcagttcctgcctcgcagaaaattacctgtacaaacctaacagcaggtctccccgggaaaggtgagcaatcctatgcttcatatcgtggtcaggtgatgcaggctggcatgtacggagtgcagggaactgcggactgtgtacgtcttgaattgaaaaatgttgagggtgtacaggaaaacctaatctcataccgccaggccgctctcggtaaatgggtagtggtggttggcggcggcgatccttatgaagttgcgtacgcaatttataaagcggtaccggatatatcgactttaacaaatgaggtagaaaacccatcaggtgctgatgtggagaaaaaaacgataccgatcgttgtttttcctgacacctatcaggtgccatttgtcgttccatcatcccagagtgtcactgttctgattacgtggaatacggcatctacaacatatatcgatcccgacggcatcgcgaacgcagtgcaggaaaatatcgtggactatatcaactcgattgctgttggcgaaccaatcaatatcttccagatccaggaggttttcctccagtcagtttctggcctggtctccccgtcgctcgtatcaatgatcactattcaggtaggtattaacggcgtcattgtaccgccggcaccagattcaagcctggtgttcggggacacgtacgcttatttcgacacttcggtagataaaattcaggttcaacaatatggcggcacaggtaccagttga

SEQ ID NO: 79533 - DNA, 531 bp, Citrobacter koseri
atgaaaaaattgcttattttcctcgtattccctttccttacgcatgcaaatgaatatggaatgaaaaacgaacattccaaaatgattcaggccgcttgctcatcgttaatgcgggatatattgcaacaatatggaaaatcttttttttgcaaaactgataacaaaatggcggaaaattctaatgctgcattccttgtggaaaataccaaccagaacgctactggtcatttaatgcgcttttcagatgtttattatgatgcttcaggtagtcttcattattcatacaacaccaatgacctagaccaagccattaattacatcaaggttggtggtggattaacagagaaacaacagtctcatcaaatttgtagaaatgcggcgaacgcaatgaaacaaaatgtagataaaaccaataggcagtatatgaacaaagaaatatcccaagaagaatatgacgcaacacataaagctcagttgcaagccatttcgaacattgaaaagcagtgtccggaaggtattgttctcggataa

SEQ ID NO: 79534 - DNA, 348 bp, Citrobacter koseri
atgagaacatggggacgcgtcactgacgagaatggcaataagacatgggtcgccgtggagtcagatgccagcggagatttttcatacggctggctgaccactctgatccagacgcttaagctgggtcttggagagtcaccgttttatgcgcagtatgggatccctgcgcaacagtcgattgtgcagcaggtctaccctgattactacgtgaacatgacacagcaacagtttgccgggtactttgcgtcgcttgcgatctcgaagatagatgaggcggctaaccccacctacaacatcgatgtggtgttttataatggagttagctatcaagaaaatattgcggtttaa

SEQ ID NO: 79535 - DNA, 714 bp, Citrobacter koseri
atgagtaatgcacaaaaatttccgttcattaaagctttttcaaacgctattcaaacgggggcagaagacagggctgcaatcgccggacgttctcttccatgccatgttgtatcagtcaaggggcagatagttacggttcagttcgatatgctgccggatggcgtgaactacccgcaaattacgattcccgtcgcgacatttccctatattcgctatccaatacagattggtgatcggggggttacagtggcggcggaagtatcgcttcgcggtgtttccggtctcggtactggtattgctgacagagctttcacaacgtccttgacgccgttgttctttgtaccgatggctaatacggggtggtcagaggaagacccgaataaaatcgtattgtatgggcccgacggggcgatcctgaaaacagaggacggcgccagttctataacggttgaacctgggaacatcaccgagaaggcggatgaaattcacttagaagccaagaacattttcctgaagggggtcattcatctgaacggtacgattgttcaggatgcgagtgaaatgggggataccacagcgaccttcattggtcctatggttgtgactaatgacgttattgccggtggcgtgagccttataaatcaccctcatgacgttaaaaatgtccagggtggcagtagcactattcagtctgaaaaaccaaaagcggagtag

SEQ ID NO: 79536 - DNA, 1005 bp, Citrobacter koseri
atgcgttattaccggctagaaattacggataaggacggcaacacacctcttgcattagacggtacgccgattggaccatttgatacgttgcagtctccgggatcggggcttcacattgaatttgacgccttgatcaccggatacgatgtggtgagtagtggcaccgcagtagcaatttatggtgtgccggtcacaatgcttcgacagagcacccagcttgcgggatatcagttaaatattttcgctgggttttcaggtggattaccattggaaaactcaaaccagaagggactgataatcagcgggcaaatttacaacccttatgcaaactggattggcacccatcaatcattgaattttatcgtgaatccaagtcctctactgaatgacaaaggacaggccgccagcatcacgcttgatggtaaaaaaggggagaaattaagcgacgttttacagagggctctgacggctgcttacccgggttttactctggaaataacaattagtgatcgtcttgttctggccgaagatggggtcggggtctatacccgcctcggacaacttgcggccacaatgagaagtcagtcgttttacatgatcaaccagtccgactacacgggtgtccagtttgttatgcagaaccgtacaatccgcgtattcgacaataccgtcggtgtagcaggaggtatccagatccttccgtgtgagcttatcgggcagccaacatggattgggccggtaagcgtgtcgttcaagtgtccgctgcgtgcaaatctgcgctgtggcgacactgtggaactgccgcataacatcatttctggccccgactcactgctttcagttaacacagaacggtcattttcaatgtaccgggacgcggtgaatttttctggaaaattcctcatcacctcggtgcgccacgtcggggaatatcttaatccggacagcaatgacgcatgggtaacaatatatgaggccgtcgctctggcgaaaaatacgacatga

SEQ ID NO: 79537 - DNA, 264 bp, Citrobacter koseri
atgacgacgataccgtttactccaaatggacgagatcccttcatgtttcaggcgactgttggtggggcaacgctatttggtactgtcctatataatatttacgcgcaacgttattatctgaaactgacagacggtcaggggaaggatgtttcgttcgtacctctgatcggttcgccagatgattatgatatcaatttggttctgccgtacgcgcccggttctctcgtttatcgagtcagcagcaaccagttcgaggctacctga

SEQ ID NO: 79538 - DNA, 675 bp, Citrobacter koseri
atggcacttaattattttggacaggcattcaggctggcgtatgaggtttctccgatcctgctggtggatggaatcgctgccgatatacccggtggtgtgatgcctattgcagtattgactgaaggactcagtatcgccaatggcctgcttcacggtgatataggttctggtcctactgcacatttcacaccaatggccggtacaacgctggtacagcaggatattgggaacctgaatttctacaacatggctacggcagcaaattcggttatcaacaaaccgaacaaggtgattatgcagatgctgcgcccggcatccactcaggacggtggatatatgacgaaagggatgacgtttactgcgttaaaactggcgctcgataagcacaatcagagaggcggttcgtacacagttatgactccgtcgttcatctacacaggctgcctgatgcgttcattcgtggatgtttctggattttcggatcaaaacaaacaagtgcaggattcctggcagtttgagttcgaacagccgttgttgacgatatcacagcttgaagctgccctaggaagcctgatggataaatttgaccgggggatgccgtcaaccttcccggcagacaccaaatcatggtggagcaatggtgatcaaatatctgctattccgacttttccttag

SEQ ID NO: 79539 - DNA, 1857 bp, Citrobacter koseri
atggctggtgaattacctatcctgactcttgatatcgatgagtcgaaaatcaaagcactggaagacgtttctgaaaaatttaaagcagcttttgctataggtccgggtggttttcctgttccacaaccagtatcgccacctgcaaaccgacctcgggaaagcgaggaaaatagcaataaaaaaggtgatgacggcacattagataagttttttaaaagtcttaataaagagtctcaagggactcttaaaacgttcaccctgatcaacaaaacgctcgctgccactacatcgaccctgaaaggactgttcaccactacggtatcgtggggagcgaaagttgctgccatcactggtggcgggatgtttggctatgggtatatggcgcagcgggttaccaggcagtaccagacagccctgggcatgaacgtcagtaccggagaaatgcaggcggccagtaatgtatatggttcgcgcattacggccacagacagcattatgcaggcactggcagcggcacagaacgatccctcaaatccgcactatgccgggctgatgagtctggggatcaagccgcaggatggcgctgctgctaaccttccaaaattactggagggagttgccagtctgctgaagcagtataaagacaccggggtatcgcagtctgtactgaaagggtatggccttgacgggctgatcgatgttgcaacggcgaatcaggtgctggcaaatagtgaccgactaccgcaactgaataaacagtacgcggaacaatcccggcgccttgatcgggatatggggggaggtactcagcagagctatcaggatttgtcggcgaagtttttgtataacgcagatcgtatcggtaataccttcctcaaaacgctggcacgcctgaataagccgattggcgacatctccgacagactcaccgccagtatcgaaaggtttttgaacgggcgaaatggtcaggcgttgttcgacacacttgccagcggattgcaaaagctgggggactggcttggtagtgacgatttccagacagatctgaagacgtttgcggactgcgttaaacaggtcatatctgttgttggtgacgccatatcatggattgccggtacgacggggggtgtaaactttaacggtaccggaacaggagctgatagcgccgatcctgcactggttaaatttgggaataaataccttggcggtcagttgccgggggcgaaccctatgactaaccagtacacagggatcttcactgaagagaaagcccatgaagacttccgaatgcctgaggatctgaagggcaatattcagaatttcgtcaatctggctaatgatacctataaacttccgaaaggcatgatgcctgcaatagctcaagccgaatcgtcatggaatccgcttgcgaatggtacccctgataaaaatggaatgtatgccaaggggttatttcagttctgggatactacggcaacagcctatggacttgagggggatgacgtttatgaccctaacaagtcaacgttagctgcgggtcgttatttgaatgatttgaataaacgttataaaggcgatattgcgaaaatgctcaccagctataacggtggtcgcgttgataaagaaggcaatctcagcctgaaaaaagaaaccgtcgattatctgataaagatcctgccgaaagtggacggtgcggtggaacaacatcctggaattatgtggcaattatctgaggctcagaaagatttgtcgaaaggcggcaaagacgaccgggcaacgatcagactccagattgatcagaaacccggttccgatatttcagctcaggtgaaaggcatatatgtgacgccgaggtaa

SEQ ID NO: 79540 - DNA, 618 bp, Citrobacter koseri
atgaaaatttcgcgaaatatgaacctgataattccggtagaaacggaaatgggcaacgcctacattcacaccggcccgatctccaaagaagtgtaccgtgaacacttttttattctcggtaaagtattttccgccattttctcagaaggtctgggggtagtggcgggcccgcgtgtggcctacctgatgcttgaacgtatctccattgatatgaagatctgggaagggcctggcggagtgcgcaacacgcttgtgaacgagattattcgcctgtcgaatctggtttacccggtggaagggaaagggtgggatacaaagcccctggaagtgtctctggagcgtgaaatcgtcgatctcgatgaagtgatcggcgagcttgttttttttacatgcgtctcgtcgataaacaaaccggctcaggcgacggggctgatggggcaggtcaatggaatgtggaacagtcaaatatcgtccttgagtcttacggactggatgcgttcattgccgacatcgaagccggcaggcagttctggcgggacggagagcacattatcagcagcatcctcgactactccgctggcgcaggattctgcgaaatctggctcgataccgggttga

SEQ ID NO: 79541 - DNA, 441 bp, Citrobacter koseri
gtgccgaatccaatgatccccgttggtgtgcttaaccgtattcgcgccagcataaaatttaccgatcactctgaactgaatgtctcggcatcctatctggctaaagaaggggtggaagtttcttttcagggcaattttaccgactttcttccggcaatgaccggggcggtgcagtcgccgcaaccgtacgtgatcatgcaggccagggttcacctgctgcgtagccaggcgttgtcaaagcagttcaaagcgcaatgggaactgaacgccactatcggtgacgcgatggtctacagcgacagcacagtattcggcgattttgaactactgaacacggcgattactaacgtgcaggatatgacgtttgcgggtggtgatcccggtgttgccatcaccatcacaggaacctattacatcaactcggaaatgtgggaaatctga

SEQ ID NO: 79542 - DNA, 1329 bp, Citrobacter koseri
atgagcttcaatatcgttacagttaacgtctcgcagacaatcggcgccacgccgtctgacttgcagcagatgtccgcaattttgtctttcggggcaaccctgcaggaacccggaaagcccgttctgcttacccagaattccgatattaccgacctgattcaaatcccaatcggtactctcgaagcagaaaattcatcctacggctctgatttcacgctgacattgccggaaggaaaaagaattgaacgggatcccggcagtgaagtggaaataaccatttctggttgttcccctacaacctggaacggtacatacacggcaacgcttactgacagcagcaccctcacctggacggacagcgaatccacgcttgatggttctcccgcaacgctgggtcagttctctgtcgatggaggcgccgatctggttactgccgtgaataccttcttcgctcaggggaattctgtcgggacatatctgctggaattggggtatctggcggatgtggtagctgatgaagtcgatgcgcttaaaacctatatggaagagccgctgaagcgcttctatgcctatctggtgccgaaatcatggggtggcacaacggaattcatcacgctggcgaaactatacactgccaatgaagcgaaacagtatttctttgtgctggaagataatgcggaagacacgaagtacgtaacaccatacgcaggtattaaatccattatagccgttgctgatgatgcctaccccgtaacgaacgcggcggcgtcagtgatgtggaattttgtttctgcctcaccgtctgaaatcaacaaagtgccgccaatggcatttcgttatcttcaggctgtcaatgtgaacgcggccagagccagcattctgaaaacgatggttaagcagaatatcaactacgtcgatacggcggcggagggcggcatatccaataccatgctggttaaaggtgttaccagcgatggcaatgacatgacttactggtattcggtggactgggtacagatcaatgtcgatatgatgctggcaaacgccattatcaacggcagcaacaacccaattaacccgttgtattacaaccaggacggcatcgaccgcttgcagcaagtagctcagggcgtattcaacacaggtgttgcgtatggtctggtgaacggtcaaacgcctgttaacgccgtaccgtttaaaacctacgtcaaaaataacccgaacgattacggcattggccggtacgccggactatctgcttcgtatacgcctatgcgcgggttcgtggaaattatcttcaatattaacgtgaccatgcagctttcctaa

SEQ ID NO: 79543 - DNA, 945 bp, Citrobacter koseri
atgccgagtcttgatgaaatcgccgagagtaccggcacccaattatcttccgtccttcaggcagccgtagaaaccatttcatccggccaggaaattacctttcgtctctacgtgcggcaggtacttccgctggatgggttcgtgtactgggttaacgcggccattatcgaccccgacgagctggaacggctggggatcaccaatccgctggtggtcaccataaagggcagcctgcaccggcaggttgtgactgaacagtccgaaagccactcacgggacatcaacaacattattttcacgccagtggagaaagcggacgattttaacgtcgagagtccaaacgctatttatctgggggaatacgaagggacgcagtttgccttttcgcgtatggaaagccggtacacacaatccggcatttttcactaccggggaatggcgatcctgcccaccatgcggtcgcagattatcgacagcccggacgacatcagcgacgagcaagttatttcgaacagcacccccatctggttgtcgctgaaacagttcgcgacggtctatccatcgttccttgtcccctctaacctgaaaccaccatacatcgccgcagatattcgcagtacggtaccgcttcagatggcctccgcgacgcgcgacggtgtgcggtatcagttcgcccaggattcagtacgggtgacgctctacggcttcagcaaccagaaggcgctcgacttcgtggatttcgtcgtgaacaaagcgctcgatgacgaggagtttggtatcaccaatattccgatcatcagtgatgccaaatccaatcaggtagaaatcaacgcgctggcgaaaaagaaaatcgtggattttgaggtgaattattaccaggccacgacgcgggacatctcgcaacaacttatcaaagaagtcatatttaactacgaggtcagataa

SEQ ID NO: 79544 - DNA, 429 bp, Citrobacter koseri
atgaaagtctgcctgggtgtcattgatatgccgtacgactacggtgatacgtcagccaccacctatgaagttgctgaagacctccaggaacgctatcagcttttcactaatttctgggaattgcataaacagcagattgccccagaagtgggtgagatgctcgcatgggcaatcatcaatcatattcggtacggtgcgccaatgccgggcggcgagctgctgggtgaaaccatgaaagcgttcaatatttttctcgaaggtgaggaaatggcggggctgtccgttgatggcgtgccaacgctggcggcgctagaggggaaaaattcccgtttgaagattgagcgtggcgaacgccgcccatcgttcatcgatgggggcctgtttaaatcatcttttgtcgcatggataggtaacgatgccgagtcttga

SEQ ID NO: 79545 - DNA, 453 bp, Citrobacter koseri
atgaccatacgcccgacgttcgacggatatatccgtttcgttcgtggcgtaatgggcgtgccagacaccgctatttctgacgatgatccgacgctggagtgttgttttcagtcggcgcttgagttgatcccgaaacggctggggctggaatgtttgcccattatctacacgaacaccgtgtacaacgcaggtggctctttgctattgcgctatgccatcgatacatcacccagcacttatttcgctgatttgcggaaaaaccttggcatgaacaatgccgtttacggcctcgtaaactcagctgctgatcaggggacatctggttcgatgaccatcagcgatgctctcagcaacctttcgctcgcagacctgatgctcatgcaggatccatatggccgcgccgtcgtcgctgtgctcatgaaaatggggccgctttgggggtacacgccatga

SEQ ID NO: 79546 - DNA, 471 bp, Citrobacter koseri
atgaaattattcatcgccaactgctccagccagccacatctcttcaactacaaattacctgaaaaaaaccagtcttttggcgtaacaatccgggccggtgctcagcacgagatcgaaaacagctctgacgttatccaccacatcatcaagcagcatgagccttacggttttcaacgctgcgataaggtggataagcatttctccggtatttgttacgccatcgacaagccagtaacggtggggcgcattgaggagaaccacgaacagaaagtggaaaaccttgatgatatgtcgcagaaaatccttgaagccaacgcggtttcgctgaacaacgcagtcgataacgttgtcatccaaaacggtgagaaaccgaaggatgacggagtacaggttgagatcgtcggagaagccgtaaacccggatcaggcgaatccgccgaaactgagtaaaaccgtgaaggtgcaaaaataa

SEQ ID NO: 79547 - DNA, 1029 bp, Citrobacter koseri
atgagcgcattcgcacctgcgattaccacggtatcgccttccatgatgctgccggaaattgtcatgcaatacagcatggcttccggcgcatttgacatccttgctggcggcgcaccgacagtaaagattggctccaatgacctgctggtctaccaacgcttcctgcgtgcccgcacccaggcacatgtcggccagtcacttccgggccagttgccatcatcaaccatcgtacccagctacgaccagatgatgacttatcgtatttcaactcgttctcagtacagctatctcgatacagaggcagcgagttcgtggggttatgcgttgaacaacggtctgcaactcgccaaccgccagggtcatgcccagacgctgcgcaacatgctgctgtacggcgtgaaggcatccaacaacgaagggatcaccaattcaccaaacgcggttacgctgaaccttgggaacgacagccaggggaatgattcgtataccacctgggattctggtgaaatgtcaaaatttgtcctcagcattatcgcggatcagaaaactcgcatgatgctgctgggtcagactctcaccaccgttgttctgtgtccacagcgtttcatgaaagcactggaatggacaggcatcgttgaactgaccagttatcagcgtcctggtggtggtacccagactgttggaggtctcgttaaaactatctctggtgatgccagcggcgatgatgtcattttctgtcaggacgacacgctgatcggcaaaggcgctggcggtaccgatctaatcgttattaccaaccctgagattgtcgtgccggaagcgcgtcaggacatcaacaccaacattttcgcgactctgatgccgaaccagcaggccgtgaacgtgatgtttaccgacgtagccgcgccaaccgaaatcccgtctccaatgccggatggcggtattaccacgctgtacaccgagcgagccacgcccggatggaacttccgcccagaaggggtgacgctgctttctgcaaaatactcgtaa

SEQ ID NO: 79548 - DNA, 612 bp, Citrobacter koseri
atgcctaatatctctttcgatccgttcaaaactcagggctcaccgacaggcatgttcaacgtcgagtcgcgtggcctcgttcagggcgatgcacaagacgatcctgcaattcgcctccagcttagctctggtacgttcgacagcaccgatcctgtgtgggctggtgtcggcgctatggagtgtattgcaaccgatgccgccaatattgctggggcgaacgtgaagcctgcgaccgcatcggtgtgcaacgcattcatcgtttccaatcaggcataccacggcatcatcaccgccggtaataacgttcctctctatgtcggtggtggttcagtgcattactaccgcatcggctcaggggctcgcattcctctccccgtgagcgcggatgtggctgccctggcaaacggtagtgaggctgttggctcagatggtttcgtgtgggacctggcgaacaacgtcatcgacgtttactccagcgccacttcaggcaatccgaagctggatatcaaactgctgatggtttcccagaaagggaacctgacagtgaagaaaaatactgatggtacggttgtctgggaagatgacaaaccgtgcggcctgttcttgatttaa

SEQ ID NO: 79549 - DNA, 1344 bp, Citrobacter koseri
gtgaatttaacagagcttgaattagcccagcgcatacgggatggcacggcaccgtcgccaatgaagttctcgaacatgtggctggtgaacctgcgcatcacaggtacagggctggcgtaccgttccgggctgaaagaacacgtctggcgagacccgaaactttaccttaacgatgagtttttgcagcgatgtaacggcctgcccgtcattgtcaatcacccggatgacgcgattctaaccgaggacgactttactgaacgtatcgttggctccgtcatgttgccgtacatacgtggggaagagatctgggctgtttgccgcatctacatacgcgacatcgtggatcaaatcgccacaggcaaggtttccacgagtccgtcagtcgtattcaacaacgcatcaggcaatgtggaagtgcaggacggtgacacgaatttcttaatcgaaggcgtgccattcctgctcgatcacatcgccctggtaacagaggaccacggctctttgggagtgtgggacaaagacaagatccccacaggggtcgaggtttccaataaaacaggtgacatagatatggacgagaagcagcttgaagctttccagacgatgctggccaaagcggttggcgatgctatgggaggtgtgaaccagggtatccagcagttaaccgctcgcatggattcactggaacaggggtacaaagcccgcgccgacgcagaaaatgaagcaaagcgtcaggctgaagagaaggccaaagcggacgaagaggaaaagaaaaaggctgatgctgctgaagaagagcagcgtaaggctgatgaggctgaagcccagaaaaaagccgacgaagaaaaagccaaagccgatgaagctgcggaagaggagaagcgtaaagccgacgaagaaaaagagaaggctgatgctgaagagaaagagcgtaacgatgctgcgatgagcgaagcgcaggcgaaagccgactccgcgtataactcgttgggtaagcgtgcacctgagcctttctctggtgaaaaagcgctggattttcgcaagcgcgctttgatcgccatgcagaaacactcccctcaacatgcggacgtcaatatccgcgcaattgctgactctgcaacgttgtccgtgctggaggatgcgatttacggcgctgcccgtaaaaccatcaccgaagagatgaacaacacccagggccaattacacaaacgtgttcgcagtgatgaagcgggtcgccgcatcaccgaatatgttggtgatcccaatgtctggctgtcggccttcaaaaccccgccacgccgcgtcgctaaatttcatactcaaggaagcatgaacaatgcctaa

SEQ ID NO: 79550 - DNA, 831 bp, Citrobacter koseri
atggcagcaatcagccgggcggggaagaagaggaggagtaaaagcctctatgaggtgctgaccgacgcgataaactactacgtgaaaaatggctgggattctgagaaatcattgctagaatggtcccgaaagcttcgcgtagccgccatcagggaatcacccggcgcggatgtagcccgtaagcacctcaccgccatttacagccgcctcgttgttgacggtggcgcactgaaagatcagccgcctgacggccccacgaaagtcactctcgataagctgaaaccgcacttccgcgaagaactcaataaacgcattttttccagcaccaacctgatccagttgaaccgcgatcaggctattgagcgcacggtacagcgttttcagggatgggtgacgtcaataccgcctgacggcgttagcgaaatcgacaaaaacgcccagaaacaggcgatgcgaaagtcggttaccgatctcgactacatcagtcgccgggtagcaatcgaccagggccacaaactctccagcaacgtgaaatacctgctttcagtacagagcggcgccatcgcgttcgtatggcactcgaactggcgccggcccggatatgactaccggatagaccataaagaccgcgacacgctgatttacctcgtgcgcgattcatgggcggtagaacagggactgatcaaacctgtgaatggtttttacgacgaaattactgctgccggcgaagaagtgttttgcagttgtcaggtattcccgatttatgcgcctcaaaaactgcccatcgaatttttaacggagaagggaaagcgtgaatttaacagagcttga

SEQ ID NO: 79551 - DNA, 1428 bp, Citrobacter koseri
atggcagagattcagattgacgcggctcttagctctgcgctggcgaaaatactggagtctgatgaaattcagcccggtaccgacgtcggctatgaggtctgtaagctgctctggcagttccacccgcttggcggaaaactcgttgaaaagcccatttctatggcgatgtgtaagccacggcaatatagcgttgatacggacccggatgaacgtgttgttcgccgcttccaggaggtttgggaacggatggagctgaacgaaaaaatcaaaaatttcttcttcatctcccgctgttacggtgctgcggctatcggcgtgggaacgacgtccacaccatgtaaggatccactaccgacgtttgggcttaccgaagaagaagtctacgtaaacgtgtgggatccactgaatgccgcaggctcgatggttaccgaccagaaccccaatagccgatatttccagaaggctaactcggttctgaaaatcagcgggaaaaactggcattcctcccgtacgctgaaggtgttcaatggcacgccaatctacctggaataccagaattcagcgtttggctttaccgggcgcagcgtatttcagcgtgttctgtattccatgaaatcctacatcgggacgatggtagccaatgacctggttagccagaaagcaggcgtgctggtggcgaaaacgcagcagaacggttcggtgatgagcggcatcgtggctgccgcaaccgggaaaaaacgcgattttgtaaaagagtcccggaacaaaggggttctcagcatcgggcaaaatgacaatatcgaatccctgaaccttcagaatatcgataaggcgctcactacatcgcgtgacagcattatctctgatatctcttctggcagtgacgtcccggcaatcctcataaaagaggaggcgttttctcagggctggagtgaaggggccgaagattcaaaagccataagccagtacattgatggagtgcgccagcttatagaacctattatggattatttcgaacgcctggttcagtacatcgcctggagcgaggatttttacaactccctcaagaatgactacccggacatcatcactgaggactaccagacaacgttctttatgtggcgccgcgaatttacagcaaagtggcaggaactcgtcgaagagtcaccggataaacgccgagaagccgacagtaaggtaattcagcaggccagggaacttttcacggcgttgaccactaatatcgacccggagaaccgcgctgtcgtcgctgaatggttgtcaagcatagtcaacgccactcagacctacggcgatgtccctcttattatcgatacagaagcgctggcgaactacgtcccgccaccaccacttcaggagcaaccgaatggcagcaatcagccgggcggggaagaagaggaggagtaa

SEQ ID NO: 79552 - DNA, 1323 bp, Citrobacter koseri
atggcggagatattctgcaaaaagcttcacaccgctcagtcgcgtgtatggaccgaaggcagccagcaccagtacaacgttgtccgatgtggccggcgctggggtaagaccgctatcctgggcaatatcgccatttcctacgctacgtcactcttcaaagagacgggaggggaacggctgcagggcggcagggtcggtatcttcaccgctgaatatcgccagcagcaggaaattttcgattatctggaagaagctctcctaccgctgatcaaaagcaaatcgcgcagcgacggtcgaatcatcctgaagaacagaggtcgcatcgacttctgggtcacgaacaacaacccgctggccggtcgtggtcgtgaatacgatgtggtgctgatcgacgaagcggcatttaccaaatcgccggaaatgttgaaggagatatggccgaagtcgattaagccaacgttgttgacccgtcgcggtcgtgcctgggtgttctcgacgccgaacggcaatgacgacgacaacttcttctacgcgatctgcaacgataaatcgctgggctttcatgagcatcacgcgccgacatcgagcaacccgtacgttcccccagatgaactggaaaaagaacgtcaggccaacgacccgcgcgtgttccagcaagagtttcttgcggaattcgtggactggtcagcggaagcgctgcttgacgtcaacaaactgatggttgacgacctgccagtcgcgatgccaaccacctgcgacatgatattcgctgtgatggacaccgcgctgaaagggggcaccgagaacgacgggacaggcgttgtttattacgcctacgaacagacgtactcggagccgcggttaaccatcattgactacgatctaacccagattaaagcgtcgttgctgccggagtacatgcccggcgtctacgacaacctggaacgtctggcgaagatttgccgcccgcgcctgggtagtcagggcgtgtttatggaagatgccgcgatgggtgccatcctgaaccagaaagcggagacagaaggttgggacatgaaacccatcaagtcgacgctgaccgggaagggcaaggacgaacgcgcggtgatggcatccggccaccactacctcggcaaatgtaaaatcacgaaggaagcctacgacaaaacggtcacgttcaaacaggtcacggctaaccacctcatcaaacaaatcgctgggttccacctggccgatccgaaggcgcacaaacgcgccgacgaccttttcgattgctacacgtatggcctgatcatcgtgttcggcaactacgaagcactgtaa

SEQ ID NO: 79553 - DNA, 1131 bp, Citrobacter koseri
atgagtaaaccggattgggggtcactacagcaaaagtacatcgctgaacactcccgctccggtatcacaccagcggagtggtgcaaagcaaatggactgaattacgccacagcccggcggtacatcaaaaaacctcccaaaaatgcgcaaaaaaaactgcgcaattctgcgcaaaaaactgcgcaaaaagatggtgcgcaaactgcgcaaaaacgggcgcaaaaatctgctaaaaaaaatcctgaaaaaatagctccaattatcgagcctgaaaatcaggaagaaatcttcgaccccgatgaattcggtatctcagaacagcagggcgtattcgctcagcacgtcgcgatgggtaaaaaactcatcgatgcgtaccgtctggccgggtacaaatcagaggggaatacagccagcgccggggcgagccagttattaagaaatattaaggttgcccgagctatccgctggctgcgcgacaagcgtcaaaagcgtctcgctctgaccgaggcggaaatcattcaccagctctcttccattgcctcaatggacccgaacgaactcactcaataccgccgtgttaactgccgctactgctggggggaagatcaccagtaccagtggaacgacatggacgagtacgagcgtgcctgtgacctggcgatgaaagaggagagatcaccccctgcttttggtggagttggctttgttgattctgctgtccctaacccggattgcccacgctgtttcggcgaagggatagggcagcaattttttgctgactcaacgatgctcgacggcccggcccgctggggataccttggcgtgaaagagaccatgaatggactggagatgaaaattgccagcccagaggctgcccgtaaagagttgctgtcatacctcaaggccacgaaggggaaattgcctgcaggtggtgcaggagcagcaggcggtgtgacagaagatgattacgatcgcgaatggaagcggctgcgtaacgagaagattctggccgagatcgaacgcatacgtaccggggataaagagagcagcctgattgtggttcacaacgcgctacaggttcccggcgcggttcagcccacgcaggaggatatcgacgagggcgatgaataa

SEQ ID NO: 79554 - DNA, 270 bp, Citrobacter koseri
atgatggcacagcggatcctgtacgacaaagcgaagactgaagcgctggccgcctgccgtatgactgcgcagcaaatagcagatgcgctggatatcgattttgcgtcgctcaaacaggacaaagaccagttgcaggagttttacaccagcattcgcaaaggtcgggccaaaggcgaggctgaactgagaacggcgctattcaaactcgcacgggaaggcgatgcatttgctctgcgcgaactgctgaaggtggagaaaaaccaggaataa

SEQ ID NO: 79555 - DNA, 705 bp, Citrobacter koseri
atgccaattgaaactgctatccggcgggtggtgctggctgacctgaagctgctggagaaaaacgctcactatatggatccggatgagttcgcccggctggtggcgaacatcaaagccgatagcgtgcttacgagcctgcctgttgtgtaccggggaactgtgctgtcaggcaaccaccgcacgcaggcagcgataaaggccgggctggttgaatccgaagtgatcgatattatcagcgaattaacggaggatgagcagaaagctatccagctcagccacaacgccataaagggtaaggacgacagcaacatcctccgggaactgtacgactcgatcaacagccttgacctcaagctttactctggcctgaccgacgacgatttcaaaatcgccgacgttgaggtgcagacactctcgtttgttcagcccgtttatgaagacctggtgatcgccttcctcccggaagagaaaaccctgtttcttgaggcgctggaaaaaatagggaaaaaggcaaaagaccgcctgattgttgccggacgcgccagcgatttcgatctggttttcaactccgtcatacagaccaaaagcaagctgaacatcatcaacaccgccgaagcactgaagaccatcgccgaactggcgcttcagaagctggaggatatgaatgatggcacagcggatcctgtacgacaaagcgaagactga

SEQ ID NO: 79556 - DNA, 1278 bp, Citrobacter koseri
atgtttataggctcgataccgaagaaactgattacccagatacttgggaatatcaacctgaaaaaacgcgtgtatatcggctgttccggttcgttccgtacggagcacgcgatcaaaagcctgatgcctgacaaacgggtgtacggcaatgatgtgtctctgttgtcctgcgcactgggaaatctgctgatcggggaaaagctcgatgtggagttttccggtcgcctggagccgcttaaccagttgcgtggtgacgcggtggcgaatactgcaaccatatgtctggcagtcacactggcccgattcaaaggcagtaatcagtatagcctggcgcatttttctcacatcctgcgaaatctggccgactaccatcgcattgagcgggagaagctgctgcgctataccgacgggttcaccattgacgggttccacgccggagacttccaccaccagattgacgcggcgcgagagaacgacggttccgtcatcatgtttgcgccgacgtacaagggcggatacgaaaatatctacaaattcgtgaacacgagcgtgaactgggcaacgccatcatatggggtgtgggatcctgaaaatactgaagcactgattcagcgtcttctggatgagaaccagaatttcgcgatcgtttctgatcgccgcatggagagtattgagccgcgtatcatgttcgccggtagtaacaagccgatttacatgtacgcaaatgattcccggtcatcattacggcgcgaggagaagaagtcacaacccttccggtaccgcccggtggatattgactgcatcacggaaaccagcacggtagaaatcgcgctgctcaacgcacagcaggtaaatttccttaaaaatatctacctggcgaaaggtatcaaccacaaggccgggatgatgaattttgcggtgctggtggatggtatgctcgcgggggcgttcattttctcgatggcgcagtacggcgacaaaatccacagcatatacatgttgagcgacttctcgacatcgcggcaccgcaaactatcaaaactcattcccatgctggcaaccagccgggatgttatcaaccacgttaatcgccagtacgtcatcgatatccagtcggtttacaccacagcattcacgacgaagccggtatcaatgaaataccggggcatttatcaactggctaaacgcggggaaggattcctgaattattcgtctgcggttcgtgaactgtcgccgcaggaaatctttcacgaatggtaccgaaaatatgccaattga

SEQ ID NO: 79557 - DNA, 369 bp, Citrobacter koseri
atgaaaacgtcctgtttttctctctatcgcggcgaaggccggatcagcatcgcccgctacgcgccacgcaataccccggcgggatatcatacattcaggaagctggcgccaggggaatggtttagctcggtctcaacttcccgctacatcgagctgtacgagcgcgagatactggcgaagctgaatccagagcagacgtggaatgaactgcacctgctcgccgggaatgcagagcctgtgctgttgtgctgggagccgccgggagaattctgtcaccggcagctagttgcccgatggttccggcgtgagctgggtatcgcagttgaagaatacgatccccgcgccacaccgcaactggacatgttctaa

SEQ ID NO: 79558 - DNA, 435 bp, Citrobacter koseri
atgttacaggcaatttatgaggcaagctgggcaaatatctgggctgccatatccgctatttctacaacgttagcggttgtcgtggctatttgggctatgttgcgttggagcaagcaggatgagctaaaggcaaagctggactttaaaaagcaagtttgttcctactcgaatgtgttggcttcaatgcctgaaactattactacttcggatactagttactatattgacaagatagaggcatcttcaggccattttgtaacatgctgccacttatggattgcggccgaaaatacgatgagaaaaaatcattacgtcgttaaaaatttccaaataattaacgataaccatgcattgtatatttctgggcaggtaaagcgagaggtcttgttagaggcctgtagaaatattatgcgggcacaattcgtatttaaataa

SEQ ID NO: 79559 - DNA, 618 bp, Citrobacter koseri
atgaagcgattttcacacgaatttaaacatggccttgtctggctgcctgagctgggaatggggcgttatccggtaccgaaggatcgcccatacgatgccgagtatttcgccagataccagcaactggcagacactgaccttggtcgggagctgacggccgcgcgtattcgcctggtggccaggcactataccggccaggttctggacgtagggagcggggccgggcaatttgtcacggcacggccagaaacaaaggggtatgacgttaaccctgcgggcattgaatggttgaaaaagcgcggagtatgggcgaatctctaccgggatcgttatcctgcgttgacattctgggatagcctggagcacatcgaccgcccggacatcgccgtcgcgcgagcggaaaaatgggtatttgtctcggtaccgatcttttccggcgctgagcacgttatccggtcccgacatttccgacgcgatgagcatatctggtactggacgcatgacgggttggtcaactggttcgcagagcagggcttcgggctgatggaaagcaacggtatcgagatggagctaggtcgcgagggtatcggaagttatgcgttcgccagggtagaataa

SEQ ID NO: 79560 - DNA, 909 bp, Citrobacter koseri
atgcctgaaaaactctactttgacgggatgcacggcatcggtgacaacatcaatcagcgttgcttcatcaaagcgctggtggaaaaaggccatgaaatctggctgaaaacaccgttaccggaaatttatgttgatatcccgaatatgcactttgtgcaagctaactcgccactgcgaacccagcggaaaagcgaacaactttcttctgttcgtttcgagcctgaaccaccaggcatcccgcgccgtcggattttttacggtaacagcgatttacagcaaggcagcatcttcaacgctatggcgaagcaatttgggactcgtccggtccggctggatttaccgcattattcccctgcggcaattcgtacaccggacggtaagccggtagcggttatccgtcccaccaccgaacggaccgaatggcataacgccagccgggggccgttgaaccagtacatcgatgatgtgtcccgccagctcgctattcgcggctttcacgtaatcagcgtggccgacgttcaggaagggaaagaatggatccccgacggtgagccattcgcacaccagaaatttcacaacggagagcttaccatctggcagatgctggcgctggtggagcacgcggatatcgttctgacggggccctgtgtcgtcatgcacgctgcgctggcgtaccagagaccaatgatttgtctgggcggcggcaatggtgggaataatcaccatctgaaagtaaccgactctcgatgcatggatctgtctcaggcgcttttcgtgtatccggataatttttgcctttgccaggaaatgctccacgactgcgacaaaacaatcagtgggctgcccgataaggttgagggttttatcacaaaggtgtaccagcaagcacacaggcggaacgctgcatga

SEQ ID NO: 79561 - DNA, 585 bp, Citrobacter koseri
ttgagtgtctgcgataatgcccacccctcagtaatcaacatgaaaaaaacctttatctgcattgccagcgggccatcgctgaacgtggaggattgcgcacgggccaaagaatccggtcattctattattgctgttaactcgagctggatagcggtaccggactgccatcatattttcgctggagactatctctggtgggttcacaaccatgacgtggctaacccgaacgctcagtggtggacgcaaagcctgcgggcgcgagacaagtttggcatcaacctgttccgaccggccgaaagcggcccgttcaactcaggtcagcgtgctattcagctggcggcacatctcggcgcacaccgggtaattttgctcggatatgactgcacgctggcgaacggcgctcactggcatggtcgccacccggcgacgatgcacaatccggtaccgcgagaagtagggcgctggcacaccgatttttcttctctggttagtcagctcccggacgtcgagattatcaacgcttcccggcacaccgcgctgacctgttttccacgaaaaactctcgaggcggctcttaatgcctga

SEQ ID NO: 79562 - DNA, 276 bp, Citrobacter koseri
atgaagaactggcaaaagtgcaggctgatgctgatgctgctcgccgcgctggtgacgggttgcagcaacaactcgccgaattacagcggcaactcgcacgaagtgaaaccggccgtatttccgcccttgcagcagcaggcgcggcaaaaaccgaggtcgccagcttgctcgccgagctgctcagcgaagctgacgcaatggcgggagaattcgcaaaagaagctgatgagcgttatgtcgcaggaagcgtctgcgaacgaacctacgacaaagtga

SEQ ID NO: 79563 - DNA, 489 bp, Citrobacter koseri
atgcaaattagcaaaaactcccaagcctttctcgacatgctggcatgggccgagggaacggcgacgcacccgctgacgaaaaatagcggctatgacgtcattgtcacagggatagatggcaggccggagattttcaccgattacagcgaccatcctttcgcgaatggacgaccagcaaaagtgtttaatcgtcgcggcgaaaaatccacggcgtcgggccgctaccagcagctttatctttactggccgcattataagaaacagcttgcgctgccggatttcagccctcagtcgcaggataaacttgcgatccagctaatcagagagcgtggcgcgctggaagatgtcagtgaagggcgtattgagcgtgcaatttcccgttgccggaatatctgggcttcgcttccgggcgcgggttatggacagcatgaacataaccttgatgcgctgatcgcgaagtttaaagagttcggcggtacggtgacatga

SEQ ID NO: 79564 - DNA, 297 bp, Citrobacter koseri
atggtaacgctaaatgattttctcctcataaccaatgcaacagcgtgcgcggcaattgcaatagtcctcggcacattccagcggcggggagccaggcacaactatttcggtgcgtttcttgcgttgattcttatcgtctcctgcggctcgatcacaatcctgatcgcctgtggcgtttacagagaggcgaatctgttcgaaaccgttattaacgttgcgctttgcgtcagcgtgctccaggcgcgggggaatgtgatgcgcattttcaaaccattgaggcaaaaagatgcaaattag

SEQ ID NO: 79565 - DNA, 411 bp, Citrobacter koseri
gtgggtgaaccaggttctgcggtcactgccacgacaatgactctgacgagcgtaacatttgccagcttgttgcaagatacgccagcaggcgtctacgtcggggcattcacaggggctgttgtgtacgttctgtcttcccaggaattgagtcgttttgctcagattgggtatttcattgcttcgtttctacttgggatcgttggggccgatttcactacagcgattttgaatgaaatcattgcgggatggctaccgagtggtgtcgtagccagcaattggttaggcgcgacggtcaccgccgctgttggcgttggcctgctgatctctctgagaaaggtaaacctgcaaaccattctggcccgcatcctttcaagtatttccagcgggggtggggatggtaacgctaaatga

SEQ ID NO: 79566 - DNA, 324 bp, Citrobacter koseri
ttgaaagagtggtttgccgatggcaaatacccagagaaagattcgagctacatttcccaggtcattaatggtaaatccattggtgagaaagctgctcggcggttggaacgtgattatgggatgccggaaaaatttttagacaagccgtttgatgctcctgaagataatcacgttgagctgaacacccgacagcagaaagttatcgacttgcttgatgctttaccggatgaggaggttgacgaattcatcatcaagttgcaggaacggaaggcattttatgatcgaagacttcaaagctatcttactaaaaataagcttcaatga

SEQ ID NO: 79567 - DNA, 261 bp, Citrobacter koseri
atgcagttacatagctatatagcctcattagatcgtggcggcgtgtctaaacttgctgttcaagtcggcgtcacagtctcttttctgtcacaaatgtcatcgggttacacccgaatcccgccatctcgtgcgctggctatagaaattgcgactaacggccaagtaacgaggcaagagctgcttccaaatgactggcaacggtactggttgaaagaagaattggattttacctcaaggaatcgaagagaggttgaacaatga

SEQ ID NO: 79568 - DNA, 483 bp, Citrobacter koseri
atgaaaatcaaccttcagttgctcggttcagcactcaatgagtggtcacgaggtgtcacgcagtttacagcaacactgcgaataactcaggcgtactttgatctcggtttgacaatgcctactgagttgcaccggatcgaattcagcgatggcaccgtcgatcacgacgcatggcgcaacaataaccagaacattttccatcgttggcgtaagtgtcagacaactgtccagcgtgagaaattttcagcgatttcccccgccattctacatgcgatggatccagaaatccgcgcaatggtcactgccggaaacagcatagagtacctgacttcacgcctgcttaaagaacatgcggacgttgttaacgcagccctactgaatgcccctcttcctgattttgagaaagagtgcgacgaactggacaaagcactaagtgatattcgcatggcatatcgagccaagcagcagagacatgaccactga

SEQ ID NO: 79569 - DNA, 819 bp, Citrobacter koseri
atggcagctaactggataaaggtcgaggttattacacctgataaaccagaaattttcaggctggccgagattttaaatatcgatcccgacgctgttttggggaaagcaattcgtttttgggtttgggctgaccaacagaccattgatggtaacgctaacagcgttacaaaaaacgccattgatcgagtcgctttcatgaatggattcgctgacgctctgatttctgtaggttggctacatgaaagtgatggttccttaaccctacctaactttgaacgccataacggagaaagttcgaaaaaacgtgcacttacaaacagaagagtgtctgaacaccgcaagcagaaacctaaatgtaacggtaagaacgttacaggaggcgatcaaaaaacgttaccagaggaagagggagaggaagatataaaagagagagagcatagcgcgcacgaatcgcctgtggataactttgccggaggtccgtcttatcctgattccgaaggcggggaaacaaaattcaggatgcactccgactggcaacctctgcccggattcgctgaacgggctgagaactggggtcaccccctgggcggcatcccgccaaccgacgctgaaatccggcagttccgggactactggcagcctgaaaccgctcacaaataccaccagcagtgggaaatggcactggcggaaagcctagagcgaaaacgcagcggaaaaccctccacccaacagcgccgggatatcaacgtaaccggaccagtggacaaaaaaatcccctctggcttcagggggaataacccctatcaagatgagatatga

SEQ ID NO: 79570 - DNA, 1623 bp, Citrobacter koseri
atgaccgaagtttttagcacggaagatttttttgcaccggctcccagtgacctagtggacaatctgatcggcagatacaccgctgacaggcaacgcatcgagtcactcgccctactgattagcgatgccgataaccaaaacgccgtcgggtatttcctgcggggcaaccagactcacgaacgctacataccgccaattggtgatattttcgccctcaatggtgcgcttgcaaacctgaacgccacttactggcaacaggctcttgcgctgacagacgttcgtgatttcatgcctgcaaagcgccgggaagagtgggataaccagatccgcgaaatgaatacccctgatttcgaacaggagagcgtcagagcaaccctggtcgacttactgaactcccggtcaaaattcttcggtgaacgcgttgacggcgttttcagggccctttccggcgaacatgtcacaaaccgcccggagggattcggaaagcgcatgatcctgtctggcgtttatgatcagtgggggcacaccaactcccggatggttaactacgttcacgacctgcgccagatcatcgcgaaatttatggggcgccctgaacctgcttaccaattgaccgaccgggcgctgaagtctgcccgcgacgttcatggcgagtggatgaacttggatggcggcgaactgcgcgttcgcgcttacctgaagggaactgcacactttgaggttcatccggaaatggcctggcgactcaactgcattctggccagtctgtacccgatggcaatcccgccggaatttcgaagcaagccaaagaaaaaaataaaagattttgtcctgatggatcacatactgccggtggcggtacgtgaggatttgtgcggactggaaaccgagcggcacaccccattcaaacgtcatcgctgggaggatgaaattcagcccatcaccaccaatccatttaatcgggtgtttcgcggctataacaatttcgacaaagctgtgcgcagtgaatctgaacggatcctggcgtccattggtggcactaaattttctcagaaaaatttcatctggtgggagtttgattacaaccctacgaaggtgatctcggaaatcatcgcttccggctgcgtaccggatgaaaaaagccaccagttctaccctaccccgccggagcttgctgaatactgcgtggcgctggcaggtatcaaacctcaccatacctgcttagaacccagcgccgggcatggcgggatagccggatttatgcccgtcgatcagacaatctgcgttgagatttcctcactgaaatgccaggtactcgacagcaaagggtttcgggtgtacgaggcagatttcctcaaatgggctgaaaacccaggctgctttgatcggattgtgatgaacccaccgttcagcgaaggtcgtgcactggcccatcttcaggccgccgcatcattaaccaaaataggatcccgtatcgttgccattcttcctgcaggaatgcgcaacaaggacgtgttgccggaagactggaactgcacttggtcggaaccgcgatcaggcgagtttactggtaccagcgtgtcagtcgttattctgaccgctgaacgactatggaaaaaatga

SEQ ID NO: 79571 - DNA, 645 bp, Citrobacter koseri
atgagattgaaatacgccatcaccatcggcgatcccaaatcagcgcaaattgttgcttaccaggctcgttcaacgggggaaagtcatctcactcgtgaagatgttgttacctctcttgggttgacccaatcacgttgcagggctggcctgtcactaatttatgcgaaatatactaaggacaaatactcagccgagatcgctttacgcgaattacaacgacacgcggcctcgatcacagaaaagtatttttctagccgctctggagatggattccacgctgctgtttcggttatggctatccttgctttggaagaatattgccgcacagccgacaccccaggagcaagatgcctctgcggtggaaaaggtaaaatacgcgacctgaaaaactctcggatgaagggacatcccgttcaaaagcagtgcccacgctgccacggaacaggattaaaaccattaacgcgtagccgctgccatcacgcaattttgcgatattaccctatctcgcagccaaccttttcccggtactggaacccgttctatgacgaccttctgaactggtgctaccgacaagaaacattggcagaagacagttacaacctgatcaccaacctaaaccctaggtttatggaatcaagcaggtaa

SEQ ID NO: 79572 - DNA, 273 bp, Citrobacter koseri
atgatcatcaccatcttggacgggcagtccaatgtagttgaaattatcccagagcacttctcagacgcagaagcaatcaaagccgccagggatgccgttcgtgaagcagctgctgaaggcaaaaccttcacagcagtcgatgaagacggtgatgacgcactccctccttcattctcagcccccgtaaaaaatcctgacgtggaatttaacggtatggttaccgatcgccacggcgaggaactggctgaattttccggcgtattcgttctttaa

SEQ ID NO: 79573 - DNA, 288 bp, Citrobacter koseri
atggataaaattagtttcgaagtatatgcgagcgacgtaactgtcaaaccggatgattataaaaacattcgtgttgaagttgacggagttaaattacctgaccttttggaatctatcgaagataacgactccatcattgattcaatcggcagtgaaaatatcgccgagtatttttcttccgaaaatcgtctatttgagcttctggataaattcgactgcggcgaactggctgattatctggagactcgcggttggaaagttcagggggcagagaatgatccacattga

SEQ ID NO: 79574 - DNA, 360 bp, Citrobacter koseri
atgttgaaccgtaatgagacacacgtacatgtatttcaattatcaaccgtatttccgtttgttgatgtagttgagttgaacaacgagattattggttacatcagtgaaaaccgggactggaataaaaaagaaaagccggtatccctcgtatcccctgatggtattcatattggggatttttgttgtgtcacgcacgcagcacaccatattacgcagaaaaatacagggattgaattcgatgacgtagaagtcatggcccatgtggaaacacgcgtattcaaaattgaaaagtcttcggactttcttgacgcattgatgctcgcatttgcatcggacctgaaaggaaaaaggccgcactaa

SEQ ID NO: 79575 - DNA, 2904 bp, Citrobacter koseri
atgagtggcacaaaaccctatttcattcaccataaagcgaaaaaacagagcggcgaaccgaatgcagttttctggaagtcggcaaagaccgaaacccgagcgctgcgtgatgctgagaacgcgctggaggatgctgacaaagacccgtcaaactacttcaaaccagttgtaaccaatttcccggtagtgaacgagcttccgcctgagggaaaaatcagctttacgttctgtaatttctaccagctcggcgatgacggcatgacctgggcacaaatccccgacgtatcccttcccgctcatccctgcgaaaaagttgttgaaggtaccgacaccaccatcgttgacggtgttgataccgaaactggcgaaattatccagcatgatcaggtgtcaactgaagacaatggcgatcgacctgaacaccctcagttaaccgttgtggcaacgatgcccttccgtcaccgcgttttggctcaattcatggccgacggcgagtatatgtatcatgtcgatgcggagcagaaaaacgcgattatcgatctggaaatgaataccgataattcgtatgtccagaacctcttgcttgcggctgaaaatgttgaactattcaaaaaagccattgaacacgacattcataaagcggtaaatgctgttaaaaaagtgtttcctgtcgatggcaaaatcccggaactggcaaccgttatccagtttctgaaaacatggttcgatactcctcatattgatcgcgggccgctcgttaaagagtggtgtaaaggtaatcgtgtatcagctattcagcgtactgaaagcggcgcgaacgctggcggcggaattgcatccgatcgcaaaatgccccagaccactctcggtcttgaatttgaaatagccttaggcctgctggcgcgtcagtacgaatttgatatttattctctgccattgcagattgaactaaaggctaactcaatcatgaacgcagttgacgaccctgagtggctggcaacgcgcgaactgttcgtgtcaatgcctggtggtctggactattcccgcgcatgcatcgttgcaacggtaaaaaccacaccagatgaactgtacaaagccccgtttcgccaccgcgagtacctgaataaggtgctgacagaaactgaccatgccaatcccgatccgcttgtcgttgatattgcctgcggacgttcgtccatgcctatgccaacgccagtaagacaggatgaaccatccgttgaagaagtaaaccgacaactcgcagctgcgcgcggtgattacgttgaaggtatcagtgaccctaacgacccgaagtgggttcatgaagactacaacgttgcctcaaatgagggggaaaaaacggaaaatggggacgctaccgatgtgcaggttcaagaaactgacggtaatgaagaacagactggtgatgcgctgctcacaagcgaaagtgatttggggaatggtgaagaagcagataccggcgaacaagccgatgtagaccacaatcagcaggaagtgagccagaacaacgattctgcaagccattctgagccagaagcgaaacaaaacgtgccggaaatgcaacaggaagaaccagcgtcagtgtggccggaatacttcgaaccgggtcgttacgaaggtatgccgaacgacgtttaccacaaggctaacggtatcagtagcacaatgctgaaagatgcacgtatcagtctgatgtattacaacgggcgccacaacaccggacttattcctcgccaggacagccaggcttttattttcggacgcgtgactcacagctttgttctggaaccagaaaaattctctgatgaatacgccgtaccagcagaaatgccaaaaaacgtggtttccacttcaggcgatatggttgccatcatcaaagaatacaacgccagtctgcctgcattaatgacacctgacgagcttaaggcatggattgaagattataacagcaaccttaccccgccacttatcctgagcggcagcgcggacgaaaccgctaatttgtacgtgtccctcccagaagaattccagcgaattcaggaaggaacaaaaccaacagcatccgcaatgaaagcctgtatcaaagaatacaatgccaccctgcctccgatgctgaaaaccagcggtactcgcgatcagttactggatcagatttccaccgtcgctccagagttcgcagaacaggagcgagccaagttcattccgtacaacatcagcggcaccaaagagcaactgaccgaaatcgtacgtgcgatccgcccggatgtaatgcttgccgatgactggcataagcagcaggaagccgcaaacgcaggcaagacagtgataagcctggacatgtatgacctggtaaaaaatatcaacgatgcgcttcaggctgatgaagacgccagttggttgctcaatcacccagaccgtaagtccgaagtcagttatttcggatttgacgaagaaacagggattgaactccgtgtccgccctgatattgaaattcgccttcctccgtatctcgacagcatctgtgccgatctgaaaacgatcggtctgggattcgtgccacaggacagactaaaggcccgcctgcaccgggagattatcgaacgcggttatcacatcagcgctgcgatgtactgcgacgttgctgcgctggacacttttgcatggatttttgtcaataaagatcccggttatcactgggttgcagtggtatatgcccctccggaaatgctggaacttggtcgcaaggaataccgcagattattacagcaaatcaacgaagcgacattcagcgggaagtggcctgcaccaattgtaggtaagtacgtcgatgagcttagcgagtacgacataaatcgtctcactgcactggaggatttagcatga

SEQ ID NO: 79576 - DNA, 1206 bp, Citrobacter koseri
atgagcacccaggtaacaaacccgttcggaaaccgggacaatcaggataaatccggcggcgcactcgctgttgaacaggaacgtgccattcaggaagtacaggcagcgctggttattgccaaacgcttcccgcgggatccgattgccgcaatggataaaatcatccaggcctgcacccgccagacactggccgactcagcactctatagctatagccgtggtggtacggaagtaacgggcccaagtatacgtctggctgaagcgctggcccaaaattggggaaatatccagtttggtattcgtgaacttgagcagcgaaaaggtgtgtctgtagttgaagcatttgcctgggacgtagaaaccaatactcgtcaggtaaaaacgttttctgttcctcacgtccgggacacgagaaaagggaaaaaagcactcacagacacgcgtgacgtctatgaagttgtcgccaaccaaggcgcccgccgcctgcgtgcttgcattctgggggtgatcccaggcgatgtaacagaagcggctgttcgccagtgcgaaattactcaaagctcaactgttgatgtttccgctgacagtatcaaaaaattactgagcacattcctcagtgaatttggtgtggcacagggacagatcgaaaagcgcatccagcgccgtatcgagtcaatccgcccggctcagtttctacaattacgcaaaatttatcaaagcctgcgcgacggaatgtctggcgtagaggactggtttgaacacggcggcctgccccctgaaccggaagctcataagcaacctggtaccgatgaaacagtacaggattcgggcgaagaaaaaacgctcaatgaaaatgagcagaacggcaactggcacaccgggttccttaatcgcatcaacaatgcgacaacgatggtagaaaccactgcgttacgccaggagatcgaaaatcataagaattccatcgatattgacctttttaccgagctgaaaggcaaggttgttcagcgccattaccgactggatgccgtatcgcgcatcgagaagatgattaacgacctaccaggttccggcgatccggaagcggataccaaatttaccgcgctggagcgtgcgctcaacgctgcgaaagttcacttaggcgaactgtacgacgcgtacagcatcagactgacagacatgaaaccggaatacatcggcgcataa

SEQ ID NO: 79577 - DNA, 438 bp, Citrobacter koseri
atgaaagtagcagaactatcaggccaggctcttgattacgccgttgaccgggcgatccacggcaagcgttacagcgaacgtctctcccttatccgcacatccggcgaatcattccgcccgtcctccagctggagtaagtgcggcctgttgctggagaaataccagattttcctggatcctccccacgacgtccacagcttgaattatggggcagatggcaagccaaagggatgctgggaaacgttcgaatcctggcacgcaacaatcagcacccgcatcgcagagaagccgccagtgattgatctcttcccatccggtggaccgtatcgcggcgaaggagaaacacctcaactcgcaatctgtcgggctatcgcatcaatgggcggtgacgaaatcgacatccctaaagaactgctgaaacaaggtggtgctgtatga

SEQ ID NO: 79578 - DNA, 309 bp, Citrobacter koseri
atgagtaagtgggtacgagcagaaattatgatcattcgtcagtgtgccggaaccatgaccgtagagaacatcggtcagctaattggcagaacgggggcagcggttcgtgcgaaagcccgtgagcttggcatcaaactgtatctgcgcggcgactaccaccagtcagcaaaatatcgccaggctgatattgaactggctcgctatatgcactgcgaaggcgtcagtcgacaagatatcgcggaaaagctggaaatgccgatcagcgcagtcaatcagtttgtctatttcgaacggagagtatcggcatga

SEQ ID NO: 79579 - DNA, 720 bp, Citrobacter koseri
atgaaagagcgcggaatgatttttaacggtgaaatggtacgggcgctgctggatggccggaagacgcaaacgcggcgaattgttaaaggatgcgaaggcacggtggagttcctgcacgaatgggatattgacggcaatgagatttttgtagttctgggagaaaaagaccatacgggaatgaatcctgtgttaggtgcaattgcctgcccgtttggtgttgtcggcgatcgcatctgggtgcgggagacgttccaggggccacttgtttctgaggaattattcgaagaataccgtgcttatcctgaaaagttcgaaaaaccagaatactgcgaatatgccgccgatggtggtgccaggcctgaatactgtgatcttgacgataacctccgtcacggttggcgaccgtcgatccatatgcctctgtgggccagccgtatcacactcgaaatcaccaatgtgcgcgttgagcgtcttcacagcattagcgagatcgatgctaaccaagaggggatgatgttcacagattacggtgtgggtcgtttcggactgcaacgtcctgggtattcctggaaacccaccacacatactgatcaatgcctgccaaatgctcgaatggcattcgctaatttgtgggaatcaatctatggggattatacatggcgagccaacccgtgggtttgggtaattgaatttagccacatagggaagcccgcgcgatga

SEQ ID NO: 79580 - DNA, 828 bp, Citrobacter koseri
atgagtaccagtatcaaacaccctgccattcgctaccacggcggaaagttccgccttgcgccgtggatcatcggacagatgccagaacacgtttgctacgtcgaaccattcggcggcgctgctggcgtactgctacaaaaaccacgtagctacgcagaggtttataacgatcttgatggtgaagtcgtgaacctgttcagagtattgcgcgatccggaattgaaccagcgtctgcaggaggcatgtattctgacaccgtactctcgtgacgagttcttcgcagcgagagaggtcacagcagatcccgttgaacgtgccagacgcatggttgtacgtgcctgtatggggtttggaacagcttccagcataggtggtgattctggattccgccacgacagcaagcgcaaatatgcaaccccttcccacctctgggagaggtatccctcaactctggccgctgtgtgtaagcggctacaaggtgtgattatcgagaaccgcgatgctctggccgttatacgtgctcatgacgctccgaaaacattgcattatatcgacccgccatacctaccggaaacccgctccaaaggacatcgctactacaagcatgaaatgaccattgaagggcatgagcaattgctggctgtcgtaaacacacttaacggctatgtgatgatcagcggctatgacagcgatctgtacaacgacatgctgagtacctggcgaaaaatcactaaaccatcacgaatcagcgccggacgcggtacaaaagttcgcactgaatgcctctggattaaccctgcggcacagcaacaggaatatgtagcatga

SEQ ID NO: 79581 - DNA, 327 bp, Citrobacter koseri
atgagcaaaattacagcattgcccgtaaagcgagatcagtacggttactggactcacccgctttatgaaaaattttgcgatggacgtgaatttatctcaccggatgaattcaactcctggctggaaaagaacggccttgaatggaaagttacttaccgggatgaagatgaagtggatcccgatgtagacggctacgacatttctgcctggcagcctgaatcacctgcaggtgaaggatggttcattggctctattcacgataccgaagacggcgcagtttgcatctggttacgtgatgttgaaggtggtgcggtatgccagaaatag

SEQ ID NO: 79582 - DNA, 210 bp, Citrobacter koseri
atgccagaaatagtaaccttttccatctatatgttgggttttcttgcgatgtttatttattcgctgaagtgtgatgtggaatgtggccttgagaaaaacccgcatgaagcattctggttcgccttattttggcctgcgctcatcacgctactgataatcatcattcttatcgaaaaagttattaagtttatacgccccgccaagggctaa

SEQ ID NO: 79583 - DNA, 186 bp, Citrobacter koseri
atgtacaaaataaccgccatcgttaaaaaaccagggaataccccgacggtatggacccgctttactgcgaaaaaactgaccaaaacagaatgcgagaagatgctatcaggtagaaccgaagccgggaaatctcgcgaagaaaaagttacgctcgaaagtttcaaatgcgttaaggctggtgcgtaa

SEQ ID NO: 79584 - DNA, 258 bp, Citrobacter koseri
atggacgcaacattgaaatacgcagtcaaacggatcaccgaactggaatcaatgttgctaccggatgtaccggaaactgtctggccggaagaagtgaaatccgtttttgcccaaatcgaacgcgccggggagttaccggcgcatcaccagcgtcgtttgaagcatcacattaaccgcatgtggctcgaccgcctgcccgttatctcgatcgtcactgcggctaaatcgctgtgcgaagcaatggagaaatacgcgtga

SEQ ID NO: 79585 - DNA, 1989 bp, Citrobacter koseri
gtgaacgaaattattgtcgataattttgccgggggcggtggtgcttcaacaggcattgaaatggcgatcggtagaagcgtagatatcgccatcaaccacgaccagaacgccgttgcaatgcatacaacgaatcacccggacacactgcactattgcgagtcggtctataccgtcaaaccaaaagtcgtgaccgccgggcgcaaagtcggtctggcctggttttctccggattgccgccatttttcaaaagccaaaggagctaaaccagttgagcgggagattcgcggcctcgcgtggatcgttttgcgctgggggctggatactcgtcctcgcgttgcgatacttgagaatgtcaccgagttcaaaacatgggggccgttacttgctccggaaatgcgcccggatccagatcgcatcggtgagacgttccaggcattcgttggtatgcttacgaccgggatttctcccgaacatccggcgctggcagaatgctgcgaatttttgaaaatcagcactgatagcgtgcaagcgcggcacctgattaaaggtcttggttataaagttgagtatcgcgaactgcgtgcatgtgactacggtacacccacaatcagaaaaagatttttcatggttatgcggtgtgatggaaaggatatcgaatggccggaaatcacccacggtgatccaaagtcggatgcggtgaaagcaggcaaactgcaaccctggagaacggcggcggaatgcatcgactggtcaattccctgcccctcaatttttggtaggaaaaagccgctggcggtcaacactatgcgccgaatcgcacgcggcatccagcgctacgtgaaaggagcctcaaagccctttatcgtgaaatgtaaccacacaagcagcaaaaacgagtatgactgcttccgtggtcaggatttactggaaccactccagactattacgaagaaacatggctacgctgttgttgtcccgcatctgactaaattccgtaccggagccaccgggcagcctgtcacggccccgtcgccgactatcactgctggaacctcgatgcgtcctggcggcaatggtcacgccctcgggctggttcaggcacactgcatacccttcactgccgggaacggcggcagtgaatatcaggccaaaccacgaccgctgacaaaacccttccatacgatcctgaaggaatcccgcgcctgcgtcatcgcaccgatcgtcgttcgccagttcgggcagagtattgcacaccgggccgacgctccacttggcactattaccgctggaggtggagggaaaagccagataataacggcgacactgattcagatggggtatggagagcgccccggtcaaccgccccgcgtcctccagattgaaaaaccactcggaacggtcacagccggaggcggcaagttcgccgtcgtcgccgctaatctggtgaaacattatggcggtaattatactggcccaggtgcgggactggatgaaccagctcacactgtcacggtgacggatcaccatgctctggtcacttcacatctggtaaaactgcgcggtacctgccgtgacggacagcgtaccgatacccccgcgccgacagtcacagctggcggcttgcatctcggcaacgtcgaaactgtgctggcaggcgcagaggatgaaacagaatacccccacgccgcagccgtccaggaatttctccgcgaatatctgggagaagatgcaaccgaatttgtggaaatcgatggggagatataccggatcgtcgatatcggaatgcgcatgttgcagccgcatgagttgtatctctgccagggttttccaaaatggtacatcatcgaccgcgattatctggggcagaaatacgcaaaagataaacaggttgcaaggtgcggaaacgcggtaccgccgcaatttgctgaagcactggtacgggccaatttacccgagttatgtatcaatcgggaggagattgctgcatga

SEQ ID NO: 79586 - DNA, 417 bp, Citrobacter koseri
atgaaaaagtgctcctgcatgttttgcggtgaaccggccaccctgctctgtgacgggctgatcggttgggatgccgacgaagatgaaaacggcctgatgatgaactgccggggaatgttcacctgcgacgcgccgatgtgccgcagctgcgcgacgtggcacggcaatctgttttttgagggaaaagcccgggggatggatacgaaagatctctgccctatttgccagaaactgcatgatgccggggagcgcatacgcatcgcagagcaccggaaagacaaagccataccagaaccctgtctgacaaaagagcaggcagaaaaaatccgtgcagctcactgggccggtttttccaacaaatacacaaagagcataaaaatcctgactggaggaggacagcaaacctttgatttttga

SEQ ID NO: 79587 - DNA, 243 bp, Citrobacter koseri
atgtatatgtatgaactgacgctatcaccgaccgagattcaggagatcaccggctacaagcggtatacgcagcaacagcagcagttgcgttgtcacggcatccccttcactaccggccagaagaacgagccaatcgttcttcgtcgcaacttccagcgccccgtcgagccgctgccgaagatatccgagtatgtatctcctgagccaaattatggagcactggacaatgggcagaccacgtaa

SEQ ID NO: 79588 - DNA, 1038 bp, Citrobacter koseri
atgggcagaccacgtaaaaaccacaaagataacagacttcctccacgcgtataccggaataactatagctatttctggaagccgaaaaatagccagacgtgcataactattgctccagttgcgggtacaagcatgtcagctctctgggctaaatatgatgcgctcaaagcaaagcacttcaacgaaatgacggttgcgaaactctggaatctgtttctcgaaagcccagcctttaccgaactggcgccaagaacccaaaaggattaccgacagcatcagcgggcgctgctgggagtttttggaaaaatgcgagcagacagcgtaagaacagagcaaataaggatcttcatggataagcggggactggagagcaaaacacaggcgaatcacgaaatggcaagcctgagccgggtttacggatggggctacgaacgggggtacgtgaaagggaatccttgcaaaggggtgcgcaaatttacctcaaaacctcgcaccgtctacatcactgatgagcagtatgccgctatttacgctgaggcaatccctgcattgcgggtggcgatggaaatttcttacctgtgcgctgctcgtctgggcgacgtgctcgaactgcgctggagtgaggtaatggacaaggggatctacattgagcagaacaagacaggcacaaagcaaattaaggaatggtctccccgcctccgctccgccgtccagcttgcccgtaatactttcggtacggagggcggatttgtgatcactaccagcaaaggcggaaaggtgatcacaaaaacgctcaataactggtggaacgatgcgaagcgcacagcagaacaaaaggccggtatgccgttcggctgcaatttccacgatattaaggcaaaagggatttcggactatgacggttcgagtcgcgacaagcagctattctccggccacaaaactgaaagccaggtgctggtatacgaccggaaggtgaaaatctccccttccctgaacgccccagctatcggacaaaccgcacagttgccacaagtctaa

SEQ ID NO: 79589 - DNA, 231 bp, Citrobacter koseri
atgcgagtagaaacgatcagcttcgtcaagaagaatgctgcttctctcgaattatcagagccaatcctggtaactcaaaatggtgtacctgcttatgttattgagtcatatgctcaacaacaagagcgggagaacgccattgctcttctgaagcttcttactctgtcagagcaagagaaaaccaatggcaaggtattttcgaaggagcagttactggacgggcttatatga

SEQ ID NO: 79590 - DNA, 330 bp, Citrobacter koseri
atggaaaaagtcaaaatcgaatacacactcacagtaaaaacctgcatcgacgaaatcgccagttacctccatcgtattgaggtagaagctaaaccagtgattgtcgggattcttgaacagtttgaaaatcaggtaagccagtttccacttggttgtcagatttgcccggaactggtgaaactcggggtggcaaaatatcgggaatgcaatacagcaggcggatatcgtgttttgtattcggtggatggctcgacagtaacagcacatgcgattttgtcgcaccgtcaggacattaaacagttgctgtttaagcgtctcatccaggcctaa

SEQ ID NO: 79591 - DNA, 1095 bp, Citrobacter koseri
atgtcggcggcgtcccgtctttaccctttatcattcctggctgcgttggtgctggcagggtgtagtagccagccttcgcaaccgctgaaaaaaggggaaaaacctgtcgatgtggcaagcgtggtgcgccagaaaatgcccgccagcgtaaaagacagggacgcgtgggcgcaggacattgcaaagaccttcgaaagccaggggctggcgccaacggttgagaatgtctgctcggtgctggcggtggcgcagcaggagtctaactatcaggcggacccggtggtgccggggttgagcaaaatcgcctggcaggagatcgacaggcgtgctgagcggatgcatatccctgtttttctggtgcataccgcgctgaaaattaactccccgaatggaaaaagctacagcgaacgtctggacgcggtgaaaacggaaaaacagctcagcgcgatttttgatgattttattaatatggtgccgatggggcagacgctgttcggttcgcttaatccggtgcataccggcgggccgatgcaggtcagcatcgcctttgccgaacagcacacaaaaggttatccgtggaccatgaacgggacggttcgccaggaggtctttagccgtcgtggcggactgtggtttggaacctggcatctgttgaactatccggcgaattacagcgcgcctgtattccgttttgctgattttaatgccggttggtacgccagtcgtaatgcggcatttcagaatgcggtcagtaaagccagcggcgttaagctggcgctggatggcgacttgattcgttatgacagcaaagcggccgggaaaacggaacaggcaatccgtaagctggcgggcaaactggacatgagcgacagcgcgattcgacgtcaactggaaaagggagacagcctcgcttttgaggagacggcgttgtacgagaaagtgtataagctggcggaagccaaaaccggtaaggcattaccgcgcgagatgttgccaggtattcagctggaaagtccgaagatcacccgtaatctcactaccgcgtggtttgctaaacgtgtggacgagcgtcgggcgcgttgtatgaatttgtag

SEQ ID NO: 79592 - DNA, 1221 bp, Citrobacter koseri
atgtttaagtcttttttcccaaagccggggccgttttttatctcggcgtttttttgggcgcttgtcgccgtcattttctggcaagcgggcggaggcgcctgggttgcgcatcttactggcgcttccggtgatgttcccatcagtgccgcacgcttctggtcgctggactacctgattttctacgcgtattacgtcctttgcgtcggattgtttgcgatgttctggtttatttatagcccgcatcgctggcaatactggtcgattctgggcacctcgttgatcatctttgtgacctggtttttggtggaagtgggcgtggcggtcaacgcctggtacgcgccgttttacgacctgatccagacggcgcttagctcgccacataaggtcactatcgaacagttttaccgtgaagtcggcgtgtttctcgggatagcgctgattgccgtagtgattggcgtgatgaacaatttcttcgtcagccactatgtgtttcgctggcgtaccgcgatgaacgaacactacatggcgcactggcagcatttgcgccatattgaaggcgccgcgcagcgtgtgcaggaagatacgatgcgttttgcctctacgctggagaatatgggcgtaagctttatcaatgccatcatgacgttgatcgcctttttacccgtgctggttacgctgtctgcgcacgtaccggatctgccgatcgtcgggcatattccttatgggctggttatcgcggctatcatctggtcgctgatgggaacaggattgctggccgtggtggggatcaaactgccggggctggagtttaaaaaccagcgggttgaggccgcttaccgtaaagagctggtctacggtgaagacgacgccagccgcgctacgccgcccaccgtgcgtgagttgttcagcgcggtgcgccagaactatttccgcctctacttccactatatgtacttcaacattgcacgcattctctatctacaggtggataacgttttcggtctgttcctgctgtttccgtcgattgttgccggtacgattacgctgggcctgatgacgcagattaccaacgtgtttggtcaggtgcgcggttccttccagtatctgattaactcctggaccacgctggtggaactgatgtccatctataaacgtctgcgcagctttgagcgcgaactggatgggcaggatatccaggaagtgacgaatacatttagctaa

SEQ ID NO: 79593 - DNA, 267 bp, Citrobacter koseri
atggcagcttatcaaatttcttacgatctgcgaaagcagaaagattatgccccgctcattgagcgcatcaagtcttatgggacctggtgtcatcctctggaatcaacctggattattgtcaccgagcaaacggcaacacaagttcgcgattatctcaaagccgttatggataacgatgatggtctactcgtcactggtttgcggggagacggtgcgtggtatgggctttctgacaatatctctcaatggcttaaaaacaacttataa

SEQ ID NO: 79594 - DNA, 579 bp, Citrobacter koseri
atgccaacatctttaaaaaagttaggccaaattgcaggcatccgttcaggccacactctaaggggagcaatcacgcctgaccctgaaggagatgtgcgtctgttacagattaaagacctcgatcaaaactggcagttcaatgacaaagcactacctactgtcgtgtgggaacaacgcatcgctcccccatttcttgaacagggggagattgttgttgccgccagagggaatcgtaatctggcagttgtatatcgtggccaggttcctgtggttgctacgagccagttcctgattgttagtctcaaaagaaaagagagtgagattgcccctgagtacgtgtgctggctgttaaaccatccgatgattcagcaatggtttcatcggagcggcaccaacattcagttaataacgaaatcagcgctgctggatgtcgctatcccggttccgcctattgaaactcaattacagcttatcgagctccagcgtatatggcagaaagaagatgaacttatcaataagttacaggaaaatcgccatcagcttgaacttggtattttacaaaaattacttaaggattaa

SEQ ID NO: 79595 - DNA, 1524 bp, Citrobacter koseri
atgagcaatatgatcgatcaggaccgcatcaatcgcgtgctatggggcgtatgtgacactttccgtggcaccatcagccctgatacttacaaagatttcattcttactatgctgtttctgaagtacatctcggatgtctggcaggatcactatgatggttacaaagcccagtatggcgatgaaccagagctgattgaagagatgatgaagaatgaacgctttgttctcccgaaagatgctagcttttatgcgctctataagcgtcgaagtgaggcgggtaacggtgaacgtatcgatgtagctctacacgcaattgaagaagctaacggcactaagctgaaagatggcagcaagagcgtgttccaggaaatttcatttaataccaataagcttggtgatgaaaaacaaaagaatctgattttgaagcagttactcgaagattttactcatccagagctgaatcttaagccaagccgggtgggtggattagacgtaattggtaacgcttatgaatatttgattggcaagtttgctgcgaacagcggccagaaagccggagagtactatacgccacctgaagtgtcagatctgctcgcagctttgcttgacccacagccaggagaatctatctgtgacccaacctgtggttctgcttcgcttttgatgaaatgtggcaagtgggtggctcaacagcaccatagcaagaactatgagctttatggtcaggaggcaattggttccacctggtcgctggctaaaatgaacatgtttctgcacggcgaggacaaccacaagatcgagtggggtgacactatccgcaaccccaagctactcgataaaaatgctaacctgatgctatttgatgtggtaaccgctaatccacctttctcactggagaaatgggggcttgaagatatttctgacgaccagttcagtcgttttcgtcgtggtctgccgcctaaaaccaagggcgactatgcgtttatcctgcatatgatcgaaaccatgaagccgaaaaccggacgtatgggtgtggtggttccccatggcgttttgttccgtagttccagcgaaggaaaaattcggcagaagttaattgaagaaaaccttctggacgcggtgattggcctgccggaaaagctgttttttggtacaagtatacctgcggcaatcctgatttttaaaaagagtaaagtggacgataacgtgttgtttatcgatgccagtcgtgattttaagtcgggtaaaaaccagaaccagttgagtgcggaaaatattgccaacattgtcaaaacctaccgtaacggtgataacgtcgacaaatatgcttatattgccagtttgcaagagatccgcgacaacgactacaacctgaatattcctcgctacgtcgatacttttaaagaagaagaagaaattgacctgatggaagtgtacaccgagcgtgaaaagctaaaatcgcagttggatgatcttgaactaaaaatggctaagtaccttgaggagttaggctatggtgcctaa

SEQ ID NO: 79596 - DNA, 1206 bp, Citrobacter koseri
atggtgcctaaagagtgggactttaaatcattagatgagttggcattagttgagagggggaaattctctgttaggccaaggaatgatcctcgatattttggcgggatgataccattcgttcaaactggtgatatatcgtcagcaggaacttatctaactaagtttaagcaaacattaaatgcagagggtgtcaaagtaagcaaagtttttccccaagagactattttaatcacgatagcagcgaatattggtgatacagctatcacgacttttgatgttgcatgtcctgatagtgttgtagcgatacaaccttataaggagaaggtagatgttttttggctaaaaagtgtacttgaaactaagaagaatgagcttgattcccaatcaactcagaacgcccaaaaaaatatcaatcttcaagtattaaagccattgctcataagaactcccccattaccagagcaaaaaatgattgcccaaatcctttctacttgggataaggctatcacaatcactgagcaactactcgccaatagtcagcagcagaaaaaagggctgatgcagcaattgcttactgggaaaaacaggtttcaagaatacgataatgagtggagtaattattttctcagtcagttgtttgattttaaaaaaggcaaaggactatcaaaaggtactttggctagcgatggaagaaagtgcattttatacggtgagctttataccagatatagtgaggtaattacagatgtggtgagtcggactgctgagaatgatggttttacctcaaaaattggtgatattttaatacccgcatcaacaacaactactggtatagatctgtctaatgcaacagcaattttagaagatcaagttttgttgggaggagacataaatgtattacgacccaagaaaaaaattaactcagtgtttatggcttacttactgacacatattaaaaaaaaggacattgcctcgagggctcaggggataacaattatacatctttatggtagtgatttgaaaaccattaaagtatttattccagatagcataactgagcaagaaaaaattgttactgttttgttgacttttgataatgaaatagaaatcctaaaacaaaaactaaacaacttaaaacaagaaaaaaaagccctgatgcagcaacttcttaccggtaaacgccgggtgaaggtggaggccgcatga

SEQ ID NO: 79597 - DNA, 1047 bp, Citrobacter koseri
atgactgataaatatttacctcaacctccagcaggtgaattcctgctgttccaaagcgaagatggtcgtgcacgcgttgagtgccgctttcagtcagatacgctttggcttactcaggcatccatggctgagctatatgataaagatgttcgtaccatcaacgaacatttgatcaacatcttctctgaaggtgaacttggtcaaaattcaactatccggaaattccggatagttcgccaggaaggaaaacgtcaggtttccagagagatagagcactacagtctcgaagccatattggccgtaggctatcgtgttcgctcagttcgggggactcagttccggcagtgggccacgcaaaccctacaggaatatctgattaaagggtttgtgatggatgacgagcggctgaagaatccgcccgttggttcttctgtggtgcccgactactttgacgagatgctggaacgtatccgagatattcgtgccagcgagcggcgcgtctatctgcgtgtgcgggagattttcgcgctggctgctgattatcagccgactctgaaagagaccaccctcttctttcaaaccatccagaacaaactgcactttgtctgcactggtcgtacagcagctgagctgatccaccagcgggcagatgccaaccagcctcatatggggctcaccagctataaaggcaatgaagtacgtaaaggcgatgtcacggttgctaagaattacctgacccaaaaagaggtcagtgagctgaatcgtgtagtgaatatgtggctggactatgccgaagatcaggcgctgcggcgtcagcagatttttttgcaggactggcaggagaagctggatcaattcctgcagttcaacgaccgtaatgtgcttcagggcgctggcactgtcagtaagaaaatggcagatgaaaaagctcagggtgaatatgcaagatttgcagagcaacggcgtttattaaaagaggccgagggtgaaaaggatattaccgagctactgcactggaaagccgataaagataagggaacatcatga

SEQ ID NO: 79598 - DNA, 3279 bp, Citrobacter koseri
atgagcatacaaatcgcgccaaaattccaggaagagtacagtgccaagctcccggcgctggctctcttgagcaatttaggctggaggtatatttcaccccagcaagccttgtctgcgcgagcagacaaggcagatcaggtggttttaaaccagattttgcgtgaacagttagccaagagaacgtttatctttgccggtaaagagcatgtcatttccgacaaagcgattgatagcctaatcgccgaagttaacagcccggcattaaaccagggattaattaccgccaatgaacatttgtacaaccacttgttgtacggcatttcagtgacggaatttatcgatggcaagcgggtaaacccaacaatctcgttgattgactggaacaacccgcaaaacaacagctttgttttcaccgaagagttcagcgtgacacgcgctaacggcattgaggtgcgcaggccagatattgtctgctttgtgaatggtattccattggtagtcattgaggctaagcgtccggacggcaatgctaaaaaaggaccgactattgacgaggggatctcacaaagcctgcgaaaccagcgtcatgatgaaattccgagactgtttgcctacagtcagatcttactgtcgataaacggtcatgatgggcgttacgggacttgcggaacaccagccaagttttgggcgacatggcgggaagaagatatctccgatctagagatgcttgccataaaaaaccgcaaacttaacgcgcagcagatggattcaatcttcagtcaccgcccggttgcatgcctggaatggtatcagaacctgatcgcagggggcgagctagctttaacgggtcaggatcagttgcttataagcctgctgttacctgagcgcatgctggatatggctcgcttcttcacattgtttgataagagagccggtaaggtcattgcccgatatcagcaggtattcagtatcaaacgactactacagcgtatcgaaacgaagaatcctgatggtagccgcaacggtggggttatctggcataccacgggttctggtaagtcgctgacgatggttttcctcagcaaggccctgattctgagtgaaactctcaagcagtgccgcatcatcgtggtaaccgatcgcgtcgatttggaaaaccagctcagtcgcacctttatctcaaccggggaactggcaggtaaaagggataaagctgatgctattgccacctctggcagacgtttagccgaacagataggcaaggggactgagcgcattctcttctcgttgattcagaaatttaacacggccacccgcttgcccgagtgcgtgaataccagctctaatatcatagtgttgattgatgaaggccaccgtagccatggcggtgagagtcatcaacgcatgaagctggctctacccaacgcagcttttgttgctttcactggtacgccattgctgaaagatgataagaccactaataaatttggtcccatcgttcatgcttacaccatgcagcgtgcggtagacgacaaaaccgtcactccgcttctctacgaagagcggccgcccgagctgaatgttaacgaacgagctatagatagttggtttgaccgtatcaccgaggggttaacggataaacaaaaagccgacttgaagcgtaagtttgctaataaagggcaggtctataatgctgacgatcgtattcaccttattgcactggatatcgccaaccattttgtcaaaaacatcgacgatggcttaaaggggcagctcgcctgcgacagtaaagcagcagcgataaaatataaaaagtatcttgatgaagccgggctgtttgagtctgcagtggtcattagttctcccgacacgcgtgaaggaaataccgaggtggatgaatctggtatccctgatgtgaccaaatggtggaaagataacgtcggctctcaggatgaacaggtttacacgcgcaatatcattgatcgtttcgataaagatgattcgctgaaactactgattgtggtcgataagttacttaccggctttgatgaacccaaaaacgccgtgctttacatcgataagcctctcaaagggcataacctgattcaggcaatagcccgtgttaaccgcctccatcctaagaaaaaatttggtttgctaatcgattatcggggcatcctcaaagagctggataccaccattgaagattaccagaagctggcatcccgcacgcagggcgggtttgacatcgacgatctggtggggctgtacggtcagatgagtacggagtacaagcgccttccccagctgtataaaaatctgtgggcgattttcgcaggtgtaaaaaacaaaaacgatattgagcaactccgtcaggtgctggtgccgcgcacggaagaaaagcatggcgaaatggttgatgtgcatcttaaagtccgtgaagacttttatgaggcactcacgcaatttgccagctgcctgaaagtggcgttgcagtcggctaccttctttgaggataagagtttcagcgaagaagaccgccagcactataaagagacgctcagacaatttaccagcctgcgtcagctggtgaagcaggatgccggtgagacggtagattatgatcagtacacggaacaggttaaaaagctgctggataaacacgttgttggtgtagaagtccgcgagcctgatggagtgtatgaagtcagcaaaatgggacaacggcccgaagagtggagtgaagataaaactcgcaacgaaacggatattattaaaacccgcgtaacccggatgattgagcaggatttacgtgatgatccttatgcccaggaagccttctcgaagttactgcgtctggctattgaagaggccgaaaaactgtttgatcaccctctcaagcagtacatgctatttcgtgagtttgaggagcaagtacaggaacggcggctgaacgaaatacccgacgtatttgctggtaatcaccatgcacaggcttacttcggcgtgtacaaaaaagtactgccggaggtttttgccattaccgattctcaggttatcgataagtgggtgaagcttgcttttgaagtagacctggctgttgatatctcagtggctgagaactcgatcaatccgcaaaatatcgaggctgatattcgcaagaagcttctaccgatgatgtttaaagagtgtaaggcaataggtggcggaatggatcaggcgaaaaagattgtggaaatgatcgtccagattacccgcgtagggctgagcggagtctaa

SEQ ID NO: 79599 - DNA, 735 bp, Citrobacter koseri
ttgggcgaaagagcaatgagcttcatttatggtgatgaacgcattaccttcgagtgtaaaccccgaccgttggtaaatgggcgtatcctgataaaagttcatcccgactgccgggttgtagtatccgcgccgcaggataccgatgaccaacaggttctgaatgccgttgaaaagcgtgggcgctggatctatcagcagctacgggacttccgtaagcagctggaatatataactccacgacagtatatcagcggtgagagtcactattacctgggcaaacagtacatgcttaaggtgatagtggccccctctgaggctcagggcgtaaaaatgttgcgtggcaagctggaagtcaccttacgccataagagcgctgaaaaggttctgcagttgctgactgactggtataaggctcgagcccgcgaagtcttcgccaaaaggctgagcgctatgctggagcaagcgttatgggtcagtgactcaccgccattgcgtattcttaccatgcagactcagtggggaagttgttcccccaatggaagggtgaccctgaatcccaatctggtaaaggccccacgtgagtgcatcgattacgttattttgcatgagctatgtcatctggccgagcataaccatagtgaacgcttctaccggctcatggggcaggtaatgcctgactgggagaagatcaagaagcgtttggacgggatggctgggatgataatgacaagctga

SEQ ID NO: 79600 - DNA, 630 bp, Citrobacter koseri
atggaaaaaatcatatgtgctctgtgtaatactgcagttgaggtgacggtgctgtccagtcatttgctaaccaatcatggctggaagatggcacctcatcttgctaagccggtagctgaggcaccgcttattgcccgtcaaacctgcaaatgtccaatatgtaacgtttctttcaaggacgcgaaaagattagaaaagcatataaataaagcccattcagaaagaccaagctcttctcccatcagtagtaatccttcaaagaaaaacagtgtaacgacgatttcctatcaatgggcgataactcaaccgctcgataaaaaatactccgctgtagtagagaaattcgttgctgaaaaaacgttatctgaaattgaaaaagaaataatgaccatcgtgaatggctatgatgcggcggatacttccagacagagtttgatgtcagggcggctcattctgcttgcccatgccaagaaaagacttgctgcaaaaagcaaatctagcaaaaacaagaaagtaacggcaaagggtaaaaaaaacaaaggtgccaagtcacgagacattatggaccaatacattggcggacgtaggattgttgtctccggtggtttaccttctctgggaaaaagataa

SEQ ID NO: 79601 - DNA, 1827 bp, Citrobacter koseri
atgaccacgagcaatgaacttctccttaggccaattagcgacctgatgaaacagcgttttttcataccttcataccagcggggctatcgctggacgccaaggcaagtaacagatctgctggatgacatcgcggaatttcagaaaaacagcgagtcaagttcccgcaaagccttctactgcctacagcctgttgttattaagcaatgtggcgaagaatgggaattggttgatggtcagcagcgcctgacaactatttgcattatccttcattatctgaaagacattgccgctatgcttggacattcagggtactctctgcgctacgaaacccgccccgagagtgcaagtttccttagcaatatcaatagcgatcacgcagatgataatattgatttttatcatatgaatcaggctcgggaagcaatagacgcctggttcagttcacgaccgcctgtctataagttcagctttttgcagactctgctgaatgatgatgaggccggtaaaaatgtaaaagtgatctggtatcagctaagcgatcaggcaaatgtgacggaggtcttttcccggcttaatcgtggaaaaatcccgctaaccaacgcagagctggtcaaagcactgctgctcaatgccggaaatttcagtcaggcgaccgaactcagcgttcgctttaatcagctcagaattgcgcaggagtgggatgaaacggagcgccgccttcagcaggaagacttctggtatttcatcagtaaccatacccgtgagagtaatcgcatagagtttatacttggcctggttgcagattcattaaagtcaggtatttcccgtcaggatccacactacatcttcctgtcgttcgcccattacctagaggaattgcatcaggatcaggatcgcatagaaaaagtgtgggtgcttattaaacagcgctttatgttgctggatgaatggtaccgtggacgcgtgacttatcatcttgtcggctatcttatcaataatagtgagagcgtcattccacagctaatcagcgaatctgaaagctgcgagaaaaagtcagaattcattaccggactaaagaaaaggattctgcgcattgctctgccgggactcgtgggctcgttgagcagggagcgaaccgagcgcagcaatcagattgacgccgcgctatccgcgctgacctatccagagcggtcgctacgtcccgtgcttctgcttttcaatattgccattttgttgacgaacaaaacatcctctacccgtttcccgttccggcattacaaactcgacgcttgggacatagagcacattacgtcagtcagctcgcaaatgccggaaaatatcagcggacagaaggcttggacggaggtgatgcgagaacatttccggccttacaatatcacagaggaagggctagacccggcccggtcggcacagcatgtgctctttgaacgcgcggagatgttgcttctggaggagccctttgacagtgaaaaatttgaagcctatttcagcgatgttctgaatgagtacagccgtacgccgcaacaggatagggatgacagcattggaaaccttacgcttttagatcagtcaactaacagaagttaccgaaatgccatctttccggtgaagcgtaatcgcatcattgaagcggatagggcgtcaacatttgttcctcccggtacacgaaatgtatttctcaaatattacagcagtaacgtccacgatatgactttctggaatactcaggatcaggatagctatcgatgcgcaattacagatgcgctgaccgtattttttgatggagcaacgtatgcaacaaggtaa

SEQ ID NO: 79602 - DNA, 2211 bp, Citrobacter koseri
atgcaacaaggtaaaaccatcacattcgccagcttattcagcgaagtcagcaacgttgtgatccctatcatacagcgtgattatgcccaagggcgcgaggaggcttgggaagttcgcgatcagtttctccattcgatcagccaagcactaacagctcctgtcgacgcactgccgctcgatctcgattttatttatggaaacctcagcactgaggagcgtcctactctttcggtcctcgatggccagcagcgccttacgactctcttccttttgcactggtatctagcgaacaaagagtcgaaatatgctgattttagtgaacgattcgcttatcagggcaaatcccgtttcacctatcagactcgcactgccgcaacggagtttttccatgcactggtgcgagccgacaacagtggtctaaagtttgcggagaatgcccccgctcttcgggagcagataacggatagcagctggttttatcactcttggcttcaggaccctacggtctccgccagcctgacgatgcttaatgcgattcaatcatgcttcggtaaagtgccgagtgagctttatgcaaaactatgtagttctgactcccagccagtggtattccagtatctgaacctgtcctcatttggactttctgacgatctctatatcaaaatgaattcgcggggaaaatcgcttacagatttcgaaaatttcaaagcttggctctcaggcagaatgagccagcagcccggtgctgtgacctttggtgagaaaatcgatcaggcatggaccgatatgttctggaacctgagcaaagaaaggaccgaaagctttgataccctctttctgcgcttttttaagcggatggcgtttcttcttgaatgcagccagtcatctgaacctgcatatcttttggcaaacctaaatgcggcctggttcaacgccctgagaagcatccgtgaaggttttagttcctcagaattcgaagcgagggataccttcaaccccaggaacattcagatcctctcatccatactggattttctttgctctccgcacgcaacccgtgaacaccgtatcttgctgattgaatttttgacgggctctgacttactcggagcatgccgtttttatgcactctgtgcatttattactgccaagagatcgtccatcgatgcccgcttcgctgagcagcacgctcaatggagccgtgtcaccgataacttcctttacaccatgcgtattgacagtaatcaagttgcagtggggattattcgttcgcttgatgaattggccccctatgctgatgacatttacagctgtctgcgtacagttgaagttcgactgggttttaacgagcagtgggatgaagaagcgcttaaagcaaagctgattattctggatagtgcatgggagcctgccttaattcgggcagaatctcatcctcatcttaaaggtcgcataagggggctgctcaagggggccaaaactgctgacaatagcggttacgatcttacccgatttatatcactgacagagaaaacctattgggtgcttaacgaaaaggttctgcataactacgagcacctacttgaacgtgcgctactgtcattgggagactatctgatatggcagaaaggacaacgatacactttttgcctgccttcgcatcagtcttggcgtgagcgtaatgagaactggctgagggtaacagagaaaagcgtgtttattgagctgctggataagctgaataaaaaagaagatatgtcaaatacgctccgagaaattattcaggaatcaaaccccggcggctggcgtgaactggtcgtgaaagaccctgagaccattcgctattgttcggaaaggattatcgacaaattagataaccaggtgtatctgctaagtaagacaaaccttcgcggctatttccgggagctgcacagctgggtgctttcgaaaaagttgttggcccttcttcgcagagaggatggaaaagcgcctttcactgccgtgacctatcactcagtctatggggatgcatggccatgtattgagcttacggtaagcgaagaggaaacgttctttatcgcacatgagaacggagtctggtttgactgtcacaatttggatgaagaaggtgagccactccccctgccgtccttctttaaaccactggtagataagttgatgcatgaagcggatacagtttccaaaacctaa

SEQ ID NO: 79603 - DNA, 228 bp, Citrobacter koseri
atggctactatcaataatcccattcttagtgctgaagacccgcttatagacatgacttttatcactacatataccggtatgaccgacaaatggttttataaacttattcaggacggagttttcccaaaacccatcaagctgggacgtagctcacgttggtttaaaagcgaagtggaaacctgggtgctacagcgtattgctgactcgcggcggatagaaaaattatga

SEQ ID NO: 79604 - DNA, 570 bp, Citrobacter koseri
atgaattacacctctaatcctttctggcaacaacgtattaccgacaccttactgaacgcccttaaggcttatccgcgagtattaatgctgagggttgatctacgactacccaatgtaccagcagctacagatgctgctgtcatctcccgatttatagactctctgaaagtaaagattgcagtgtatctgcttcgtaaacaccgcgagggcaaccgaaaacgcatgaccaacctgcgttatatctgggcaaaggaatatggagaacgcaacggtaaaaagcactatcacatggtgttgttgcttaatcgcgaagtctggtgttccgcaggcaactataacgatccggcttcactggcaggattaatcaaacaggcatggtgtagcgccttacgggtaggtactcaggagtatgcaacgctggcacactttccggaaagcccggtgtactggattgaccgagggaataacgagcaactacaggaggcattattacgggcttcatatcttgcaaaggaccataccaaggttactggtgatggcgagcgtaattttggatgcagccagcgctga

SEQ ID NO: 79605 - DNA, 921 bp, Citrobacter koseri
atgctgataagggaatatctttcaacctttccattgtctatgctcaggcgcatattaatatcgctaaatataacgatagcaaactcaaatttccctcagatagccaataatgccccggcattaatagattttatttgctcggatgtcgcttctgataaaataaaatctccttttgataagataaataaacttgtaaaagatgtagaaagtgacgctttctccgatggttgtattgtatggcttaaaaatgatatcgaggcatgccactatttctggtggaatctgatgcagctcgaatggaaaggtgtgtttaaactgctcagagcggataatatacatctctacagtgatgtggggagtaagcagcaagctcaatgcgtttttgatacattttgtttgcccagagtcgtaggcggacataaagaacgttataaatccatttttaccttattaagtttgttgccattcaaaaatactgaaataaatcttctgatttcacatttatcctgtaactacaagagagataaagagatatgcaggcatgaggtcaatgtcacctctttgatgaaaagcaaagagtcggtttctttttcagtttgttacttaaagaaaaaaaatatgttcctggctgatttagaacctctcacggagagtgatagtaaatacgcattaatcacacagctttatatgcttacaagagaagacaattttaaagagttagtcgcctcgttgactaaagcttggtcacaaaagaaggtacgtgaaaaaagaaaagagacggataaaaaacagactgccgaacttctcggcttgagcaaagaaagcatcaggatgcttaaggaattatcaaaaaaacacagtatgggccaatcagaactgatggatctggctatacagtctttgttcgaacaaatgcaataa

SEQ ID NO: 79606 - DNA, 729 bp, Citrobacter koseri
atggctgtctaccgtaacgaccccgatttaaacctgctgggccagtgcagcaatgaagagctgcaactgttggtttctattctgatcactgaccctcgtgacggtgacacccgctggacagagagcctgaccagtacccctgaataccgtctgctggcaccggaacaccgccgctactggcaactgatagcggctgaacttcagcgttacggggccaatacgctggtaagtttgattaggctggggcagggcgtgacctatcgagaaatcctcggtgatgtttgcgacaaacttgatgtgaacttcaacctgaaaagcaccaccgagaccattgagttgtgcctgctgatgaaggtgctggagaaaagcctggaccagatgacacccgaagaactggctaccttttcccgcaatatgcaactcgacctaaccaaccccacccctcagctcattttgatggcagtacaggcagccatacgtacctcctcgctggctgcactggagcttgccaccgtactgtctgcaagcgtcattacctcactaggaggcgttgccacttggggcacggtagtggtggcatccagagcactgtccgttatttccggtcccatcgccattgcgctcagttcggcgtggatgatttccgacattgcgggtccggcttaccgggtcaccataccggcctgcatcatcgtagcctggctccggcagcaacgtctttcccgctaa

SEQ ID NO: 79607 - DNA, 678 bp, Citrobacter koseri
atgtctgaacagggacaccgctatgatcggttggccagccgtctcgccatcctggtcagtcgcctctttatgggcgaatcactcagcgtcagacaattggctcaggagtttggcgtttctgagcgtaccgttcagcgcgacttgcgtgagcgtctacgttatctcgacatcgaatattcccgtggaagcttccggctcctggacgcccggggtccctttcgcaccaacagcgacattctccgctttgcccggataaccagcgtggcacattactttcctactctggatcccaggctgctgtcggtgttgctcgacagtggtcaggattctccatgtattatctggaatgccccgccacgtcaggcacctgcgttgtttggtggtttccaggctatcgttcaggccatcatccgtaatcgccgtgttcactttctgcatcaaggccatcagcagtctgcagtggccccttaccggcttatctgtctggacggggagtggtacttggtgggcgtatcgaaagatcgcattcaggtgttcaccctttcagccatcactgatgtggtgatgaccctcagctgttttgtgcgaaacagccatatcactcgcatttttcaggacccgagattcattcaggccctgccgcattatcaatatatcagcgggctcatcagggaatga

SEQ ID NO: 79608 - DNA, 465 bp, Citrobacter koseri
atgaaaaattcatcactcagcgcgttggtgctggtctgtggccttgttccggtcatggcgcaggcttttggaaataaggacacttggtccagtggttggagccaaggcgtatcagagtttgttatcaaggggaaaggtcagtcacagttatatctatcctgtgaggattatggctcacagccggctacggtcatatttacggacgccagcgggcatgaagtcagtatggatgaagataaaaaccttcaggtcagcattgacggtggagaggccattgatatcagtgagtctggcagtcgtctcggcagcaataacctggtgctggcctggacacagttgcgtaacggcaaacaagtctcggtatccggcgaaggtgttaagccagctaccttcacgctagctggggctgcgaaggtgctgccagagtttggcacacacggctgtgtggcaaaggcctcactctga

SEQ ID NO: 79609 - DNA, 360 bp, Citrobacter koseri
gtgaaaatcaaacaatggttgatacccgcactgcttttattgtctgcttcggcgctggccgagccaacttctccaataaaagtggagaccagtgattatgttcatcctgccggaacacgctacgccactgtagtggtcacctcgctggatgacagtgtgaaagttgaaaacattgacgttaatcggggcaactgccgcatcgacaacaaaaagtttatgtcctccgttaacaaggaaaccattctgccgatcactctgcgctacgggcagtccgtcaaagtgaatttttataatgagtgcgtggcttcggaagtggtagtcaccaccgacagaggggcgtggcgctacacctataactga

SEQ ID NO: 79610 - DNA, 213 bp, Citrobacter koseri
atgatttttctgaaaatgctggtgaccgctttgggtcaggttctgacctggtacggcggtcagcaagcccgacaatttattgaaatccgctttcgtcaggccggtcgcgatgacgacagcatagatgcagccagagaagcagccacgctgctggtgaccgcgctgataactgccctgatggtgcagatattacggatcctggacaacttctga

SEQ ID NO: 79611 - DNA, 471 bp, Citrobacter koseri
atgtctgtattcaatttatccccgatatttcctgcaaacgagcaacgcatcattcgtcgggcgttacgactgctggagaaatatcagcgtcaaccgagtgagccatttacttccaccagcttcactaaaacctggctgcaattacagatggctcatcaggagcgtgaagtttttatcgtgatgtatctcgataatcagcactgcctgctgggatgcgaaacactgtttaccggcacacttagccataccgaagtgcatccccgcgaagtggttaaattggctctgaaacacaatgccgctgcggtaattctggctcataaccatccgtcaggtacgccagaaatcagtcagcaggataaacacatcactcagcggatagtgaaagccttggcactggtagaagtgcgagtgctggatcatttggtggttggaaacgaggtggtctcctttgccgagcagggtttgctttaa

SEQ ID NO: 79612 - DNA, 321 bp, Citrobacter koseri
atgcacatttcatctgtaccggccatggtgccggtttcgtcacgtctgtcgcctgtgcaggtgtggcagcaactgttaacgtatctgctggagcatcattacggtctgacacttaacgacacgccattccacgacgacgcggccatccaagagcatattgaagcaagtattacacttgctgatgcaatgaatttcctggtggaacgctatgaactggtacgcatcgaccgcaaagaatttacatggcaggagcagacaccatttctgaccgcgaccgatattctcagagcccgtcgagctaccggattaataagtacctga

SEQ ID NO: 79613 - DNA, 831 bp, Citrobacter koseri
atgcaaacagaacccgacgtgttgacggaacacaatgagctcattctttcgaccagtatcgaacgtgtagtcactggacgcgattcctcgctaaaacagatagaacaactcattgaacagcttgatgccatttcacggttaacctcagaaattggcggtggtacagcgcaagactgggcgatgaagccagggcaccgctacgatagttggctgactgagaaggcagataaagcgatgcctgccgtcacccgcaatatcgacagtagtatctggcgcgatttgatgctgaagtccggtatgatggccttaatggatgcacaggctcgcgaccagtggcacaagaacctggaggagggcgatcttcctgctatcagtgaggcgaacattttcagtacttttgaactgttacatcttaacaaaatggaagtctttgagcgcgggatcattaacgtcttcaaaggcctgtcgtgggattataaaaccaatagtccctgcagctttggtaagaagatcatcatcaataatctggtgagccacaatcgctggggatttagtctgaactggggttggcggagggatcagttggctgacttggagcgaatgctgtttttactgagtggtaaatcaacacctgacaaccgtagcgatataactactcggttgatggcgcatattcgagataacccggataagaatgtttatgaagatgagttcttccgtattcgctactttcagaagggcactgcgcacttgactttcaagcgcctggatttggtcgagaggatgaatgatattatagctaaacactacccaggaatgttagcaaagtag

SEQ ID NO: 79614 - DNA, 594 bp, Citrobacter koseri; identical to SEQ ID NO: 75561

SEQ ID NO: 79615 - DNA, 873 bp, Citrobacter koseri
atgatatctctcgaaacgctgcaatcagccatctccaacgtttccgtgtggcgtcagggtgacgtatgcgcgccacacaagccgttgctgctgttgtatgtgctgtcacagtacaaagcaggccatccacgcttgtttaactacggcctggagatccacgtaccgctcactcgcctgctgaaagagtttggccccaagcggcgtactgactatcccaatatgcctttctggcggctcagaactgacggcttctgggaaattgccaatgcggaaggctgcaaaccccgtagaggcaacacccagccgacaaagaaagagctgattgataaccaggtagcgggcggctttaatgaagccgcttaccaacagttacttgcacaccctgaagtaatcgaccaactggcccagcaaatcctgatggaccgcttccccgaaagcattcagaggatcctcgccaatcaactgggtctggattttatcgaccgatcaaagaaccgcgatccgcgcttcagagacatcgttctccgggcttaccattcgcgatgtgctttctgcggttacgacctacggctggatggtgcgctggttggtattgaagcagcccatatccactggaaaacctatggtgggccgtgtgtggtaaacaacggtctggcactgtgttcgctgcaccacgatgcttttgatatgggcgcattcgggctggatgaaagcctgactatccgcatctccggcggcgtcagccgtagcccggtggtggacaacctgttctggcaacgcaacggccagcagttgtatcttcctcacgacaaatcgctgtggcccactgaacaatacgtcggctggcatcgtaagcagatcttcaaagcctga

SEQ ID NO: 79616 - DNA, 345 bp, Citrobacter koseri
gtggtaaaccgcagctaccctctgaagatgcggatggacaacggaccagagctggtctcactggctctggcgcagtgggctgaagagcatggcgtgatgctggagtttattaaaccgggtaaaccgacgcgaaatgcttttatcgaacggttcaaccggatataccggacagaaatcctggatttttacctgttcaggaccctgaatgaagtacgggaaatcacggagcgctggctgacggaatacaacagcgagcggcctcatgaatccctgaaaaacctgacgccggaagaataccggctgatggctgaaaaaccggaagtctcaaaaagtacgtggaactaa

SEQ ID NO: 79617 - DNA, 1668 bp, Citrobacter koseri
atgacaagctctactgattttcataaactttctgaagactgcgttcgccgttttttacattcggtagttgctgtagatgacaatatgtcttttggagcaggtagtgatactttccctacagacgaagatattgatgctttagttgatcccgacgatgagcctacaccaataataacatcatcagcattcccaggggtagaatcaactaaatcaaaagcaaaggtaaaaaaccatccttttgattaccaagctctagcagaagctttcgccaaagatggcattgcttgttgcggattattagctaagagttttaatgttgaagaaagagatataattacagcatcatcccgcaagtcagatataacaatacttgactgggatatgcaaagcgatagtgggcaatttgctattgaaataataaaatcgataatcgtttcagatataaattctggaggacgtttacgtcttctttctatttatactggtgaacatgttactgctgttataactaagttgaacaatgagttaaagaaaacatactgtagcgtaataaaaaatgatgatagtatttttattgaagataactatgcactcgaacaatggtgtatagttgttattagtaaagacgtttatgaaaaagatcttccaaatatgttaataaaaaaattcactaaccttacagctggattgctatccaacgccgctctctcttgcatttctgaaataagagaaaaaacccatgggatattaacaaaatataataataaattagacactgcatatgtttcccacatcttaaatttaatgaactccaaggaatcaaggccatatgcttatgaaaatgctcatgattatgcagtagatttaatttctgaagaaataagatcaacattgcaaataagtgaaaacttaaagaaatctctaagcaaaaactccttatcccattggcctatttttcactatacaaaaaatggttgcaagaattttctattaactggaaaaaaacaaaaagacttatcagtagaacatctaaggaatatactctctgctgattctttagaagaaattcaacatgctattgaacgcgcatctttaggtaaaaaggaatacttaagccaagatggtgaagaagataaaaagttaatgcaattatgctccctggaaatcacgcgcaggaatttaagataccattctcatatagataatgtatccttaaaacaaggaactttgcttttagatgcatataattttgtctatctatgcatacaaccattatgtgatagcgtcagattgcatgaaaaagccgattttttattcctcaagggaacactagacgataataattacaatttgttaatcgaagatgaacatggcgatttttataaaattaaaatgccggcaaaagcttctaatattatttcattttcatttaaggtcgaaaatggaaacggcgtcatcatagggaaaaggaacaacctagttaatactgactatatctcattcgttcctttactcgttgaaaaaatatccactccaaaagtattgaaatggatcggggaaataaaaacaacgtacgcacaaaaaataacaactgatattgttggcaatctgtcaagaataggtttagatcaacatgagtggttacgaacaaaatcaaaagatatataa

SEQ ID NO: 79618 - DNA, 891 bp, Citrobacter koseri
gtgacagtacaatcgcagtttgctggcgtctggtgtccttccattacgccgatggacaatgacggaaaagtcgatcttaacggcctgagccagcatctcaaacgccttaccgaggccaacattgatgttattttgctgatgggcagcattggcgaatttgcgtctttcacgctggaagagcggctgatgctgatccgcgaggcccgcgcgatgagttcgctgaagatggttgccaatgtctcctccacctgcaccagcgacatcctgcttatggcgcaggaagcgtaccgcgtcgggtacgatgcggtgatgattctgccgccgtattactacgggcagacgtcgaagcagcttctgagctacttccgccagcttggcaacgccctgagcggcaaatggtttgcctacaatttcccggcacgcaccggctgcgatttaacgccggatctggtggcgacccttgccgcagaattcccgaattttgccgggattaaagataccgtcgactgccagtcccatacccgcagcatgattcagaccacccgcgcggtacgcgacgattttgccgtgctctccggctatgacgagtattacattcccaacctgctggcgggcggcgcaggcattatttccggcttaaacaacgtgatgccggagctgtttgtcagcgcgcgggaggcgtttaagcagggtgatttgcaaacgttgcgcgatatccaggagaaaatcggcacgtttatgtccatttacgcgattggcgaggattttgtaaccacgattaaaaccgtggtatcgcgtaagttcggctattgtaccggcgtgtcgcgtaatgcgggaggagaactgaacgagcacgagcgtcgcacaattgatgaggtgtttggccgttaa

SEQ ID NO: 79619 - DNA, 981 bp, Citrobacter koseri
atgtcgattaagaagctcgaaggtggtcaatatgaagtagacgtatggccgcgcgggcgtaacggaaaacgtatccgcaggcgatttgagaagaaacaagaggcggttctttttgagcgttatgtattagccaacgccgacaaaaaagaatggctgggcgcgagcgttgaccgtcgcaccttaagcgagttgttagatacctggtggctgctgtatggacagactcaggaaaatggcgagattgaaaagcggcacctgaataaaacaatcagggcgctgggtgatccagccattaaccgactgaacaagcgaatgattgcacagcaccgaggccaacggctggaagacggtatcagcgcagcaacgatcaaccgggatatttaccgcttatccgggatgttcagcacgttgataaagctggaagagttcaggaaggaaaacccctgcaagggtctggaaccactaaaagaagcgccgccagctatgacctatctcaccaaatcagagatcagcagactgctggatactctgaccggcgacgatagacgcgtagcactgctatgcctcagcaccggcgcacgctggggcgaaggtagtacgctgcgaggtgagcaggttaatcacgggcgcgtaacgttccttaagaccaaaaacgggaaaaagcgcacggttccgatatcggaagaactggagaaagagatcaagaccagcgacaccgggccactgttcaaagttgattatgaaaacttctgcgaacggctcaaacaggttaagcccgatttaccacgcgggcaggccacgcatgtgcttcgccatacgttcgcaagctggttcatgatgaacggagggaacattattgcgttacagcaaattctggggcacgccagcatacaacagacgatgctttatgctcaccttgctcctgattacctgcaacacgcagtaacgttaaacccgctcggcggggggttggcagtgtga

SEQ ID NO: 79620 - DNA, 462 bp, Citrobacter koseri
atggttatgaaacatgagggaagggatgagggattctgttgccgttatgcttctgcggggagactgatcgggtggtttatgtatggcgaagatatgcagaatgttatcttcgtggagtcctcagatagcggtgactttatccaggcaatcaataaagcgatcgctgatctgcaagagcgtctgggggctgaaaagcaatttatcaataatgcgcttaaggcgatggatgataccggtaaagacgattcaccacgtatttttgcgggttcactttcagatgaagaactaatttctttccttgaggaaataattgtcaaacttatgtcccgtagaaatctaacaggaaagacagagtctctacgggaacaggctagacaagcggaggaaaaactaaaatccaccaacgactttattaattcaatcgtgtatcggcaggttcgaaatcccaatcagaatccttga

SEQ ID NO: 79621 - DNA, 456 bp, Citrobacter koseri
atggaactcaacatcactactggttttaaaatctttgaaaaacactacaaccgtattgctgaatctctcggtgtaagtaatgcattagggcatgaacttgaaaatttcatcgctttccgcgctctaacccttttaaaactggatctattgttaattaatcaccgaaactcaattgatcaagaacgccagttcttattcggcaaatacactctccatcattatttattcaccaaaaaaggtatacagttttcagaagcaaaaaagttaagcctccacgatatcttattaattctattgcaagaagtttcaacttattccttaccaactgaactaatgaaccttcttaagaatgaatttaatttttcatcaaataacattaagtatgttaaagatgaaatgcgcgtattcaaggattctgattgggatttcgaacctgccgatacacgattgaattaa

SEQ ID NO: 79622 - DNA, 282 bp, Citrobacter koseri
atgacagacaaagagttagagggattcattgaagtgcgtcacgccgttgacgcggttccatacccaaagtttgccgagttaatcggtaaaaagcccgccacggttaagagcatgattgacgacggtaagttgccgatcatcccatggaagaacccggaaagcctgggcgcccgagctgagaactggatctatattcctgagttcaaccgtgcaatgcgtgacgcctactacaaccgtccgagagagcagcgcgacgcctggttactgtggattgggctgtaa

SEQ ID NO: 79623 - DNA, 225 bp, Citrobacter koseri
atgaccgcgcttatcgttgatgcgctgatcggttctgtggtgtcggcgtggttcttttttacaggcgtcggaatcatctttttactccgctataagcataagggcgttcgtttttcccaggtgcttaaaatccagcttcatatggtaagtattgttttagaggcaatggtctggggagcaatggctacctgtgcagtagcgtttgttctgagtcggattttttaa

SEQ ID NO: 79624 - DNA, 201 bp, Citrobacter koseri
atggaacaggacaacaaacgacagaaccgggtaaatgaatgcgctgaaattctggacacccatttaaaagaaatgcaaacgggcttcatgattcgtaccaatagcggcgagttcatggtcagggataaaaagctgattaagaaaataaccaaagacgtggcccgccatgttgatggtgaattgcttaaattgggaatgtga

SEQ ID NO: 79625 - DNA, 207 bp, Citrobacter koseri
gtggctgtgcaattaatacagttgagtcgtcactcatatttatatcgtggcttcactattcagaaatgcccgcgtaatccttttacgctgaaacactcttaccaaatttccagtaatggcgattatttcgggcgtgactttgctttagcggaagccatgcgcactgttgatcagatgtataagcaagggggaagcaatgcacaatga

SEQ ID NO: 79626 - DNA, 231 bp, Citrobacter koseri
atgcacaatgatggcccatcactggcaagcctgcttaagcacgggtgccaggtcacacatttcaagaactctcgcggctggctggaaacgccggacggaagattttttaagcccgaaccggcgaaggttcaatttattaagagtaaaaataaaccgtttgtttatacccaaagaattaataaaggctttctgcttacactggctgaattatttaaaaagctaattaagtaa

SEQ ID NO: 79627 - DNA, 222 bp, Citrobacter koseri
atgtctggtatgtcgaagcgtgaccaatatgattttattcttcatgtgtttcttcctgctattcaaaccgagggattaacaattaaaactcgtagcgctggggaattaaccctttcttctaacgatccgtctgtttccgaatttatcagcgatatgcgcaagcgtcttagcacaactttatcgcgtccgattgttccgttttccccttacggagttctttaa

SEQ ID NO: 79628 - DNA, 996 bp, Citrobacter koseri
atgattcgcccgatcatcaaatgggcagggggtaaaacccgtgtccttcctgacctgctgccgcatcttcctaaagccgactgcctgatcgaaccgttcgtaggcggcgcatcggtatttctggcgactgaataccgccgctatgtgctggctgatatcaacccggatcttattaacctgtatcgggaagtcacccgttacccggacttagtgatcgatgcagcccgcgaactgttcaacagtaagaacagcccgcaggggtacaacgaagtccgcgccgcgttcaataagcaagtaggtacggtaaaaagcggtgggttgcgttatggcgccgaaatggcgtgcatcatacgcgctgctcaatttctgtatctgaatcgtcacggttataacggcttatgccgctacagccgtaagaccggctttaacgtgccgtttgggaagtataagagcgtctactttcctgaaaatgaaatccgcctgtttgccgaaaaggccaacgatacaaaggcaatatttctttgcgcgccgttccagcgttctctacaggtcgtcacgggtggcgatgttctcgtttactgcgatccgccttacctgcctgaaagcaaaacagccgattttacccaataccacaccgaaccattcacggaagacaaccaccgccagttagtccaggcactgctggaagttaaccgtaagcatggcgtgaaggtcgtcatttccaacagcgacactgaagccacccgcgcgatttatcagcccttcaggatgcacgaaatcagcgtgcaacgttccgttagcactgacaaagacaaccgccagaaggccaaagaagtgatcggcgtgctgcctgtctgtgatggctgcgggcgctatgaaggtggtcactgtgcgcaatgttgcccaggtatcgccgcatgtgaagagggctggtcgtttgattgttgcggcaattgcgatatttgcgagccgtctgataacccagaaacgtggtaa

SEQ ID NO: 79629 - DNA, 990 bp, Citrobacter koseri
atgactgcctattacaacgaaatcgatcccttcgccgcgcaatggctgcgtaacctgatcgacgctgggcacatcgccccaggcgtcgttgacacacgttcaattgaggaagtaaccgcaaatgaccttaaaggattcacgcaatgccacttctttgccgggatcggcgtctggtcttacgccctgcgccgcgcaggatggcccgatgatcgccccgtctggacaggttcatgcccctgccagcctttcagcacctgcggaaagcggcagggaaaagacgatgagcgccacctctttcccacatggtttcgtcttatatcggagtgccgccctgacgttatctttggcgagcaggttgcgagcaaagacggcctcggttggctcgacgatgtacgcgatcacttggaaagagcggaatacgccttcgctggtttcgatctctgcgctgcgggcttcggtgcgccgcacatccggcaacgcctcttctgggtggccgacgccgaaagccaattcatggaaacatccatcgaatgcggggagagagggtggattgaatttgcagacggcggcggctttatcggggtggactacgccgagtgcgagcgacgccacacggggcggaacagggattactccgggtatgtccggcagcagtctggcgcaattagtgaagctggcaggttggcctacaccaacagcaacggacggaaagggcggctatcagggcgggagggtacgcaacgggaaggtgtcaacggatcggctggatgtaacggcgcagcttgcggaaccaatgcggttaacggcttctggggatctgctgactggcttttctgccgcgatggaaaatggaggccagttaaacccggacttaagccgctggttaatggggttgccggacgagtgggccagttgcgcgcctatggaaacgccatcgttgcgccggtcgcggaagcgttcataagtgcatatttggaaagtgcgcaatga

SEQ ID NO: 79630 - DNA, 2376 bp, Citrobacter koseri
atgaccacggcaacccgtggccgtcgcgctcctttccggccaaaagtcatacggtgtaagcctgaagattctgagtggtacagatctgaatggtttaaaccgcgccatgctattggccgtgatgtgcagccttctgctaatggttttgaatatctgacgccggaaggttcccgcaaacagattgatgttgcggatttgtttgaagagaatgaaaagccggagcgcagcaagctgctgcgccgccgtctggcttctcttccgcagtatatccgccgccactttgcttcgaagctggatgcgctggatgctaaagaccgcaaagcagcagatcactggctggttaatacctttgagcgccacgtattaacgcgtattgatagcgtgaacagcgtttaccagcctgacactgtgatgcctggaattctgctgccagtccgcgatcagcttttccgtatgctctgggcagggaaaaaagagttaaaaagactggcttatacacttgccgacatctttactagcgagtttatacgcgagtccgatcaccagttagcacgtaccggcgatccagagttcgccgcgctttccggctatggttgtatagcctcgctggcggtgcatctgaaaacgccgatccccggctggactgcatattgcaatgaagaactggaagcagaggacgcgttacgcgcggttcttcgtcttgagtcgccgcagtggtggttaaaccgcctgcgccgtatccatgcccactggcgtgaacatttaatgatcgcagcgggatacgtccagaaaaaatccgcaccttacagtagcgccccgtgccttacggaatggctggcccagaaaaaggctaatcgtgaataccttaaggctatggaactggaagaccaggacacgggcgaacgcatatcactgatcgataaagtcgccggtagtgttgccaacccggccaaccgccgccgcgaactcatgacgagaatgcgcggatttgaagatctggcgaagctggaaggcctggccggtgatttctacactctgacagcgccttcccgttatcactccatgcagcataacgggcgcaggaataataaatacgctggcgcatcgccgcgcgaaacgcagcaatatctttgcaaggtctgggcgagaacccgcgccgcatggaaacgagcggggattcgcgtttttggcttccgcgtggtggaaccgcatcatgatgcaacaccgcactggcatttactcctttttatgcgcccggaacgcgtcgggcaggcgcgcgaaatcttccgtaaatatgctctgaaagaagacggacacgaaccgggggcgcaggaaaatcgctttcaggttgtaccgatcgacgaagcccacggcagcgcaaccggatacatagcgaaatacatttcgaagaatatcgacggctttgcactcgatggcgagagggacgatgaaaccggggaagacctgaaagaaatgtcgctccgcgtcagcgcgtgggcgtcacgctggtctattcgtcagtttcagcagatcggcggtgcgccggtcacggtatatcgcgagcttcgccgcctgggtgatcgcgaactggtgttacaccctgaactggaaaccgccaggcaggccgctaatgcaggcgaatgggataattatgtgttagcccagggcggcccgctggttgagcgcaatagtctgcgcgtccgtctgaactatgaaaccacagaaaacggcaatgcctacggtgatgatgtccagcgaatcactggtatctattgcccgattacgggcagtgactctttgatcttcacccgcaccactcaatacaaaatcgtgccgaagcgtaaaagcgctgacggtgtggccgttgacgttggtttttcaggcggcaacgccgcccctcggagttctgtcaataactgtacgcgggatgccgcggcaggtgctgacggtgttgagcatgccgccagcgaagctacaggacagtcagaaatggctgtgccagctgagggcgtgacggtgaattttgatgcgctttcacggcaggaaaagcgagaactggcgcagcggttgggtgtgagcgttaagcgtaagaaactgaagccctacatgccaacgcgcgagcaacaactggaggaaagggaaatgattatcgctgaacttttgttagcaaaaggtctggaccatagtccggcgatcgtcaaatcacttttgtcgggagggattctcgcatgcgagaatgttgtttatgccgtaagggatgggaggctagtttcaggcaaaagattgcaccctacccgtgaacatgttttacatgtaaatgaggataaggctagtgagttagtctctcgcctgaaaaacgcattcaacaggggatag

SEQ ID NO: 79631 - DNA, 1350 bp, Citrobacter koseri
atgcgattgaccgcccccacaaaagcattctcggatggtttttctgaaaacgatgacatctttaaccgcaaacagcttcacgacatcatcatgagagttgcctcaaatgcccctgataaaagtcttgtattagcattagatgatcagtggggtaatggcaaaacatcatttgtaaaaatgatgtcatctgaaataaggaaaagccatgcggaacagtttgatgtgatatatttcgacgctttcgaaaatgattaccaatctgacccatttgtagcgttgacatcaaaaatttatgctctcgttaataaagaaaatggaaaattaaaaaacttaggtcaggagctactatctatagggaaaaaacttggtgcatcctttgcgatcaatggcgctaaatttgctgtaagcacattaactggcgggcttgtatcaggtagtgccattgaaaaagcaggagacgccataagtgactcgctttcatctcccatcgaagcattcattgaagaaaaaataaaaactggagaaaatgaattagccactattgatagttttaaagcgttgctcactaaaattcacaaagaatcagaaaggaaaattatatttattatcgacgagcttgaccgggcacgtcctgattttgctttagatttactggagaagataaagcatatattctctgttgaaggttttgttttccttcttgtaattaacagggcgcaatttgaaaaaagcattgagtgcagatatgggaatataaactctcgcttgtaccttaataaattcattcattactggtttactttacctaagaagaatctattcgcagaaggttgtcttgtcggttatgaacgttccacattaactcattacttattaaatattgatcatgaaaatcttctttctcgcaatggttcacttgttaaaacgcttgcttatcttttagaaataaataattgttcattacgtgaggctgaacgctgctacgctacatttgcagttatgaaaaacccgtgggaaataagcaactatcgtcatgaaatacttcaggtagctatagggtttgtggcatttttaaaggtacataatcaagaattattagttgatattatgtataagagaataccattggaagaagtgctaacccaaatgaaaataattgatgaaaaatcacaggaagttacggaagtatattatattatgatgcttttaaaatatcactacctaacagataaagagttatcttcagtagaagtaaaacaagaatatgcatttatgactggtatagcaaatagacgcttgaggtggcttgaagctatgttcgctaatgttcagggttttactgttaattga

SEQ ID NO: 79632 - DNA, 192 bp, Citrobacter koseri
gtgcggattcgcagcctcaacatgttcgtccagcagatcatccgcatatgctttcacctcaataattttgtcatctacatatttacgagttgccagcaccacggacggatcgattttcagcgttaccgcctctgtgctactgacgatcaggatcacgcgaataacctgcacgcgcccggaaccttcctgtaa

SEQ ID NO: 79633 - DNA, 582 bp, Citrobacter koseri
atgcttatcggctatgtacgtgtatcaacaaatgaccagaacacagcattacagcgtaatgcgttggagtgtgcaggatgtgagctgatttttgaagataagatcagtggcaaaacatcaaacaggccaggccttaagaaggtgctcaggatgctttcggaaggtgatacgttggtggtctggaaacttgatcgccttgggcgcagtatgcgccatctcgtcacattaattgaggaattacgttcatgtggcgtcaattttcgaagtcttacggatagtatcgatacatcaacccctatggggcgttttttcttccacgtaatgggcgcactggctgagatggagcgtgagcttatagtcgaacgaacccgtgcaggacttgcggcagcaagagcagaggggcgcataggtgggcgcaaaccaaaaatggcaccagaacagtgggcgcaggctggtaggctaatagctgcgggtgaatcacgtcagcgggttgccataatttatgatgttgggatatcgacgctttataaaaaattcccggcgaccaaaagtcaggattccggcatacatggacgattctaa

SEQ ID NO: 79634 - DNA, 2967 bp, Citrobacter koseri
gtgaaaagccttaatatccgcgtcgcgttcagcgcgatcgataaacttacccgcccggtcaatgccgcccgccagagtgcgggcggtttgtctgaatccctcaaaaaaacgcagtccagcattaaagacctggacagccagtcccgcacattcaaccgtctgcgcgacagcgtgcaaaagacctcccgcaaaattgacgacgccagccggacgcttgaagggctgaatcaggcgcagcgggaaggcacacagcttacagacaagcagaaagcacatatggcagcgctggccgcaaagctggagcgccttaactctgcccgtacacaggaaatggttaagctgcgcgccgcctcacaggcgctgcgcagccacggtgtctcgctggtcggcagcgatcgcaccattcagagcgccatacgtcgaaccgaacagtacaaccagacgctggagcgggaacggcgacagcttgccgctgtcacacaggcacgggcgcgctacgaccagatgcagcaaacggcgggcaaacttcgcggcggtggcacgatggccgttgccggggccactgctgctggttacgcagcaggacgcttcttatcccccgcagttgggtttgaccgggaaatgtcccgcgtgcaggcgctgacccgcatagacaaaagctcaacagacttttccgcactgcgtgagcaggctaaaaagctgggtgctgaaacgcagttcaccacgactgacgccgccagcggtcaggcgtttctcgctatggccggtttcactccgcaggccattcaggccgcattgcccggcgtgctcaatatggcacttgcaggaggaatggatttaggcgaaagcgccgacatcagctcaaacatcctgtcgcagttccgcctcgatcccaaagaaatggatcgcgtcagtgacgtattaactggcacattcacccgtaccaacaccgatctgcaaaacatcggtgaggcgatgaaatacgccggaaccgggctggctaacttcggtatcagcgttgagcaaacctcagcaatgattggcgtgatggcgaacgtgggcctgcgtgggagcatcgccggtacaggtttacagaaagttttctcgcagctggctgcgccgaccaaaaaagcgcaggctgcgctggcagaactcggcgtatctgctgcggatgcaaccggaaaaatgcgaccagcagaagccatcctttccgatctctatggaaagattaagaagtacagcaataccgatcaggcctctttcttcaaagatattgcaggggaagaagggatgaagtcacttcaggcgctggttaattctgccggacagggtgaacttcaaaagctgctgggtgaactgaaaaacgccaaaggtgaggcgcagaaagccgccaaaataatggcggataaccttgatggcgatctcaaaaatctggacagcgcctgggaaggtttccgcatccagattaacgatctcgtcgataatcagcttcgcgccctgactcaggggctgagtgacgttgtggggaatatgacggagtgggcgaaggagaatccgaagctcgcccaatccctgctggttgtcggcggcagcgttctggcgctgaccgctgccattggcggcacatcgctggcgatcggcctgctgatggggccgctggctaaactccagttaggctttaccctgctgacagggggtaggggcataaccggaacgattgccgctctgcgaacactcggcacagcttccggcccggcaatggcaagcgtgcgcggatgggggccggttctcggctcgttaacggggaaaatgcggggagtctcaaccatcatacccgctatgcgcggcgcactgacgggtgtatttcttgcacctggtgccgcgctgggcgcactgaccaaaaacctcggaatgctcgccctccgcctgactggtttaccggccatatggagcatgatcactactgcggtgtctgtgctgggtacagcactgtcgctgctgttgagtccaattggtctgatagtggcggcgtttgttgctgccggggttctcatctggcggtattgggagcctcttaaagcattttttgcaggtgtattcaccggcatcatggaaagactggccccattacgcgagaccttcgcgcagttcatccccatatttgacgcgataggcagcgctgttagccaggtctttaactggttcaaatctctgctttccccgatggagtccagcaaggaaacactggataaatgcgccagcgccggtgaggtgttcggtaacgttctgggtggtgcgctccagcttgttcttacacctgcaaaaatgctgctggatacgctggcgtggattcttgagaagctcggcgttctgcctgatgaggccgaaaaagccaggaagaagatcgaagacgcgcagcgcatggccgttcttcaggacaaaatagccctccttcagggtgatatcgctaaggtggaaccaaaaaaagttgaggtgaaaaacgttccacccggagcaccgcaacccatatcaccgctgaccggcgataacggcactatgcgccggttgcagaatatcgacagcaacaccaaagcgacagccgacaacacgaagaagatcggccccggcgatatcgtgtttaaaaacctgccgcgtgcgctggccgttcgtggggaatggaaggaatcgcagctggccagcacggtcagaaacaacgggttaagcgcacgccccgcagtggtggcggcatcgcttcccgttaaacaggcggaactcctgccagtcagcagcgctgaccgcaatataccgattgccactggcggctttacgggagaaatccacgtccacctgcacggcgttgaccggcaggacgcgcgcgaaattggccggattgctgccgacgcggtgaatgccgaaatggcccgccttgcgcggcttaatcgcggcagcttcaaagacagagattaa

SEQ ID NO: 79635 - DNA, 903 bp, Citrobacter koseri
atgaatcaaacctatgggcgactggtcagccgggcggcaattgccgcgacagtgatggcgtcactgttacttttgatcaaaatttttgcgtggtggtacaccgggtcggtgagtattctggctgcgttggttgactcgctggtggatattgccgcgtcgctgactaacctgttagtggtgcgctattcgctgcaaccggcggatgatgaacacacctttggacacggcaaggcagagtcgctggcggcgctggcgcagagcatgtttatttccggctcggcgctgtttctgtttttgaccggtattcagcatctgattacccctacgccaatgaacgaaccgggcgtcggggtcgtggtgacgcttatcgccctggtttgtacgattattctggtcacgtttcagcgttgggttgtgcgcaagacgcaaagtcaggcagtacgggcagatatgcttcattatcagtctgatgttatgatgaacggagcgattctcgttgcgcttgggctggcctggtatggctggcatcgcgcggacgccttgtttgcgttgggaatcggcatctatattctatacagcgcactacgtatggggtatgaggcagtgcagtcgttactggatcgcgcgctgcccgatgaggaacgtcaggaaattattgatatcgtgacatcgtggccgggcgtcaacggtgctcacgatcttcgcacgcggcagtcagggccgacccgctttattcagattcatttggaaatggaagataatctgccgctcgttcaggcgcatctggtggctgaacaggtagagcaggcgattttgcggcgttttccgggttcggatgtcattatccaccaggacccctgttcagtcgtacccagggaaggcaagaggtttgagctttcgtaa

SEQ ID NO: 79636 - DNA, 156 bp, Citrobacter koseri
atggtgagtgcattgacagaattagcgaatcaattttttttacaccgcaagaattcaatattgcagatcaccacattgaaggatggttcaatgaatttggtcaattcagtggtactgtttctgtttatggtgaaaagccaattcatcatgttgtaa

SEQ ID NO: 79637 - DNA, 1047 bp, Citrobacter koseri
ttgatagttatagattttttttgtggctgtggtggagccagtgaagggctacgtcaggctggctttgatatcgagcttggattagatattgaccaacaagcatcagaaacatttaaagctaacttccctgatgcaaaattcatccaagatgatattaggaaaatcgaacctcaagatatctccgacatcattgatattaaagctaaacggcctttgttgctgagtgcatgtgcaccatgtcaaccattttcgcaacagaataaaaataaaactagtgacgactcaaggagaaatctactaaatgaaactcatcgttttattagagaacttcttcctgaatatattatgcttgaaaatgttcctggaatgcaaaagattgatgaagaaaaagaaggcccatttcaggagtttattaagctacttaaagagttagagtataactatatatcttttatagcgaatgctgagaactatgggattccccaaagaagaaaaagactcgtgctcttagctagtcgagtaggtaaagttaccccaccagagataacccatggtaagaataaaatcccattcaaaactgtacgggattatatccagaacttcacaaagttatgttcaggagaaaccgaccccaaagatcctttacatagggctggaacactgacccctcttaacctaaaaagaattatgcacactccagaaggaggggatagaagaaattggccagaagagttagttaataaatgccataaaaattatgatggtcacacagacacttatggaagaatgagttgggataagcctgcgcctacacttacgacgaaatgtaatagttactccaatggtcgttttgggcatcctgaccccactcaacatagagcaattagcataagagaagcatcaagattacaaacatttcctttaagctatgtttttaaaggttcgctgaactcaatggcaaagcaaatcggcaatgctgtaccttgcgaactcgctagactatttggactacatctcatagaaaattgtactaataaggattcatag

SEQ ID NO: 79638 - DNA, 258 bp, Citrobacter koseri
atgaagcggctgatgctctccagcaccctgctcctagtctttatggctgtgatgttttatctggttactgataatacaccgcagattaaccacagcgacctgctgctctggcgcataacgctgtacggcgtgatcttttgtacaggctggcgtctgtatgaccgatttccaccgtatcgcccggccatccgccgtatcgcgctatggtttatcgtactgatcgcgctcaatgagattgtgccggaggtattccggtga

SEQ ID NO: 79639 - DNA, 264 bp, Citrobacter koseri
atgtgggatagctcaaacccgcttttaatcagcactcctgcaacgggagcaagagttaactatccaattagttttacgacgcaatttaacgggatctatgtcactgagaacgggaatacgaataacaattttgagtttgctaaccccgcccaaatcggcatgacgggcttttctatggcaacgatggacataacgcttggctcatcaccatcaacggcctacggaacgtcatttacagggtattacactgcggagggatattaa

SEQ ID NO: 79640 - DNA, 390 bp, Citrobacter koseri
atgtggtactggaatccggttgactgtaatgaggctttgccgggcatacatgacttatctggttgtattgagattgatgatgatgagcacccgtttaaaacgggggatttacctgctggtaaagtgtggtcaaacgatgccagcaatcatccggtattaacagacattccccctccatcacctgaagaagaaatagcggaggccgaagcaataagaagccagttacgcgcaaccgcagatgccgaaataatctggaggcaggacgctgttgacgccggaatcgcgacagaacgggaaaccacagaactggctgaatggataaaataccgggttttgctgatgcgcgttgatacaacaaaacccgtatggcctcctgtagtacaggcttag

SEQ ID NO: 79641 - DNA, 186 bp, Citrobacter koseri
atggctattatggcaattattaaaaatgacgtagtggttaatattatcgttgctgaaccgacgctaaccatccctgattttgacgttattcccgttgagaattccggtatcgccggtgaaggttactggcgagatagtgatggtaaatggcttccgcctgaaccggaagccagcaccatatactaa

SEQ ID NO: 79642 - DNA, 573 bp, Citrobacter koseri
atggtgatcgttgaactgctcggcggaggcggctcaggtggtggtactgtcgcatctgccacggggaaacagtcatttgcgggcggtggtggtgctggcgcgtatgtaaaggcgatgattactggcggttttaacggcgtttttgtcactattggcgctggcggaataggcgtaatcggtgaaactggtggaaatggtggtgatacaaaatttggaaataattttgtcgccggaggcggcaaaggtggttcaggaatgcttgcaacaagtggctccctcggtggtggtgaaggcatgggcggtgttgcttccggtggcaatattattaactcatccgggcattctggatggtcaggcattgcctacgatgtaacttattctgtatccgggcgcggcggtgaatcaattatattcccaggaggccagccatcaggaactcagcaaatgaaagacggatttgacgcctctgaatttggatgtgggggcggtggcgcaaattcacgggcaggtgcgacggcctataaaggcggggccggtacacagggaattgctatcatctgggagtatgcataa

SEQ ID NO: 79643 - DNA, 1056 bp, Citrobacter koseri
atgaaaaaaattccctgcacgttgatgcgagggggaacatccagaggggcgtttttattagcagaacaccttcctgaggagagacagcggcgcgatgccatattgatggcaattatgggatcggggaatgagctggaaatagatggcattggcggcggtaatccgttgaccagtaaagtggccattatccgtcgttcggatgactcaaaagcagatatcgactatttatttgctcaggttctggtacatgaacaccgcgttgataccacgccgaactgtggaaatatgctttccgcggtaggcgcatttgcgattgaacatggcttaattgagactacgccgcccgtcacgcgcgtgcgtatacgtaatgtaaatacaaatacgtatatcgaagcggacgtgcagacgccggacggcgccgttgagtacgaaggtcaggcaaaaatcgatggcgtaccgggaacggctgcgcccgtggcactcacgtttttgaacgctgctggcgccaaaaccgggcaaatttttccgaccggtcatcgtgtcgatcattttgattccgttgccgtcacctgtattgatatggcgatgccggtggttattatcgctgccgaagatgtcggtaaaacgggttatgaatcccctgcggaacttgatgccgatactgaattattgcgccgcattgaatccatccgtttgcaggcgggtaaagcgatggggttaggcgacgtcagcaatatggttattcctaaaccggtgcttatttccccggccagacggggcgggacgatcaatgtgcgctattttatgccgcactcctgccataaggcgctggcgattactggtgccatcgcgcttgccagtagctgtgcgacagaagggacggtcgcccaccggatgacgcaattgacggactatggcgatataaatatcgaacacccgggcgggtgccttgatattcatttaacaaatgaaggtaatgagccttcttcaatacgtgcttctgttattcgcacagcaagaaagatttttgcaggtgaagtttatattcctgaatga

SEQ ID NO: 79644 - DNA, 1434 bp, Citrobacter koseri
atgaataaaaaatctatatggaagctaattattatattagcgatcccgtgtattattggcttaattcccgcgccagccggtctgagtgaactcgcctgggttctctttggcatctatcttgcggcaatcgtggggctggtgataaaaccgtttcccgaacccgttgtattattgattgccgtcgcggcatcgatggtcgtggtcggaaatttaagtgaaggggcgtttaaaacgaccagcgtgctcagcggttatgcctctggaacgacgtggctggtattttctgcgtttacgttaagcgccgcgtttgtcactaccggtctgggcaaacgcattgcgtatattctgattggtaagatcgggaataccacgctggggctgggctatgtcacggtttttctcgatctggttctctctccggcaacgccgtcaaacacggcgcgcgcaggcggcattgttttaccgatcatcaacagtgtggctgtcgcgctgggttctgagcctgaaaaaagcccccgtcgtgtcggtcattatttaatgatgtccgtgtatatggtcacgaaaacgaccagttatatgttttttaccgcaatggcagggaacatactggcgctgaaaatgatcaacgatatttgccatctgcaattaagctgggggggatgggcgctggcagcaatggtgccgggtatcattatgttactggtgacgccgctggtgatttataccatgtatccaccggaaattaaaaaggttgataataagacgatcgcgaaagccgggcttcaggatctcgggccaatgaaaggccgtgagaaattactgctgggtatttttgtcctcgcgctgtcaggctggattttcagtaaacaacttggcgtggatgaatcaaccgttgcgattgtggtgatgggcgcgatgttgttactgggcgtggtgagctgggatgatgtcgttaaaaataaaggcggctggaatacattaatctggtacggcggtatcattggcttaagctctttattatcgaaagtgaagttttttgactggctggctgaactgtttaaaaacaatctctcttttgataatcatggtaacgtggcgttcttcgtcattttgttcctgagtattattgtccgttatttctttgcctccggtagcgcttatattgtggcgatgatgccggtatttgccatgctggcgaatgtctctggcgcgccattaatgctaaccgcgctggccttattattctccaactcttatggcggaatggtcacgcactatggcggtgccgctggcccggttattttcggggtcggttataacgatattaagtcctggtggctcgtcggcgcggttctgaccatcttaacgttcctggtacatatcacgattggtatctggtggtggaacatgttgattgactggaacatgctgtaa

SEQ ID NO: 79645 - DNA, 2259 bp, Citrobacter koseri
atgattaagttatatgacaaagggatttatctctccggtaacaatgagataattgcagaagaacagtattgcggtaatgtacaaaaagaggaagccaaaaaaggcaccatagcatggtccattcttgcgtctcataatacgtcaggaaatatggataaacttaaaatcaagtttgattcgttaacctcccacgatattacctatgtaggcataattcagaccgcgaaagcgtccgggatggcgcgttttccattaccttatgttctcacaaactgtcataactcattatgcgccgttggtggaaccattaatggcgatgatcatctttttggactttccgccgcgcagcgctatggcggtatttatgtgccgccccatattgcggtcatccaccaatatatgcgtgagatgatggcgggcggtggaaaaatgattttaggctcagacagccacacgcgctatggcgcgctggggacgatggccgtaggggagggcggaggtgaactcgtcaagcaactgttgaatgatagctgggatatcgattatccgggcgtcgtggcggtatatctgacgggaaaaccggcgccaggcgttggcccgcaggatgtggcgttagccatcattggcgccgtatttaaaaatggctatgtcaaaaataaggtcatggaatttgtggggccgggcattagcgcaatgtccacggatttccgtaacagtgttgatgtcatgaccacggagacgacctgcctgagttcggtgtggcaaacggatgatgagacccgtagctggctggcgttacatggccgtgaaccggattatcgacagctgaatccgcagccaatggcctggtacgatggctgtatttatgttgatttgagcacaattaaaccgatgatcgcgctacctttccatccgagcaatgtgtatgaaatcgacacgttaaatgagaatttgacggatattctgcaccaggtagaaattgagtctgcgcgcattgcccgtggaaaagccaaaatctcgctgctggataaagttgagaagggaagattaaaggttcagcagggaattattgccggatgctcaggcggtaactatgagaacgtcattgcggcggcgaatgcgttgcgcggaaaatcgtgtggtaacgagacgttctcactcgcggtttacccctcttcacagcctgtatttatggatctggcgaaaaaaggcgtggtggccgatttaactggcgcgggcgcaatcatcagaaccgctttctgcggcccatgctttggcgctggcgatacgcccgttaacaacgggctgagcattcgccacaccacccgtaacttcccgaaccgtgaaggttcgaaaccgggtaatggtcaaatgtccgcggttgcgctgatggatgcgcgttctattgcggcgacggcaataaatgggggctatctgacctccgccgctgaactggattgctgggaaaacgttcctgactatgcgtttgatcccaccccgtacaaaaaccgtgtctatcagggttttgttaaaggggcgacgcagcaatcgctcatctatggcccgaatatcaaagactggccggcgctgggggcgctgacggaaaatattctgctcaaggtggcgtcaaaaattcttgatgaagttacaacgacggatgagctgatcccgtccggggagacctcgtctttccgctcaaacccggttggtctggcggagttcactctgtcacgccgcgatccagactatgttggccgaagcaaagcaaccgcgacgctggaaaaacagcgtctggcaggcgaggtgagtgagctggagccggtctttgcccgtattcgcacaattgcgggccaggaaaccaccgatccgttagccaccgggattggcagcatgatttatgccgttaagccgggagacggttccgcgcgtgaacaggcggcaagctgtcagcgcgtgattggcggtctggcgaatattgcccaggagtatgcgacgaaacgctaccgttcgaatgtgatcaactggggaatgttgccgctgcaaatggcgggtgagcctgggtttgacgtcggggattatatttacattcctggcgtccgtacggcgctggatcaatgcgcaaccaccttaaaaggctatgtgattcatgacgatgaaatcacggaaatcagtctgtacctggaaagcctgaccgccgaggaacgtgaaattatcaaagcgggaagtctgattaatttcaataaaaatcgtcagatgtaa

SEQ ID NO: 79646 - DNA, 1071 bp, Citrobacter koseri
atgggaagaaggagaagttataaccggcgagatctcccccccaatctgtacatcagaaataatggatattattgctacagagacccacggacgggtaaggagtacgggcttggaagggacagaagaatagcagtgacagaggcaattcaggccaatatagaactgttctcctgtcaggaaagaagctctctatcaacgagaataagcaatgaaaatgtagtgacgctacactcatggcttgaccgttacgaagttattatatctaccagaggattgaaacaaaaaactcttaccgactacggcagcaaactgaaagccatcagagagaggatgtgtgatatgccactttctgaggtgacaaccaaaacagtcgccgaaattctcaatgcttatgttgatgagggaaaaaacgccaccgcaaaactcatcagatcaaccttgagcgatatattcagggaagctatagctgaagggcatatcaccacaaatcctgtcgcagcgacacgggcggcaaaagcggaagtaaaaagagccagaataaccgttgacgaatatcggattgtccaccaggcggccaaatcattaccggaatgggttcaccttgcgatggatcttgccgtcgctacagggcagagagttggtgacttgtgcaaaatgacatggagtgacatcgttgatggctatctctatgttgagcaaagcaaaacaggaactaaactggcgatacccgtttctctccatgtcaactctctggatatttctctggaggcgacgctggaaaggtgcaggagatcacttaatggagagacgattatagcctcgacacgcagggaacctctttcatcaggaacgatatcacggtattttatgcgcgcacggaaagcatcaggcctcatttttgagggccagccaccaacctttcatgaattacgtagcctttcagcaaggctttatgaaaagcaggcaaacaaagatttcgcgcaacatcttctcggacataaatcggaaagcatgacatcacgctatcgagatgatcgggggagggagtgggacaagatagaagtcatatag

SEQ ID NO: 79647 - DNA, 219 bp, Citrobacter koseri
atgtacttaacactacctgaatggaacgccagacagcgcaagccaagaagtcttgagactgtgcgcagatgggtcagggattgtctgatatatccgcccccagaaaaggacggaaggcagtatctgttccatgagaaagcagtgaaaattaaccggaacaatgccgccatcggcagtctgacgaagaggattaaagatgggaagaaggagaagttataa

SEQ ID NO: 79648 - DNA, 312 bp, Citrobacter koseri
atgaaggaattacgtttttatggcgcaagtgatgacctttttgaatgtgaaggggccatccgagaagaaatatgctgtttcaatgtgccgggtgtttatcaccttaaatctgccgaaggagaaatgcacgttgttggctattacatggaatcaggtttatggagcattggtttgagcccaattgatgagggcgtgtcattaccatcctggcctgtttcatacattgtttatgagcacggatatagcccgcttctgacaattcaagttcctgacgacaccgtattaattcaagacgaagattcagacgactga

SEQ ID NO: 79649 - DNA, 729 bp, Citrobacter koseri
atggatagggccgaaattgatttaattcttgagagtaagccaaggaaatttcacaggaacaaccttgttaaaggtgttggtaaaaacgactcacctttctgcaccggcgccgagttcgatggaaaggtgatcaaccatagggcttatgatatttggtgcggaatgctacagagggcatcgtgcccctcctaccaggaaaagcatccccactacaaaggttgttctgtatgcgaagagtggctcacgttcacaacctttttcgcatggtggaagaaaaatcacgtagatggctgggagttggacaaggacttcaccgttattggcaataaggtttactccccagaaacatgtctttttatcccaagccaactcaattctttcatcaacgcaaaaggtaaacacaacggagaattgcctgttggcgttatgtacgttccatcactttcaaaattcaaaagcgtaatcattttcatgcgacagtaccattatctcgggctgttcgagtcagccgatgatgcccatcttgcatggattaccaaaaagttaacattcgcccaccaattcaaagaaatgtgcaacctgatttccccttggctttttgaggcgttgattactcgcgttttggcgctatcaaacgcaccgagtaagtacgaaattgccgagcggatcgccgaagaaattgaaacagcggaacacctgaagaagctgcgcgcccagcgtgcggcatga

SEQ ID NO: 79650 - DNA, 222 bp, Citrobacter koseri
atgacagcagaaatcattgatcaggccaacgaagtggttcaacagcgcatagacatggctgtggcccctcaccgcatcaaccgcaacgccgtatcagctgaaaattgcgtggagtgcggtgaggacatcccggcaccgcggagagctgccgttcccggctgccagacctgcgccagttgccagactgacctggagcttatacgcaagcaaagggggttgtga

SEQ ID NO: 79651 - DNA, 249 bp, Citrobacter koseri
atgagcaatccaatcacagtaggactttcaggaattacaaaacgcatctttgctggccggtcaaagccaagcaaattggctcccggcgttcgcgaattcacaggggaaaagttcgacgttacagatgaagccctttctgctgtagcgcacctcatgatcgcccgcgatgacgtactggttttcccttcggcaaatggcaaggaaattcatctccgtgccgacctgaaagataaggtggtgaaatcatga

SEQ ID NO: 79652 - DNA, 885 bp, Citrobacter koseri
atgaaatacggaagcgtgtgcagcggcattgaggctgcaatactggttgaagaacctgcaccgcgtacctggcaacgcccgttccttaaatgggctggcggcaaatattcactgctgccggaactggatcgcctgataccagcaggtaaacgcctcgttgagccattcgttgggggcggatcggtatttctcaactccgaaaagcacgaatctttcctgcttgctgacgtcaacgcagatctgattaacctctatcagatgcttgaagtggaccacatcagagtatgctcgcttgccaaaatactgtttgagcgcgccaacagtgagaaggcatacaaagatctgcgtgatgagtttaataaccagcgtatgtgcgcgcctgagcgcgctgctgcctttctcttcctaaatcggcactgcttcaacggactgattcgctacaaccgcgatggtttctttaacgttggcaggggcaagtacgaagcaccctatttccccgagattgagattaaagcattcaaactgaagtcgcataaatgcgtgttcatgaatgcagactatcgcagtacgctggcgctggctggtgaaaatgatgtggtttactgcgatccgccgtatgagccgttgcctggtaccgcaggtttcacaaattacgccgctggcggctttacttgggatgatcaaatcgctctggcggaaagttgtgttgttgcccaccatcgaggcgcgaaagttctcatcagtaactcaaccgcgcctcgtgtccttgatctttacgagcgtaacggtttcaccattcaccatgtatctgcacgtcgtgccatatccagcaagggcagcaccagagaagtcgcaaaggatatcgtcgccacactgggagtttaa

SEQ ID NO: 79653 - DNA, 456 bp, Citrobacter koseri
atgagcgagctttggcaaccgtgggaaaacctcttcctgcatgacgtctgcaaaacaatgccgttgtccattatcgccgaaaagcttgagcgcacggaacgcgccatagtcactcaggcatatcgtattggagcaccactaccatctcgaatgactggcagaccatggacagcagccgagcttcatctatttggccggttctcagaggaggagatagccacggcaaccggtcgttcaatttactcagtcagaagcaagcgtgacgcactggcccgctccagaggattaactatgcgtgaatggtcagcggaagagttagcaatactcatgcgctacaccaacgcagaagtagcagagattaccggtcggagtatcgaagaggtcggagataagcggctgcaaaccaatattgagcgtaatggctgggatgttaacgatccggagcgtgcatcatga

SEQ ID NO: 79654 - DNA, 627 bp, Citrobacter koseri
atggaacagaaaaaagtttacgcagcaatcagcggagtagcttctgcgcttgcagagcaaggtatcaggaaagagaaaaaacaaggcagccaggttaactatgcgtttcgcggaatcgacgacatctacaacgcactggctcctgagttggtcaagaataagctcctgattttacctcgatatacagaacgcacatgtgtagagcgaaccagtaaaagtggtggtgctctgttttatatcactgttcgtggcgacttcgatttcgtcagcactgaagacggcagcatccacacggtcaccacctacggcgaagcgatggacagtggcgacaaggcaaccaacaaggctatgtcgatcgcctacaaatacgcagcatttcaggcgttctgtatccctacagaagaaactgcgattgatgccgatgcagagatgcatcacatcaaaccggctgatgcagaccagattctggctgagtttacgcagtacgccggcgctgagaacgacagcaagaaacttcaggaacagtacgcatcaacatggcaacgccttaacggatggcctgaccaccaggctaaatgcaaagacgttaccggcattcgaatcagagaactcaaacaggcggcataa

SEQ ID NO: 79655 - DNA, 189 bp, Citrobacter koseri
atgatccccgttgatttagcaaaaacaccggagctaagccggataaaacgcaagtatcacgttatcgaagctctgtactggcgtaaggccgccaacaaaagcatgaagcgtcattgtctgcgcatggctcgtgatgaacgcatcaataaatgcgagttcttgtccaatccttccgaaattccattctga

SEQ ID NO: 79656 - DNA, 972 bp, Citrobacter koseri
atgagcgaagtaacggatttagtcgtcattgagaagtcgaacgcgatggcagtatttacaagcaaagaacaactcgacccgcttctcgagaaaatcgagacagaggcccgcagcttggtgcccgacctgaccacgaagaaaggtcgcgatgccatcgcatccatggcgcataaggttgcccgttccaaaacctacatcgacaacgccggtaaagatctggttgctgagcttaaagccctgcctaagcagatcgacgaaagccgccgcattgtgcgtgagcggctggacgcgcttaaggatgaagtgcgccgtcctctaaccgaatgggaagctgagcaggaacgaatccgggtggaagaagcctggaacgctatgcacgaagaagcattggtgatgaacaagatgttcgatgaccagcgcgccgcgcagatcgaggcagaccacgaaatggctctgctgatgaatgacaagtttgaccgtgaccgcgaagagcagcgccgcctggcggaacaggctcagcgtgagcacgaagaacgcattaagcgtgaagcggcagagcaagcccgccgcgatgccgaagcgaagcacaaagctgagattgaagccgcagcgcgccgtgaagccgaagagaaagcccgcgctgaactggcggaacgccagcgcattgaagcggaacagcttgcggtacgcgagaagcaggaagcagaagcccgggcggaacgcgaaaaagccgcggcggtagaagctgaacgcctgaaagcaaaacaggcagaagaagcccgtctggctgagcagaagcgcatcgccgatgagcaggcgaagcgcgaagctgacgttaagcaccgcaaagccgttggcactgaaatcgttaacgcactcaccgctaataccagtatctcacgcgaacaggcgatcgaagtcctgaaggcgttgatggatggcctggtaccgagagcacaaattaactactga

SEQ ID NO: 79657 - DNA, 210 bp, Citrobacter koseri
atgatttcacactacggaacgacaccaattattcgccagtgtgtaatgcccggaatgatggcaatgcatgaaggccgcacctatcgcgtctcagcagtcatccaggagcgcaaatgggtgtacctgcacaccgatgcagaaattatccgcctcagtgactgcgtgattgacgtccttcttgacggtcacggcaaccctatccagcactaa

SEQ ID NO: 79658 - DNA, 168 bp, Citrobacter koseri
atgaataaccaaacagtcacccacaacggcaagcagtacaccgccaaaaagctcaacgataacgagtggcagctgacgtccgtcgataaaccccgcgagaaaatcacaatgacaagtcggcagatgcacattgctgggttattgcagcaggtggagggtaaatcatga

SEQ ID NO: 79659 - DNA, 771 bp, Citrobacter koseri
  misc_feature (553)..(579): n is a, c, g, or t
atgacacagaaaactatcattacctacaaaggctttaacaaagatttgcagtgccggaattaccagtttgcgatcggagaaacctaccatcacgaaggaaaagtagaggcttgtggttctggttttcatgcctgtgaatgtcctttcgatgtttttggttattatccgccagcagacagccgctatgcggaaacaatctcttttggtgttactgaccgtgaagaggaaggcgacaccaaaatcgccagcgccagcattaccattaaggctgaattaacgcttccgcagttcatcaagcgcggcatcgaatggatctggagcaagattgacaagtcgcttgaacagcagatcatgactggctaccggtcagcggcaaccaacactggctaccggtcagcggcaaccaacactggctaccggtcagcggcaaccaacactggctaccggtcagcggcaaccaacactggctaccggtcagcggcaaccaacactggcgaccggtcagcggcaaccaacactggctaccggtcagcggcaaccaacactggcgacnnnnnnnnnnnnnnnnnnnnnnnnnnnccggtcagcggcaaccaacactggcgaccggtcagcggcaaccaacactggctaccggtcagcggcaaccaacactggcgactggtcagcggcaaccaacactggcgaccggtcagcggcaaccaacactggcgaccggtcagcggcagaagtttctggatcacactccgtagctgcatcactcggcattga

SEQ ID NO: 79660 - DNA, 867 bp, Citrobacter koseri
atggaaaacactggcttacaagatgttaatttctctctgcgatatgatggactagacgctgaaaagcatgagattgaactttcttctttaggtgaatccttaaaaggattctcaaaaattctcgcaacagcaggaacgtttgctttaacgcaaaaatactcccgcaatacctcaagtcaagaggtcaagatatacgcgaaagaggcccgggcaaattgctttacgctcgacacggtgatgaattttatcagccaatctcaattgttctcgggatctgcgggggctatacttggggcactgatcccctatatcttcgcaaagaatgcgcagaagaaagaggaaatgaagtaccttaaagaagcgcttgagaaggctatcgaagccctcggaaacaaagataaagacaccatcgaaggcttgatctcagtgattgataagatggcaggagaactgcgcccgtcggtaaggcaagctgtctcccccataggcaatacatgcaacaaaatcagcgtcacctcagctggaggttacaaaccagctgtcattgatgaagaagataaagcaattattgaccagcttgacgatgatgaagtgataggcttgagagagtatcgaatttatcttactgagtttgatgcgcataaaatgaccgccaaagttattattgatggcgatgactctgataagagggtttctgcacaaataagtgacccttctgcatcaaaatccgataacccttatctaatatcgctcagtcgatatctctcctcgggattaagtaatgaatccattgtcaaagtaactgcgaaggcatcggttagaaaaggcgctatatcaaaactattcatcgtcgacatcgagacgtaa

SEQ ID NO: 79661 - DNA, 300 bp, Citrobacter koseri
atgaaaggcaaacaggcaatcatgcgttatctcgaaacgcaccggaccttcactgcgaaggatgtggcaaccgaatacggaatctcactgagttgcataaccaaaaacgctcttgaacttgagaagaagagagcaatcatccggcttagcaaagtatggcgaacggtgacttatcgcctggcgacaccggaagagcaggatggtacggatcgaagctgcaccaacgggatatttcaggagtgccggaacagtccggctatgaagcgagttttgatggtttgggggagggtaggggtatga

SEQ ID NO: 79662 - DNA, 468 bp, Citrobacter koseri
atgaaacagaaatttatcgagtggttaaccaagaacaacaacggatgctcgccagcaatggctgaagacggaagctttgagcgtgagaagacacagcacatgttcgaagcgtaccaggctggaatggccgaaggtgaagccagatgcgcggcgctggctgcggagaatgcactactgaaaaaaacggagccagcaccattcagcaagctgatgatggaggcgattgatgcttatcaggcaggatctgatgaagttccagaactggcaatgttgagcgcatataaaaaattgcgagatgggctaaaaaccccagcgaccgacgctttcctggctgaagtgcgggccagcggtgttgagatgttaagagattctattgctgaagtggggggcggcattgaagacacgattgatctgcatcactactgctctgatttcgccgtcgaaattcgcaaaggagtgcagtcatga

SEQ ID NO: 79663 - DNA, 186 bp, Citrobacter koseri
atgagcaaattaacatccaagcaaattgaggttttgtcgtgcgttttcaaaggtgaaaagccatacgcagtctggcgacaaactctcaacgccctgttgcgcaaagggctgataaccagaaccgttgtcggatattcaattacagccaatggaatcgacgtaattaagcaggaggccgcccaatga

SEQ ID NO: 79664 - DNA, 723 bp, Citrobacter koseri
atgagcaatctgatcacctcaaacaccatcaccatgtccagcattgatattgccgagttggttggaagtagaccagacaacgtgaaagtctctatagagcgccttgcagagcgcggagtaatacgacttcctgcaatgcaggatttcgaaaaaatcaataacttaggtcttgctgtaaaggtaagtgcttatgtttttgagggtgagctaggcaagcgtgacagtatcgttgtagtcgctcagctttctccagaatttaccgcccgtctcgtagatcgctggcgtgaactggaggagtccgctttaagtatccccaaaacgctaccggaagctctccgccttgccgccgatctggctgaacagaaacaacaactggaaaatcagcttgctctcgcagcacctaaagttgagttcgccgatcgcgtcggtgaatccgaaggcatcctcattggcaactacgccaaagtagtaaagctcggacaaaacaaattgttcgcctggcttcgtgacaacggaatcctgatcgccagcggttcacgccggaacgttcctaagcaggaatatatggatcgtggttatttcactgtgaaagaaaccgcagttaataccaaccacggcattcacatctccttcacgacaaaactcaccgggaaaggccagcaatggctaacccggaaactggtagatcatggtctgcttaaggcgctgggggatgctgcatga

SEQ ID NO: 79665 - DNA, 318 bp, Citrobacter koseri
atggctaaacgtatgcaagataaagagagcattgccgggttgtcctggattgtcgttcttgtgctcgcctgttggggcggccttgtacgctacctgatagacgtgaaacagaacaaggcgacatggagttggataaatgcgcttgctcagatcgtcgtctccggattcaccggtgttatcggtgggctggtcagtgttgaaggcgggttgagtttctacatgattctggcagcgtctggtatcagtggtgcgatgggttccgtggcactgacttacttctgggaacgtctgacggggatgaagaatgcaaacaattaa

SEQ ID NO: 79666 - DNA, 477 bp, Citrobacter koseri
atgcaaacaattaaccctcagcgtaaagcgtttctcgaaatgctggcatggtcagaaggtacggacaacggacggcaaccaactaaaaaccacggttacgacgtaattgttggcggctccctatttaccagttatgccgaccatccccgcaagttagtaacgctgaatccgaagctgaaatctacagctgccgggcgctatcaactactggcgcgttactgggatgcgtatcgcaagcagctcggactgaatgatttctctccagctaaccaggacgctgtcgcgctccagcagattaaagagcgcggggcgctgcctctgattgaccgtggcgacattcgccaggctatcgatcgttgcagcaatatctgggcatcacttcccggcgctggttacggccagttcgaacataaagccgatgcgctgattgctaagttcaaggctgccggtgggaaagttaacgagcctgcatcatga

SEQ ID NO: 79667 - DNA, 456 bp, Citrobacter koseri
atggcagcattatcgacagaggttaaagccttcatcgttcaatcactcgcctgctacgagccgccagtaaaagtcattgagcttgtaaaggctgaatacggcatcgatgtctcgcggcagcaggtgtcgcaatatacgcccggcaacgcaatggcggccaagttgagccagaagtggattgaccttttcaacgccacccgtaaacgattccagaatgagatcgctgacatcccgatcgcaaataaagcgtaccggttgcgtgtcctcgaccgaatggcgaccaatgctgaaaagatgaagaactacggcatgacctcgcagcttatcgagcaggccgccaaagaaatgggcgatgcctacaccaatcgccagaaagtcgagcacacaagccctgatggcagcatgactccgcagccgacaatcatccagctactacccgttgagccgaaatcatga

SEQ ID NO: 79668 - DNA, 1353 bp, Citrobacter koseri
atgaacaaacagctacagatggcggttaatcacgcgattaacgacgccaggcttgctcgcgcccgtatggcgctgcttaacccttcgatggggctggacgccaagcgtaattcagcgtggtgcgaatacggcttcaaagaagaattaaccttcgacgatctgtacaacttatatcgacgcggcggcatcgcccacggcgcgataaacaaaatcatttccgcttgctggcataccagtccggagattatcgagggggaagaggaggacgaaactcgcgacattaccgcgtgggaaagaagtcttctgactgtgttcactcatcgcttctggcgatcgtttgctgatgctgacctgcgccgtctggttgggcgctattctgccatcctgctgcatatccgagatggtaaagcatggaatcagcaggcaacgaaagggcgagggcttgaaaaaataacagtcgcatgggctggctcagtgaaagttaaggagtgggatgctggtctgaactccaagacttacgggcaaccgaagatgtggcagtacaccgagcgcctgcctaatggctccacccggcgcgttgacatccatcccgaccgcattttcattctgggtgattatgccgacgatgctattggctttcttgagcctgcctataacgcttttgtcagtctggagaaggtggaaggcggttccggtgagtcattcctgaagaatgctgcacgccagttaagtattaattttgataaagaggcgaaactggatgaaatagccagagcttacggggttgattacagcgagcttaatgaaatctacgataaagtagcccgtgaaatgaatatcgggaacgactccgttcttattactcagggggccaatgttgctccgattgtggctgctgtatccgatccctctccaacctataacgttaacctgcaaaccgctgctgccgcacttgatataccgacaaaaatacttgttggtatgcagactggtgagcgggccagcactgaagaccagaaatacttcaacacgcgctgtcagtccaggcgagaagatttgtcattcgacattgaagacctgtgcgacaaattgattgagcttggcgtcattgatgttgtggcaaagaaaacggttatctgggatgaccttaatgagcaaagctcatctgagaaactggatgccgcgcagaagatgtcgcaaataaacagcgcatcgctggcgacaggcgagcaggtgtttactggtgaagagattcgcgtggccgccgggtatgagggttcgcccgaaccgcttccagaggtagatgatgacgaagaagaaagcgaagtcaccaataattccgggaaaccttaa

SEQ ID NO: 79669 - DNA, 552 bp, Citrobacter koseri
atggcgacaccgattctatctgacttactggtggtagatccatcatctttaactggcttgcgctggatagtttctaggggtaggcagaaagctggaagtgaggctggatgtttattcagaagcaaagcaaatcagtattacgttgttcgcattgaaaaagttctttattacgctcacagaatagtttgggaattaaccaacggaaagattgcggatggcatgaccattgatcacattgatggcaatggtcttaacaatgccatcaataatctgagggtcacctctgtcaccctgaatttgaggaatagaaggaaaagcactacccgaaactctgttgctgttggcgtgagctttcaaaaaagggcccgtgataaaggatttaaggcatattatcgcgggcttgatggaaagaactatttcaagtttttcggattctcagctcatggtgagaaaagagcattggaactggcgattgagtggagaagggaaagaatgtccgagttaaatgacgatggcgcaggatatacattgcgacacttgtctggcgaatga

SEQ ID NO: 79670 - DNA, 606 bp, Citrobacter koseri
atgtctacgcgaacaggctcacaccacagaaagataaatacgatgaaatatgtttacgtgatgcagtccgattcaggactggtaaaaattggcgtatcaaaaaatgttagccaaagaaggaagcatttagaaaatcaatctggcgtgagtgttgaggttattgcaacatttgggccttttaacgcagccacaagattggagcgcacagctcatgatctcttctcacaggccagggaatctggcgagtggttcgccataaaagcaaaagatgctgtcgatgcgataaataaaattacatcaacatttgaagattcagcgtcccatgaaaaagagggttatggtacgtcaatcagtgcagcagagcggcacttgttatgcatagatgacgctgaattaatcaccaatacggtcacatatttgcgtgaaaataggatgattgacgagggtgaaaggctgaaccgcctgttcatggcggggagcttaacaactagggattttttacatgaatgtcagatgtcaatcatggagagaaaagtctatgacctgcttgagatacacaatgacttaaaaagtaaggtgcagatgtatttgccgggtattgcgtaa

SEQ ID NO: 79671 - DNA, 903 bp, Citrobacter koseri
atgacaagtatagcaattcttgaagcagttaacacctcttatgtgccatttaacgggcagcagatcgcaaccgctattgctgccggtgtaacatatgtggctatgcggcagattgtcgaaaacataggcattgactggacagggcagtcggtaaaactgcgaaaaatgaaggaaaaattcaactgtagagatatctctatggttgccgcagatggaaaattaagaaaccttctttgcattccacttaaaaagctcaacggttggttgttcagcatcaaccccgagaaagtccgtgctgatatccgcgataagctgatccagtatcaagaagaatgtttcactgttctgcatgactactggaataagggtggtgcagaaaatccccgcaaaaagacaaccgttgatgagcgcaccccattgcgcgacgccgtgaatatgttggtcagcaaaaggcacctgatgtatccagaggcatacgcaatgatccatcagcgctttaacgtcgatagcattgaacatttagcgcctgagcagattaatgatgccattgaatatgttcatcgcgtggtgcttgaaggtgaattccttggcaaacaggaagaacttcctgcgccgaaactggatatcagtttcccgatgtcctggttcattgaaaatgctccgtatacggttgtccgccaacagcgcggtgacaccgtagttcttgatcgtgctgccctggtcgattgcagcccagcatataagcttgtcgaagccctaacaaaggctggatacgacgtgagcgcagtaagtgcagagctaaaggcgctacgcactgtcatggtagagcagagttgggcgatgaaagaaatagcatcatacgttgctgttcgcgacaaggcatgccatcgcattagcctgtaa

SEQ ID NO: 79672 - DNA, 354 bp, Citrobacter koseri
atgaaaaaggtagttgctttagctcttggggctttgctgttgtctgggtgtactgtgcgcgttgctgatatgactgttggcagtaccaaaaattataacctgaacgcagccaagtttgaaaaaggtcagcgcgtaactggcgaagataaagcgccaattgtgattttccctctgggtatcccaagcgttaagactgctatggatcgcgctattgagaaagataagtgcgctgttggcctgagtgatgttgtcatttaccagctcaaccatgctttcctgttcggaacctacggtttccgtgtagaaggtacgcagatcattgataaatctcagatgggttgcgaaaaccgctaa

SEQ ID NO: 79673 - DNA, 297 bp, Citrobacter koseri
atgcgaagagtatttccggctcttgcgctttttctgtcatcaggcgtctttgccaatagcgatatggtagaaaaccttaagtcagctccacacacgctgtgcaaaggatctcaggattataatgcttgtttgaatttgacaaaaaaaatgatatctgccgtccatcaggtctctatggtgggggctctttgcgaacaatacaaagatgcactaaatgagacccctgaaaaaacacaagagcaatgcagggaaaacgaaaaagttatgcgttacttggactcgctaagggaagaataa

SEQ ID NO: 79674 - DNA, 558 bp, Citrobacter koseri
atggctgagcccagtctacatgatttatttgcctatgacgaaacgtcacccacctgcctgatttggaagatatctccttcacggcgcacaaaatgtggtcaccaagccggcacaattaacaaggtgtccggtaaatatccgcgaaactattaccgagcaagagtgaatggcgggtatcaaagcgtgcatcgcatagtttggttcctgcatcacggggaagttcccgaagggctggcaatcgatcatgttgatggaaatacactaaacaacaagatcacgaatctcagattggtaacaccatccaaaaatgcccgaaattgccgaaggcaaaagaataatatttctggtcagactggagtaaggttggctatggataaagggagatttcccttctatgaggcctatgttcacattgatggcaagcaggtccgtcgccaattttatccaaaaggagggacgcttgaagaggctaggtcccgagcggttgactggcgaaaagagcagataaatcgacttaacgaacatggtgccggatacaccgagcgccacggcaaataa

SEQ ID NO: 79675 - DNA, 132 bp, Citrobacter koseri
atgtttgataaatttagcaacggtataatgattttcacgatttgcattgtcgtgttgaaaccatttttagctgaagtatttgttcatacgcattcacaagttacagcgaactttgcactatcagtcaaataa

SEQ ID NO: 79676 - DNA, 510 bp, Citrobacter koseri
atgactgagcgcggaatgatttttaatgatgaaatggtacgggcgctgctggatggccggaagacgcagacgcggagaattatgaaaaaccagccagcgggcgattacccagacacgccagcactggttagaaatgttggtcctggttttcagtggtacggaagttatggtgaaagcagcattttcaattgcccatttggtgccgttggcgatcgcatctgggtgcgagagacgttccaggggccgcttgtttctgaggagttattcgaagaatacctggcccattctgaaaagttcgaaacgccgcaatactgcgaatatgccgccgatggtggctgcctcaattgcggcgagccggagccatgcggctgtgttaatccacaaccagacgcaactgatgccttcgcctacctctggcagtcaatctatgggcaagaaaattgggatgctaacccctgggtgtgggtaatcgaattcagacggatcgacgggggtgaccatgcgtattga

SEQ ID NO: 79677 - DNA, 1209 bp, Citrobacter koseri
atgaacacccaggtaacgaacccgtttggtaatcgcgacaatcagggacagtcaggcggagtgatggctgtcgagcaggaacgcgccattcaggaagttcaggcggcactggttattgcaaagcgttttccacgcgatcctattgcgtcaatggataaaatcctacaggcgtgcacacgtgaaactctcgctgactctgcactctacagctacagccgtggcggtaccgaagttaccggccccagcattcgcctggccgaggcgatggcacagaactggggaaacattcagtttggcatccgtgagctcgaacagcgtaataatgcttctgtcgtcgaagcgttcgcatgggatattgagaccaatgtacgccaggttaaaacctttaccgtcccgcacgttcgcgacaccagaaaaggtaaaaaagccctcacggaggcccgcgatatatatgaaatggtcgcaaatcagggctcccgtcgtctgcgggcctgcattcttggagtgatccccggcgatgtgactgaagccgccgttcgccagtgtgaaatcacccaaagctcaacggttgatgtttccccggaaagtatcaaaaaattactcagcacatttttgagtgagttcagggttactcaggctcagattgagaagcgcattcaacgacgtcttgaatccatccgccctgcacagttccttcaattgcgcaagatttaccagagtctgcgcgatgggatgtctggcacggaggactggtttgattctgatggcgcctcacctgcttcggcggacaccacattcaaccatccagagaataacgttacgacgggaaatgtggaggaagagaaaccagtcgaaaaaccagcgtcaggtaatgactggtatgcaacgtttactactcgtattaccgatgctgctgataccagagaaaccgaagctctccagcgtgaactggaagatcaaaaacatacgattgatatcaaccagtattccgaactgaagggcaaaatcacaaggcagaaattccgcctgagcgccgttgatcgcatagagagactgcttaaagaccttccgcgcccaggtgagcctgctgccgcagggagatttgcaacactggaaagtgccctcaacgcatccaggagccatctcggcgacctgtacgattcgtacagcgtcaaacttcacgacatgaaaccggaatacgtgggctaa

SEQ ID NO: 79678 - DNA, 933 bp, Citrobacter koseri
atgaacagtaacagtaatatgaccgctttaaaggggcgcataaagttcgttcaggataaactcgattcaatctccgccaaatcggaaatatcgtttgctgacaaactagtttttaacaatatggactcctaccttagtgatctgaaggcagaacaagtcgcagaagacgcacgacatccattgttggattttatggagttgaggctgaagggggtagtcgttgatcttggtacaattccattggagcttttgggggttatatccaataacctagcagcgcttgtccagcgcgcaactcacaaacttgcctccgggaaagactcccataaagtcccttatggtataaaaagctcgctgaacatgaggcttgctgaattgtctccggggtcaactcgactcggattaaccttctcaaccggcgattgtgagttagtggaaacggtgtcaagtaaggcggtgaaggaaattattggcctactggacactaatgacgcctcagtgatgatgaaccagatagcagagataggctataactcagcacaaagcttaaaaagaattgtcgaggagtgtgataaaaatcacattgactttgacttgtcatgggttgggccttttagcgatggagcgcgcttagttaaagtaaactcttcgaaaattaaaatgttaagtgacaggttagcatcaaccaccatatcgcagccagttaatgcatctattgtcggggttctggcatcattatcaaaatacggcaagatggatattgagcttgatggtgaaaaaatcaaagcttcattcccaatagaaatgttagatgagatacagaaaaatcataaggtcggccatcaggtttctttgttagtagaagtaactgatatttataatgaaaatctcggcctacatcgtaaaaattaccgtgttaaatctttaagataa

SEQ ID NO: 79679 - DNA, 459 bp, Citrobacter koseri
atggtaaagctatgcttcccacctcttctttctcccggatttcatgattttgatgatgatcaagtcaaatcgctttgcgtggacgcatttccggaatcggttagaagaagtatgttatactgtaattatatacagttgatgggtgatattagaagtataaataagcaatttaattgtttcgttgaggtgtgggtagacgggtcatttaccactgaaaaaccagagcctgatgacattgatatacttttagtaattgattcagaaagtcttaatctagttcctgtgatgttccagccgcagattgagaaattattaaacaggccgtacattaaacataattacaagattgatcttctattgttagagcatggtaaagacgaggacagaatgcactggaggggagtattcgggcatgacagagaagacactcccaaaggtatcgtgaggatatcattatga

SEQ ID NO: 79680 - DNA, 285 bp, Citrobacter koseri
atgagcaacatcgacaaacaggcactaacgaaggtttatgtcaccaaatacgcactgacagaaggcccattttctattgacgccgagatttttcatgaaggttcaatggctgtgtacaccgtaaatggatacaggaaccatgttcacggtaaagacttctggctgactgaacaggaggctttagctgattgtgatcgccgccgtcaggcgaagcttaaatcattagaaaagcaaaaagcgaaactggaaaaaatgacattcgcaatcgaagaggtgctgtcatga

SEQ ID NO: 79681 - DNA, 588 bp, Citrobacter koseri
atgatagacaaacaggcgcagtacagaccgaagttttcccgactctgggagcgttatgacgaagcggccaaggataacgctgtgcatatgcgcgagattctcgaacaggctctcgatgccttggaagcagccgaacgacatatcgctatcactgagcgcgttgcaggtgagaagctggaagccgcagagaagcggattgctgagcaacgtctggaaagccgtttattggcaaactcagatcgagacattgcagcattgcgccagcgcataacagaactggaggcacgtgcattcaatcctgcaattctggatgtgatagcagagcgccagcggcaacaatcggttgaagggtggacgccagagcatgacgacgaacactgcaacggagaacttgcaatggcagtggtttgctacataaacgagacaggaacagttaaccgcaatggaggtaagccgtgggggtggccgtgggaagcatcatggtggaagccggataaccgtcgtcgcaatttggttaaagcaggcgcactcattctggcagaaattgaacgcattgaccgcgacgctggcatcggtaagggggagtga

SEQ ID NO: 79682 - DNA, 237 bp, Citrobacter koseri
gtgctgccagcagaagaagcggaggagctggcgcgtatcgcgctggcatcgcttgacgctaataagcaggaattaaaaattgccgagcttatcaataaattttacgaacgttaccccctggcaacgttcaagagcgacaccgcgcgggctgaggcgttggggtatttcatggctggcgctgaattacagtgtttcggtgaatttgttaaatatgaggagctgtgcggcgatgaataa

SEQ ID NO: 79683 - DNA, 456 bp, Citrobacter koseri
atgaataacaaactaacaggcctcggcgctaaccatcctgctaacagcccgcttacaaccgagcgccttattcacatccgcgatgtgttacagcgcaaacttaaatactcgaacggcggaaatatggattacatcatcgctgatgctgtgaaagcgattgatgaattgcttgcgtcgcggggcactgagccggtatttttcattgaagttgaaggagatgactggattcaggcagggaggattccaggctcaacgtttgatttcaatgaattgcctgatggcatcgttaatctctacacagccccgccagcgccggtagagccattgaccgatgaacagatcgacgatgtgctcgattctcgcggcaatattttatacgtcattgccgacaaaagggagcgcctgcgtatgtttgcgcgtgaaatcctccgcgctgcaatgggggataaatcgtga

SEQ ID NO: 79684 - DNA, 555 bp, Citrobacter koseri
gtgaaaactatccagttatcagggcgtgagttgtcgatagtttatagcttaatggcgccgccgtaccgcgctgaagatattcgctccgacgagttcaacgaattgcgtaataaagtcttttacgctctgcgtgatgctcagaacgatgaacatgtaagccagcgttacaagttgccagttatcggctggttgcgtagtgattacaacagtgacggcaaacgcgacccgaacgcacctctgtttatgctgggtagcaatgatccgacagaaacatggggagtgaaatacattccgctggctggcaactctccggtgactacggatggttggacgggaagcgacgaagcaaacgcagcactgataatgctcgatcgcatagaaacagtggactcggttgatgatgaccgcattgagggtatcaagcgcatcattcgcgggctcgcagcagcaccgcagcaggaagccagaaaaagtaatgtgataggcagttatcagggtgctgacgggcaagagcatccaatcgtcagcctttcatcgccgcaggaggtgaagtga

SEQ ID NO: 79685 - DNA, 360 bp, Citrobacter koseri
atggcactcactgaattcggtaaggccgttagaaaagcgaggatagatactgactgcacattacttaccatggctcaggaattgggcgtcacctctgcgtttttaagcggtttagaaactggaggtaagaaaatccctaagaaatgggtgaaggaaattcaggcgttttttaaaattagaggttatgaactggacaatttgcaggaactggctgatgtttctaatcagttcgtatccttagatggtttgtctcaaaatcagcagatgttagtagctggttttgcaaagtcccctctgacgccggaacagttaaagcgcattgctgaactgatgaaaagcattaatcattttgagggataa

SEQ ID NO: 79686 - DNA, 483 bp, Citrobacter koseri
ttggaaccgtcaacttatgtgttgcgtggaaaccgtgttgcaccaatgagtatgaacgatattactagtagggctataaattacagcgctttttttaaccttaggacattgaaaaaaaagaagagtctagacaaggcatttgagttgctgagcgaatatggcattaccctgcgtgttgtggaagatcacatttggtttagggaaacatatgatctaacgtctggtcactatgatcatgtttccctaaccatcagcgtcccaaatcggatatttgagttggcgtgcaagggggagcgagaagcgctttttgtactctttcatgaactggggcatttgatattaggacatcgaccattattgcataaagcaaacaagccagccagtcaggaagaggatgctgagtggcaagctgattttttcgcagaaattgtattaaaagatcttggatacgatatggggcaattagcatttgatttcttttga

SEQ ID NO: 79687 - DNA, 630 bp, Citrobacter koseri
atgaatcaacaacaatttcagcaggcggctggtataagcgccggattagctgcgcgctggtttccgcacatcgacgcggcaataaaagaatttggcatcactgcgccgctcgaccaggcgatgttcatcgcgcagatggggcatgagtccggcgggtatgaaaagctggtggaaagtctgaactacgcagccgatcgtcttgttcccgtattcggcaagcgccgtatcacggcacagcaggccgccgcgctcggcagaacggcaacgcaaccggcaaatcagaaagcgattgctaacctggtttacggcggcgagtggggcaaaaagaacctgggcaatcaggttgccggtgacgggtggaaatatcgcgggcgcgggctgaagcaaatcacagggttaagcaactatcgcaaatgcggcctggcgctaaaactggatctggttactcagccggagttgctggagcaggacgaaaatgcagcgcgttccgcagcgtggttctttgctaccagcggatgccttgtgtattccggcgatgtggaacgtatcacgatcatcatcaacggcggtaaaaacggtcttgatgaccgccgtcgtcggttcaatctggcaaaagccgtgctggtgtga

SEQ ID NO: 79688 - DNA, 396 bp, Citrobacter koseri
atgacaacctatataaccgtcgctgatgttgaccagttgcttggtgaaaactggactgagccggataaaaaggcaaaagcggttctgatggccaatgcctggatgacaggcctaaatcttcaggatatcgacctcaataatatccctgatgatgtaaaacaggccggggcatacgctgcttccgtcgcggctgctggcaatctatatcagcaaaaaacagattctggcgtggtgacgagtaaaagcgttgaagccgatgatgtgaaggtttccagaacgtttgccgagctttcaaccagcagcaccgaattacttgatcctgatttgcaactggcgctggccatgctcaatccatggatgcttagcccgttccagacgttctttgtgaggtcttga

SEQ ID NO: 79689 - DNA, 255 bp, Citrobacter koseri
atgtccgattttaaagttgtcccatttcaaaagaccaatcagcacaaagtggataatggtgaggttattcgcttgctgaaacaggccctggaacacgcagaaaatggggggtgccacagcgttgcagtgatactgcttgatgatgccgggaatgcaatcgattgttggcataacggtggtcggccgtatgtaatggtgggtgctatggagtcgcttaaaacggattttatccatactcatattgagcggcggtga

SEQ ID NO: 79690 - DNA, 633 bp, Citrobacter koseri
atggctaaggcctggagtcttgacccagcattattcgctgacaaggtggaagaggatgtcggaaaactgcaacgcgttatagccattcagttgctcaatgagatcgttattcggtctccggttggtaaccctgaaatatgggctatcaacagcatgcaggttcagcagcgcgaccgggttaacgatatcaatgaagcccttcgcaatagcgaccggttcgggactactgacaaaaacggtaaccgtcggattaaacgaggcaataaagtcagtctctccggtgctgagtacagcagtaatgtggggcaattcggcccccaacgcgtgcgcaagctaaggcgcgggcagggggagatttatcgaccaccaggctatcgcgcggggactttccgggcatctcacttcgtgagtgtcggttcgccaagtgattacgttccacgtgaacccgatccgaacggtgcaaacaccataaataacgggacttcgacaattcttgcggcaccaaattattcagtcatctacatccagtcaaaccttccttattccgtaccgcttgaaaacgggcactcaaagcaggcaccggcaggcgtttatgcggtttcatttaatggtgtaacacaggcctacaaatga

SEQ ID NO: 79691 - DNA, 450 bp, Citrobacter koseri
atgatcatcttaaccccacgaattgatgttggcggcgagcgctggttctcaccgatgaagggactgcgcctgctggtgaccagcagcgagaatccgcagttccgctcacgtaacgccctggtgcgccgccacatcgataagatggacgccgtctatcaggttggcaccaatgatttcgaccttgcgagcgtcggcgaaatcgactcggttgatgatttacttatcgacaactgcgctcgtttccttctgaaagactgggaaggtgtcggcgagttggtggaaggtaaggaggttgccattgattacacgccagaacgcggagtgtccatgctgaaacagcaccctgagttgtactggcaaatcctcgctgaagcagccagcatcgcccagggtaaagagcagcaaaagcaggaaaccgtaaaaaagccatcgaagcgcaaaagtggctga

SEQ ID NO: 79692 - DNA, 369 bp, Citrobacter koseri
atgaaagcgaaagtaagaacgattcacggacatggcaaagctagtgaagaatatgtgatcattgacgttaatgaagattgtaatgcagatcacttgatgattgcggacaccacttatacccccaaaggtaatatttcatgcaaagttcgccatactcattggttctatccaacagccttaaaaaaaggtgatgttcttgctctttttacaggaacaggcacagacaagagtgtcaagcaagccagtgggaatacggttttttatagatactgggggttgaaaaccgcagtatggaatgatgatggtgatggcgcgatattgtttgatatcaatacttggtcaacaaaaaaagttgcagaaaccaagtaa

SEQ ID NO: 79693 - DNA, 369 bp, Citrobacter koseri
atggaattgcattcaggaacatttaatccagacgattttgcatggcgtggcctgacgctaacgcctgaggcggcggcacatattcgtgacctggttgcgaagcaacccggcatgcttggcgtgcgtttaggcgtgaagcagacggggtgcgcgggatttggttacgtgctggataccgtcagcgagccagaaaaggacgatctgttgtttgaaacggatggcgcgaggttgtacgtgccgcttcaggccatgccgtttattgacgggacagaggtcgattatgtgcgcgaaggattaaaccagttatttaaatttcataacccgaaagcccagaacgaatgcggctgtggcgaaagcttcggggtatag

SEQ ID NO: 79694 - DNA, 618 bp, Citrobacter koseri
atgacaacccaatatggattttttattgactccagtcgttgcaccggttgcaaaacctgcgaactggcctgcaaagactacaaagatttaaccccggacgtcagcttccgtcgcatctatgaatatgcgggcggcgactggcaggaggataacggtgtctggcaccagaacgtctttgcctactatctctccatctcctgcaaccactgcgaagacccggcctgcacgaaagtgtgcccgagcggcgcaatgcacaaacgcgaggacggttttgtggtagtggatgaggacgtctgcatcggctgtcgctactgccatatggcctgcccgtacggtgcgccgcagtacaacgccgccaaaggccacatgaccaaatgcgacggctgtcatgaccgcgttgccgacggcaaaaagccgatctgcgtcgagtcctgcccgctgcgcgcgctggactttggcccgatagaagagctgcggaagaaacatggcacgctggcggccgttgcgccgctgccgggcgcgcacttcaccagaccgaacattgtgattaaacccaacgccaacagccgcccgaccggggataccacgggttatctggcaaatccgaaggaggtataa

SEQ ID NO: 79695 - DNA, 387 bp, Citrobacter koseri
atgctttttttgattttcgcagcctcgttatatttgttgtctacgctctccgcctctgctgctacaggtatgaacctgatgtgccatattcgcggtgccgtacgcatatctttttttgattatggtttaacaacaatgaagtggaaagatcgttttcaggtaggggcgggaggcgtaaggaaaaaacgtattggcgatcacgcctttcgactggttacgtttcagaatggcgacgattttgtctacgatcggcagcataatatttatctgatctttattcagggaacgacactctacgataaatgccgactggaagggacatttgattatccggttacgcacattccgtcatatcaaaggccaaaaatcactcatactccagattga

SEQ ID NO: 79696 - DNA, 1266 bp, Citrobacter koseri
atgtttgctctggttgatgtgaactcattttacacttcgtgcgagatggtattcaggccggacctgaaagatcggccggttgtcgttctctctaacaacgatggctgcgttattgcccgttcggcagcagcgaagtcctttgtgaaaatgggggagccctatttcaaacaaaaagagacttttcgccgtcacggcatcgtcgcgttctccagtaactatgagctttatgccgatatgtctcatcgggtgatgtctacgcttgacgagctgtcgccacgcgtagagatctacagtatcgacgaggcattctgcgatttaaccggggtgcgcaactacctggttctgacagatttcggaaaggagatacagaagaccgttttgcagcgcacgcatctggctgttggcgtcggaatagcgcagactaaaaccctcgcgaaactggctaactatgcggcaaagaagtggcaacgacagactggtggcgttgttgatttatcgaacgtagaccggcagcgtaaacttttagctgcgctgccagttggcgaggtgtggggtatcgggcggcgcatcgcgaaaaagctggaggggatgggaatcaatactgcgtttgagcttgctgagatggatattcggtttatccgaaagcactttaacgttgtgctggaaagaacggtacgcgagctgcgtggagaaccgtgtcttgagattgaggaatttgcgcctgcgaaacaggaaattctctgttcccgatcttttggcgagcgcattactgattacgaggcgatgcgccaggctatctgctgctatgcgtctcgtgcggcggaaaaactgcgtagcgaacatcagtattgtcggttcatctcagcctttgtaaaaacgtctccgtttgcactcaacgttccgtattacggcaatagcgcagcggtaagattacttacaccgacgcaggacagcagggacatcatcaacgcggcgacgcgctgcctggacacaatatggaaagacgatcatcgatatcagaaagcaggcgtaatgctcggtgatttttttagtcatggtgtcgcacagttaaatctgttcgacgataacgcgccacggcgcaatagcgacaaactgatgaaggtgctggatcatctcaacaccaaagacggcgtcggtacgctctatttcgccggacagggcatacagccgtcctggcgagtgaaacgggaaatgctttcgccgcgctatacgacaaggttttccgatctgttgaccgtcaaataa

SEQ ID NO: 79697 - DNA, 420 bp, Citrobacter koseri
atgatgttgtacagaccagttgaggtgagagacgccgttgctattccgtttttcagcgaccaggttcgttgtggattcccgagcccggcagccgattacgttgaacaacgtatcgatctcaacaagttacttattcgtcaccccagcgcaacgtattttgttaaagcagcaggggactcaatgattgaggccggaattagcgacggcgatcttctcgtggtagacagttcgcatacagccagacatggcgatatcgttattgctgcggtagagggagaatttaccgttaaacgccttcaactgcggccccgcatccagctaaacccaatgaatagcgcttacgaacccattcgtatcagcaatgaggaggcgctcgatatttttggggtcgtgacgtttattgtgaaggcggctcgttga

SEQ ID NO: 79698 - DNA, 3525 bp, Citrobacter koseri
atgatcactattgacggtaatggcgcggttgcttcggtcgcattccgtaccagcgaagttatcgccatctacccaattacgcccagttcgacaatggctgagcaggcggatgcctgggccggaaacgggcttaagaacgtctggggcgatacccctcgcgtcgtagaaatgcagtcggaaggcggcgccatcgccaccgttcacggggcattacagaccggggcgctctcgacctcatttacctcatctcagggcctgctgctgatgatcccaacgttgtacaaactggcgggacagctcacgccgtttgtactccacgtcgccgcacgcaccattgctactcatgccttgtctatttttggcgatcactctgatgtgatggcggttcgccagaccggctgcgccatgctgagcgccggcagcgttcaggaagcgcaggatttcgcgctcatttcgcagattgccacgctgaaaagccgcgtgccatttattcatttctttgatggtttccgtacctcgcatgaaatcaataaaattgtgccgctggcagatgacaccattctgaaactgatgccgcaggctgaaattgacgcgcaccgctcccgcgcgctcaatcctgaacatccggtgattcgcggcacgtctgccaacccggatacctacttccagtcccgtgaagccacgaacccgtggtacaacgcggtttatgaccacgttgaacaggcaatgaatgatttcgccggggccaccggtcgccagtacaagccgtttgaatactatggccatccgcaggcggaacgcgtcattattctgatgggttccgcaatcggcacctgtgaggaagtggtggacgagctgctggcgcgcggcgaaaaagtgggcgtactgaaagtccgtctgttccgtccgttctcagcgaaacatttattacaggcgctgccggaaaccgtacgtaccgtcgccgtactggatcgcaccaaagagcctggcgcacaggccgaaccgctgtatctggatgtgatgaccgcgctggcggaagcattcaacagcggcgagagagaaaccttaccgcgggtgatcggcgggcgctatggcctctcttcaaaagagtttggccccgattgcgtgctggctgttttcaacgaactggcgagcgccagacccaaatcccgcttcacggttggcatctatgatgatgtcactaatctgtctctgcccctgccggaaaacaccctgcccggtacagcgaaactggaagcgctattttacggtctgggcagcgacggcagcgtttctgcaaccaaaaacaacatcaagattattggtaactccacgccgtggtatgcacagggttactttgtctatgactcgaagaaagctggcggcctgacggtctctcacctgcgcgtcagcgagcagccgattcgttccgcttacctggtggcgcaggctgattttgtcggctgccaccagttgcagtttattgataagtatcagatggcggaacgtctgaaaccaggcggtattttcctgctcaatacgccgtacaacgcagatgaagtctgggcacgtctgccgcaggaagttcaggcggtgctgaaccagaaaaaagcgcggttctttgtgattaacgcggctaaaatcgcccgcgaatgcggactggcggcacgtattaataccgtgatgcagatggccttcttccacctgacgcagattctgcctggtgatagcgcgctggcggaattacagggagcgatagcgaaaagctacagcagtaaaggccaggagctggttgagcgtaactggcaggcgctggcgctggctcgcgaatcggtaacagaagttccgttgcaggcggtggacccgcacagcgcaaatcgtcctccggtggtgtctgacgcagcgcccgatttcgttaaaacggttacagccgccatgctctccgggcttggtgacgccctgcccgtttcggcgttgccgccagacggcacctggccgatggggacgacccgttgggaaaaacgcaacatcgccgaagagatccctatctggaaagaagagttgtgtacccagtgtaaccactgtgtcgccgcctgcccgcactcggcgatccgcgctaaagtggtttcgccggaagcaatggagaacgccccggccagtctgcactcgctggatgtgaaatcacgcgatatgcgtggtcaaaaatacgtattgcaggtggcgccggaagactgcacgggttgtaacctgtgtgttgaagtttgcccggcgaaagaccgccagaaccctgaaatcaaggccatcaacatgatgtcccgccttgaacatgtcgaagaagaaaaagtgaattatgacttcttcctcaatctgccggaaatcgacaagagcaagctggagcgtattgatattcgcacctctcagttgatcacgccgctgttcgaatactccggcgcctgctccggttgtggtgaaacgccgtatatcaagctgctgacccagctgtatggcgaccgcatgttaattgccaacgcgaccggctgttcttctatttatggcggtaatctgccttcaacgccttacaccaccgatgccaacggtcgcggccccgcatgggcgaactcgctgtttgaagataacgccgaattcggtctgggcttccgcctgacggttgatcaacatcgcgtgcgcgtcatgcgtctgctggaacagttcgccgatcgcatcccaacggatttaaacgacgcattgcacgccgacgcgacgccggaagttcgtcgtgaacaggtcgccgcattacgccagcatctgaaagatgtcgacggcgcgcatgaactgttaaccgatgccgatgcgctgattgagaaatcaatctggctgattggcggtgacggctgggcctacgatattggctttggcggtctggatcatgtgctgagcctgaccgagaacgtcaatattctggttctggacacgcagtgttattccaatactggcgggcaggcgtcgaaggcgacgccgcttggcgcggtcacgaagtttggcgaacacggcaagcgcaaagcgcgtaaggatctgggggtgagcatgatgatgtacggtcatgtgtatgtcgcgcagatctcgctgggcgcgcagttaaaccagacggtgaaagcaatccaggaagcggaagcgtatccggggccatcgctgatcattgcgtacagcccatgtgaagaacacggctacgatctggcgctgagccacgatcagatgcgtcaattaacggctaccggcttctggccgctgtaccgctttgacccgcgtcgcgccgatgagggtaaactgccgctggcgctggactcccgtccaccgtcagacgcgctggcagagacgctgctcaacgagcaacgcttccgccgcctgaatgcacagcagccagacgttgctgaacagctctggaaggatgcgacggcggatctacaaaaacgctatgacttccttgctcaactggcaggtaaagcggaaaagagcggtgctgaataa

SEQ ID NO: 79699 - DNA, 306 bp, Citrobacter koseri
atgggtttcccttcaccagctaccgattacgttgagtgcgcgctctcacctgcagttctatgcaatataggggcggaaagcagagtgcttgaaactgacgtcgggtttgctgtcattgagcctgcaaccagaaagacaccaggtgacgtgctgctgattctattcgatggaaacactcagtttggggaggtgcttatcacagacgatggcgaagcgatcgaaggtactgctctggctgaagttgaggtgttgggacgtgtaacgtttttcattaaccgtgcaactgaagatgatatccctgtctaa

SEQ ID NO: 79700 - DNA, 213 bp, Citrobacter koseri
ttgattttttcaattatccgcattgaaccgaatggacgcagaactgtcactactcaggcattcttgagcgagctgggaaaagtgaactggaactggtctctgggacaggccaacacctggatagaaacgtatgtgacgacgttcaaggatgttactgaccacgaaggcaaagatcgtactttccagcttttcaatccgaacggagggctatga

SEQ ID NO: 79701 - DNA, 474 bp, Citrobacter koseri
atggcaatcccggcatatctttggctgaaagatgatggcggcgcagatatcaaaagcgctgttgatgtacaagatcgcgaaggaagtattgaggttttggggttcggtcatggactacatctgccgaccgataatatgacagggaagatcaccggcacacgcgtacatagcgctcttgtatttgaaaaggagttcgacagctcaagcccatatctgtacaaagcagtggcaaagggtcagacattgaaaagtgcgaagttcaaatggtaccgcattaatgacgccgggcaggaggtggaatacatcaacatgctgctagagaacgtcaaagtcgtctcgatttgcccgatgatgcacgacgtgaagacccctaccaccgagaagcataaccatctcgaaagcgttgcgctacgatacgatacgatacgagaaaatcacctggaagcactgcgacggcaacatcatcttttctga

SEQ ID NO: 79702 - DNA, 483 bp, Citrobacter koseri
atgatccgctgcacgtttcatctcaatagcggacagctgtcgacgctgagctgcccttgcgtgggattctttccggcttactctggaaacgcgggtgagaacagaaacaatccggacaaaaccggcgttccggagaaggggccgcttccacccggcaaatactatattgtcgccagaccgggtagcggcgcggtgcatttcatcaaaaacgtggcatattcggtagcgtctggctcgaattatttcaactggttcgcgttatatcgtgaagactcgaatattgatgattatacgttcgtcgaggaagtaaagagagggaatttcagactgcatcccgcgggatacaaaggagtaagcaacggctgtataacgttcgtcagcactactcattacaacatattgagagaagccattttaagacagccgacatttagaataaacgggacgcacctcgtcgcgttcggcacggtgcaggtgtactga

SEQ ID NO: 79703 - DNA, 261 bp, Citrobacter koseri
atgaatactttgaaatttacagtgttatggcatatttatttattatcgtatgcttgcatttttattgcattttttgcggtagtaccagagcaacaattgttcacatggctgtcaaataaatatgggtttattgatattgagaagtgggatatttactattcattattcactctattgactacagccttgctgaatagtttattcattatcataacctttcgacttattagaaaaaacagtcgagcgaataacaactattaa

SEQ ID NO: 79704 - DNA, 1521 bp, Citrobacter koseri
atgagaagcgtaataacatacttgagattctcatcagccatacaaggtgctgaaggtgctgattcaaccagacgacaaaatgagctattcaaacagtggttaaggaagaatagcgatgcgcaagtagtagcatctttcaatgatgagggtctatccggttacaaaggtaaacacttatcagggcaatttggggatatgctttcccgtattgagtctggggaatttccagaagggacaatactactagtcgaagctatcgaccgcataggtcgtcttgagcatcttgaaactgaagccttgatgaatcgcattattgctcatggtatcgagattcacactctacaggacggtttaatctacacaagggatgctctatccgatgaccttgggataagtatcatccagcgtgttaaaagctacatagcgcatcaggagagtaagcagaagagtttccgtgttagtcagaaatgggaacaacgtgcaaagcttgcccttgctggtgaacaacgtttaacaagaaatgttcccggatggattgaccctgagacttttaaactcaatgcacatgctgaaactgtacgcttgattttcaagctgctgttagatggtgaaagtctgcataacattgcacgtcgcctgcaaagcaacggtatgaagtcgtttagtcgccgtaaagatgctaatggatttagtgttcactctgtgcgtactatcctacggtcagaggcaacaataggcacactaccagcatcacaacgtaatgaccgccccgctataccgaactactatgaagccgctatagatgcttcaacgttcaataaagctcaagagattcttagtaagaatcgtacaggccgtacacctgcaagtgataacccattaacgattaacctcttcaaaggtctgtttaggtgtcaatgtggggctagtgttcaccctacagggactaagaataagtatgcgggggtctacaggtgcaataaccacttagacggtcgctgtgatgttcaaccgttgaagcgtaaaccgtttgaccgatggatgattgataattttctggggatgattgacgtggggaatgatggagaatcagagaggaagattgcagcgttacagcatgaggttgaaattgtcacatctcgaatcaagaaagctaccgccctacttcttgaaatggatgacattacagagttgaaagcacaggcgagggaactgaaccagaggcgcacagagctacagaccgcgattgatagcatgaagcgtaaaacttcactcactgacaaggaactaccccaacttaaagatattgaccttatgactaaagcgggtcgtgtcgagtgtcagttgattttgtccaagcatctaaaggggctgacattgggtaaggattcggtaactgtaacgctacagaacgacactgaaataaccatacctacaaacccgttaccgctaaatgatggaacatcaatctttgaaattgctgataaagagctactagaaatagacgcttatcaactgtaa

SEQ ID NO: 79705 - DNA, 780 bp, Citrobacter koseri
atgtttgatacaaaacaacttagatatagcggaaaagatggggtttatttccatctacaaggtaacccagataactttctgtcactatctgcaacagagcaaatggagtatgactcccctatgatggtgacaactcaggctatgcagtctgggcagaccattacagataacgttcaaagagcacctaaaacaatcactatctctggtgttgtagtagtaggttcaagcggttctattttaagaaccagacaagggcaacttgtagagaactttatcaatacagtagaaacatggcgagaccagaaacagattattactattgtctgtagggatggtattaagattgatgactctgttattactcagtttaaagccagtaaagaacacactattactaatggtcttcgtattcagatgacatttcagggtgtggaatttaaatcaatagttggaactacggatatttcttctgcaactggtaaacctatgacaactaaagatgacggtgtaacttctaagaaaaacactggtaatactacaacatcttatggttcaccaatgttatcttgcaaagagttatacagctatcagacaagtgaacttaccgacgaacagttaaaagcccgtgtaaattgctctaggagcgttagcattagaaatggtgaaagcaccttcacagactcagctaatgagcaagcttcaaaggtgcttaataatgctggtacaggtagtgctttgaagaagttctctgtgaattctaataaacgcggtacttactag

SEQ ID NO: 79706 - DNA, 1998 bp, Citrobacter koseri
atggctatgcagtctgctcaacgaattgaaaagaacctaaacaaaggcttcaggattaatacaaaacaacttgatagcaatctgacaagttctttagggcagcttgaaagaaagtttaacaagacttttgataagttcgaacaaagagcaagaaacacaaaagcatttcagtttaccagtcaagttaatggcgctcttaaacaaccaaggcaaccgagagtaaatacaggtgaccgagcagtaagagcagcttatcaggctaacatgtctaagcttaaaaactttgaccctgtattacagaaatatattaagagtcagttttacgggttagctggtaaagctggtcagatggataactctaagtttaatgaaaagttagctcagttaaatgcaagtgtacgagaaacgattattaaatccaaaggtgttatgtccaccagcattaacggaaataaagcagctagttctcttgatagtttaagttcggcagcagttaaaacagcaggtgcatttatttctatgcaagctgtattagccagctatcaaaagattatggaagttggccttaaacgtgcttcttctgaacgtgcaattgattttgtgtttggtgaaaacgcagagcaggttaaacaattcactaagaacttatcacagacaacaggtacggacttagccgaaacacaatcacagtttgctggttttggtgcaagtgctaaagaatctcttgggctggagaattctgaaaaactctttgaagcagtcactatttatggtcgtcttatggggcgctcaaatgaagagattaaacgtgctttaattggtttccaacaggttgcttctaaaggtcaggttatgagtgaagaggtgaaaggccagattgcagaagccttgccgggcattgttcaggagatgactaaagctatgggctttaaatctgaaaaacaattctttgaagccatgaagaaaggtctaagttcaacaccattccttttaaaacttacaccccaactacagagcgttattaaagctgctggtggagtagaaaagttaaaagacagttctcaggtgcaagttgataaccttagtaatgcttggaaagatacgcttaataatatcttcaaaggttctgaaggtggtcttaaagattttacaagaagcttaaccaatcttctaaatagtcttggtggaagtggcaagagtcttggtgaatctcttggtagcttgatgagcgatatgtcacatggcatcgactcattgaccgatatttcttacaaggtacgagcgttctttgatgaggtgacattagcttatcgtggtttaaccgatgaacaaaagaaagttgttgatgctttaggttctggcttgattaatagcttaaaagtcttggctggtgttattgctgtaaataagattattggtgttaccagaagtatttacgggcttatgactgctatcacaaggttaggtcaggtagccaatacaacaacagataacgtgaataaaaagaatgggaaaccatcaagatttaatcttgggaatatgctattagctggtagtgcagtttatgcaggttatgaaagattagcttctacacctgaacgaatggaagcacaagctaaattaccagagttagctaaagagtccggacttaaaccagtattcactatggatgatgtgaaaggttggtttaatagtgcagcgacaaagattgctagtttccaagagccaatgaataactttgtgaataacactgagtcaagtacaccagctattacgggtgatattgtgaatagcaatgctcaattagctatggctgtatcagagttgggaagaaaggtagatgctctggcggcagaagctaagaagcccttagcggttaatatcactggtgaagcggtagttagacctgatgaaccagcattctttagatttacacagtcagctagtgaccagttcacagcggatatgctacttagctcaagctatccagaagagtaa

SEQ ID NO: 79707 - DNA, 216 bp, Citrobacter koseri
atgattgatttacagcaacgctatgaagttattaagtctgtttgtgagaacttaaagcttcagaccaaaccaaagttaagaattaaaagcaagcgtcaagttatcacctcgcataaagcaagagtacgtaagattccttcatggtgcttagacaagctaccacatgacgcacagttattaggtgaagatgggattcacacttacgtttaccattaa

SEQ ID NO: 79708 - DNA, 252 bp, Citrobacter koseri
atgattaagaatctactgaatgaagttaaagaaagattcgatgatattggcgccctttatgaagagtatggtaaacgacttgccagcggtgagaaacccgatgattcaagtcgggaaagaatggcttctcagtttttgcatattgcatatgaaaccaagagactcaagtttatgctagaggaaatggggttttctagtaaaagtgaaattgtggaaacagagaaaagttgccatatgaagattttgggttaa

SEQ ID NO: 79709 - DNA, 717 bp, Citrobacter koseri
atgattagagatgaatttgaaaaagaaactgataacagaccactagctattaactcaatcggtaatggtgctcatccagtacataaacagcaagaagcaattgctgataaaattgctaaggaagagtgggaacgtaagacagcaatcccaagtgaaattatcactgtttatcctgaaccaactgagttacctgatgtatgcaaaactgaagcattacttgagcttgagcgtgaatattacccattaatgaaagcacagcgtattaagcttgatattgcttatgacaatgtgaagaactttgaagagactgagaagccaactgattttgatattgaagtggaaattagacaaaatccattcgtatattactcagttgaagataatgatggttttggtacagcaagagagaatgtttcaaaggttcttcagaacatccctgaaggattccgtttaattgatgttagaccagcttcacgcggtacaggttcatatattctactgtctgataaaacagatgaagagatttgtcagttagctgaaaagaatctacttgagcgtcatggcaaaaaattaaacagatttaagcaagaacttgctaatcagcttaaagctatgaagacgcttgttggtgaatatgaagatgctaagaagcttgctatgcaggctgatattgagcaactaactaagatttctagcaaatatgcaaaggctatttga

SEQ ID NO: 79710 - DNA, 306 bp, Citrobacter koseri
atgaattatccgatgacagtattaattgaccaggaaactatgagttggttgactgacctgaatatgtcaggttttaatgtgcattttatgaattgctttgaagcttcaagttatatagagaaacacaccatcaacacaattaaacttggtgactatgttcacaagctggaagtaacagactcacacaataagcgctttatcattgaagagtgcaatcgacttgatttaagcccagagcaactactgaagctgaatgtatttctgacttatcagcaggaattaaacccatatgaaaattttttttaa

SEQ ID NO: 79711 - DNA, 201 bp, Citrobacter koseri
atgttatgtattaaattcgaatatttgacagataaaatgattaagcatgtatcagacctgctcgttaaagaaaatggtttcggtgatattcataatccaaaagatatcttcattcatgccaccagcccaaacgaaacattaaaaacagcagttacagcggaatggtttgaacgaaataaagtagaattaggctattggtag

SEQ ID NO: 79712 - DNA, 273 bp, Citrobacter koseri
atgaagcaatggcgagatgatattaaacggttctttgcaacttactttaaaattaattacgaaacaggaatgcttgaatggattgatggtggagaggttaagacaggagatgatgcttacggtaatccaatgattcgctatggtactcgtgattattatgtgaagtatatcatctggtttttgcatcatgaagttcaggcaactaaaaagattatattcagagatggtgataaaagaaattgtcacccaaacaatttactactggagatttaa

SEQ ID NO: 79713 - DNA, 279 bp, Citrobacter koseri
atgaacagacacacattaacccgtatttcagaggaagccttcagagagcttacccgaatcaaacaagctactaacttaccccacaagactattatgcaacttgcaattgctaaagaggtcactgaggcggatttactgaagactcctgtctcaagaggtcgtaagcatattcgaattgaacggaaagcacttaacattcttaagaatgaaaacaagctgccagtagatatcacgcgtctactgagtctgaagatttataagttatctcaagaggtatga

SEQ ID NO: 79714 - DNA, 555 bp, Citrobacter koseri
atgaacgacagagattttcaaaagtttcttgaagagagcaaagcaagaaacagacacaacggttacagctacacaaccacccccaccagctacgaactaccagcctttaccaaatccgaacgtaaaaacattgaagcggtcattcgtagcattacgccacgagacagatatatgccagcacgtaaagaaaaagagaatactttaaaaactttcttgatgggctttgattcttacgagcaattaccgtcacgaattgaagatgtaattatcggtacttgtcgcagttttggaagggataactatcaccggaaagttttctatttactacgaaatcttgacaaaattagttcaagcacaataacaagttatcttcagcgtcaatcaaccagacttagccatgagctaccaagcgataaatattgcgccaacctagccactgtttgcatgaaagttattgagacaattaatcatcatgtggaagtgggtaatattagccttacaaccagtgaaccagactttgaatttgacgtgtacgcacaagcagaaggattttaa

SEQ ID NO: 79715 - DNA, 189 bp, Citrobacter koseri
atggtaaatctccctcaggaattggggtcacctgatttatgggctggtgggggtgtgggtctgttcgcaggcttactgcttcgctacgtcattgtcagggtgtttatcgtgttcaggctgttcggcaaagagtggtcgtttgacctcaagaacagaaccggaacagataatcacacagaaccccgttaa

SEQ ID NO: 79716 - DNA, 570 bp, Citrobacter koseri
atgcgtacattcctttatgctcgtgtatcacttgatgacctcactacacaaaaccagatagaggccgttaaacgtgctggctatgaagtcagaccttcacgagtgattgaggaaaccattagtggtgctaccccagctatggacagaccacaatttgtaaagctggtggataagctggaagaaggtgattgtcttgtagtgaccaagattgaccgcttaggaagggataacattgatgtacagaagaccgtcacaatgttacttggtatgggtgtgaaactggtctgtttagacctgcctgttcaagacctttcaagtgctgaaggtaaacttatccttcaattattcagtacctttgcagagtttgaacttaaccgcatcagagagcgaaccagagagggcttagaacgtgcaaaatcacaaggtaaggtgttaggtcgtcctgtagctatgaacactacagaagccgttttagagcataaggcaaagggattgtcacagagtcaggttgcaaagcttctgaatctctctgtaagaacggttagccgtcactggacaaagacactgtaa

SEQ ID NO: 79717 - DNA, 666 bp, Citrobacter koseri
atgagtgacactactgattggggaagcatggtagccaacatagttatggcaagtactgctgtatgggctgcattcaaagctaatgattggtttaagactaaacgtcttgagagtgctgaaaacttctataaagaagtacacaatcttcataaccgttactattcagctatccaatacgttgaggattcaagaagaatatttgatagtcagtatggattgaataccccgatatctgaacctaaagaccaatcgttacagtgggaagtcaaatcaaactcttacaaaattatagctgaactggattatctggcatcttcactgcaaatgatggatgcaatgggtaatcaactcagccctaaatcggctgaactggttcgtgatatgatgaaagcacatgggcgattctgcaatgatgtgatgaatttcaatgactcagtttggaaggttataagggcaggtataagtaaagagaacatcccacctacgcgaggctatgtgaacaacaattacatggctatccttactagcatggatgaacctgtaaagatatcgtttaagttaaaagaaattagttttaaagatttttaccagcatgaaaccactatgcagtctgtaataacgtggtttaaatcactcatcaatagaactggtaaaaacaggccataa

SEQ ID NO: 79718 - DNA, 252 bp, Citrobacter koseri
atggtctccattgtcggggcgattggttttgtcggcctggtgatccctcatgccgcccgcctgctggtgggtaatcaacaccatcgattgctgccggtcagcgccatgatcggcgccatttttctcattatcgccgacgtaatctccaggacattacttcccgggcaggtgttacccatcggggtgattacggcgcttgtaggcgcacctgcgttttccatcattttgatcagaggaaaccagacaaaatga

SEQ ID NO: 79719 - DNA, 174 bp, Citrobacter koseri
atgacggcagacagagcgcctttaggccttaatcagatcaatggctattcctattcactgttagatatggttgacaaccaactggatttctacgccgcctatgtcgccaccagcgtgcctgttgtgccgggcgtcgtgaacgccgtagcgaacttcaccgttaactataactga

SEQ ID NO: 79720 - DNA, 279 bp, Citrobacter koseri
atggctggtatttgtatcattgaaggatgtggtcgctatgctgataagattattggcgtaagactacgaagagaactggaaggcagaaatgccatttgggcccctgatactgaggcctatctttgtgatgaacatgcagctcaaggttatgatgtccgcattgaactaacccctcgtgatgataagaccgtcagaactgtggtaagcaatgctgatggagacgtaatagagcacttgcataccatcacaaagccggtaaatacagacgatccgcagtaa

SEQ ID NO: 79721 - DNA, 882 bp, Citrobacter koseri
atgttaaaaaaagccaccaccaaaatcaaaacagagggaacgaatctctatatgggtgactgtctagatttattatccatgatggaagattcgtccgtagacctcattgttacttccccaccttacgctgaccagcgcaaagggacttatggtggtatttctcccgataagtatgtggagtggttctctcccatcgcagagcaacttcatcgtgttctaaaaccaactggctcatttgtgcttaatataaaagaaaaggccgtgaatggcgaaagacacacatacgtactggagttaattatccgattgcgtcaactgggatggctgtggacggaagaatatatttggcataaaaagaactcattcccagggaaatggccaaaccgatttcgggattcctgggagcgttgtctccactttacgaaatccaaaaagttcacgatgtaccaagatgcagtgatgattcctatgggtgactggaagaaagagcgtttaaagaaactcagtgctaaagatacagtccgggatgagtcgagagtaggaagtggttttggaaaaaacatctctaactggcaggaaagagagatggcctaccctacaaatgttctccacatggccactgaatgtggaaacaaaaagcatagcgctgccttccccgaagcattacccgaatggtttattaagctcttcactaaagagggtgacgttgttcttgatcctttctctggttcaggaaccacattactggttgccaatcggttgtcgcgaaaaagtgttggtttcgaactgatggaggaacattgtcaggtggctcaagagcgaataggtctgaaaaaatgccctgtcgcaggaattagcatatttagcaaaattgatgaatag

SEQ ID NO: 79722 - DNA, 615 bp, Citrobacter koseri
atgaaccaatcacaatttcagcaggcggctggtataagcgccggattagctgcgcgctggtttccgcacatcgacgcggcaatgaaagaatttggaattacagcagttaacgatcaggccatgttcattgcacaagttggacatgagtctgctggctttacctcgctggtagagaattttaactactcggtagacgggctgaaaaaaacctttggtaaacgcctgacgccgtatcagtgtgaaatgctggggcgcgtcgatggtaagcaggttgcccaccaaccgcaaatagccaatctggtttacggtgaccgcatggggaatcacagccagggtgatggctggaaatatcgcggtcgcggcctgctgcaaatcactggccgtgagaactatacccggtgcggtacagcgttgaaacttgaccttgtcagtacaccggaactgctaacgcaagagcgacatgcggcccgttcggcagcatggtacttcacgttacgcggttgcctcctgtattcgggtgatgtggaacgcgtcacgcagatcatcaacggtgggcagaacggcattaaagaccgccgtgaacgttacgccaaagcgaaagccgcgctggtctga

SEQ ID NO: 79723 - DNA, 2079 bp, Citrobacter koseri
gtgagaaatagcgaaatcattgttgataactttgctggtggcggcggtgcctccactggaattgagatggcgactggccgcagcgtggacattgcgattaaccacgatccgaatgccgttgcgatgcacacgacaaatcacccgaacacgttgcattattgcgaatctgtttacgatgtcaggccgaaggtagcgaccgccgggcgtccggtggcgctggcgtggttctcgccggattgccgtcacttttcaaaagccaaaggtgcgaagccggtagagaaagcgatccggggtctggcctgggtagttctgcgctgggggctggatgtaaaaccccgagtgatgaaactggagaacgtcgaagaatttaaaacgtggggccctttgctcgctggtgaaatgaggccagatccggcccgtgctggagaaacttttgaggcgttcattggtatgctgactactggcatccgggctgaccacccggcactggcggagtgctgtgaatttctgggtatttctcttgatagtgaagacgccgcgaagctgatcaaagggctgggctacatcgtcgagtatcgcgagttgcgcgcctgcgactacggtgcgccgacgattagaaagcgattctttatgattatgcgttgtgacgggaaaccgattgtgtggcctgagccaacacatggcgacccgaaatcaccggctgtccaggctggtaagctggcgccgtggcgtactgctgctgagtgcatagactggtcaatcccggcaccttcgatcttcgatcgcaaaaagccgctggcagaaaatacactaaaacgcatcgcgcgcggcattcagcgatttgttatcgacagtgcgtcgccgttcatcgtgaagtgcaaccacaccagcagccgttcaagttatgattgtttccgtgggcagccactggaagaacccctgcaaacgatcacgaaaaagcatggttacgtcgtcgcagtaccacatctgacgaagttccgtaccggcgcaaccgggcaggaagtcaccgaaccagtaccgactgtaaccgctggcacgtcggcgcgcccgggcgggaatggtcatgccctcggcatcgttgaggcagcgctgacgccgtttattgttggggccggtgggccaaagtattcggcgaagccccgcagcatggaaagcccgatgcacaccctgtgcaatacgaatcatgcgtgcgttattgcgccagttatcgcccgacagtttggcgccagcatcggccaccgcgcagataagccgagtgcaactattaccgctggtggtggcggtaaatcgcaacttgttacatcgacactgatccagatgggatacggggaaaggcctggtcaggaacctcgcgttctccagatcgaaaaaccgttagggacagtaaccgctggtggaaacaagttcgccgtggccagcgcatttctggcgaagcactacggcggcaactatacggggccgggcgtcgggctggatgagccgactcactcagttacgacggttgatcatcatgcggttgttgcagcacatctgatggtgaacaacaccgggcatcctggcggttccgtggactctccagcgcataccgttacaacaggaaaccaccatgctgtagtgacttctcatcttgtgcatttgcgagggttctgcaaagacggtcaaaaaatggatcaaccgatgccaacgattaccgccggaggccagcatgtgggggaagtgaaaaccactctggcagttgagcactacgacgaacagcgtgcgcaacagacattggcgttcctgcgtgaatattgcggcgaagactgtaccgggctggtggacatcgatgggataacgtaccgcatcgtcgatatcggtatgcggatgcttcagccgcacgagctctatcgcgcacagggcttccctgactggtacatcatcgatcaggattatcgcggcaggcggtacgccaaagataaacaagtagcccgctgcggcaacgcagtcccgccaccgttcgctgaagcgctggtgcgcgccaatttgccggaattgtgcgtgagacgggaggcagcgtag

SEQ ID NO: 79724 - DNA, 258 bp, Citrobacter koseri
atggatcagctactgcaatacgcaaccaaccggattattgagctggaaaatctgctgctggtggatactgaggaaacggtctggccagcagaggttcagatggtttttagtcaaatcgaaaacgccgggagtttcccggcgcaccaccagcgccgattgcagcaccacatcaacagaatgtggctggaaaaaatgccggttacttcgattattgccgcagcgcgctcgctggctggcgcaatggagaaatacgcgtga

SEQ ID NO: 79725 - DNA, 822 bp, Citrobacter koseri
atgactaataaccagttaacaggcctcggtgcggatcatcctgctaacggcccgcttacaactgagcgtcttacttacgttcgcaacgtgttacagcgcaaactcaaatactcaaatggcggaagtatggattacatcatcgctgacgctgtgaaagcgattgatgaattgctggaagtgcgaaaggcggagcctgccggataccacgttatcaaagaatgcggaaaagtcggctgtagtgttgcaacacttgaggaagccgagaaaacacgagaattctggaataaaaagtggactattaagccgtatttttacaccgccccgccagcgccggtagtgccagaggaagccactccagacaatatcgagatactggcaagcactcgcgttgattcatccgtatctttccaatgggatgaagatgaacgtaatgctgcggctgactcgtggaacgcctgccgcgccgccatgcttcagggtagccaacctgtaagtaatcgtgatgagttgcgcgaacaggttcgccgtgaacacgctgaatggtctgatgccacatttggtaatgttggccccgttggtccacttaagcacctgtcgaaagaggcgctggaagctgctgccaacccggaagatccgcttgagtgggctgatatgcagtttttgctgtgggatgctcagcgccgcatgggaatttctgacgagtttgtcaccagggctatgatcgaaaaactggagataaacaaatctcgccagtggcctgagccgaaagacggagaaccgcgactacacatcaaatctgatcaacggcaggagcacatgtga

SEQ ID NO: 79726 - DNA, 666 bp, Citrobacter koseri
atgagcaacatcgacaaacaggcgctacgccaattggcaactgatgcgcacgagttgggcatcatcaagcggtattcgaagggactagaggcgcagagaaaattttacgccgctgcaacccctctggttattcgcgcgctgctggatgagctggaagccagagataagcaggttgctgagttagttactggccgtctgaacctccagtggatattgaacgtctatgcccacggatacgaagaggccaaagagcagattgctaaggacattgagataaaagccagactatgccgtgaaagtaacagcttgtttgacaggttgcgtgccgcagagaagcgcatagcagaactggaggccataaaaccaattggatattttgcgtatgacactgacggcggatttactaaccacgaaacggcagcgcgcgcgcaggaagaggcgcagaacgctatcgaatattttcgtgaaaacgcctgcgacggctggagtgacgaagttgatagcgtgtgctggggtgccatcatgcaggaggctaataaagtcgatgaaagaccggtaactggagaggacaggtgcgctagccacattgaatatcattgtgattatgcactattgcccggaagtaacagcgccgctggcatccagtctatcgaaggagaaggataa

SEQ ID NO: 79727 - DNA, 318 bp, Citrobacter koseri
atgagcaaatttatggcattaccagtagaacgcgaccaatacggctactggactcaccctgtctatgagcaattttgcgatggtcgtgaatttatctcacctgatgagttcaacgcctggttggataaaaacggcctcgaatggaaggtagtttaccgggatgaagaagacatcgatcctgaagttgatggttacgatatttcagcctggcagccagaatcgccagccggtgagggttggtttgtcggttcaattcacgacaccgaagatggcgcggtatgcatctggttacgtaacgttgaaggcggtgcagcatga

SEQ ID NO: 79728 - DNA, 1044 bp, Citrobacter koseri
gtgtcagagggatatatccagagctttaaacttaaagttcatgaaagtaacggaatagaatatgaaaatttattttcgaaagttatgtcatattatcgccccggattcgataaagtaaaacctcatggtaacataggtgacagaggtaatgatggatgggtatatggtgcaggaatttactatcaggtatacgctccagaggacctgcctagtaatgaaaagaaatcgctagataaaatgaaggctgatttcgaaaaacttttctcgtattggaatactatttccacagtcagggagttttattatgttgtcaatgataaatattacggcatcccaccatatctaaacaatgccatcgccgaaattaaaaataaacataacttaaatgaagcgagggtgattggtgctacggcccttgagagtttttttgcaacgctgagtaatgaacaaaaaaattatatatgtgggcaatcgactcgtaaccagttcaaaacagagcgctaccttgtagaatgcctcacaagtaagatgtatcttcatgcctgggataacattagcgataaccttatcgctaatggaatgcaatctgaagttgttgatggattttatgaggcctgccagaccgttctgacaacccaaatgccaggccgacttcccaaccttgacttatcaatgattgagcttgctaaccatgcgtattacctttgcgaacatataactaatatgaactttgcaagtaacataaatggtttttggaagagggacatgagttggaaaaaaatcacaatggaccaagataaatatcatgagaaatatgacacctatgagcactggagaagagaactatttcggctacactataatttagctcatgcgttaaatcttttttctttagaggtcagaaagtcacttgatcctgatttcttttttggaactcaattcggaataaacgatagcattggcacctacaataaactggaacctatgtatcttattccaagatcgtattgctcaaattatctagagttatttggtgataattga

SEQ ID NO: 79729 - DNA, 951 bp, Citrobacter koseri
atgcctttagtacgctctgagcatgaactagaattagcaaaagaattgctggatgatattgaactatctcggatccctgtggatactttaatattgaaagcctctcgactggcaagactttgtggcaatgatgagtttcagaggtgggtcggatttgaaatgcgcgggtattttacaaatgttgatttatgtctaaaatacatggagttaacagggagatggactgataaggaaaaaaatgaagggtattggtcacctatcgctcaaatagaatcttttgttgtggcaaaaaaaattgaattagaatctatgtcaaccccaaacgttagcggaactgactatgctaacgccgtgatgactaattatttaaatacaaaatctgcaatctcacttttaatttcaaaattaacaggaattaaaagcagagttatgggtatacttcatacctttacatctgaaatttattatgaaaaagagctcgataatttagccgaatcaatatttgagaattataaaaaagatgttgatactttaatttcaagtttatgcggagatgtacttcagcaaataccttcggtagtcaatagactcgcagaaggcgaagaagaatcagttagccaagccctcataactgtaagacgaatcatcgatagctttgctgatgcaatcttccccccagtagaggaaacatatgaaattggaggaaatcaactgtcacttggcgcatcaagacatcttaaccggctgaatgtctacgtacatcagagggttgagagcaagtccagaaaggataagattcgacaaaatttatcaaatctatatgccagagtctcaactggcgtgcatgcagatgtatctatcgaggaagcacagtcactgttcctgaactgctatcttctattgggagaaatcctgcatataagcaagcttgaaaaaattgtggccgaataa

SEQ ID NO: 79730 - DNA, 768 bp, Citrobacter koseri
atgcaccatgcttttgagtgtatgggcgaaccactcgcacgcgatttcgatgcgcaaatgttttcccgctaccgtgaaaaacggttaaaaggtgagtatgcccgttcaaacagagtgaaagaggtatcgcctcgcacgcttaatcttgagcaggcctacttccgggctgtgttcaatgagctaaaccgcctcggagaatggaagggtgaaaacccactgaaaaatatgcgacctttccgcacagaagaaatggaaatggcctggctaactcacgaccaaatttcgcaattgctcggagagtgtaaacggcatgaccatcctgatttagaaaccgtggtcataatctgtctcgccactggcgcccggtggtctgaggccgagagtctgaaaaaaagccaactcgcgaaatacaaaatcacattcaccaacacgaaaggcagaaaaaacagcactgtcccaatcagcaaagagctctatgagtctctgcctgatgataaaaaaggccggttgtttagtgattgttatggcgcgttccggtcagctctggaaagaacaggcatcgaactaccggcaggacagcttacccacgttttacgccacaccttcgccagccactttatgatgaatggtggtaatattttggtcttgcagcgtgtgcttggccataccgatatcaaaatgacaatgcgatatgcgcactttgcccctgaccatttagaagatgcagtaaaattaaaccctattgtaaatagaattaacatatattaa

SEQ ID NO: 79731 - DNA, 171 bp, Citrobacter koseri
atgactgtccgtaaaaatccggctggcggttggatttgtgagatctacccaaacggtgcaaaaggcaagcgtatcagaaagaaattcgctactaagggcgaggctctggcgtttgaacagtacaccgttcaaaccccgtggcaggaagaaaaggaagacaggcacacgtaa

SEQ ID NO: 79732 - DNA, 672 bp, Citrobacter koseri
atgaccggtggatttattgcaggcgagccagggcgtttttacaccttccagtcaaaattgccatcaggtgaatacttcgagtttcgcccccgcaatccccccctgaattctaagcccatcgtagacgatgaaagtgggatgtgtattggttattccgtcgctcaagctcccggtttgtggcaaatttatgatgccgatggcgtgtttgtcagaatggaagaagcgccattagaagctcctcttattgaccctacagacctcgctttaatcgcctttggtgcatttcgactttttcgggtggggaaggcattgctggaaagtagcgttaaaacggctgtaacggtgaaacttagtcaggctaccattagcatcttgcgtggtcgccttaaaataggcttatcaactcgtgccctcaagatgactgcaacaccggctaaacatatgcttaatccggggcgatacgttcctttgcaactacaggaaaaagttattcgatacggtaaaagaatgcctgatcctcaaagggcccccggactttttcgttacgaggcagagatgtataagcttgtagagaatcgaggccaaaaaggaacctatttctataagaaatacatgttagaggttctggtgcgtgagaaggactggacaataactcatttcttatacaaataa

SEQ ID NO: 79733 - DNA, 429 bp, Citrobacter koseri
atgattgaaataattaacggcaagaaaatactacggattaccccctttgagcgagataatacgcccgatatacctgagtatgactggatacagacttacgtggaatacgaacttcctgagctaaaatctcaatatcaggcttcgtttaatgtcggtgagcttaatacccttaaaaataaactcatagagttacatataaatttagtgaatagcggtaaagcgcaggaggtggtttttgatagcacagaaaatcagttgaatctgattttttcaccactaccctcagggcaaggcgtgctgttgacattaaccctcagaccggaaaatccagccgaaagtgtagttgtcagtgatagtatgggaatggatgaaagctacttccctgcgctgctttccgggttggatgaaatcattaattggtcaaattaa

SEQ ID NO: 79734 - DNA, 810 bp, Citrobacter koseri
gtgcatcacagctcaccgatttacgttaaacgcaacgtgctcgcgagcacctacattccgcacccgttgttatcccgtcaggatttcagccgctttgcactcgactatctggtattcggcaacgtctttcttaagcagcgccacagtgtcaccggccagttaatcaaacttcttgcctcaccggccaaatacacccgacgtggggtcgacgattctatattcgggtttgtggaaaacttcactctacctcatgagttcgcgcctgataccgtgtttcacctgctggagcccgacattaatcaggagatttacggcctgcccgaatatctcagcgcgcttaattccgcctggctgaatgaatccgcgacgccgttccgccgcaagtattaccagaacggcgcgcacgcgggttacatcatgtatgtgaccgacccggcgcagagtgcgaccgacgtcgaatcgctgcgcgaggcgatgcgcaactcgaaagggctcggcaactttaagaatctgtttttctatgcccccggaggaaaaccggacgacattaaaatcgtgccactgagcgaggtcgccacaaaggatgactttttcaacatcaagaaagccagcgtagccgacctgatggacgcccaccgcgtaccgttccagctcatgggcggcaagcccgagaatatcggctcactcggcgacgttgagaaggtggcaaaggtattcgtgcgtaacgagctgtcaccccttcaggacaggttcagggaggtaaacgactggctcggcatggaggtcatcaggttcgacaacccggaataa

SEQ ID NO: 79735 - DNA, 219 bp, Citrobacter koseri
atgtttcattgtccgaagtgccatcatgccgcacatgcgcgaacaagccgctatctaaccgaaaacacgaaagagcgctaccaccagtgccagaacatcaactgtagttgtacgtttatgacaatggaaacaatagagcgctttattgttactcagggagccatcgacccggcaccgccgcacccgactgtcggtggtcagcggccattgtggctctga

SEQ ID NO: 79736 - DNA, 1137 bp, Citrobacter koseri
gtggatttgcttattatactgacctatattgcactggcatggacagtttttaaattattcaggataccagtaaatcagtggacactttcgtcagctgctcttggcggtatagggctggttagtgggcttattttattaatgaactataaccatccctatacatttaccgcccaaaaagcagtgatttctgttcctgtgatccctcaggttacgggaagggtaattgaagtcattgacaaaccaaatcaactaattaaaaaaggagaagtactttttaaaattgagcctgataaatatcagtctcgcgtcgagcgtttacaggcagatttagtcacggccatccataatgttgaggtactaaaggcccagttgtctgaagctcaggaaaataccatacgagtctcagttgaacgcgaccgtctttataaagattatcaacgctatgtgaaggggagccaggctaaggtaaatcccttttctgaaagagatatagacaatgcccgacaaagttatctgtctcaggatgcagtagtaaaagcttctgttgccgaacaggctcagattcagagtcaactggacagtaaggtaaatggcgaacagtcccagattgttagtctgagagcgcaacttgctgaagcgaaatatagtcttgcacaaacaatcgtccgggcccctggaaatggatacgtcactcagttgttgattcagcccggcacatatgcgtcttcattaccgcttcgtcccgtgatggtcttcatcccggaacagaaacgacaggttgtagcgcagtttcgtcagaactcattgttgcgtctaaaacctggtgacgaagctgaagtcgtgtttaacgccctgccaggaaaagtgtttgaagggaaattaatgagtattcttcctgttgtgccgggaggggcttaccaggccgagggcacactacaggcactaaccgttacaccggcaatggatggggtgatggtaactattgaacttgaacataatgaatatattgatgtgttacccgacggtgtttctgcgcaggtagctgcatattcggaacatttctcgcatgtttccgtattgcgtaaggtgcttttgcgtatgacaagctggatgcattatatttatcttgatcattaa

SEQ ID NO: 79737 - DNA, 552 bp, Citrobacter koseri
gtgtgccgtatcagtaaaggccccatagggggccttcagcctataggttttttcaatatgataacaacgccattagatcaattcgcgctgtcaggcttaaatgaactggttaaatccattattcctgcaacagaacaaagaagaatgttatttgtgcaagatattgatttgatcactgcatgttactgccgacagttatctgatgatgttgtgattataccacttagttcgtggggaatatcttcctgcggaactatatcgttgcaggataatacttcagatattcgtgaggcgttaaaatgtacgctacaaagaaaatctgatgaaacatgtcgatactgccagctcatcagtgaattaacattaagggagctcggtatcattcggttgatgaaatattctgacagcatgccaggagttcgtctaatgacaagaataagcagaaaaacggtatatacccatcaatcgaatattagaaaaaagacaggtttcagaacaaggagccagtttctggcatggtgcaaagctgtctccgggtcgctaacaatttga

SEQ ID NO: 79738 - DNA, 3666 bp, Citrobacter koseri
atgccacaacttcttcgcatcattcttatacacacccacctgccaggggttgttgaaattcaactggatcagcataccaatatttgtggaactaatgcttccgggaaaacaactctgcaacgtcttgttcctgtcttctacggtgaacagcctaataaagtagtaccaagaacgcggaagaagttcgacgagttttatctcccttgcagcaatagctatattatttatgaataccagcgagaaacgggtgacaattgcctggttgttttgacgggtaaaggtgagggaggcgttgaatatcattttgttagcgcgccttatcatccagactttttccttcgctatactgaggatggcgcgaaaggactgagttatcacgaatggtctgcccagatgcgtaaccgggatgacgtctcagtctccgccaaaataggctcaaccacggagtaccgcagcatcattcaaaatgatcttgcctcattacgcggcaattcgacagagacgatgaggcttcgtcgtttggcggcatcgtttagcctagtaagtggtaattataagctcaggcatattgagaaattagtgagcgccgttcatgccggtgaaggcaaaatggaaacgctcaaaaccatgctggcggcgatttttgccgatgatggcgttacgctcccgcaaacaaaagtaaaaagcagctttgcgcgggaatggatccaaaaaatgcgccagtcgctgcgttacgataaattgcagcaggagtttgaactcttacagcgcctgggcctgaaactggatgatacggaggcgcagttagccgcgctccaccctctgttaagaaatgatgaacaaattcagaagcagaaaagggcggatgcagaacagcaacttattcagcggcggggagagcttatccaattagaggattgctttaatcaacagagtcgtgaactgaacgatcaattaagtaaaacgcaaagtgaattaaaaacggttcagtcatggctggattatgtccaggaagaaaacgatcgttatgaacgtaaagatatccgccttttgcagacgcacatggacgaattaccccagtggcgggaggcgcttttagcgcaaagtgagcaataccggcttatgcaggatcaagtaggtgaactttcccgagaatttgaacagcacaaagcaaaacttaaagacagtttttaccgtcaggaccggctgactcagcaaaaaattcaggattgccagcgggaaaaagaggtggtcagggataaatttgatagccagaaagagatatttcggcagcacttcgaagagcgaaaacaacagcaggaaaaccactatggtgaacaactggagattatttctcgcgatcggacggctgttaacattgagcttaaacattcccagttaaccgctgaagagcatgaagaacgccagattgcagagttgcgtattgagcaggcccaggagtgttcattgcaactgggcgagcgacgacaaaatgcgcagacaaagttgtccgaggcccgcaaacagcaagatagtgcagaaaagcaactgcactatgcccgcgccgagctgcatcaggctgaggaacaattgcagcaactgcatcgccagttggatcctgaacaggggacattacgccacttcttgcgttcacgttacgagggctgggaacagaatttgggcaaggtgctgaatgaaaacttgctggaacgtaaagacttgcagccagatctaagggaactgtcggaatcactgtacggtctgcaactggaattaagcgtgctggatatgccgaattttgcgcaggatgaagcttcaattcgacacagtcttgataaggcagagcaaaccagggcgcatgctgaggaggtgaagaaaacggcagaagctagctttcaggagcaccaccagaacgttaagcagttgcaatcgcaagcggacgagtgtgaaagacaatatcaacgtcaaaatcaggaggtcggctatgctcgggatgcccgtactcgtttaattgcagagcatggggtgctggagcaagaacgtcggcaggaaaaacgcgcccgcttaagcgcattagaaaaagcgcataccgaattaacgcaacagaaagaacacgatctccgcgcattaacgggcgaacataatgcgcaaacgttgcaatggagtgtcgaccttcaaagtgaacagcagcaaattgatgagaaggtggaagaactgtcccagcagataaacaaaaaacgcgccgacatggaagaacagataagaatattccagcaggctctggacgatgatttagcgaagaagggaattgatccccgcgaagtgaaaatattgcgggagcgcattgaaacgctaaaaaaagatattcaggcggttgaagaacgtcgggatgagctgaccgaatggcagcgttttatcaaacttgactgggaacagctgcgccctgagaaacagaagcaggaagctgagctctctcagcagaagcgtgagttgttgcagtcagaatgtcagttaaaagcagaatatcagaataaaaaagacaggcttactgatgagaggaaacagtacgatattctgatgcggcaggttggagagtttgttgcacagttaaaaatattgctggatcgattatcacctctgcctcttgcagaaactgttccggcttatattgattccgccgctgatatcaatgaacggatatcgcgtaccagtgatatgttggagcaacacgccagcgtgacccgtacgctggagagcaaactgaatgagtttaagtcacgctttaatcaggacgcagaccccactttccttgaattaatggattctgagatagataaattacccgatccttcaaggaaccggcagcaattgccaatacttgagaaactactacagcttcttaaagataaacagcagcaattgctggagatgggggaaaatatcggtggcgatctgaaaaaattctttgatgttttcagtgatatcaatcgccggatttcgcaacaaagtcggcgcctgagcgatgcggttaccgacgatttgcaactggagggcatcaataaatcagaagttcgtattttatcgaccatcgaccagttacgattctggaaaccattaaagcgctttgctaaaaactatagtgactggcgttcgtctggtcagcaactccctcccgaaagttatttgaatgcccttatggatgtggttgaactgcttcatgccgatgagcgtttcactatggaatcgttattaaacctcgaacttcatcttaatgaaggtggggaagatattgttatcaaaaatgatcgtcaactactggaagcatcaagccacggtatggcctatctgatcttgtgtaagtatcttttggcgttcacgcgtttattaagaggcaaatcagacgccgttattcactggcctattgatgaaattggcacgctagcctaccacaatgtggagaaattatttattgcctgtagccataataatattgtgattgtaggcgcattcccgaatgcggagtctgatgtgttaatgctgtttaagcaccgttatttgcttgatgccgatcagcttgaaccaacccagcgcaggttgaaaaggatccagccgaaagtgagccgcttggcagcccgactggcgcagatggaacaggaggcaatgtaa

SEQ ID NO: 79739 - DNA, 624 bp, Citrobacter koseri
atgctggaacatggacttttaatcaaaaggctgctgacaggggaatttatttgccgtatcaacgacccagatgcttatcgtcatttacaggatgagagtacccggcaagcgatggacaactatttgcgccctcttaactacagaatagtcagtaatgaaacgcaaaccgtctattatgcgggcttttgtgagatgaatcgcgatacccgcagccagcttatgaatcagtttaaggacatcatctcttctctgttgcctctgcttgagtggttacaactcatacaggagacgcaagggcgggagagtacgctaacagcaggcgactatatcaggttgtcggaaatcatgacgcgtgtagaggataatcagagcctgcaacagcgtctgaatcagctttccagcgatcgttttttcaattgtcgaagtgattccattgatcttcagctcaaacaaattttccggcgtttgaaagagcacagctatgttagacaacccaacgccgagcagcagatatttatcgctacggggaaagttgattatctgattgacgtgatccgctttatccgtgatgaagagcatttaccggttgaagacacacctcctgttcagcaggagcttctgtaa

SEQ ID NO: 79740 - DNA, 1239 bp, Citrobacter koseri
atggcgcaggagatttctccgatatccagtctgtttaaaaacggcgctgaccggttggcattgttgggaaaacaccatcatgccttaatgaagggttatgtcgatgggtttattgatgaaacgacttttagcgaccagacattaaaaaagctgattgcagcgcgtattgtatggcgtcctgatgagcaacagccgctgatgttacgcccgttggtgagcgagctcatcgccagcatggttgctgatgagagccgacggcagattaatgcggatgtggcagaaaaactggagcagatccgcaataaggtgcaggcctggcgcgatgcttattataaaggcgattacagtattgctgaacggcaaatgcagaggctgactgagctcgttcacgatctcagcgggcaatttgaagaggccatcgacagcctctggcatcgtctgaataatgatttcggtttcgtcagcagtctgaatgaaaaaattaacgagaatgcgcgggcgcaaaaccaggttcgtcggttgcttgatggactagatttgatcgttttccatgaattgatcgagtttgctgaaaataatagctcactgcgtaaattattagtgagccagttacaattgcgtgtcagtcttcaccatagttcactactggccgttcagcagcgactggtggatctgatggctaaatttcgccaacagcagtcacgtacattgttagtgacgaatatggctgcttttttgcgtcagcatccacaatatcaacccgccagctaccctgaacgccgggaagtgccggatatattcaacattgcggcttcactttcactgcaagcctccatttcgctcgacaggcccgtggatcgacaagtggtggcggagatgttgctcgctctgcctcgggcatcaattatgcccccgcctgtgccaagaagtgcgggctcagtcatacctcccattgatgaggaggttgctgctcgtcaggttgcgcttaaaatggacgttgaggatttttatgttttcgctgccggacaatccgggccggtgagtgcgctgcattatctgacggaaaatcatctgaactgggacagcgagatatggctttatcaggtcattacggaatatcaatcattgccgttagcggataaacctcgtttctggcagcgttgtgatgagcgtcaggccagcccggtaaacgatctgcgtattatatcggatgtgagtattggcgtgagggtaaaatga

SEQ ID NO: 79741 - DNA, 879 bp, Citrobacter koseri
atgaccgaagcagaaccgttatcgtataacgcgctcgtctggctgaaaaaacttgatcatcgcctgaaagcgaaaaattgcgagaagaaaaatacagacggtaaaatcgtgattcaggttttgcgttggtgtactgcgctggatttgatcccgactaacagtttgttgctgcctgatttcatttttacaatggcattgctgaataagatttcagatacccagcaacgtctcaaacaggcaaattttcgtgacgatattagcgaacaaaatcgtattgagagtgcgcagttaagcgatcaggagattaaaacggcgggaattcgaccacaacagcatcgggtactgctccatcttaatcagcccttagtcagtgagttggggatgactattgaggttgttgatacggattggcgtaatattacgctgacacagtttgatgttcttatcgtggtggagaatcaggattgtttctaccatctggcgctttttgactattcccaatgcgatttccattcgcccctgattatttaccgtggcgatcgggtatatagcaagggggctgttgcgttgaagcgttactggttgaaaacagggaaaactgcgatctattttggcgattttgaccctaagggggccagtatcgcgatgaatgaaggttatcattttatgttattaccttcgccagatgcggtgataaaaaaatcctctccagtgatgtttcctgatgcgcagctaaaattcttacctgaattattaagaggtgagatacattgccattttcgtgactatctgttggttttggaaaaacatgaggcgttgaggcagcaaaaaatgcagggtgaaattttgaaaatggttatgttgaaaacatcagattag

SEQ ID NO: 79742 - DNA, 2196 bp, Citrobacter koseri
atgacgaacgaataccagcggctggatccacgcatacagaagtggatataccggcagggatgggccgatctccgggaactgcaaaaaaaagccgttccaccgatattagcgggcgatcgggatgtcctgatcagcgccgcgactgctgcaggtaaaacggaagcttttttcctgccggcctgttctgctatcgcggatgttcagggcggcttcggtattttatacatcagcccgcttaaggccctgattaacgatcagtatcgacggctggaaagcctcggcgatgtgctggagatgccggtcaccccctggcatggcgatgttgcgcaaagcaaaaagctaaaagcgaagaaaaatcctgccggtattttgctgatcaccccggaatcgctggaagcgatgctgatccgcaacgcgggatggttaaagcaggctttagctccactggcatatatcgccattgatgaattccatgctttcatcggttctgagcggggtatgcaacttctctctctgttaaatcgaatcgatcacctgctcggaagaatcgacaatccagtcccccgggtcgcactcagcgcaacgctgggggaactggagcgagtaccgttatctctgcggccaaatcaacgtctgccctgcgacattattaccgacagtcagactcacgccacgctaaaagtgcaggtgaaaggttatctggaaccgctaaccaccacaggccagcagccaccgccgtcggcagagacgcaaatctgccatgatatctttcgcctctgtcgcggtgattcccatctggtgttcgctaatagtcgcaaacggaccgaaagcattgccgctacgcttagcgatctgagtgaagcgagcatcgttcccaatgagttcttcccccatcacggctcgctgtccagagatctgcgtgagacgctggaacagcgacttcaacaaggcaacttacctaccaccgccatctgtacgatgacactggagcttggcatcgacatcggcaaagtcagctccgtcgtgcaggttactgcacctcattccatcgccagcctgcgccagcgtatggggcgttccggtcggcgcgactcgcctgccgtattgagaatgctgattgccgaacatgaactgacgccaacatcaggcattgttgaccagctcaggcttcaactcgttcagtcgctggccatgatccgcttacttatcggcagcaaatggtttgagccagccgatacccggcagatgcactattccaccctattccatcagattttggcgatcgtggcgcagtggggaggggtgcgtgccgatcagatctggtcacagctatgccagcaagggccatttcagaaagtcagaatcgatgacttcaaaacgttattgaagcatatgggggagaaccaatttctgactcagctatcaagcagcgaactggttctgggcgtcgagggcgaacgtcaggtgaatcaatacaccttctacgccgtattcagcacgccggaagagtttcgtattgtggcggggaacagaacactgggctccattcccgttgattcccccctgatgcctgaccaacacattattttcggcggtcgacgctggaaggtaaccgatatcgatagtgataaaaaagtcatctatgtcgaggcgacaaagggtgggcagccgccgttatttggcggacaagggatgtccattcatgatgtcgtccgccaggaaatgttcactatttatcgggaaggcgactaccgtatcaccgttggcgatcgcaaagccgattttgccgataccacggccagaaacctgtttgatgaagggctgcactgttttcgcaacaataatctggcttcggaatgttttattcagcagggacagcatgtctacattcttccctggctgggcgatcaaaccgtaaacacgctgtcggcattgcttatccagcgcggtttcaaggcgggctcatttgctggtgtggttgaagtggaaaaaaccacagtcgcggaagttaagctgacgttagcctgcgcacttcaggaaggtttgccctccgagtcccgtcttgccgaaagcatcgctgaaaagtgcctcgaaaaatatgatgagtatttaccagagacattgctgacgcaggagtatgggttacgcgcttttgatgttgagtgcgtggctgcgtggctgcgggggcatttgtag

SEQ ID NO: 79743 - DNA, 1317 bp, Citrobacter koseri
atgtctggcattcgtattcgtctcaaagaaagagacgccattattcagtcactgaagtcaggcgttacgcctaaaattggtattcagcatattcaggttggccgggttaacgaaataaaagcgctgtatcaggatattgagcgtatcgccgatggcggcgcaggattccggctgattatcggggaatacggctcaggtaagacattctttttaagcgttgtgcgctcaattgcgctagagaaaaagctggtgacaatcagtgccgatttatccccggacaggcgtatccacgcgacgggtggacaggcgcgtaacctttattccgaactgatgaagaatctgtctacgcgaaataagccggatggaaacgcattattaagcgtggttgagcgctttatcacggaagccagaaaagaagcagaaagtacaaatgtgccggttccgacgattattcaccaaaagctcgctgacctgtctgatatggttggcggttacgatttcgccaaagttattgaatgttactggcagggccacgagcaggataatgagacattgaaatcgaatgccatccgctggctgaggggtgaatacaccacgaaaaccgacgcccgtaacgacctcggagtgcgtacgattatctctgacgcctctttctacgactcgttaaagctgatgagcctgtttgtccgtcaggccggttacgccggtctgctggtaaatctggatgaaatggtcaatctttataagctcagtaatacgcaggcgcgggttgccaactatgaacaaatactgcgtattctgaatgactgcctgcaagggacggctgaatatatcggctttttactcggcggcacgccagagttcctgttcgatccgcgcaaggggctatacagctacgaagcgctccagtcacggctggcggaaaatagcttcgcccagcgtgccggggtgattgattattcgtccccttccctgcatttagccagcctgacgccggaagagctctacattctgttgaaaaaccttcgtcacgtttattccggcggcgatgcggataactatctggttcctgatgatgcgctgacagcattcttacgccactgtagcaatactattggtgatgcctatttccgtacaccgcgaaacaccattaaagccttcctggatatgctggccgtgctggaacaaaacccgtctattcagtggtcgcagttaatttccggtgtcgcgatcgcggaagaaaagcccagcgatatggatgaaatagcgtcggcagaagatgccgatgaagacggtctggccgacttcagactatga

SEQ ID NO: 79744 - DNA, 2328 bp, Citrobacter koseri
atgggcttctggatattcgttattgcactggctgttatctggcttctgttttctaaaaagaaaaagtcgccgccccccaaagtaaatagcaaaatcatcaccaaaataaatcattcatctcaacacaaatctctcaataagccagccaacagcgtgacaaatatgcactctcaggcatccgatgatgacgaactggcaacctttagctttgttaatggacaggcggttgaatacagcaccagccgccagccatcgcgagaaagcgccgcccggcgcaatactacgccagcacgatgggtcaaaccgggagaaagcatcaccattcaaaacgtcgtcattaatcacggtcatttttatttcggcggacgattaaaaacacattcatcaggggaatatggctatctttataacgatggttccgacgcttcgctggttaacgacgctttccccatcgagcccatttcacggcattattatgatgaatcgctgggatactggcccagctttgccacactctcccctcgctgccgtggcgcctatcttgactggctggcaagcgatcgcagcgatgcaagctgccctgttggttatgtttttatctatttttacggtcttgaacgccgcgtactggcggatggcacacaagaagccatttctgacgatgaattcaaagcattattcgaagagatatcgcgcctgagaaccgtatttcaggcaagcggttccttccgtcattatgcaacacagttgctggaaatgatgatcattctcagaccgaagttactttctatacatatcgaaaacgaatatttctcatcgaggagtgcattactgttcagactgaatctggcgacggtggttgataaagaacaacctgtttgtgccgatctggcactggcatggatacactattttcctgattacaccctgcgcacgcctgcccgtcgatgtcattctgaattttccgcgttattcaaacagcgttatacccaaaaatatggtgacggtattgtcgtcaaacccaataaaacacggttgtatttaagctatacccccgccagtggtacgcttcgggaacttcaggtaaaaaaacagatggatcttcccgatcccagcgttttaaaagccccagttcagaaattaattcctgttgcagaatcctgtatcaatgcgctggatgcctacagtcgctatctcggtaaaaaagatgcctcagcaagcgatgtcgccgccatcatgctgcttcccgatgaaatactgaccgcagatgcagaacgtttgtttgctgaatttaaacactgggcagatgagaaaatccgtgaacattcaggactggcgacattagctgatttctgggccagactgggtatgcctgtaccggataaaattaataagaaagaagccgagctgatgcaagatttcgccaggcgagcaggctacggcattgcgccggatatgcgctatcaccttgtccggccagaaccagaaggacagattgtcttatttcccgaaggacatgcggaattctacgtaccgtcggcggaatttacgtcagtctctgtggcgcttcggctgggtgccatgattgcacaaatggacaagcgcgtggatgttgctgaacgggcggcgctggagagaacgattaatcataacgacgcgttgtcgccaacagaaaaacgttcgctgcacgcctacctcacctggcggctcaatacgcctgcaaatcaggccggtctgaaaggtagaattgagcaactcagcgataaagataaatccactattggcaacgtgattatcagcgtcgcctgcgcggatggaaaaatcgatccggctgaaattaagcaactggaaaaaatctacgtcagccttggtctggacagcagtaccgtcaccagcgatatccaccgtctgtcaaccgcagaaacaacgccgacagctacgttgcaaaccccatcagcgacgagcggcgcgttttctcttgatgaacggatccttgcccgtcatgagtctgataccacggacgtacgccagttactgaacaccatcttcaccgaagatgaacccgcagacgaatccccagcggagatcctgccacacgctggtgcaggtcttgatgaggcacatcaccagctttaccaacgtttgctggaaaaagagcgttgggcgcgaaacgaagtcgctgagctatgccagcaatttaatttgatgctaagcggcgcgattgaagcaattaatgactggtctttcgaacaggttgacgcaccagtgcttgatgatgacgatgatatttacgttgacctggaaattgcacaagaactcaaaggataa

SEQ ID NO: 79745 - DNA, 1068 bp, Citrobacter koseri
atgaacatttttgattactaccggagcgcatcacaacgtcgcgagcttcaggaaatcctctcttacgcggcgcagcagcatccctccgggctgggagccagctttctggaaaaggatctctgggtaacggagatccttcggctgctttttaatgaggagctgctgggagatttatctgtcgcgtttaaaggtggaacggcgttaagcaagtgttggaacgtgattgagcgtttttctgaagatatcgatctttctgttcactgggccgatctggcaggtcactcagaagaggaagaacagcaagcatgggagcaaagcacgctaaataacagccagaatcgccggttcagagagcagcagcaagagcgcttaacagaatggacaaacgcgctggcagaacggttaaaccaacgctttcaggcttatgaaattccgggccttgaagcaaaaatggaacccgacagtggtggcgaaaaagtcgatatctatttcccacgggtgaaagaagacagtatggcctatcagcgcgatcatattctgttggaatttggcggacgaaatcgtggcaagccaaccgatctaatgcctgttgtgagctatctgtccgggattgctggaatggatgcacttctgttacccgccgcgaccgtaaacgcttatgacaccggttatattctttgggaaaagctgacggcactgcaccagttctgcacgcaaaccaaagcgccaaatccggcccgactggcacgccactggtatgatgtggattgtctgctgcgtaatcattttgccagcccctatgaaacgctggaagccatgcgcaatgtggtcgagatgaagcaacgtcgctggtctgtgccgggcgttgattttactcaggtcattgtcggaagcctgcaactgttgcctgacgatgctgaacggttcgccgcgatcgccggggatcatcaaacggcggtggaagggggaatgttctttcatcagcctgacatatttgctgacattgccgatcgactttgtcatgcacaagatgaaatcaatcgttttatgcgtgattcacaggtataa

SEQ ID NO: 79746 - DNA, 618 bp, Citrobacter koseri
atgtctgttgccgctctggcccgccagcgggttcaccgcatgaagcgtggcatccccttttccatcagcggattttactcgctgggaagtcgtgcgtcggtacaacaggcaatgagtcgtctggtcaaagaaggctttctggtccgggttgaacgcggtttttactcccggccaaaaccgttgaaaaaccttccatccgtaaacgttgtcgccagcgccaatgccgttgccgcagcatgggcaaaagagcgcggttacaaaatcacccttcagggactggaagccgcttaccggttggggctgcaaacgcaggcgccggttaaacgcatctactggtcaaacggccctacgcgagagttccgcgtcggcaatgagttggtacggatccagcataaatcagcaagccggttacgttggctgaaccggcctgaaggagagctgatgcgcggtttgctaagtctggagcaggaacataccccgccggaaacgctgaagaatgcttttcatcggctgagcatcccgtccgcgaaagcgcgacagattgccggaaagttaatgaatgagcctgcacttcacgcgtggcgctcgcatcttatagcgttgcaaaaggcgctctga

SEQ ID NO: 79747 - DNA, 462 bp, Citrobacter koseri
atggctactaccctcacccaaacacacccgttacttgctgttcccttcaatgctgccacggatttcaccgtcctcgccagccattgcgaaaacttcgccgaaaccctgattgaaaacgacgaccccacgctgaaaatggcgctctgcggcagacccaacgtcgctctggcgctgctccagcccacgctgttagaccccatcccgccccatcttgttgaaagcctgaccgtcgataccctcccggcgaattcccccgagtttgggccggaatgcactgagctttgtcgctactgcctcgccctgacgcagacgctggcggaacagggattttcttctgaaaaggagaaacagttgagttatctgctgtacgacctgatcaactactttgcggcggaaatgaaagccccgcgctggctacgtaccgccgatggtgtgaagtttattgacggggaggcggcatga

SEQ ID NO: 79748 - DNA, 240 bp, Citrobacter koseri
atgatgcaaccggactggcactctgccgacattatcgcggcgctgaaaaagcaggggacgtcgctgtcagccgtttcccgccagtcagggctggcgtcctccacgctggcaaatgcgcttatccgccactggcccgaaggtgagaggctgatcgctgaagcactgggtattgcgccggagcaaatctggccttcccgctaccgaaaatatgaatgccactcaatgagcagggaaatctaa

SEQ ID NO: 79749 - DNA, 1020 bp, Citrobacter koseri
atggcttcttacgcattctggaataacaaaggtggtactggaaaaacaagcttagcatttcaagtgattactcgttttgcagaacttcatcctgaacaacgaattttagcaattgacctctgcccacaagctaatttatcagagttattgctaggtgggatgaataatagtggtagtgacaaattattaactcgccaaggattaactccccgttgtagtattggtgggtattttcaacttcgtttacctgcaccatactcccctccagcatttagctctacagattatataactcatccatccggatacaattctgatatccccaataatattgatttaatatgtggagatccattgctagaattacaagcaaatgcagtaaacactcttgctaaccaaaacataccaggaactaacgcatggattgctgttattgattggttgaaagatctgttagatcagttgagagatacttacgacactatttttttagactgcaatcctagtttttcattttatactcaaatcgccttggcaaatgcagaatgtatcgtccttcctgttatggcggatgattcatcacgcagagcaatattaaacgcaatctcgttggtatatggtttaaagctcccctcagagatatatacagctcatatgttttctacaaagttaaaggatgccggacgtaacttacctcaggtgcaccaaattgtaaaaaaccgcctcacacaatatatgggggatgcctcagcttatgctgctgtacttgatgcaatcaaatgtgatgtcgaagaactgttgagaaatcatcctcatttatttaccttttcaaaggtagatgacggtttttcaagcattcgtgacttccaaaccacaggagtcatagctcatgctaaaggtcagccattttctaaggtcagggctggtaagcaaagcattaatggacatcgagttcaagttaaagctgattatctcgaaaattgtagggatgcaatcaattctctggttgcaaaattctga

SEQ ID NO: 79750 - DNA, 888 bp, Citrobacter koseri
atggggattctggagcaggaaatgaagcgtcttgcacagcaggctggcggcagccataagaccgttcacgaccgcattaagctggcgcagcggttttgtgagcgtctggtgctggcgcagaatgtgcagatccgccgggtggaacagcttaaggcgcggcatatagagggttatatccgtgaacggctggcgcaaggcatcacgaagcgttccctgcaaaacgagatggcaacggtgcgctgcattctgaaacaggccgggcgtgacaggctggcacagagtgaacggctgaataaccgctctctgggattgtccggcgcatcctgcaacggtacgaagctggctgtcacgctggatcattaccggcatgtactggaaaacgcccgcgtaaaagatccggggctgacggcagcgctggaactctcaaggctgatgggattacgctcgcaggaggcggtgcagagcgtgcagtcgctgaaaacgtggcggcagtcgctggagcgtggcgatccccggttaaccgtggtgttcggcaccaaaggcggacggccccgcgagacgattattcttgatgctggcgctgtcagaaaagcgctggataatgcgctggctgtggcggaagatcgccacggcaggctgatagataagccggacctgaaaagcgcgatgaaatactggcacagtcaggcggtacgtctcgggttaacgggcgcatattccccgcactcgttacgctatgcgtgggcgcaggatgccattcgtcattatctggcgcagggattttgtgagaaggaagcactggcaatgacggcgatggatttggggcacggcgactggcgcgggcggtatgtggcgcaggtttacgggcgaaaggatgaggctgattga

SEQ ID NO: 79751 - DNA, 429 bp, Citrobacter koseri
atgaaggatgagcatctggtgccattatccgagcaggcggtcgccctgctggagcagataaaggacattaccggagaatccgtttttgtgtttgcgggtgcgcactccatgaacaagccgatgagtgaaaacaccatcaacaaggcgttgcgcgtgatcggctacgacaccaaaaccgaggtctgcggtcatggtttcagaacgatggcctgtagcgccctgaacgagtccgcgctgtggtctaaggatgccatcgaacgccagatgagccacaaggagcgcaacggtgtgcgggcggcgtatgtgcataaggcggagcatctggaagcacgtatggaaatgatgcagtggtggtctgattatctcgacgtaagccgcgaagggtacgtggcaccgtacatttatgcgcggcggcataaggcggcctga

SEQ ID NO: 79752 - DNA, 156 bp, Citrobacter koseri
gtgaccccggttgtgacccaacatcaccccgccctgcccctgaaacgtctgccggagctgctggacaagattaatggctacaaagggcgggaactgacccgtctggcgctggaattaaatttgcacgttttcgctacgcctcgcccgttgggatga

SEQ ID NO: 79753 - DNA, 564 bp, Citrobacter koseri
atgaacggagagaccctcacgttaactgacagcaagatccgcgccgcgaaacccctcgcaaaatcctataaactcaccgatgcacaaggtctgtacctgacagtatccaccagtggttcaaagctatggtatttccgctaccgttttgaaggtaaggaaaatcgtctggccttcggcccttacccgcaggttacgctggcggaagcccgcgaaaagcgcgatgcggcgcgtaagctgctggtatctggtatttgtccttccctgccccgcaaggcagaaaaagccgccgttgacggcacacgcacctttcagtacatcgccacggcatggcacaccagttgtcttaaactatggtcagaagaccacgcggataagatcctgacctgcctgaagcgctacgtcttccctgatattggcgcaatggacattgcagaagttgaaacccgccatctggcgcaactggttaagaccattgatgataaaggcgtgcataacgttgccgggcgggtgcgccagcatctgaccaaaatcatacgtcacgccgtacaagcagggaacgattaa

SEQ ID NO: 79754 - DNA, 741 bp, Citrobacter koseri
atggggattttctttgaaccgtataaagaacagagttgttgtttgtgtggttctggtgagtttctcactggagagcacaaaattaaagcttcggccttgcgtaaaatttttgggcggaatgaaatggtcatcggtcattttgatagtcaaagtattcctcgaacggcgcaaggcccaaaatctaatgcttttcatttttcagctcggatgtgcgccttgtgtaataacactcgcacgcaggtagccgatcatgagtttgatctttttcatagttcagtttcttcatatttatcaaaagatactgaaccttctttagtgtttgatcttccaaggtataaaattggaacagaagcatatcttaatgtgtttagatattttgcaaaaatactatgttgccaggttgctgaatcatgtggcccccgcccattggaagtttgcgaatttgctattggaaaaacaactcgaaacgttattattttgcaagcaatagatacagacccaatgtatcaatcctatagtaatatattaggtgattctcaattcgcagcacatggaggacttcgtgttggctttgatttcaaaaaacagattcccacatctttccaaagctcaataagtttaggggcagtgcgatatgtatttgaggttaaattcggagatgcagtaggaattgaattacgaacatttttctatgagttttggtgtaaatgtgaggcggcaaacaggagtctaaaagattga

SEQ ID NO: 79755 - DNA, 489 bp, Citrobacter koseri
atggatttactaacttttatcagcgccgtaagttggcctgttgttttttttattgtcgttcttatgtttagaaagttgattgttcaacggcttaagtctttcgaggggttcgggcttaaagttgatatggtggaggagcaaaaagaactgattgaaaatccgaacaaagtcgcaacggatcaccgggcgctttcgcgtcaagttgtctcttctcatttcaacgctgagggagatataggatacgctttatattcgaatggcatattaattcaaaaacttaaaatcacgatttcagatttaaaccgctttcgtgatacgccagttcatttcccaattgcttttcctattatggccctgaatgtgcaatttatcggtggctcgacccctgatgtgattgaaatgaatggaggtggtatgactttgcgctttacgaatcgcaaacctagtgatgacaatgaggtaattaacatcatcgtagtaggtatgtag

SEQ ID NO: 79756 - DNA, 1140 bp, Citrobacter koseri
atgtcaaaacagtcctttacagcagcccaacgagaagctatttggctcgcacattcaaaaaaatgtgcatacacgcgtgagctattggatatcagtaattttcatatcgatcacattatccctgagacgctcaattctaatccagaattacgatctgataccctagagaaacttaacttatcacaggatttcgaccttttgggatgggaaaacctgcttccatgtcgtcccggtgctaacctccaaaaatcagcagaagtgtttgatccagcccatacccacttttttttaggggtggctgcatcaaaaaaaacagatattgttgataatttaaaaataattgagcaaagaaaaattcgaggccgcgcgctaattctcttgcaacagtgccttgagcgtggagagcttacggccgtggaaatcgctcaagtattggagcaatacagagaagagccagaggccatttttgaacttcttcaaggaatgcaatttacggatgaagatgaaatcactgttgtttctagagcggatatagaaacattacgcgatcggtccgttcgattaggtgaaaataatcatataaacggtgtaaccctcactaatgacgacgatgtagagcgttttgttagcacttgtagggaatacgatgaggcgctatcacaaggattttatgcaaaaactactttcgacatgaagatggcttcatggtttgagcatcaatgtggacttcttagcgcgcttgaggcagctgatagtcctgaaaaaagttttattgcaaatccaagagttagcgttattgacctttcattgatgccattttatctcttccccaatcttggtgatgccgatgactcaatcgaatccaatataagctatcaagataaggttgatgatgggactttaactataaaaagagtatctcaaaatctgcttcgtatagaatcgagcagtatggggcagcaactcattgaggtaacccgtgcagactttaatagtgatggtatcgaggacattctattatttgaatattgctatgcgacggaaggaactcttggttttgggggcgttaaaatgattacgcgctttagttcaaccgggatgtttgaactaatttccacaccgatgccttgtgattgttga

SEQ ID NO: 79757 - DNA, 753 bp, Citrobacter koseri
atgtcaaaaacacggcttagtaagcccggtttttcagccaagtctgtgctgactattatgttaatcgctgcgtcatctgcatcttatgcagcagaaagcatcgatcaactggcgacgcgcatcggtatggatcacttccgggaagcgatcaaaaagggtgatcgcagcgccttcaaaacgctgccggcaaaaggctataaaaacggacttaccgggttgctcatcaaaactaacacctacattaaccccgaatacagctttgctgattgcgatacggacaccgttattatctcggtgcaagaacacaaaacactccctggttgccgcatatctctaaagctagcgactaaagatgctgacggtagctatcacgataatggcattcgcatcgaatacggtattgcgaccggctccaaaaagtttatcgccaacaattcaatgtgggcacaacatgccatcagcggtaataaagtgctagaaggtgctatccacccggatcaaacaaataaccataaagatcaaatgtgcatgggtatggctcaatttactgcaaacgtaaccgaaggccgaaacgcagggatggctaaaacagactattatcagcgtctcgataatatgaatggcaagtccgaagtcactcctcagatgattacgctctataagaccttcgttgactacgtatatgaacacccgaaacaggatgctcaggtttcagcagcatttatttacactaactgcatgaaaaatttctaa

SEQ ID NO: 79758 - DNA, 675 bp, Citrobacter koseri
atgctggatgataaacgggtgaagcgcgtaaatgtagggtctgtcaggcgctgggaggagtgggacattgcgccaggtgaccacattcttgtcagccttgccggacaggggattccgcgtattgataaggttgtctggcgtagcgctcaacgggataagcccgcaccgccggggaatcgctataacgcattaacctgtttttatgcgactgaggtatgccaggagcagttcatcgccaggctggtctggctggggtcgaaggaggcgctggaggttgacgggatgggggaggcaggatggcgtgtgcttcaccagtcgcatcgtttcgagcatattttctcctggctcgcgttaacgcaggaacaactacaggcgacacctgggtttagtaaagaaaaaagcaagcagttgtggcatcagtttaacctggtgcggcatcggccatttatccgctgggtgatggcgatgggcataccgttaacgcaggcggcgcttaaggccagcggcgatcgttcatgggggcagttactggcacgcacggcagaatactggcaacagcttccgacgacaggggaggggcgcgccaggcgggtcatccagtggcgggataacccggaaatacgggcgctgggcaactggctggctgcccggcatattaacggctttagcccttag

SEQ ID NO: 79759 - DNA, 237 bp, Citrobacter koseri
atgatttttgattgccatcagtctataaaaaagatacttgattttaatcaagcaccagccggggagagcccacagctcaatatcgcctggggtgttgataaaaacttcatgtttggcgccgcgatttcgatgacatcagtgttgatacataataaagacatcaatatccatttccatctttttactgattatgtggatgatgattatcaacagaaaataagtatgctggcgcagtaa

SEQ ID NO: 79760 - DNA, 501 bp, Citrobacter koseri
atgcacattttttgccaatggcgaaatcgccgtaggccggataaggcgcctgcgccgtcatccggcgttgccgaaagtgagcgaccgatcccgcctgatggcgctgcgcttatcaggcctacaatgctgggccgtaggccggataaggtgtctgcgccgccatccggcgttaccgaaagtgagctaccaagcccgcctgatggcgctacgcttatcaggcctacaatgctgagccgtaggccggataaggtgcttgcgccgccatccggcgttaccgaaaatgagcaaccgagcccgcctgatggcgcttcgcttatcaggcctacaatgctgaattccagacagcaaaaagccagcccgtgggctggcttttctgaattggtcggtgatagaggattactcgccactgcgtggctcgcccttcgggccgttgcttgcgcaacgttctctcgctacgctcgagtcgaacctcttgcctccggaggttctcatcctcgttaa

SEQ ID NO: 79761 - DNA, 153 bp, Citrobacter koseri
atgcgtaggcccggcaagcgtagcgccccgggcaaaattgccggatggcggcataaacgccttatccggcctacgatggtttgtaggcccggcgagcgcagcgccccgggcaaattgccggatggcggcgtaaacgccttatccggcctgtga

SEQ ID NO: 79762 - DNA, 963 bp, Citrobacter koseri
atgaagaaattattattaatattgatatttttatttccacttgtagcacaatgtgcttgcaggattgatggcgatggaaaaaagagtgatgctattactcttgatgttacgtttgatttaagtaataatttgctttcagtttctcagaatcaggttctggggtttacgcagaatttttcctgtgtgttatccaatgaaaaaatgtattttactgataatgtcggtgataatatctattctttaggtgttagcaatggtgtgaaattttccataaaaggaatatcaactaattttccggtgtcagtagaacgtggagataatagtgttaatgtcataaataaattgattacccttcagtttgattatataaaaaatggtaaggcgcctgttaaaacgtttggagataatacatttacgatagataaagcatttactattgcatctcagtcgtgcattagactttttggaggttgcctgtggggcagcgatgccagccagtataatgtaaatttaaatgttactgttattaataaaaaaacaacctgtgaatttttatctccacattatttcataaaaatggaagatgtaacaacacaggagttgctggccgggaatgggaaaagaagtaagagtgaagatattaaactacgatgcgatggtatacatggaattgcaagcaaccctgttacggtaaaaatatctgatggtgattgggacgccaatggtcagatattgcttaacactatatctactggaagtaaaaatgtcggctttaaattatttcgaggttctgagccggtaacgctgcataaggggaatgttttgctctcagtcgcgaaatattctggtctggaaacagactatgtatttcccgtatcagcagaatatgcccttactggcggtggaaaaccaacgacaggtgaaatatcaagtaaagttatttttagagttgattatcagtaa

SEQ ID NO: 79763 - DNA, 618 bp, Citrobacter koseri
atggtcatcttcggtgtctttacgatctatgccatcctcagctactccaccaactacctgaccgaaatgtatggcatgtcgctggtcgccgcgagttacatgggcattgtgatcaacaaaattttccgcgctatctgtggcccactgggcggcatcattaccacttacagcaaaattaaatcgccgacgcgcgtcattcagcttctctccattgtcggagccgtcgcgcttattgcgctgctggtcaccaactcaaatccgcagtctgtcgtgatggggatcggcctgattctgctgttgggcttcacctgctacgcctcacgcgggctttactgggcctgccctggtgaagccagaacgccgtcttacatcatgggaacgacggtaggtatctgctcggttatcggttttctgcccgacgtttttgtttatccgatcgtaggccactggcaggacacgctcccggcagcggaagcctatcgcaacatgtggctgatgggactggcggcgctgtgtatggtgattctgtttacctttttgctctttcgcaaaattcgtaccgctaacgccacaccggaaaagatgacatcgctggccgcagaagcctccggcgagtga

SEQ ID NO: 79764 - DNA, 1890 bp, Citrobacter koseri
atgaaatcagagccgcttaccgtcaatcaactcttccagaatcgtcggcagtattgcgttccattttatcaacgagcctatgtatggacactaagagaccaatggtcagctttattagaagatattatcgataaggctgagagcagactttctaaaacaaaaccaacgcctcacttcctcggggcgatcgtgctcgaaccacaatccaaagacagcctattgggggtggatacgtcacacatcattgatggccagcagcgactcaccacacttcagtatgttcttgcttccatccgtcttgctcttcgggcaacaggactttccggcctagagaatatcgtattgccttgtttacgcaacataaacgaagagactatgcgtaatgtagacgttgaacgtttcaaactttggccgacattccgtgatcaaaaagactttattaaaagtctcaacgttgactcagtcgaagctcttcgcgaggtctatccggaaaacttcacacaacacgggaccctgcgtaagtatttcagccacccaccctcactggaagcattatggttctttagtgacgcttttattcagttcatcaacgcggaagggcaccctgtagcctcaaatgcagaggctttgattaatgcagtcttgactgacctcaaaatgatcaacatcaccctggaggaaggagatgatgctcaaatcatttttgaaacgttaaatggccgtggggcagaacttcatgcaactgatctcattcgcaattacatctttatgcgcgctgtaagtgacgatattgatgctgcgatgttgtatgagaatgactggaagccttttgaagattcctactggactgaaaatcaacgccgtggtcgtatttataaaccccgactggaatggttaattcacgccacgctacaggctgaaaaacgcagtgaggtggatttgtcgcgcctttacaatgaattccgggactttgtgactaaggatatgcctgcgcgccgcgccgatcagcaggtcgcgcttctcactcgctatgctaatcaatataaagaactgatcggagatagtggtacgactcctgtcgcgcgctttggccgtcgtattgcagcctatgacgtgacgactattcatcctcttgcgctcctgatttcagtcactgatatctctgataccgaaaagacaatcatgtttaatgatctagtctcatatgttgtacgaagagccgtgtgtgggctgacacctaagaactataataacgtattcatggctgtcttacggcacctagctaaaactgccgtttccagtgttgagctacgttacagccttaagaatttgaatggcgaggcttctcgctggccgactgactcagaattccttaatgcctgtatcaccgcacagctttatcctggcaggcttgatacgccgaagatgcgtatgatgctgacagagcttgaaggggaactgcgccgtcaggttaaaacagaggaaccagatgttcctaaactttccagccttgatatcgatcaccttatgcctcaacagtggttctctcactggcctctcgaaaatgggcaatctgttacggatacagaagcatcagcggttgctcagatagttcttgcaggtgcggagctgacgcctgatcaggaactggtgcggaaacggcagcaagtaattgcaactttgggaaatcttacgttacttaacctcagcgtgaatcgatccctccaacactcagattttctaaagaaacgcgatgcttttcttgcccataccagcctgcgtttgaacgtgcctctgaccgttaaagacagatgggatgaggaacaaattctctcccgtggtgcgttgctagggaatgccgcacttaaaatgtggccgcgagctgattaa

SEQ ID NO: 79765 - DNA, 3543 bp, Citrobacter koseri
atggcaaataaaaaaaaactgagcaatcctttttctacaggcggtggcggtgttcattttgaagcacatgtccaagcgtcttttgttgctctgatgctcacaggcggtaatgcaccttgtcttccttgctggccaatagtggacattaaacttcaaggcaaaattgatggttttgataccgacgatttgatagttgttgttgaaaatgtcaccagcaatgaaaagcgaaagctcttagggcaaatcaagcattctatttcatttacgcaaggtaatacgatatttggggaagtgatacaggctgcttggaacgatttcaacaatcctgacgtatttaccaagaaaaaggatgttattgcactgatcaccggtccgctcagttctaccgatacacacaatgtgcaatggttattgaaccaagctagacacacaaaaacagttgatgaatttttgagaaatgtgcagcagggcaagttcagcccagctaaaagtaccgagaagttgggtgtcatccagtatcatctgaaggtggcaaatagtgggaacgatttaacaaacgatgagctttatgactttttgaaccattttcatttacttgggtacgacctaggtaatgaatcaggcgtcgtcctttctttgctgcactcccacattgcacaattccatcaacagtatcctcaatgggtttggtcgcggatagttgatatcgtacaaacttggaataaagatgctggcactatcatttcaagtaagataccagaggatcttttagatgttttcaaacaaaggattgttgctgagattcctgagaagttaaggttagtacaacagatagtcaaaaccgactggactcaccatccggatgcctcctatctagccctaacagtgttgattgggagatggaatgagaaaaatgagtgtgacctaaatgtactaacccaaatgcttggtatcagttatgacgaatggctaaggaaggcacgagagattttacatagcccagacagtccgttgtcactcaaaaatggcatttggaaagtaactaatcgaatggagctatggagccttctgggatcccgaattcttgatcagaatctcgaattgtttaagtctttcgcgatttccttactcaaagagccagaccctgctttcgaattacctgctgagcagcgttacgctgctagtattcatggtaaggtgctgaatttttcacccatgctgcgacaaggcatagcagagggtttagccataatcgggagtcgaccagaggtttgcgttaactgctctcaggggaatgccgaaatttccgttaacgtcgcaatacacacaattttgactgatgcgaactgggttttatggggtagcctgaacggtttgctaccaactttggctgaagccgcccccgcaaaatttcttgatgcagttgagaaggcaatgcgtcagacgccttgtgcatttgatgagctattttctcaggaaggaaatggtatcactggtggtaattatctgactgggctgctatgggccctagagggattagcctgggatgagcaatatctagtacgcgtctgtgttgtactggctgaacttgccagccacgaccctgggggtaattggactaatcggccatctaattcgcttgctactatattattaccgtggttaccgcaaacgctggcttccatagaaaagcgaaaagttgcagtcaacgtcatttttaaagaatggcctaatattgcttggaatttactcgtccggcttctacccggtcatcatcaaacctcttctggatcacacaaaccttcttggcgccgaataatcccagatgactgggaaaacagcgtgactaatcaagattactggttgcagacttctttttatgctgaacttgccgtcgcaagcgccggagaagataccgaacgccttaccttgttgattgatcattttgatagtctgccatctcctgctttcgaacaatttcttgaggtcctctcttcgaaaacaactactgggctcaatgaagagcagcgagttttaatttgggatcatcttaatcgattctcaaataaacatcggagattctctgatgctaattgggctttatctgatgatctgctaacccaaatcgaaaatgttgcagagcaactggctcctgccaatccgttcaacttatatcaacaccttttttcaaatcgagattttgatctttacgaagaaaatggcgattgggaagaacagagaaaaaaactcgaagcaaggcgcgaatcagcaatttcagaaattcttaagcaagatggtgcagaaggcgttatgcggtttgctgaacacgtttctgcaacccatcaaataggaagtgtactcggcactattaacgatgatgtgttcgaaaaaattcttttgcctcatttcctggatacaacagaaaataagtgtaaggcattggtaggcgcttttatttggaaacgtttctatctcaaaggttgggagtggtacgacaatctggataaaacagactggactcctgaacagttaggtcaattcttggcttatctgccttttaacaaggaaacctgggcccgagtctctcatgatcttcaagcttccgagaacgaatactgggcccgcaccgatgcaaatccttaccagggtgaaggtgatcttactcatgccatcgataaactgattgaacatggtagaccacatgcggcaatcaactgcctgtactggatgcatcaggcggagcaaccaatcgacactgaacagtgtatccgcgctttgattgctgcccgttcaactaacgaatctagctccaacatggatggttacaacataacgactcttatccaatttcttcagactgaacccaaagtgaatccggatgttctatttcagatcgagtgggcttaccttccattgctcgatggccgccaaggtgctgaacccaagctccttgaaagtcggatggctaatgacccagaatttttctgcgaggtaatccgactcattttccgttctgacaaagaagaccagacggcgagtgaaccaacagaggaattgaaatccatcgcaacaaatgcatggactcttttgtacaattgggagacaccgccaggaagccaagcagacggaacgttcaacggagaacgctttactgaatggcttcagaaagttaaggaaatttctacaacgtcaggtcacttggacgttgcactcagcaaagttggtgaagtcttaatttctaccccctccgacccgaatggcttgtggataaacagagaggtcgcagttgctctgaacgatcgtaatgctgagagtatgcgtgaaggctacagaataggaacctacaactcacgtggtgctcattgggttgacccaactggaaaacctgagagagagctggcgaaccagttccgagcaaaagcagaggaagtagaaaacgctggttttcagcgattcgccgttaccttaagagttttagcggatagctatgaccacgaagctgaactggtcatcagtgatctaaatgttggaaaggatgattaa

SEQ ID NO: 79766 - DNA, 537 bp, Citrobacter koseri
atggtcaccacacatgttttcatcgcggtcagtcttgatggttatatcgctcgacaggatggtgatatcgactggctgttgaagcgcgatgacccgacagaagaccatggctatgccgcattcatcgcggacaaagattggatcattatagggcgaggcagttatgagaaggtgctgacttttgacgaatggccttatgatcgacccgtgctggtactttcccggcagctaaccaataccccggtgcctgaggcgctgaagggcaaagtgcagttttcatgtcgcacgcccagggaggctcttactgacctgatggagaagaacgtgcaccgggtctatatcgatggtgggcagttaatacagtcgttcctgcgcgaaggtctggtcgacgatatcgttatcactaccgttcctgtcctgctcggttcgggaaaaccgctgttcggagtgctgccccatgatatcgatttgacgctattatccagccgcagcttcccttcgggtctggtgcagtcgcactatcggctgacgtcataa

SEQ ID NO: 79767 - DNA, 1680 bp, Citrobacter koseri
atgagtatcttcgaggcgcattttcgcaggctgcacgcccgctacggcgcaggtcagacgcacgaattacagatgcaggagatcgccgccatcttcggctgttcagtgcgtaattgccggattgcgctgaaaaagatgcatcaggaaaaatggctcgactggcagccgcagcgcgggcgcggcaagcgctcacggctccacctgttaacctcgccggaaaagctgttcagccagaacgtcaataagctgctggagaagcaggattacggcaacgtgctgcggtttatcggtaacgacaagtatctgctggatcgcctgagcctgtggcgctttggggtacaggataaaagcagcgaaacgcgggtacgcatcccctactatcgcaatctggatccgcttaacccgctcgttcccctgcgacggaccgaacgccatctcctgcgccagtgcctgagcgggctgacacgctatgacgccgttcagggcaggatcgtccccgatatagcccactactggacccacaacgaggactttacccgctgggagttctggctgaaatccaccgcccgctttgccgatggcagcgaactggatgccagtgccgttcagcgctgcctgctcgccgccagccagagcccgcagttcgcgccgcttttcagcccaatcaaagccatcaccgctgacgccccctggcatctgacgattggaacgcatcatccggtcaggcggctcgactgcctgctcgccacccagccaacgatgctgtttgattaccagcaaggccacatgcgctgtaccggcgctttccaccagcaggagcacagcgacaactttatggtcctgcggcgcaatcaacactggcaccaggcgcggcccggactggatgagatcaccatttttacctgggcaccggagcatatcagcatgagctttattcctctgctgcggggtgaggaggcgcaggatgaccgcccgctcaacgagcgtagtctggagcagggctgctgctttgtactgctcgacggtgacggggcctttgcagatgaggccggaagacggtttatcaattacctgctgcaacctgtcgaactcctcagccagacgcagcttcccgacgaatatgcacgcatcctctctgtggctcagggtatgctgccgcagtggaaccaccgaccggtggatttcggcgggatcaccgcgccgtttaacctgcgtcagccggtgatcatcagcacctttcagcaaccggaactggtggagcttgccggagcaattcgccacctgcttgaacgctggcatattcgcgccgaaatacggatcgacgcatttgaccactttaacaaccatccgcgccctcccgcggatatctggctcagcaactttatgctcgataccctttcggttccggcgtttctggaatggctggcttccaccacgctgtttacgcgactgcctgaaacccagcgacaaaacctgaacgcgctgctgccgacgattcttaacagcaacgatgaacaggcattcgcaaccattgccgcctttttccatgagattacccaccagcgatatgtcattcctttgctgcatcactggatggaatttgcgaccgagaagtcatttacctggcgggatttaaatacgctgggatggccggattttagccaactttggctcgaataa

SEQ ID NO: 79768 - DNA, 1527 bp, Citrobacter koseri
atgaaaagattcaaccttctgcaaatgttacaaagcatcgggcgatcgctcatgatccccattgccatgctgcctgccgccggtattttgctggccttcggcgtcagctttcaggatcccaatattgtcgccagcctgccgtttctcggcgctgactggctggttcacgtgctgaagctgatggcggaagcgggcagcgcgattttcgctaacctgccgctgctgtttgcggtcggcgtggcggtgggacttagtgacgatcagggcattgccgggttgtcggcgatcgccggttttttgattatgaacgtgatcatcggccagtttctggggatcacgcccgagtcggtggcgcaggtacgtgattacacgatggtgctgggcatcccttcgctccagaccggcgtgtttggcggcatcattatcgggattattgcctcctggctgtataaacgctattaccgtattcagcttccgtcatggctggagttcttttccggtaagcgctttgtgccgatagtcacttccttcgccgcgctgtttgtcgggctggtgatggcggtggtctggccaccggttcagcatctgattaatggcctgtcgaataccatgacggtgcaggggccgggcgtgtccgccttcctgttcggtcttgtcgagcggctgctgatcccgtttggtcttaatcatgtctggtggccgacgttctggctgcagtttggcgagtacgtaaacaaggccgggcaggtggtgcatggtgaccagcttatcttctttgcccagttgaaagaccaggtgccgattaccgccggaacctttatggccgggctgacgcccatcaaaatgttctgcattccggcgattgcgctggcgatctaccgctgtgccagcccggaaaacaaagcgcgggtgaagggcattatgctctctggtgcgatcacctccattgtttgcggcatcaccgagccgattgagttctccttcctgtttgttgcgcccgtgctgtatggcattcacgccgtcttagcgggtctggtgttcctgttgatggagtggttcagcgtgcacatcgggctctctttctccggcggacttatcgactatctgttctttggcgtcctgccgcgcgcacctcactggtacatggtgttcccggtcgggctggtgatgggcgcgctgtactacgtcctgtttacctttgccatccgccgctggaatttgctgacgccggggcgtgaagtcgaagaaagcgctgtggcgcaggaaaatgaacagaatgacctggtgagcggcatcattctggcctatggcggattggggaatatgaccagcatcgaagcgtgcatgtcacgtctgcgcattgacgtgacggataagacgctggtggacaaagcgctgctgaaacagcttggtgcggcgggcgtcgtcgaggtcgggaacaacattcagagtgtttttggtatgaaatccgatcggctgaaagaggcgatccgcgcagctaacgcgtatacacaggaggcaaaatga

SEQ ID NO: 79769 - DNA, 843 bp, Citrobacter koseri
atgaaacagctactccacagcggcctgccgctgtatctcgatgacgacggcgtgatggcgctgaaaccgccgctgaactatctcggctttggccgcaaaagtgccgggcagatggcggtggtcttaccggagttcaccgaggcgctgcgtgatgaaccggcttacgatgtctatcgcgggctgagctttgcggaggatcaggagcggcttgctgctgaccagtatcagtacgacatcaccatcatcatgccaggaacgatcggcaaggagcgcaagaaaaccagcggccattatcacggctataacgacacgcggcgcaacacccatccggaagtgtatgaagtgattaagggcactgcggcgtatattctgcaaaagtcgccggatttttccgtcgcgccaaaagatctgctggtagacgatcttatcgtggcggtggtgaaggaggggcaaagcattatcgtgccaccgaattacggtcactgctccatcaatattggcgacgggccgctggtgttcagcaacctcgcgtataaaccctgcgcggttcactacgacacggtgcagttttaccacggtatggcctgctacatcgtggaggagaacgggcagctatgtgtgcgcaaaaatcactactacccgcatattccgcgcatcaaattcgccaccgtcaaagagaacccgcatcttggcatcaccttcgatacgccgctttaccagcgctaccgcgccgcgccggaacgtttccattttctgggatatgtcgataactatgtccgggaaatcatggagatgctccagtatcaggatgatttattcccgctcagtcaggaggacgcatga

SEQ ID NO: 79770 - DNA, 567 bp, Citrobacter koseri
atgatggaaacgcaatctgttgcaggcgtcgcctgtactgacctgcatcaggcgatggcgcggattgatggcgctgcgctggcgcgtctggagcaggccatcgctgaagcgaacgcgatatttgtttttggtgcagggcgttcgctgttaatgctgaaagcttttgctatgcgcctgatgcatatcggcctgcaggtgcatgttgtcggcgatgtggttacgcctgcgctgcaaaaaggtgacctgctgctgctggccagcgcatcgggtgaaacggcttcgctggtgaatgtagctacgaaagcaaagcaactgggcggcactgtggccttgctgaccattttccccgagtccacgctggggaatctggcggaggtagtggtcaggatcccggcctataccgacaaactgccggatggaccggataacgtgaaaggcattctgcccggcggcagcctgtttgaagaggccgtcatggtgctgggcgacgccatgattatgaatctggcccagtcgacgggatatcgcttaaccaaaggttttgcgctgcacgccaacctcgaataa

SEQ ID NO: 79771 - DNA, 636 bp, Citrobacter koseri
atgaaattacagcttgccctggacgagttaaccctgcctgaagcgctggcatttattgataaggtggttgacgacgttgatattattgaagtgggcacgccttttcttattcgggaaggcgtgaaggcgattaaagccattaaagaaaaatatccacataaggaagtactggcggatgcgaaaattatggatggcggccattttgaatcgcagctgcttttcgacgccggggcagattatgtcacggtgttaggtgtgaccgacgtgctgacgatccagtcctgcatccgcgcggcaaaagaggtcggaaagcaggtggtggtggatatgatctgtgtcgacgatctgcccacgcgggttcgtctgttggaagaggcgggcgcggatatgctggcggtacacaccggcactgaccagcaggcggcagggcgcaagccgattgatgatttaataacgatgcttaaggcgcgccggaaagcccggattgccgtggcaggcggcatcagcagccagacggtgaaggactatgcgctgttaggcccggatgtggtgattgtaggatcggcgatcacgcatgcggtggatccagctgttgaggcaaggaagatttcacaggtgttgttgcagcatcgctga

SEQ ID NO: 79772 - DNA, 1476 bp, Citrobacter koseri
atgacaaataaaaacaaacctgagaactttgaagacttgcttcttgggaaatttctagatcccatacatggagttattcgaataactaagctcgagaaaaagataattgaccatcctttattccaaagactaagagacattagacagaatacttttttatataaagtatttccttctgcaatgcactctcgttttgaacactcagttggtgtgatgcatttatcgtatgaaatattgaaaaatatagatttaaattcgttgatttataatcgcaaaaatgtggatgctgacctctatttggatattaaaaaaataccaataagtcttattcaggaactgcgtattgcagctttgttacacgatgtcgggcatggtcctctagcccatcaattcgatagttttgcagtgaaaataaaaaagttcaaagaaaaatgcgagactgaaggcactcagaaatacgataagataatatcattagctgatagtaaagaaggacgattaagccacgaacaagtatcatgcatttttattaaagaaatcattgatgagttgaagagtaaagctgaaaacgaatcgaatggtgacgatgtttataaagaaaatataaggatgattaacgcagacagcattataaaaattgttgaaaagaactatgaatttaaaaataaaatggaagggccggatatatatcctttattgggctcaatcatatcatcctcacctatagatgcagatagaatggactacttattgagagatagttacttctcaggcgttaagtatgggatatatgattatgggcgattgctaatgtcatttatcccagtcaaagtagaaaatagtatttacttagcatataaagaaagtggtatggattcgatactagagtttgctaatgcaagaagcggtctttatagtcaagtctatttccataaaacaaatcgtgcgctatctgccatgcttaataaagcgtgttctggacaagtctctgataatgttatctctttagattctgaaggtaaagtcattgatttaatgagggatttctatataaaaaatccagacaagcaatttttagagtacacacttgagaatgaattaaatgaagattctaagaaaatacttcatgatattattaatagggaatacaaaagcacaatatctaaaaatatcaacaatattctcaataatgatttaactggaaatgaatgggtgcttgattttcaaattgaagataacttcaaggatattgaggctagccaagccaaaataattaaaaaagaaatcaatggtaggtataaaataaaggaattgcgtgagtgtaatgaagcacttcaaccatatcacaatgttaaattttttattcgtatttttgcatcaaaggccactcaagattcaaatattgaagtttttgaacagctaattgagaaaattgaagaaactgttgaaaatgaaataaatgctattgaagcttaa

SEQ ID NO: 79773 - DNA, 1833 bp, Citrobacter koseri
atgggagcggtgacaggaacggtgttaacctcaacggctaatgaggtcgttaaaaaaacaatagggccagtctttgatttcttagtcaaaaaatacgagcttttagatataccaagattcaaagaacactatctagagtattgtgaaaaaactttagaaataaaaacgctggtttctcaagataaatcttttcatgttgatgagatttacatcccaatcgatataatgcaatctggcacccaaagtagattagagataaataatttcacagcattagataatgatagagccatattaataaaagggctagcagggcaagggaaatcaacattgcttcgaaaattattatctaataatgcgaaaagattcagccgactgccagttttctatgagcttaaaaattataatggcggtaccttagagcttgccatatcaaaatcattaagccattttggagttcaaatatcagagtacgcgctgaaaaaattattttcagacagtaatgttaaaatataccttgatgcatttgatgaggttaagcctgagtttaggattgaactaattgatgaaataaagcgttttatcaattcgtttaaatgccatgtagtctgtacaagcagacctagcaccgaaattgattccttgtcagaatttagaacattttctgtgtgtgagttaactgaagaacaaatttttggcattatcaagaaaactgcatctgatcatgaaaagtgcgatgaactatgtggcgcgcttaaacgtagtcctttacatacaaaaaaagattccatccttaaatcacctattttagtcgttttattctgtatcagttacaatttgggtgaagatataccaaatacattatcacaattttactcgaatattttcgatactgttttccatcgccatgacaatataaaaggaaaagtatacagagagcgtcactggaatgataatagacgtgtttatagagagctttttgattgtttgtgttttatttccctaagagatggcttgaatggatttagccatgaaaaactagtaaacttcgtatcgatctcactcaaacatataaatgaagagtattgcatagctgaaaaggctgtgaaagagttatcttctattacaaacttaattattgaagatggctttaatgaatatcgtttcgttcataaatcaattcaagagttttttgccgcatcatttattatgtcattgcagcatgacagaaaaatttcattttataaaaaatgctttaatgactattctttttacagcacctttcataatagcttattctttttagaggaattagactattataactaccatgaatatggttttattcctgcaataaccgacttcctttgtttatcttctcagactatgaaaattgagaactattcaataccaacctcgatcaaggatgttttcttggatgatatccatcttcgcgccaaattcactatttttaaagttggcaataaagaaagctatgaggtagagaaaacaaatttgaacttcgataagtcagatgcatatcccagcctattctcaagcatatttacgttctcaattgattttataaaaatagagctatctgacaaggagttaatgaatatcattagacagaatgagaatgtactagataatggctggtgtaagttaagcattagagaaattcttaaatttaaaaacctgcccgatacaattgctttggaagcattaagcctaggcattgatgtgctcactagaaataagtttaataatgctgttgataagttaaacaaccgaagggattcattaaattccacagattattttaacttctga

SEQ ID NO: 79774 - DNA, 1023 bp, Citrobacter koseri
atgaacaaaatcagagccgccgtggtgggtgcaggtatctacggcaaacaccatatgaacgcgtaccgccacaacccggacacggtactggtcgccatctgcgacacggatacagagcgctgcgacgaccttgccatgtcatacggcatcatgggctatacccggctggatgtcctgttgcaggaggaagccatcgatgtggtctcggtggcgacacctgacccgtaccacaccgaatccatcctcacctccctgcgccacggcaaacatgtgctggcggaaaaaccgctcaccacctcggtacgcgagtgcgagcttatcatggagatggcgcagcagcggaacctgctggtcggcgtcgatttccacaagcgctgggacccagcggtgatgcgcatcaaagctgaactggagaagccggaagccgggcgcatcctgcgcgggcatatcagtatggatgatgtcatcagcgtgccgacagagtggctgaactgggcgggcgcaagctccccggtgtggtttctcggctcacactgctttgacctggtgcgccatctttccgggcaggaggtggtatcggtgtacgccgtcggacagaagcggctgatggtcgaatgcggcctcgacaccttcgacagcgtgcagagcctactgacaatgaccgacggcagttcgtgggtggtggaaaactcgtgggtgctgccggagggctttccgaaggacaacgacggacgtatcgatattctctgcgaggcaacctatatccgcagttcctcacagcaccgcgggctggaaatcaccacgccaggtatgacgctcacgcccaacagctatttcatcaactaccgcaacggcgttgccagcggttttggtatcgaccccatcaatgattttgtgcgggcggtcaggcacaaagcgccctatccggtcaccgcgatggacggactggcggtgagccggatctgcgaggcggtgcaccgtagcctggagagcggcaaacctgaacgcccgataaagccataa

SEQ ID NO: 79775 - DNA, 981 bp, Citrobacter koseri
atgaacacggtgcttattcctcccggtcccggtggctacggtaaagggttgtggctgcccgttggcagcggcaaaaaggtgctgtcgctgatcgggcgggaaatccatcccgttgcgatagaaattggcgcactcaccgaatcggaagtggtgaacggcttcgccgatatcccgcctgataacgacatcctgtgcgtggtgataaactgcgccgggtccctgcgctgcggcctgtacccgcagaagggcattccgaccatcaacgtgctccccacctggcgcgccgggccactggcgcactttattaccgaagagaactatgtctccggcgtgacgatggagcaactggttctggtggatagcgctgaagcgccggactgcgggcctgagccacttccagctccggaaccagtcattaccaccgcacctccaccttcgcgcggcacagagaagctggtgcgcatggtcgagcgtaccggcaccgccaccggacacgttatcgccctgctgttcgccgccagccgcgaggcggtggatgtgtccctgcgcaacgttattccgtttatggcctttgtctcgctgctgatagccctggtgcaggagaccgcactcggcagcctgattgcccatgccctgacgccgctggcgaactcgctgtgggggctggtgctgctctcactcatctgcggtattccgttcctctccccggtgctcgggcccggcgcagccatctcgcaggtgattggcgtgatgattggtacgcagattggcgcgggtgcgatatctccggccttcgctctgcccgcgctgtttgccatcaacgtgcaggtcggctgcgactttgtcccggtgggcctttccatgcaggaggcaaagccggagaccatcgccaaaggcgtccctgcctttttactatcgaggcaactgaccggaccgctggcggtcatcatcggctggctgttttccctgggcttattctga

SEQ ID NO: 79776 - DNA, 285 bp, Citrobacter koseri
atgaaaaagtcaacaaccaaagactggcaccccgccgacatcgtcgccgctttacacaagcgcggtaccagtctggcgaaactgtcgcgggaagcggggctggcctcgtcaacgctgtcgaataccctgacgcgcccgtggccaaaaggcgagtggctgattgccatcgcgctcgacgtgcatccgtcagagatctggcccgctcgttacctcaattccagtaacaaacgtgaaccccgtaaaccgcttcaccccatgacaacaaccgacaactccgggacataa

SEQ ID NO: 79777 - DNA, 315 bp, Citrobacter koseri
atgttcaggtgcagggtggcaatcgtgattggtaaaagattaaagatttcaagagtcagggctgatctgacgcaagtggaactgggtgtactcgcagggctggatgaagaatctgcaagcgcgcgtatcagttcgtatgaaaaggaagtccatgcacccgatttcaaactcgtctgtaagctggcagcagcgcttgatgtaccggaagcgtatttttatgctgttgacgatgagcttgcagaattgatccttcagtatcaccgttttaagaagaataatccgggccgtacattactgttttcaccaaatccttaa

SEQ ID NO: 79778 - DNA, 2070 bp, Citrobacter koseri
atgaaacgcgcgccctttctctgtaagcagtctccggaccgcacgctcgaagtggtaatccttgccggaagccaggcatgggagacctcacgcgtatggcgaaaagatcccgaccgggaagatgatgttcccccggtggtactcggcccggatgaactggccgatctggacaacctgaccataatcaggcccgacacgctctacgtccggatactccgcaccggcgatatccgcgaagaagatctgctgaacattgcagtaaaactggcgcacgcggatgtgcagatggcccggctgatgacccttgatggtgagttgctggagaactggaccggacagcttgcacgcctgcgacaggaaaggccttctgacatcctgccggatcacttccgcctcgatgaagaagcgctgtggtttgacaagctcaccgaacgccgggacggtgaaagcgacgtccagccccagcgcatctgttcccctctgcgcgtcaccgccatcacctgcgacagccatgacggcagctatggccgcctgctggaatggcacaccaccaccgggcaactgcggcgatgggccatgccgatggcaatgctcagcggcaacggcgaggagttgcggcgcattctactggagaacggcctgacctacatctccacccgccccgccctgcgcagcctgctgtgcgaatacatctcacggtcactccccggacgccgggtcacctgcgtggagaaaaccggctggcattgcggggtgtacgtgcttccggatgaggttatcggtcccggtggcgacaatgtcatcctccagggcagccactatctgaccggcggctttgcgcaggccggtacgctggctgaatggcaggagcaggtcgccgcgctctgtgcaggcaattcacggctggtctttgccgtctgctgtgcgctggccgccccgctgctgcgcctgaccggaacgggtggcggaggctttcatctgcgcggtgagtccaccgacggcaaaaccacggtgatgaaggtggccgcttccgtctgtggcgggacggattactggcactcctggcgggctaccgggaatgcgctggagggaatcgccagccgccataacgacgccctgctgccgctcgatgaactgcgcgaagttgacccgcgtgaagccgggataattgcctatatgctggcgaacggccagggcaaggggcgcgcccgcaccgatggcgaagtgcgtaaccgaaggcactggacgctgctgctgttctccaccggagagctgtcactggcggaacacaccgaacgcgccggggagcgcctctacgccggaatggacgtgcgcatggtacaaatccccagcgacaccggacagcatggtgcgtttgagcagctacacggctttgccagcggccagcagttcgccgataccctctgcgaccgggtggcccgcttccacggcaccgcctttcgtgcctggctgaccttcctcaccggcgacctggacgccagcaccacgctggcaagagaattacttcaccgctaccagacagccctgatgccggagcatgccggaaaccaggtgcagcgtatcgtggcccgttttgcgctgctggcggtggccggagagatggcaacattgcacggcatcacgggctggcaggaaggcacggcgtatgaagcggtccggatctgcctgcacgcctggctgaacgagcgcggccatatcgccaaccaggaggatgaaggcgtgctggcgcagatcaagcggttcatcaccgcgcatcagtacagccgctttgcctcgtgggatggcccggaccgcccgctaaatatggtgggctttcgccgggtggaaaaagatccgctgacgggtgaggaatacacattgtttcacatcctgccggagggctggcgggaaatgtgccggggattcagtcccgccagagcggcgagattatgccagaaagcagaatgcctgctgccaggcagcgaagggaaataccagtcgcaggttcgcctgccggagatcggcaaagccagggtttaccgccttacctcccgcatcctcagtatctga

SEQ ID NO: 79779 - DNA, 216 bp, Citrobacter koseri
atgaaaacccgtgctaacagtaacgatgcttttcccgaaagcggcaatgtgcgtatgcgacaggtggtccagtttctggcgatgagtgaatcgtcggtttatcgcctgattaaagacaccgactttccccaccccgtccacctctcttcccgactggtggttttcgatgccgctgaaattcgtcagtggcaacagcgccgcaccgccatccgttaa

SEQ ID NO: 79780 - DNA, 765 bp, Citrobacter koseri
atgcaagcatcgactattcctccggttgaaactcgtctccattcttatcgtattgtcaaaatgaagccaaaagctgacgacgacgccggtcgaggttttgaccttaagggctcgcccgcgccctcttggactcgtgtcaataactgtactgagtacgaaaaacacacaaatagaggggctggaaatttaccgtctgaagatccagagcagtatgaaattggtcaaatgagctacgagcaggaaaaacggctcaacgaaagcattagaacctacaaaccagaacggaaaaaatcacctgccgatgtgtttgagaatcttgcttatgcaattactacgtctgattgtgatgaaattgttcaggctagagccgaaagctatcttaaagtagcgcgggaattacgacatcaggaaagtcatatgccagctagtgataagccaagtccagttcccacagagcgaatagcagctctaaatgattatgccaactctattggtttagagcttagtttgggacagatagagttgttgctacgtggtgggcaaatgcgcattgctggtagcattgtttcagttgttggttatgatgagttaaaacgcgttaaggataacagtatggacagtaaaactactaagttgtggagacatatgcaactacggcatagtattgatagcggcagtatttggtatgatccagtggggaattacgctgcgatgttaaagacgttagatccgttagaatgggcgagactgtttggcagaaaatag

SEQ ID NO: 79781 - DNA, 546 bp, Citrobacter koseri
atgtttcatgacgattttaagtttgaaagagaactggaagcaattgattttattaacaataaaataaaacgatgcagaaagtgtggcaatgaactccattacaaagaaaaattttacaacactgataaaatttgtaatagatgcaaagggagacgatcatttgacgaaatcgatgttaatcctctggctgttcagaataaaaataatcatataagtgctattcagaatgtgaagtacgccttgcttctagctgacaatatagaaaagaaacgtactacaacagaaaaagattttttggaaaagtatacacagtggcaactaaataatgaaaaggcagaaaaggcctggaaagaaaaacaagcatcaactttatctaaacataagagaagtaaaagccctgcaattactccaaatttaacagatgagagattgggggagataataagtaactatgactcgggtgaggggctgaacgttagccatgatgaactgatctcaattgtatgggaggttatgtatcatcgaggtattaataaaaccttttga

SEQ ID NO: 79782 - DNA, 2778 bp, Citrobacter koseri
ttgagaaatgtcataatcttcaggggtggtttatacctcattaataaggaagtagtacttacttttgttttttattcacttattgtttctcttggaatacttggtgtcgttcactctcaaagtgtagagcaaaatgaaaaatatttatttatatcaccttcgtacgtcaatgatgtcaaactaaactggacaaccagcgtttgggctggcgtgttaggcatacacggaactattgctgcgttatcaataacgttcatggggatgtttgttaatcaagtttctaattattcagaatcaggatttgaagatatatgtaaatcattacttctgagtcgtagtaactttttatcatttagcttgaattctatatttagcttattatccggagtcatcctgctagctttggggggagggatgattgcatatgtgatttctatcgccctctcacttttctttattctaagttatgggctaatgtatctaaagttgtataatgtcacggaaaagccaacaatcataagagagtttttattttctgatttacagtctaagggtgagggttattattcttctaatattcattttcagaagttggttgcagattttgactcatgttgtgaaagatttagttttatcgaaaatggttggagttcagactctctagccttagagcagcatacgttagagattttctcgggccgaaataaattattcttatgcgggatctgtgttcaatgtctaaaagaaattgatgaagtaattaatgaatgtactggtggtaatgaatttaagctacgtattagcttaaatttttatcaaagcatttcatattcttcttttaatattgagtctaagaaaggaatgtatgttgatgaaaaaataatattacgaattaaaactattctagaaagggcattattaacaagaaaaatgttgcctgaagaaattgttttttaccataagtatgaacaagctgtgataaacaatatcagaagcagtttgttaaaaggtgacgaagtagggattgattttggtgttaaggccttgtttacgctcacggaaaaaaatgatgttataagaaccataagtggcctagatcattcgttcgggttctcaaataaaaagaatagaatagacaatactatcttcgcgatgttttttgagaaggtttcattcgagcttatgacaagtggcgatttaaaaaaagcaagagaggtaatgggctggattattaatctcggaagatatttatatactgaagattatttctatgaattctatcgcattatctgtcgatccttacatgatcgtgcaagatatggttttggtgatgatgattttagtatatttgatttatatgtgcacacaactcgtcaaaatttgatgactcgaaattatatggcgttcgagttgaatacggattttttaaccaatgagttacgatatctcgaacacgccaccgatggggagtcactaagtgtaattgaaaataaaatggttcagtgtgttaaaggtattgtaacattaattttgattcgcctgatctatctttcagataatgagaaacaagaaaaagatgagtttagaaatctatgcaattatctaaagtcatggactaatgcagcattttttgaagatgtctattatagagaaggaacctatgatgcactttttgtaatccccagcgaaccagattttgacgcgagtagaactctaagagaaatacctgattatgaggcgacatctatatctataagcaatgatacttatagagctatagcttttcttatgacacaatctccatttaatagtaataatctcaattcaatcttcattcgagataagaaagagttcttagaaaatacagcaattacaacttatcagttacaatcgataataacatatttgaaaagtgatgattttagcagggcgcttgaagaaatagaaaaaggaagttctgataaatcgaacaggaaggatgtttctgaaagtcttgaaggcgtagttgttgaaaaattaaatttgctttctcagtttgttgttgaatctgaattagatgatgggttagttgataaatataaaaatgaagtggctgtttcttttaaaaaacacttgggtaggattttagatgtcaattcacttcctgtttctgacgccatatccggtgatacttctttttatattatcaataaaagggaggtgatgagttccattgatggagttcactattcaatgagtggagggatttacgcagaaagaggtatatataattgggctaaggtggttttaaataagataaagttgaagcataaaaacgtgaaggaaataaatagtttggatgacttgcctaccaataaattgataacaattaataatatggtggaaaatgaacctggcatatatcgttataataaaggtttaagaatgaatgattatgaaggtgttttagggttgggtgacgcaggtctttattatatggactttgaaaatgaatttttattcaaaaaaggaagtaatttgtttgatgtagttattgagaaagtaactgaagaaaatatcaagtcaatcggtggtgccgatgtctttgcaggtgaaaatccattcttgtatgccctgatgtcattgagagttaatttagaattaattgaaagaccaaattataacttttactttctctcgttggaaaaatgcagggagctcaccgcattgagtaaccgtaaagcacatttatcttttgacatgggaacaggtttggatggttctcagaatatatcatga

SEQ ID NO: 79783 - DNA, 429 bp, Citrobacter koseri
atgtcaataatcaagtcacgtatgatcgaagggatacgtcctaatgccgagactttaacagcaattaaggagcaaatgggcattgaggaggataccgacgtgaggttcatggcgttggaggttcagttcgataggaaaatttattactgtgcgctatctggcgggaagcttgaaaatggtgaacctatactaacacttgttggacaagcggcccttgaagtgatcattaatcatccttctcctaataatacattggtatttcagcaagtgaaattgggtgaaacaccacttaaaactaaagtcaaagcaacgttgagaaacgcgcctgcaaactcaaagatttgtttctttggtgatatgcaaggtgaacttgatggtgttctgagtgacgtttttaatatcaaagcttcattggacagttaccactag

SEQ ID NO: 79784 - DNA, 504 bp, Citrobacter koseri
gtgagcgacttcagccagttgcctgcaacgattaaggatttaccttttatcttggacgaatttaaggccggctctgaaaatggcaatttctccaaagattttctaaattcaaaattagctaaaaccctcgaaaaacaattgcgcgaactcttctcacggcaagagctgggcgatcaggctggtcactgcttttacatactagccagggagtccgatggccgtagagttggattcatttggttaatgattactccagatcccgataaccaaccgatactagaaatccgcgccatttgcatcacaaaacagttccgtaataaagggctgggtgcagttatgcttgatgagtggctagaagcttatccccaccacccgttccaagcaaaatgtttccaacgttcaacacgtacgatagagatgcttaaacgacgtgttttttatgtgcacaacaccagccctacaggaagccagcctctcgttcgcaaccgtctggtgactatttga

SEQ ID NO: 79785 - DNA, 645 bp, Citrobacter koseri
gtgatcagtcccattcgtcagaatctgtttgaacgagaatgtgagatgccgctgctggaagcgcggcatctcgcccttctgcttctcggcctcgatgcttcccaacctgcaaacgccctgccggaagaacatcaggagaattaccgaatcctgcacgacgccatcagccgcaccatcaaagctacaggcatggtcagctccccggcgaataaacgtatgttctatgccgatgagatgtttgccctggcctggcggcttattgatgacgaactcacgccaccagaaattaaggcccgcagcctgaaggcggtgatgaaactgtcacgtaacagccgtggccgcaagtggctgaagacgctcggtgacgacgcgctaccagatctcactacttcagcacaaccttccaagcgtgggatacataagcgcgacaaggcacgggagaatactgccaggctctgctggttactggttcaacttctggttgaggaaactgacgggcgtaatggtacgtctgataaaccggcatcggacctgatacttcgaaagttgaaaacgctggcgcaggagcgggaggtgccgtcagatgggcttgggcgggggacgttttatgaggtattggggatggggcgtggaaaaaactcttag

SEQ ID NO: 79786 - DNA, 1248 bp, Citrobacter koseri
atgcctaagcaactgaaacccttaacaaatgtggagatcgctggcgcgaagccccgtagcacggactatgagctacgggacggtgaaggcctgtacttgctggttaagacttcagggaggaaggcctggcatttcgagtattatcatcccgtcaccaaaaagcgcaccaaaaccagccttggcccttacccggtcgttacactggccatggctcgcgaaactcgcacgaagtacagacgactgctctggcagggtatagatccccgtcaacacttagctggaatagccgaagaaaaacgcatccagaatgaatgcacactggaaaaagttgcggaacagtggctcaaagagaaaaaacggaccagcgatcttagcgaagaccacgccaaagatatctggcgctcgctggagatgcacgtattcccttctctgggcagtacgcccgtcaccgagattcgcccgaagatgctcaaggaacatctcacaccgctggaagaacagggcatcctcgaaacactgcgccgggttatctcacggctcaatgaaatcttccgcttcgccatctccgaagagctcatcgagttcaatccggctgacaacctggtcgcccgcttcaagaaaccgaaaaagcagaacatgcccgcccttcaccccagcgaactgggcagactgatgctggcgctacagaacgcctctatccgtaaagaaacccgctgccttatcgaatgggagctactgacctgggttcgccccagcgaggccgtcagcgcccgctggtgcgacatcgacatgaaaaaagcggaatggcgcatccccaatacctttatgaagatgaaccgttcgcacacggtgccgctaagcaaacaggcgctgcgcgttcttcagctcatgaagcccgtcagccgccatcgaccttgggtcttccccagcatccgcaaaccactggagcacatgcaccagcaaaccgcgaacgccgcacttatccgaatggggtttggcggcgagctggtcgcccacggcatgcgcagcatcgccagaacggcgggagcaggtcatttcccccgtgaagttctggaatctgcgctggcacaccagaaagaagacgagatcgaagcggcctacaatcgcagcgactatctggaacaaaggcgaccgctcatgcagtggtggggaaactacgttgatgccgccagacggcaggcgctgctcggtgctgaagaaccgctacagatcgtggaaggagaataa

SEQ ID NO: 79787 - DNA, 900 bp, Citrobacter koseri
atgatcgacttctactactgggatatttctggtcctggtgcgggtatcgaaaacatcgacctgggcttcggtaaactgtctctggcagcgacccgctctcaggaagccggtggttcctacaccttcagcagccaggatatttacaactcttctaaagacaccgccaacgacgtcttcgacgtgcgtttagccggtctggaaacgaacccggacggcgtgctggaactgggtgtcgactatggtcgtgcaaacaccactgacgattatcgtctggctgacggcgcatctaaagacggctggatgttcactgctgaacatacccagagcatgctgaagggctacaacaagtttgtggttcagtacgccactgacgcgatgaccacgcagggtaaaggtattcctcagggttccttcactggcgtggacgacagtagcaacacagttaataacgacatcaacaacaatggttctctggtgcgtatcctcgaccacggtgcaatctctctgggggatcgctgggatttgatgtacgtcggtatgtatcaggacattgatcgtgacgacaacaacggcacaacctggtacaccgtgggcgtgcgtccgatgttcaaatggacgccgatcatgagcaccctgctggaagtgggttacgacaacgtgaaatctcagcgtaccagcgacaccaacaaccagtacaaaatcaccctggcgcaacaatggcaggctggcgacagcatctggtcccgcccggccatccgtctcttcgcaacctacgcgaagtgggatgagaagtggggctatgacaacggtatcgcttataaagataccagtgccacaacttacagccgtggcgacaacgatgagtggtccttcggcgcccagatggaaatctggtggtaa

SEQ ID NO: 79788 - DNA, 297 bp, Citrobacter koseri
atgaaaaaccaaccctccacacagtctgcaattcctacaaccggctacatccgccgctatcgtttggctgaaatgctgggtatgagcctttctactctggatcgcaaggtacgtgacggcactttgccgaagccaacaaagctaggtgagaaaatcacagcattcgatgctgtggcgatcaatcagtggctgtcgccgcagctgatgaactgggctatgaggtggcgcttctggaggatgaaggtatttatcttgatacgcaggatgctgaattttattttcagcgttatgacctga

SEQ ID NO: 79789 - DNA, 201 bp, Citrobacter koseri
atgtctaaaatcgctagtaaaatcataggatttactggcgatttttgttttctaagagctaacgacttccaccctgttccagccatttttaccgtgaaaaataacggtaaaaattttctgtctgtggtctatagtgtgtttttaccgtgggtgtttacggtaaaacagaataggcagaggggggatgttggcggagactaa

SEQ ID NO: 79790 - DNA, 300 bp, Citrobacter koseri
atgttggcggagactaagctcaaggcgttaaagcccaaagataaactctacaaggtggccgactgtgatggcctgtatgttaccatcgctaaatccggcctgatcacctttcgttttgactaccagatcaacggccgccgtgaaacgctgacgattggaaagttccctatcgtttcgttggcatcggcgcgtgagaagttgctgggtgcgaagaaattgctggcgcggggcatttcgcccgctacagagaagcaacgacagaaacagcaggcaaatccacttatttcggcgactggctga

SEQ ID NO: 79791 - DNA, 483 bp, Citrobacter koseri
gtggcaaaacaacctaatctgacagactttcaaagaaaaaacctatcaatacttgagccacaattgcgctcatgtgttaaaactgccgatttaaagaaagctaaatttttaacaattaaaattcaagagattcttagacctactggtcatgaaacaaggctgctacaagcaaaaaactggttatatgaaacggctttggaagctggaaatgttgagtttgcaaaggctggttttaaaggaacaatgtataaaagctcgtctagaactcgtgtgaatttagaggctacagcttttttagctatatgttttttacgtgagagtaacatagcagaagcaagggtttttatttacaaagccgtagataatattagtaatattacttctgaatcaagaagaaaacagttccacaaacggctgttacagcgattagaagaagaaagccttttagagcctatctcaataggactttattccagacaatga

SEQ ID NO: 79792 - DNA, 501 bp, Citrobacter koseri
atggttgtcaatggacggttgcatgaccaaatcaccgctatcaggaacaaaaaaacaggccgcaatcccacggacagagggaaacaaggcgtaaagcgcagtctgatgacagatgccaacgggcttcctctgtcgctggtcgtcgcagcagcgaacacgcatgacatcaaactggttgcagatacgctcgatgcccttcagacagggcgtccaggacaaaaaatcaggctctgcctggacaaaggttacgaagcaggctggctgaaaacgtatctacagagccgccgctacgagccgtatatccagtcccgtaaagaggagtctgacgccagtaaaaacacggactttaaagcccatcgttgggtcgtcgagaggacacatagctggatgaatcgctttcgtcgggtcctgaccagatgggaaaagaagaccgaaaattacgaggccatgttgcattttgcctgtggtctcattgtctggaataaagtcctattgagatag

SEQ ID NO: 79793 - DNA, 657 bp, Citrobacter koseri
atgattggttttgtgttctgggataagcgggaccattttctcccaaagctcatcgcttatccgccacttgctgcctgtcatattttcaccttcagaaattatcagttacgacattctgacaatcccttttgggatggattcttagctggattaattgataagtctggaagtgtgttggatcttgataaagttaatgatgaaactataaatatggtaatgagtcaaaacgaagagcaaatattagagagaataggaagctctgttccccagcactcaataaatttattggaacaggttcaagtagcgtatacattaaggcttcctgccccagatagaaaattattaccaaaacaattatccaaggacaagaaagtggagttgggtaaaagaactaatacagctttaaaaagagtggcatggcgagcgctatgtagccctgaaagtgatatatataaagcatggacacaggggctatctgttgtgtacgataaaaaatatatagctggtgcaatagtttcatcgtttaattcttttagtatatcaataacaatgttagcagctagcattgcagcattggcaattaaatttggagcagaggttttttgtgaaacattttctccaaaatcattaatgatagatagggacgataaagagtaa

SEQ ID NO: 79794 - DNA, 183 bp, Citrobacter koseri
atggcatcagattctgatcgtaccatctaccatgtcatagaaacggggggcctggcgatgcggaaatttgccagacagcgccaggccaagaacaaaaaagcccgcagttacgcgggcttagaggtgttttactgctttgacgtgcaggctgctgttgccagaccactcgatgatggtatataa

SEQ ID NO: 79795 - DNA, 261 bp, Citrobacter koseri
atgcttgctcacgttgatacccctttccgctgtcctgcctggcgtccaacaactcaccggcagcaaaacgccgccgtcgcagcgttgataccattggtcatgcggagtagcgtcgtaattctgtttgctgacaccaaaacggacaaagaagccgcgccggttgttgccgatgggctgacggtcataggcgcggtcgctgaggctcttggcctcgtccagccgttcacgggctttcgcaagggtgatccctccacgccgtag

SEQ ID NO: 79796 - DNA, 453 bp, Citrobacter koseri
atgtgtcaatttttcaatgtttcggtgctgccaatgaatcaacgcattggatacgcccgcctttcgatggatgatcagtacctggacctgcagcgtgacgcgtttaagtcggccgggtgcagagtgatctacgaagaagtggccaccggcaagaacgcactacgcccggagcccgagcagtgccgtaaggcgctatgtgccggggataccctcgtggtgtggaggcttgatcgacttggacgcagcctccccaagttggtccagatcgtgaccgatcttgaacattgcagcgtcgatttcgtgaggttcacggagaaaatcgagacgggcagcgcagcggacaagatggttttctatgtgatctcggcgctggccgagtttgagcgcaacttgatccgggagcggacgcagaccgtgcatgtgggcgcaccgttggccgaaaaccgaaactag

SEQ ID NO: 79797 - DNA, 1470 bp, Citrobacter koseri
atgaaccagcagctagacactgcagacagtgtgcgccgtgaggtagcacctcgtaccgcgcagaaacacaaagccgaattcggccagttcatgacgccttcgagcgtggcccgcttcatggcatcactgttcccaccctgcacccagcagatctgccgtctactggatgcaggtgcgggtgtgggcgctctatcttgcgcctttctcgaccgttgggtgacgggtggctttagctttgagtccgtcgaggcgacggcctacgagatcgacgacaacctgcgtggccaccttgcgcaacacttaggcggatacagctgtgtgaggtcccgcatcatagtgggagattacatcgagctggctactgctgaggggctgaaggatcgaggctatacccatgcgattctcaatccgccgtataagaagatcaacagccaatcagcccaccggctggccctgcgcagtgtcggcatagagacggtgaatctgtattccgcctttgtcgcgctggccgtgggagaggcagcgccgggggggcagatcgttgccatcataccgcgcagcttctgcaatgggccgtattaccgcccgttccgtgatttcatccttgcacgggcagcgatccgccacatgcatctgttcaagtcgcgcaacaaggctttcagggatgacgaggtgctgcaggaaaacatcatcatccgcctggagcgtggtggccagcagggtccggtcacgatttcaacttccaccgatgacagcttttccgacctgaccacccacgaacatccgttcgaccggatcgtgttcccggatgacccggagcggttcattcatgtgccgaccacgactgaaaaaagcgccatcgagctatcgcctgccgtgcgctatacgctggccgacattggcgtgaaggtatcgaccgggccggtagttgatttccgcttgaaagagcaccttcgagacatgccagagccgggcaccgtgcctctgatttaccctggacacttgagcatgacaggcgccgtctggcccgtaccgggcttgaagaagcccaacgcgatcatacgaaataatgagacggaaaaatggctttacccaaacgggttctattgcgtggtgcgccgcttctcatcgaaggaggaaaagcgtcgtgtggtggcaagcctcgttgatcctgctacctttggcgatcattcggtgctgggcttcgagaaccacatgaacttgtttcacgagaacaaacgcggcttgcccgaggcactggcccgtgggctggccgtgttcctgaatacgacagcagtagatgagcatttccggcgcttcaacggccatacgcaggtcaatgcaaccgacctcaagctgatgaagtacccgagtcgtgacaccctgaccgagcttggtgagtgggccatgcagcaaggaacgctcacgcaagacctgatcgacaccaagctggggaccctgaccgtatga

SEQ ID NO: 79798 - DNA, 957 bp, Citrobacter koseri
atgaaagataagagcgattacatcgaggccgcgcaacaaatcattatttccctcgggctaccgaaggcgcagcataacgagcgctcggccctttgccttttggccctgttggatctcactccgggtaagtcatgggtcgacgcgggaaacccgctgatcggcataacgcccataatggattgggcgcgtgatcacttcgacaaggcttataagccgaacacccgtgaatcagtacgccgacagactatgcatcagttctgcgacgctgggctcgctctctacaatcctgacaagcccgaccgtcctgtgaatagtccgaaggcggtctatcaaatcgaaccctccgcattggtcctgctgcgtaccttcggaacccctgcatggcatgacagtctcgttgcttatctggccgagcgtgaaacgcttgttgcccgctatgccaaagagcgcgagcagaaccgtatcccggttgagattgcaccgggtcagaaaatcaccctcagccccggtgagcacagtgagctgatccgggccatcatcgaggactttgcaccgcgtttcgcaccgggaagcgttatgatctatgccggtgacacgggcgacaagtggggttacttcgatgcccctttgctggccggactgggtgttgatgtggattcacacgggaagatgcccgatgtggtgttgcactttactgagaaaaactggctactactggtggagtccgtcaccagtcacggcccggtcgatggcaagcgccataccgaactggcgaagctatttgccggatcgaccgccgggcttgtctatgtgactgccttcccaaatcgggccataatgggtcgctacctgggcgaaatcgcttgggaaactgaagtgtgggtggcagatgcaccgtcacacctaatccattttaacggcgtgcgcttcctcgggccgtatccggccgaggactga

SEQ ID NO: 79799 - DNA, 567 bp, Citrobacter koseri
atggcaaacagccaagtccatccgcaagggtggatttctcttttgatagcaccagaacatgaagagcgagccaagcggatgcgggccgaacgcgatcgccagtatggaaacatctacaccgaggcgactactgatgagcgatgggtgggtgacttgggcgagatggtttttaactcgtggtttaagcacgaaggcatccaaagctttgagtgggtgctggacgatgcggccggtaaacctgatttcgtgacagccctgaacgttcgcatcggggtcaagacggtgaagcgcaaagtgccgccccgcgaggactacaccgcccagattacggctcgccatgcgggggaacccatcgaccagttcttcttcatgacctacgaaattgcaaagcgacgcatgtggctattgggtggtatcagccgcgagtgctttctgcgggaagctcactactacggtgccggtgaatcggtacatgccaactacaagattcgacaggggcatgagatttataacattgagatcgctaagctgattccgccaaaggtgtggattaagacggtagcgtag

SEQ ID NO: 79800 - DNA, 2250 bp, Citrobacter koseri
atgaaactaaatcagacctatatcaaaatcagagataaatggtgggtgctacctctcattttaccctctttgctgttgcccatattaagcattgccaatacctacgcgcataccaatacgggttccggcaatgtcacgcttttttatcttcccctggcattcatcattagcctgatgtcattttttgactgggcggcattaccaggcattgcggtcgcaatcttctggaaccgctatccgatagtgggattgtatgagacgctctccattatcggacatttcattatcccggtcgtgctctgctggggcgggtatcgcgtgtttactccccggcgtaatcaggtgtctcatggcgatgctcatctgatgtttcagcggatgttctggcaggtgttttgcccggcgacgttatttctggtgctctttcaatttgccgccttcctgggaatgtatgcgagcaaatcaagcatgatgggcgtaatgccttttaatatcaatacattgattaactatcaggctttgctggtgggaaatcttatcggcgttccgctgtgttattttattattcgcactgtccgcaatccgctatatctgcgtggatattatgcgcagctgaaacaacagtttgataagaaagtcacaaagaaagaggttgttatctggttgctcgtgctgacattgctcatgacaatgctttgcatgccattgaatgaaaatagttcaatatttagcactaactataccttgtcattattattgccggtaatgctatggggagcgatgcgctacggttatcgatttatttcgctgatatggtcggctgttctcattaccgcaattcattattaccagagctacatgccttattattccgggtatgacacacaactcactattacgtcttcaagctacctggttttctcttttattgtgagctatatggcggtgctggcgacgcgccagagaatcgtcagcggtcgggcgcgtcggctcgcgtatcttgatcccgtcgtgcatctgcctaacctgcgggcgctaaatcgcgcgctgaaaaattcgccctggtcagcactctgttttttacgcgtgcccggcctggaattactggggaagaactatggcgttatgctgcggattcagtacaagcaaaagctctcccactggataaacaccttgctggcgcctggtgaatgcgtgtatcagctgtcggggcatgatttgattctgcgtctgaatatggagtcgcatcaacagcgcattgaagcgctggacaaccatatcaagcaattccgtttcatgtgggatgatatgccgctccagccgcaggttggggtcagctactgctatgtgcgctctccggtcagccatatctatctgttattaggcgaattaagtaccatcgccgatctttctctgatgaccaacaaaccggagaatatgcagcggcgtggcgcaatgcatttgcagcgggacctgaaagataaagtggcgatgatgaaccgcttgcagtatgcgctggagcacgatcatttttgcctgatggcgcagccgatttcaggtattcgcggcgatgtttaccatgaaatactgctgcgactgaaagacgataatggcggcatgatcaatcccgatggttttctgcccgttgctcacgaatttggcctgtcgtccagcatcgatctgtgggtgattgaaaataccctgcgctttatggcggaaaaccgggataagctgccagcccaccggtttgccatcaatctgtcaccaacgtcggtatgccgcgcccagtttccaattgatgtcagtaacctgctgagccagtacgaagttgaagcgtggcaactgatctttgaagtgaccgaaagcaatgcgttctccaatgccgagcaggggcaggcaacgttgtcacagttgcaacagttaggttgccagatagcgattgatgattttggaaccggttatgccagttatgcgcggctgaaaaatgtgagcgcgaatattctcaagatcgatggcagctttattcgcaatatcgtctctaacagtctcgattaccagattgtggcgtccatttgccatctggcgcgaatgaagaatatgcaagtggtggcggaatatgtggaaagcgaagaaattcgtagcgcggtgagcgcgttggggatcgattaccttcagggctatttgcttggcgaacccaggccgctggcggcgacgctggaagaggtacaggcaccattgtctggtgcctga

SEQ ID NO: 79801 - DNA, 192 bp, Citrobacter koseri
ttgatagagtttctggttgaccgtaacgatctggaaaacccgttgtttgagctgctatctacccgcatccgtgattacgaaaagcacgcgccagagttcagagcactcaatcaatgcctggatgaccgtcgctcatataaaagcgctctctctgagcgctttaaacttcctgctgaagcctttatcgaataa

SEQ ID NO: 79802 - DNA, 930 bp, Citrobacter koseri
atggcactggaaagcggtattgcacagctggttgaggcgtttatcgctgcgggtcgcccctcttcacgggagcaaaatattgatgatcggagggctggctatatcgccagtacagtacttgccggagagacagaaacgcgtgtacaggttgacgatattgaaattgatgcaatggcatttcgcgtggtttcgccactggcctcttctgaaacgctgccctgcgttatctactatcatggcggctgcttcatcagcggcgggtttgctacacatgataaccaactgcgacaactggcgtaccacagcggttgccggattattgcggtacagtatcgccttgcccctgagcatactttcccggccgcgcatgacgatgctgaaaaaggggcaaacattatctggaatcatgctgaagagcttggcattgatcgcaagcgtattacccttgctggcgacagcgctggtggacacctggcactggtcaccgcattacgcctgaagcaggcaaatcactggcaacccgtacagcttgtgcttatctaccccatgcttgacgcaaccgcagggtttaacagctacacccgtcatggtctggattacatcatcacccgagatacgctgctttccggctatgagatgtacttacagcagactgaccgtcaacatcctgaagttagtcctctctggcgggatgatttcagcactctgccgccagtacatattattacggcagaatttgacccactttgcgatgagggtgaagcactttatcaacggctcacggaacagggcgttgattgtacctgccaacgctacctcggcgtgattcatggatttttccagttgggcggcgttagccatgccgcacgaaatgtaatgcgggatatcgcctggcgtattggaaacccatctacagggacgatttattaa

SEQ ID NO: 79803 - DNA, 483 bp, Citrobacter koseri
atgtggactattccctctgaacgagaaccattaccaggagtgaagcattcgcaccgtggttcgaaaatgcgaactccacaccttgttcctttgagttgtcaggcattggctgtgttgacggaaattaaagagatcagcggtgatcatgaactcgtgttcattggcgaccatgatttcagaaagcctatgagtgaaaatacggtaaacaaggctttgaggtctatgggctatgacacaaccgtggaggtctgtggacatggattcagggctatggcttgtagtgccttgattgaatacggtttgtggtcgaaagatgctgttgaaaggcaaatgagccatcaggagcggaactcagttcgtgctgcctacatacataaagcagagcaccttgatgagagaaagcttatgttgcagtggtgggccgattaccttgatctccttagaatacgacaagtttcaccatttgattttaaaaggatttaa

SEQ ID NO: 79804 - DNA, 315 bp, Citrobacter koseri
atgaatatcgaagaatttgtgagtgaagataaccatatgtgtaatctgggccaggaacttttctgtaaaatcttcgaacccggagcgatttacgatttacctgataatgaatttaacagaaagattgtttactggttaagccagtatttagtggggaatctaagagaaccgttggattcgatctctgagcttaagattttcgaacagttttatgtttatgagacatggttctcgctaattaaatgtcccgttgaaatgaaaaatctttcaaagcgagtaattcaataccatattggacttagaactcttttgtaa

SEQ ID NO: 79805 - DNA, 135 bp, Citrobacter koseri
atgaatgatgcaatttttgataaagattcttttaaaagcaaaagaggaaaattcggcgtaaagttattaccaaagcagttaaaaaggacacataatgtgagtgtaagatttaatgacgaagaattattaatctga

SEQ ID NO: 79806 - DNA, 258 bp, Citrobacter koseri
atgtataaaaataacgatgaagccattgattgggaagccaagcgacttcttgatgatggtatctataccgatacagaacaagcctatttagaagccgaaaaaatagtaattaatatacgggaacaagcaaaacagcgacagattaaacaacagttcaagataaaaataaaatcaatcaagaaaaaaattgggcaaggttatgattatgctgatgtcccgtatgccaacaagagaaaacattggggagaagataaatga

SEQ ID NO: 79807 - DNA, 285 bp, Citrobacter koseri
atgacaacaaaaacaataaaacaacaaattgcttcggcacaggaacgtctatacttcttggaagctaaaaagaaacaacaaacaaaaaaagaaaacacacgtaagaaaattattttcggtgcagaggttgccaaagtcttagaatgtgatattagttatgtagataaagaattagtctttggggttttgcttaatatacccaatcttcatgagagtgatgttgatgcctacaaagcacaaggccaagcctatatcgaaagtgttttaaataaatccaagtcctaa

SEQ ID NO: 79808 - DNA, 1443 bp, Citrobacter koseri
atgagcacagttaagaaaattgataccatttcatcttacttcaaaattcccccttcaatacttgatcaattagatgttgttgatgttctgttagaatcagatacattgctttttattgacccaatgctactccctgaaagtaaacattcagaaatgaaagatgatgcagatcaaaaatacatcgacactttcacaaaaataataaagctgcttagtgcatgcaaaatagataatgacagtgatattgcatggagaactgcaaaaaaattattttcattttccgaaataggctggacatgtctgggttatggctcatcagccaaaggctcaggatttggacctcagcttgttaataatacgatgaaaactgctcatcaaattgtaagtatggatattgatgatcctgatttattcatggttatgtcattatttgaagaaggtattggggctgaccgaattagtgacatgaccaccaatataatatttgatgccttagttaaattttcagaaagagtaaacataacacttaagatcccaacaaaagaattcacttttaaagggaataaatacaacgcaccccacaatccattaacaaataagccactaatattagttcctaaagatattgtccgcgacttaccaatttctacagattggagtggtgctgtccacacaatgaaggagaacactgacttaagagacagaatcaatacaaatattggtaatctcctcgcatctatgaccaaaaagcaaaaagatgaagccaaacgtcgagctttagagaaaaaagaatattttgaggatttgctaacattaataaaagaagtagaaaaagagccctacgatttcaaagcggatagaaacggtgaattattctggttaagattggcatcttcaatagacaagaaatatccgtttaatctttcaggatataataaaaaactaactttggatgatgttgaacatcttgtaagcgatattttaaatcaattcaaggatctcattgaaaacaaagggttatggaaagaaatgtgggctgatgataaaaagccacgtaaagaaaaagctgcacaacgtttgctatttgctgttgcatattcatattgtaaagcaaacaacttagatataagtcctgaagccgattcaggaaatggccccgttgactttaagctttcacaaggctttgaacaaaaagtattagtggaagtaaaactctcgtctaatggaaagttattgcacggatatgaaaagcagcttgaaatttataaaaaaggggatgacactgaacgtgcatttttcgtaatagttgatattggctatatcggagacaaatatcaaaaagttcagcaatccagaattgctgccgaaaaagaaggaaagaaagtttcaaaaattattcacatcgatgctcaacaaaaggactccgccagcaaacgcatttaa

SEQ ID NO: 79809 - DNA, 384 bp, Citrobacter koseri
ttgccggatggcgctaacgcttatccggcctacgagcagagtgaggacttatcgccggatggcgctaacgcttatccggcctacgagcagagtgagaacttattgccggatggcgctgacgcttatccggcctacgagcagagtgagaacttatcgccggatggcgctggcgcttatccggcctacgagctacgagcagcactgaaccgtaggccggataagacgttttacgtcgccatccggcacgatgacagcttattttttcttgtagatatccgcagtaccatgaattttattatcggtttgcccggaggtcagtacgaccacatcagcccctttttcatcggcctttttaagcagatcctcttttgcctccatagttga

SEQ ID NO: 79810 - DNA, 1587 bp, Citrobacter koseri
atggctgacacgcaccttcccgctcgcgataatcatgacaagccggtgatctggacggtctcggtaacgcgtctgttcgagctgtttcgcgacatcagcctggagttcgaccatctggcgaccatcacccccatccagcttgggtttgaaaaagcggtgaactatatccgtaaaaaactggcgaccgagcgctgtgacgccattatcgcggcgggttccaacggcgcttatttaaaaagccgcctctccataccggtgatcctgattaaacccagcggattcgacgtgctccaggcgctggcgaaagccggaaaactgacttcgtccattggcattatcacctaccaggagacaatccccgcgctgatcgcctttcaaaaaacgtttaatttgcgtctggaacagcgcagctacatcaccgaagaggatgcccgtgggcaaattaatgaactgaaagccaacggcattgaggcggtagtcggcgcagggctaattaccgatctggcggaagaagccgggatgaccggcatttttatctattctgcggccaccgtgcgtcaggcgtttagcgatgcgctggatatgacccggttgacgctgcaacatggtggccaatatgcctccggcaacgggctacgcacccgctacgatctgggagatatgcgcggccattccgcgcaaatggagcaggttcgccatacgatcatgctgtacgcccgctccagcgcggcggtgttgattcagggcgagaccggcaccggtaaagagctggcggcgcaggcgattcaccgcgagttttttgcccgtcggggccagcgcagcggtaaaaaaatgcctccgtttgtggccattaactgcggcgcaattaccgaatcgctgcttgaagcagagttattcggttatgaggagggggcatttaccggttcccgacgcggcggacgcgccggtctgtttgaaatcgcccacggcgggacgctgtttctggatgagatcggggaaatgcccctgcccttacagacccgtctgctgcgcgtactggaagagaaagaggtgacgcgcgttggcgggcatcagccagtcccggtggatgtacgggtcatcagcgccacgcactgcaatctggaacaggcgataaagcagggacaatttcgcaccgatctgttttatcgtctcagcattctgcgcctgacgcttccgccccttcgggagcgcccgtcagatatcgtgccgctggcggagggatttttgaaacagtccctggcggcattagacgcgccgtttggcgaatcggtgcgcgaggggctggcgcaaagccagaccattcttctgcgctatgcctggcccggcaatattcgcgagctgcggaatatgatggagcgcctggcgctttttttaagcgtcgagccgcagcccagtctggatagccagtttttacagcagtttttacccgaactggcgacgattcccgaagcgccatcagcgcttacgccgcagcaggttctggcgcagtttaacggcgataaaaccgcggcggcgcgatatctgggtattagccggacgacattctggcgacgattaaaagagtga

SEQ ID NO: 79811 - DNA, 1257 bp, Citrobacter koseri
atgagttattcggatcagtttcttaaagctttaggagtagtcgatgtttcggctaagtcttataatgaaattagcaaacgtacaaaaataccgactgacagacttaaatattataatcaaagaaatattatgcccagcgggaaggatctgagcatcctttgcgaagaatttaatatatcacctgtgtatttccaattgatgatgggacatatggatatgcatacattggaacttatccaagaaaatgcttctatcatatttgagaaaatacaatcgccaaatataaccgttactggtgaaagttcctttgaaaaagatgttgaactggtattgcagaccaaaaatggtgaactttataatggggattgcttaaaggtttcgaaaaatattgatgctgattctgtggacatgatttttgcagatcctccatttaatttagataaactttatccatcaaaaatgaatgataatttaaaggaagaagaatatattaaatggactcatgactggttaaatgaatgtattcgcattctaaaacccggtggttcattgttcctatggaatctacctgtgtggaacagtaagatagctaattttttacatggcaggcttaatttcaaacactggatagcggtcgatatgaaaaataatatgcctattcagggtaggttatatccctcccattattctcttctttattttatcaaaggagaaaaggctaatgtttttgagcctgacagattagctgcacagacttgcccaaaatgttttggtgatctaaaagattatggtggatataaaagcaaaatgaatccacttggaattaatctaaccgatgtctggtatgacattcctcctgtaagacataaaaaatataagaaaaggaatggtgctaacgaattaagtataaaagttttagatagggtgaccgaaatggccacaaaagaaggtgatctaatctttgatccatttggaggctcagggacaacttatgtaatagctgagataaaaaatcgcagatggattggctctgaaattgatgactgcgaaataattaaggataggtttagcaatctttctgaagataaagaacacttagtcgaggtacgaggtaagcttaattctttgtttccttcgactattaaaagagaaagagagaagcggggattgtggacagtagaaagtgtaagaatgaaagatgacggcaaaaaaccagctaacgagcagtttggtcttcttcaaaatgaagaaaaatga

SEQ ID NO: 79812 - DNA, 345 bp, Citrobacter koseri
atgactaccccgcattctattgcagaattcaacgatccagaagtctccccggcaaataaccgcgttgccaccgtcagttatgcgagccgctacccggattacacccgtattcccgccattaccctgaaaggccagtggctggaagccgccggttttaccaccggcagcaaaatggatatcaaggtgatggcaggctgtattgtgctgacgacaaagcagtcggagcctgaagaaccggcgttattgcagtcgctgcgtcgggtgtgcgagctgtccacgcgtaagcagcagcaggtgcaggagtttatcgacgtaatttcggcgaagcctgccaggcagaaataa

SEQ ID NO: 79813 - DNA, 762 bp, Citrobacter koseri
atgggactggtgaagcgtctgaaagcggcttatgatgtttgctgcggcagcgaggcgctgtcacaggacgtcacgcagatgaacgcccgcgtgcgcgagatgatcgccgaagcactgaaagccgatggcgtggaagagctgtttttccttggcgacaagaaagcggagtcgatcgatattttcgacgacgattatctggcgcgcattaataagatcaaactgccggcgacaaaaattcagctactgcaaaagctgctggaaaaagccatcagcgattttaaaaaagttaaccagcttcaggggagcaacttcacccgtcgttttcagtccattatggataaatataacgagcgccgggaagatgacgtcctcaacggtgaagagttcgatactttcagccaggagatgaccgatattatctacgatattaaaaccgaaatgggcacctgggccgagatggggattgatatcgaagagaaagccttttacgacattctggcacatatgtgcgataagtatcagttcacctatgaggacaacaagatgctggcgctggcgaaagagatgaaggtggtggttgataacacgtcgaagtatccggactggagcaaacgcgatgatattaaggcgaagctggaggtagagctaatcctgctgttgcataaacacaagttcccgccgatggcgaatgacgatgtgtatatgggcgtgctgtcgcaggcagagaattttaaacagcatcacattaatacgctgcattaa

SEQ ID NO: 79814 - DNA, 138 bp, Citrobacter koseri
atgatgaaccgcaccaccaaagagctgacggcggacgatatcgccaccatcgccgatacctaccacgcctggcgcagcacgccggaagacagaacgccgctttatgggactggtgaagcgtctgaaagcggcttatga

SEQ ID NO: 79815 - DNA, 258 bp, Citrobacter koseri
atgctcgagccgttccagggcaaaatttatgacccctgcagcggctcggcggggatgtttgtccagtcggtgaagtttgttgaaagccatcgggggaaaagccgcgatatcgccctgcccggccagctgttctacaccacccagatcccggtgtgcctgtggtttatgaccaagtcgaaggctgccgatccggccaagggctatcgcaaccgtcaggggaaacgctgtttattgatgcgcgtaacctcggcaccatga

SEQ ID NO: 79816 - DNA, 591 bp, Citrobacter koseri
atggccaaagcaccaaccaaaaaagccaaagcaaagaaaggctttgaagacacattatgggataccgcgaaccagcttcgcggcagcgttgaatcctccgagtacaaacacatggtgctgagcctcgtgttcctcaaatttatcagcgataagtttgaaacccgccgtcagaagatgaaagacgaaggccaaggcgatttcctcgagatggaagtcttctatcagcaggacaacatcttctatctgccggaagaggcgcgctggtcgttcatcaaacagcatgccaagcaggatgatattgccgtgcggattgatgccactctctccaccattgagaagcgcaacccgacgctaaaaggcgcgctgccggataactatttcagccatcagaatctggaaaccaagaagctggcgtcgctgatcgacaccattgataacatcgaaacgctggcccacgaaaccgacgtagaagcgctgtcgaaagaagacctggtcggtcgcgtgtacgaatacttcctcggcaagtttgccgccaccgagggcaaggcggcggtgaattctatacgccaaaatgtgtggtcacgctgctga

SEQ ID NO: 79817 - DNA, 1350 bp, Citrobacter koseri
atgtccgatggcaatgcatacaccgtgtttgaatatggctatctggtcagcgatacagacaaagcaaggctctgcgatgcagagcctatacccgcgaccgctttccactggctcgaacaacgatgccagaaagacaaagagagcgacgatcagcggctgctttctctgagaacaatgtccggcgtgaaagtcattcaggtcaaaaattatgttggggtgattgcccttccccataaacgatttattgaagtgctgcctaagacctgcgggcagcaaggtgataaaaacgtcgcccgacagaaattattgatgatgctgaaaacattaaaaacattccgccatgtcatatcctcatctgctggcatcatgacatcacggatgacattgatggatattttcattcagcaatttatttccagcatggaagtcgtcgttcagaaagggcttaaactcgattatctgcgtcagcgggaaaacctcgcctggctaaagggtaaactgcttatcagcgagcaactcaaaaagaacagcgtccgtcgcgatcgtttttttgtggaatatgatgaatatcgcgtggagcgcccagaaaacagattgctcaaaactgcgattgaaaaagtgtacagctatacgaataacccggtactgctgcaatcactcagtcgcctgcgggcacttttcgaacccattcctgaagtacataatgtcgaaaccgctttcaaacaaatccggctggatagacacatggcgtattacaacaatgcgctggagtgggctcggctcattctgacggggcagtcaccgcattgtatgcagggcaatacggaaacactctcgctacttttcccgatggaagccgtctttgaagcattcgtcaccgcctggttgcgtcaacattgccagcctttctggcaggttaaagcgcagtccagatcgcattatcttgtgcatcaagacgcatctcccctgtttcagctcaaaccggatatttggcttattccgggagaggcgtctgacaggccacctgtcatctgtgatatgaaatggaagctcatcaaaacggataaagcgcaatacaacctgtcgcaaagtgatttgtaccagatgctggcctatggggtgaatcatctccaaggggaaggcgatatggtgctcatttatccaaaacatgaggggttttctgccccactggaaagcccgtttgagtatcgccactccggcggtaaaatactgcgattgtgggttgttccctttgaaacagggacccatctgctgaattcccgcttactcatgccagcgaagttaagtctcacagaaagcggaaattcaccgcttttatcgttacaatag

SEQ ID NO: 79818 - DNA, 2064 bp, Citrobacter koseri
atggtagaggatctgcagtctttagcgcctttctttcggctgtttgcacaaaagaataatgattacaacagtgaatgggggccgggatatcgggaaattaccgcaagagtacaacgcgaaaaacctgattttaccgatcaaaccattcaggatctttggtatacccgcgacaacaaggtcgccagcctgcgccagggcggtatgtcccacgaagaatttgttcatgccaaagatgatcttcacgaactcactaaactgattgcctctggttgtactcttgaagtgtttgagcaagcccaccaacgtttacagaccctaaaagagcaaggcaaactgaagaaattttatcgtgcgctttgcagtcgcacctttgcagccctctacccctcgcaagttaccagcattatcaatgaaggcgttttctttcgggtttataactactgtaacaaccgtttccagctcgggctaccagaagatggagaatggtcgccgctgaagtggattaaattaaacctgttactgaaagccgtcttcgcccagacactggataacgctcccgatgatatcgaactcaacatgtccctttggcatttgtacgaaacggaaatagaagataacaataacggtgtaaccgaactcgttccatcagcaacagatgaagagcaagattcttcacctgacgatatactcccccccagaaacctgattctgtacggcccacccggaacgggaaaaacctacaaaactattgaaatcgccgtacgtgcctgtgaaccagaagcttttacacggttagatgggaaagaaaagtcggagcgccgaagagaattaaaaaaaatctacgatgcgcttgtagagaaaaagagagttcgatttatcacattccatcagagttttggctacgaagaatttatagaaggattgcgagcagaaaccagcgatgatggaagcattcgctataacgtcaaaccaggtgtatttaaacaaatatgtgaagatgcaacctttggtgatgctaccgtacaattagcgctggatgacgcaatagagcagctcaaagcacaatgcgctgagcaagatggcatcacgttgaaaacaaccaacggcagtttgtttcgcgtgacttatgccaacaacaacacattccgcgtattcccggcacagtcgaaaaatgaccaattagatcgtgggtatcccgcctcgattgaaaatattcgtcgtctgtatcaaggagaaaaagagaatatctataatatctcttacgtccgcggcattttgaaccatcttctccagacatggcatctcccagcctcaccagaagtatcatcacctaagaaaagacaaaactatgtcttaattattgacgaaattaaccgtggcaacatttctaaaatatttggtgagctaattactctgattgaaacctcaaagcgtgcgggtgagaacgaggcactgagcatcagcctcccatattctcccaaaccgttctcggttcccaataatctcttcctgattggcacaatgaacacagcggaccgctccctcacggcgctggatactgcgcttcgccgccgatttgagttcgaagcactcatgcctgatatctcagtgttaaacgacacagaggttcaaggcattgatatcaaagcactactgtctacgttaaatgcccgaatccaagcactctatgacagcgaacatacgctgggacatgcattttttatccctgttgttctggaaaaagatgattctgcagaagcatttaagaaattgaagcgcgtcatgaagaataaagtgctcccgctactagaagaatatttctataacgactggcaaaaaattcgtctggtccttggcgataaccaaaaaacagacgaagcactgcgttttgttcgctcagtggaaaaccagaatgatttagccacattgtttggccaaaccgcgatagatgatttacaggaggctggcgtaaattatcagttatgcaaagacagcgataacgtctgggataaccctctggcataccggcaaatctatgatgctcaggccagagcaacggagtaa

SEQ ID NO: 79819 - DNA, 393 bp, Citrobacter koseri
atgcgcgattttagctctggtgatattaatggagatgtgaccattaatgatcattcgaatcaaacaaattataagctattgattcattgtgataatgaagagcttctggcagaagaagtgcaccgaataaaagtcttacgaaaggagcgcagaaggaaatcgagggtattgtttaaaatgctctccgggtgcgggctgttgttactatttgcagggggatggtacttgtttcaagggcaattagacatggtttcggcattgagcgggttaggtggggtaatttttacttttgccacattatctggtgcagataccccaaatgccttcgagaaaagacaaatagatgctcttgatgaaattaacactcttttgagagaaagagatgccagatag

SEQ ID NO: 79820 - DNA, 819 bp, Citrobacter koseri
atgtatggtatttactttaatataaataaaataataaaaggtgataatatgattaaagaaatggaagttgacttggatttaggcttaaaccctttttgctttgagacagaactaaagattgagacaagaaagaaaaatctgactgtttcaaggggaacggaacttatcgaaagaaaagatgccagtcgaagctattttgctaatattgtgcatacacaagaggttgataaagaagagttcatcaaactctatacctcacaaataaaatcctactttgatctcacgaaaacagcatacaaagtattttttatctttttacgtatttatcaggatgcgataggtaaagatcatttctacctgagctgtaaaaaggcaatgtcccttgcggaaaagatagatcattttgtcttatcggaatctattttttaccgggggataaaggaactcatcgagaaacgcattattgctaaaactaatgagaaaaactggtatttcataaatcctgcgattgttttcaacggtgatcgtgctcgctttgtttcagagatcagaaaaaagaaagagaaaattgacattgaacaggttgaaagcattattgatagcggaggagactatactaaaaatgaagataagcgtaggtctattgagtcagtcattgaaaatgtaaacaacaaagaagatatcgatgtattaatcgccagattacaagctaaaaagtcgcagggattcgcaaagtgcgaaagtataaaagtaagcacctcttatgaaaacataagcttagtgccaccagaagaaccactagattgggataacatctaa

SEQ ID NO: 79821 - DNA, 240 bp, Citrobacter koseri
atgattgatgagttccacgttatgtttatgtataaaaaaatccaagctgaagccgctactactgatatcaaaacactgaatcagcttttgaagaagttccgaaaagtggtagaggagcggcgtgaggagtattatcaggagattggtgaaaagaaggtgcgtaatctgaggatgaagaggctcctcaagttgatggcgcgagatggtatttcaccacaggaactatgtgactggcagtag

SEQ ID NO: 79822 - DNA, 303 bp, Citrobacter koseri
atgtctaaaaataataaagttaaaaacaaatctacaaaactgttccttgatcttgctaaaaaatcgtttgaggcaagttggatcagtttacaaaatgatcacgatggggatataagagagtatattagtgatcatgattttatgagtgcaactatcatgtgcgtgattatgcatattaaagataactttgagagtttaacacagaaagaaggaaataatggaaatgttgacgaggttgatcttaagggaatcgctaatctgctggtgaggcattcgtatttatttgttcacaaatctttgtag

SEQ ID NO: 79823 - DNA, 285 bp, Citrobacter koseri
atgaataagaaaaataatggttttgataggatcgctactgagatgtttctactatcagctatgaaagagtattaccgtatctattgggatatagtcaaaaaagggcccaaagaggcatttaatttacttactgataatcatcatatggaaacagtctatgaccaagtaatcgaacgagctaaaaagggggtagccaaaaataagcgctatcttatcgatttcgaaggggtgagaatggaggtaatgacgctgcataccaaagcattagtgttagcctatatgtaa

SEQ ID NO: 79824 - DNA, 201 bp, Citrobacter koseri
atgacaacaagaagacttattcgcctgccggaagtgatgaataaaacaggatatagcaaagcatggatttatcgacttattagcagaggcgtattcccagaaccgataaagattggaataagagccagagcttttgttgaaagtgaaatcgatgaatggattgaaaatattattcagttttcacgtaaacacgctgattaa

SEQ ID NO: 79825 - DNA, 1215 bp, Citrobacter koseri
atgaagctcaatgccagacaggtcgagactgccaagcccaaagagaaaccctacaagatggctgatggtggtggcctctacttattggtgaaaaccaacgggtcacgctactggcgtttaaagtatcgtatcgatggaaaggaaaagttattggcgctgggggtatatcccgatgtgtccttggctgatgccagagcaaaacgtgatgaagctcgaaagggtatcgctgggggtatcgatcctttggaggctaaaaaagaacaaaaagttgagcgtgaagcgcaggtcaaaaacacctttcaagaaattgcgctcgaatggcacagcatgaaagtgaagaaatggtctgcgggatatgcctctgacattcttgaagccttcaacaaagacgtcttcccgttcattggtcaacgcccaatcgcagacattaagccgctggaattgctgaacgtgctgaaaaagatggaagacaggggagcgaccgagaaagccaagaaagtacgtcaacgctgcggcgaagtgtttcgctatgccattgtgacaggcagggctgagtataatcccgcgccagatctcaccagtgccatgcaggggcatgaatctacacattacccattcctgaccaccgaagagcttcctgccttctttaaagcccttacgggctactctggtagtgaattgatggtgctggcagcaagattgctgatcattaccggcctgagaacaggggaattgcgcggtgcgttatggtcagaaatcgataccaagaaagcgctatgggaaatttctgctgaacgcatgaaaatgcgtcgtccccatatcatcccgctctctacccaagcgttagccattatcgaacagatcagagcaatgacggggcaatttcctttactgtttccgggacgcaatgatccaagtaagaccatgagtgaagccagtatcaatcaggtgtttaagcgaattggctatacaggccgggttacgggtcatggtttccgtcataccatgagcaccgttcttcatgaacagggctataacaccgcatggattgaaacccaactggcgcatgtggataagaatgctatccgtggcacctacaaccatgcgcaatatctcgatggcagacgtgagatgctgcaatggtatgccgactacatggcaagccttgagaaaggcggcaatgtggtgcagggagcgtttaatcgacgtgggtaa

SEQ ID NO: 79826 - DNA, 1395 bp, Citrobacter koseri
atggcgatttttcatctggagtttaaaattgtgaagcgctcggagggcatgtcttcctgtaggaaagctgcttatcatgcgcgttgcagaataacagatgatcgcactggcaatacctacgactttagccccagaacagatttattctatcatcagatattagcccctgattctgctccttctcatattatcgaaagctcaaccaccctgtggaatgaagttgaaagggttgagcgtcagaaagatggtcaaacagcacgctattttgatgttgctattccctgtgagcttagcaatgaagacaagataaaattagtagccgaatactgtcagaagaatttcgttgataaaggcatgattgctgatattgcttttcatgatctcaatggtggaaatccccatgctcatgtgatgttgacattaaaaccgatcacggctgatggcttttgcaaaaaagaaagaagctggaacgacaagaaaaacgtaatcctttggcgtgaatcatggtctgtgattgccaatcgctatcttgccgctgctggcagtaatgaacgtattgatcatcgctctattgatgctcaacaagccgaagcactcgaaaatgccactattaccttggatgttgaagaaaaagcgctatggattgccaaagctacgttaaccagccgtccaccaatgcagcgtgttcatcgtgccaagtggaacagtaagagtgttcaggaaaagcgtgctgctgaacaggctgttcgtgatgagatgaaacaagaagctcaggccacatacaacaccttcaaagatttagatctgcagatcgttgttgaccttagaagcttcaccgtatcagaaatgcctgagcctgttgaaatcgtattgcctgaaacaggttcgcagtcgtcatcatccgaagagcaacagcctgttctggttgcccctacacctcatacacgcactacactgaaaaccccatcctctacaactgccagagcggttaaacgcgctcctgttaaaagtaagagaaagcaggttaaacctcctcaagatggtttgttcaagcgtttcaccctactggtggttgaatatataagggagaaattcgtctgggccaagaagaaaccagccccggtttctgttgaagctgatcatgataagcgcattgctgaaaaatatgtgtttgatgaggtacaaggcatctatgtaccacgcgctgagcatgagagacgtgctagatttaacagtgacacttatagtccaacaccagatgagatcaggcgttttccaagtcgcgcaaccaaagacgaagtaccggacgcagattttaaccacacaccaactcttcgtacggacaataaaaatgccttaccaaagctaaaaccatctcgatttgatagaggctga

SEQ ID NO: 79827 - DNA, 657 bp, Citrobacter koseri
atgaactctatctatggggtgcttatcattggtctgctgatgaacataccatcattggcacctgtgctgtttctcgggaatagacataaacaggtgaaggtttcgatgacggtcagactttacctgcttaacactttcttggtgctgtcgctgatgacgttatcgcaaaatactacgcaaaaatacgggttgttccctgtatggcttgtgtttgccaccgttggactatttgtggtcatgctggtgccaactgtaaaatttctgcgtaagcatttaaccgtaggtaaaagccgtgcggttatcctttcatcattcttgattgtctacgcgatcagatttcacggcgtgttttcagttgggaatgatagtgaatatacgcttaacggattcaatgtggtgtggacatttttcttcttgtttgcctgcctgctggcttatctaagttgtgctggaagtaaaacatactccggttcttctgcgtcgtcatctgcaccacaatccgattattttaaacctactaaagaatatgaaacacaatctcaaattgattacgatattgctgtgaaggggcggagtgtgctgtctgatcctaatctgagtattgttgagcaacagtgctatagagatagtgttgaaaaaagatataccgataattga

SEQ ID NO: 79828 - DNA, 510 bp, Citrobacter koseri
atgctattgaaaatagctgtatggcctcaaggaaatgatcgtttctcaattaaccctacatataaaggaaatggagtaaaacctataaaacaagaatgtatggctcacttgtatagcaaggggtggttcttagagcaaagactaaagatttcctctgaaagtaatgctggtccgattgatgctgtatatcccattacagatcatctttattttgctgtggaatgggaaactggaaacatatcttcatcacacagagcattaaataaaatttgtttaggaatattaaatggttcactactcgaaggaacattaattttaccttctcgtgaaatgtatccttttctaactgatcggataggaaattatcaagaactatcaccttattttaatgtttggagaaattttaatatagccaatggctacttatcagtcatagaagtagaacatgacgaggaagatgtcaatgctcctttaatacctaagggcacagatggacgagcaaaattttag

SEQ ID NO: 79829 - DNA, 489 bp, Citrobacter koseri
atgttttatgggatgtatgtagatagattatgctttagtataccagaacttaatgacatagaacatttattcgatattgagaaggtaaattatcactataaaattggtatcgaatttgaaacaggaaatgttgctagttcttttagagccatcaacaaactaaacaacctcttccacgatggtcatattgacggaggttgcttcattacaagtattgataagagaaactcagccactagaatttggcccgtatcaaatagaaatggttcatttcaagaactaaaaaatagagcctacatatctcaaatatccttaccactaatttgcattggttttgcacctgatgaattttcacaaacggccccatttttaggagcaaatggtgaactttacgaattagagaatacatatcgaagagatcttgaaactaattttgaaatattcactaaacatgatggattagaatttctaaaggcaccattcaagtaa

SEQ ID NO: 79830 - DNA, 408 bp, Citrobacter koseri
atggcaaagcatttaagtagaagagatatcgattatattctttattcaatcaccgagtggaacatgaaaggcgacaagctaacttgggacaacttatgcaaaaaagtatcaagaaagatcgggaaaaccccaacaaggcaatccttatatacacacaaagaaatcgtaaatttatacatggctaaaaagaaggctatcaggcagaaagttgatctcgttgaaaaaccatccagcattaaaaaagcctacgaaaagatcgataaattagaaatcaaagttgcagaactgtctaacctgaacaatatactgcaagagaatatagctaagcttcagtactcttgctgtctcttatacacatctccgagcccacgagacgtagaggaatctcgtatgccgtcttctgcttga

SEQ ID NO: 79831 - DNA, 429 bp, Citrobacter koseri
atgttattttatcctaaattaataaaatactataaaagtgaatgcaatcatgaatatgagaatgttaagaggaaatttctaaattcaattttgatcactagtatattaatcagcgttgtgctactaatttgcgttccaatgatatctaaaatgacgggtaaaaatgatttcctaaattcaatatctttattctatattatgcttttggggtccgttttatactgtatttcattagtctatcacttcgatttgtatgctagaaacttggataaattcattataaaaacgagtgttgtggcatttggtatttcattcttattaatgattttcttgggttatttattttcagctacggggatagctattagccaattaattggaattatcattttgttgttcgggaagtatagatacagtaagttaggatga

SEQ ID NO: 79832 - DNA, 981 bp, Citrobacter koseri
atgttgaatataatttttgtttcaggcgtcataaatgaaagtcacttggtttatgttgcgtcctatatagagaaaatcaaagttcaatataacttaaattttaagatttactatgaagataatttcaggtttttatctgatcagaaaattgatacctcgatagtggagaaatggttaggacaagtcacttacattaaacatggcagttgcgtaaggactggtttcagatgtcgaatcatacatttatttattggttcggtaggtattaaacctattattcaaatgcgcctgagaaatctattttcaaagataactaatgttgtaattgatgaaggtatcggttctgtatcagatattaatacgatgaaaaacgtatatgtacgtgaacgcaatttgtctcaattacaagcttatctttatgcatttatatatctttacgttaaaagaggatttttggcaaaaaatatttggaggttgtttaatggaattactccaaatgaaaaactaatgcattttatcaagaaaaaatgtgaacctctcaaagtagaaaatagttcctatgtgttgctgttaactcaaccttgggtaaaattgggggtattaactgaacgcgaatatcacgattatgttttagacttaatcaaacatgttacagacgcaaatcttaaattagttgtaaaaccgcatccttccgaagacatttttctttacgaaagtcttaaacttaacttgataagatgcaaaactccaatcgagttatgttttgatcatgtatattgcaagtcagttattggatttaatagtacctctctgatcttgttaaatgctatttataacgtaccaacttataggttacgttatggaaaactagaggatattgtaacgttttcgcctcagcaggaatctttattcaacaaatattcaagtaatccaatgagttttgttgaaattagtaaaatacttaatgcgagcgaacagtaa

SEQ ID NO: 79833 - DNA, 1350 bp, Citrobacter koseri
atgcttatttttttatatgtatcttgttccttttttatatggtgcatgagtatattaggtatcgattcttgggccttaaatataatctttgtaatactatggattattacaatactctcatatatgaaaaataaaagtaaggagagtgtgcttaatataataatgatttatattatgtccatggggctggtatgttgtgttgttgttgaaagtggtgcatatctctctgaagtaagaatgttcggaacattgactggagcaacgatacgcgtaggatttacagcgttagcttttttgctaagcgcaattttatgcaccagggttctaagtggttatttgcagccagtgaacgcaatggacaagcgtgtgaattggtctatcaatacacttatgcaaataattatacttagttcattcgctggactgttatatgtgtacattacttacggtacacccaattctaatagtgttgatcgatttgtttattgggataatattgctcctgcatggggtagatatctacagtttatgttgcttcagttttcatttcttcttggtataaaatttatagaatctaaaagtaagaaattccttattttgctcattgcctcaatattaatgcagtttattggtggtgagaaattcacaggaccatccttatccatattgttttttttgatccccgtattgtatagtttaaaacaaaacatcatctcggtgtttcttcgtcctcaattttttttattaactctaatagttattgcgatttttgtgctttcaacatatttaagttatgcagcaatatatggaaatccctcggaaggactacgctatttgctggagagaattgcattgcaagcacaagtttggtgggctgtagattctgtttcagacacaataaatccacaactgaatttatcttggttgcttaaaaatggttttggtgtggggctaagtgaaggtaatatgatatttggcatgtattatcttatgcaacaaatcacaccatcggacgttttttcgcgtttcgttgaaaatggggttcgatttacaatgggggctccagttaattataattattttttcggaactgttcttgggccttttgcagcaatattatttggttttgttgctggctttggtgcatggctaatgcgtaatgcaatagtaatgaaggatcttttcttcgcttttatagtcgttaaatattactattacataatacaaatttgcattatgtctgactggtattatttctttactgctaaatttgctatattcacactatttattgttttttattcgttagttttgcaaaggatcattataaagaaatgggaaagtgtataa

SEQ ID NO: 79834 - DNA, 984 bp, Citrobacter koseri
atgggaaagtgtataaagtattctattatagttcctatttacaatgttgagttattccttaaggattgcttggattctataaaaaattcaatgactgatgactgtgaatgtatattagttaatgatggatccactgatagttcaggtatgatcgcagaaaaatattgtgcttctaatgagcgtttccattattatgctaaggataatggagggttatcggatgctagaaactttggtttgcattttgcgacaggtgtatatgttctttttgttgattctgatgatatagttagccctgttttaataaaggctgttgatcaggccctaaaaaataataatgcagatgttgtttattataattatttgaaattttattcagaaagtgtgattgatttgttcaccaaaaaggggagggagtttcatattcgatactccggaaaggaagagctttcacaaaaacctaacttcgcatgggctcgtgtagccaagcgttctgtttattttgagaatcatttccctgttggcgtaatatatgaagatgtttatacatctccttatattactcaaaatgcaaatgtggtagggtttattgatactccattatatggctatagaaaacgtgctggttctattacgaccacatccgcagaaaaacagtttcagttattcgaaactgtaaaattgttgaaaaataggcaagaatctaaagaattggattttaaattttattctactgcattagtaaatctatctcagtcatgccttgtgagtttggttcgtattgaagatacgacgactcgttctttttatagaaaaaaaatcaaagatgaatataggaacttatcctgtagtcaaatactaaatagttattcaaagctaaaattcaaatgtctttctttggtgtcaaaaagtacgattggtttatatcttttggaaaaaattttgaggccagttgttttattttcagataaaaggaatcactga

SEQ ID NO: 79835 - DNA, 132 bp, Citrobacter koseri
atggttaatcgtggcgtccgttttgacgcaacacagtctgacgtaagtgaacagtctgctatgagcgagaagcggaagttcgccgttgttctcataactgataaagacattacttacatttctgtgtcttaa

SEQ ID NO: 79836 - DNA, 270 bp, Citrobacter koseri
gtggaagatatactttttatgatgagctggattaaaggtcatcatgtggtgtcattaacttttggagtcttatccgcaattttatggattaaatctgccacagcaaaagttgagctaggcaaaaaaattgtcatggtcacatatgaagatcccgaacttaatgtaaatctccatgatttcttcgccactgcgcggcttcaatctaagtacaattcatttgcggcattgtctgcggctgcaacagcgctattccagattcttggtttgtaa

SEQ ID NO: 79837 - DNA, 339 bp, Citrobacter koseri
atgtcagcgaacgaactggcattgagattcagcacagcacctgcagagcaactgattagtgttttgcctgtccacgaagtcaaagaagccctgcgtgatgaagtggaagatgacgttctgggcgaggcctggacagaacataactttgaaatggaagcgattggggaacagctcgatgagactgctcaattggccagaaaatttgaactggctgccgaagcatttgccaccgcaatcaaactggcgctgacgcttccacacagtgaggcaacccctgttttgcagaataccctcagagataatcccggttacggtcgcgaaccgactaaggatgcgtaa

SEQ ID NO: 79838 - DNA, 141 bp, Citrobacter koseri
atgattgatttcgcacgcaagccagcacggcagcaggccgttctgcttaaccgtattgaagtaataatccgccttatctgttacaccctggctcagaaaggtgacccgtctgtagaccaacagaccgcatcacgcccgtaa

SEQ ID NO: 79839 - DNA, 384 bp, Citrobacter koseri
atgagacagaatgaagagtttgataaccaactagttgctcgcttagaagagatcactcaaagaggcatcagcaaggctgagatggccagaatcgcaggggtcacaccccaagcggttaacgggtggtttaagaagggagtgataagcaagaagtctgcaatagctattgcggccgccgctaacgtgtctgtaacttggttattgggtgaaaaagttgctgaggattcaggtctaaaacctaatgagactaaaatgcttaacctcttcaggcagcttccagagtcggagcaggaaaaaatgatagatctctttgctcttcggcttaaagaaatcgacgaatatgttgagaagtatttacgcggacgatttaaatcaaacgattag

SEQ ID NO: 79840 - DNA, 222 bp, Citrobacter koseri
atgacggctcttgataacgcaattcgaattgcaggctccgccaacaaattagcctttgcaataggtgtcagcggtatggctgtaagccagtggaaaagtaaaggctcggtaccttcatcgcgagttttgcagatctacaacgttactggaattactccgcatgaactccgcccagatctctatccaaacccaactgacgggatacctctacagggagcttaa

SEQ ID NO: 79841 - DNA, 360 bp, Citrobacter koseri
atgaccactattaccagagaacggcttgagcagttagcaaacttcaggggcgcatccgtaactcgtcaggaagagcaagaactggcgcgtatcgcgctggcatcgcttgacgctggcagcaacagccacccggcgcacggtcctgtatcactcgatcgcctgcaccgcattcgtgaaatcttgggcaaagccgcagcacaaagtggcggcggtaatctcggttacgcaatgtctgatgctgtgaaagcgattgatgaactgctggaagtgcggaatgcgaagcctgtggcgattcagttgcggatacctgttcaccgtgaacccaattacgcctcacgcagaccctcgcagggtgattaa

SEQ ID NO: 79842 - DNA, 264 bp, Citrobacter koseri
atgatgttccgctttgatatgcaggcgcggctcaccgtttttcggctccggccattggcgcgccatgttcaccttcagtttttcttccatcgctgctgtgatttcaccgtcacagataccggcacggtgctgcacgtcccacagcaggaactgcatgtcagcccattcacccaagtctctaacatcatcggctgcctccagcgcttctttagaaagatgtttcaatggcccaatcgggccaacatcgccgaacgtagcctgtga

SEQ ID NO: 79843 - DNA, 219 bp, Citrobacter koseri
atggctacactgttaacccctgcgatcgatacgatggcgatgggaaatccgacagaacgcttgcgcagagccttgtcacgtaacaaagggcgttataccattaataaaaatgggtatatctcgcttaaccttgacaatgttgcggtccaagacgcaatcgcaactcaaattcataacttaagcggtattgccgaggacaaggacactaaagaaggctaa

SEQ ID NO: 79844 - DNA, 801 bp, Citrobacter koseri
atgaatacattgcagatagctgtaatactgatgtgcggttacatatacgtaaccaactccttatctgatagatataaatttaagcgttcctctggttgggacgcttatttttttgtcgcggtatgggggattattttcgtcgttgcggcttggctgggttgctcgttgatgagctttcttggcttttttcgttggttgtccaatttcttggatatcactccccagaaaattgctcgaatgtttcctgtcactaatggtgacgagtctatcaacttcagggatctgaagctctttgtttgggcttttacatcgatcaccctggctacgcttgcgggcctagtgaagcgttggtggctcaccaatcctgacaggcacatatctgtattagcaaggataaccagcactaatgcccttgaggcaatgcttatggaggcttctgtaagccagtttccagtgcttgtttcactaaaatcaaaaaaagtatatgtagggattgttagctgcccagcttttgaacatggcgattatgaggtcgtggaattacttccattattgagtggctacagagataaagacacattgcaagttaggttcacatctaactatcaatcgcattatataagacaaggcattggtatcgttggaactatgagcaggctgacattagatgatttcagaacgctacttccaaagcgagaaattgataatgtatcgttctttgacattgaaacgtataagaaatttcaagaatttgagaataatgacccgcctggaggtggttcgaccaagaaagaaagctaa

SEQ ID NO: 79845 - DNA, 213 bp, Citrobacter koseri
atgtctaacaaattgactggttcagtaaaatggtttaatgagtccaaaggatttgggttcatcaccccggataacggtagcaaggacgtgtttgtccacttttctgccattcagagtaatggctttaagaccctgaatgaaggtcagaaagtagaatttaccgttcaggatggtcaaaaaggaccttctgctggcaacgtttttgcggtttaa

SEQ ID NO: 79846 - DNA, 936 bp, Citrobacter koseri
atggcaacgtataaatattataatattcagatgcttcctctaaccaaaaaacaaaaggcgattggagcagctggatatacagcattattcaaaaatcttagtgaaaaacttcaagatgttttattgtcccaaggtgaccttagaagcattgcggttccgttgaggaacgattttttcttttctccatatgagatcaatgtcagggacgacatggtttatggtaagtttctcaaatttgacaaagtcgatgtagtaagaaaaaccattagtagggttcaaacttatgctgcgggttttggtgagtcgagtaaaatttatgagtacagatttgtatttgatcctgtaatacatatcctcgcgattgaagacagcccgtcattacctagtgcaaatgtactgtttgtcgtctttaatgagttatttaaagagtccagaagaaaactgtacagaaattatcgaatgtctgttgatgaattaacctcatctgccagtctcgataaggttttaaaagaatccaaaggatattactctttccgttcagaaattacattctcgaactcaaatgactttttggatggtttagaggagttattagaaaacgtggaagctgaaatgaaagacaaaggaattgacaagttagagcatagggagtcggcggacaaagattcaataatgagtgatgtaagtacaaatgctctaatttatgcgggactatcgtgtaagtttggcaatactgaaatatcatacaaagataaaagcaataagaagaaagtatttaaaatggctgattttcctgtaaaaattcgcattagcgaatcaatgaaaaaaagagagtcagtattggattattattatgatataaagaattcaataaacttagccaataacaatgccagggccggaagtggtattctgaaaaaaataagaaaaggttaa

SEQ ID NO: 79847 - DNA, 624 bp, Citrobacter koseri
atgaaagttggtaaatgggagttaaaccaagagaatatacttaaagttattaagtgtattccttttattggtgcaatttttaatgtagccaacttttatgctaactccggtgttttgtcaaaaagaaaacaagttgctgcctttgctgactggtggagaagaatacttgctggtgttctttttacttttgtccttagtttgagtatagtcgtattctttaatgatgggcttttcaatcctataaaaaacacaactggtcttgatgcgccttcggtagcattgtcaatatttcctagtatacttggatttggaatcggtgtatttgtggtcgtttttgcactgccgaatcaatttatagaaaaaataaatcttataaaagttaatgggataaatagaactttcggtgcgtctttgatggttgttgatatggcatatcccttgatggtgtacgcgatgattttgatgggggaatttatactcaaacttttccaaataaatttgtttacccaagttttaagtgtttttcttttattatatgggatgttgatgacatttgatttaattagtctggtttttatgacagcctacgctctgctggccgcgcaggcatctaaaaagacgtaa

SEQ ID NO: 79848 - DNA, 138 bp, Citrobacter koseri
atgccttatgcaatcgataattattatcatttcaatgggtcctcctggcggggtggcctgccacggggcggcgggcgcgcggaaaacggctggtttttgcgatcctgggtcatcatcatcatttgcgcaggtctttga

SEQ ID NO: 79849 - DNA, 489 bp, Citrobacter koseri
atggaccaggaaatagcctctcttaaactgaatattaatcaactggcaggtatcactggcgtacatcgacaaactgtcgcagcacggctaaaaaatattgaacctgcacccggcagcaacagcaaattaaagctctatctcatcactgatattttgaccgaactgatgatccccacggtttccgccagtatcgatgatatgcagccgtctgaccgactggcgcactggaaagcggaaaacgagcggatcaagttcgaacaggaaaccgggcaacttatcccggcagatgaggtggcgcgggaattttctctgatggcaaaggccgtcgtcatggtacttgaaacccttcctgatgtacttgaacgcgactgcgcgctctctcccgcagcagttacccgcgttcagagcgttattgatgatctacgtgaccagatggcgcagaaggtactggaagccgaaacagaggaggatgagccagaggaggactga

SEQ ID NO: 79850 - DNA, 2109 bp, Citrobacter koseri
atggcaaagcgagcatcagccagggggattcgtcgtgatgtgtccggcatcttacgtgctccgcgacgcatgctggtggccgatgcggtaaaagattatatgcgggtgccgatgggtgcgggaaactctgttccgtgggacccgaatcttgcaccttatgtcattgagccgatgaactgtcttgcatcgcgtgaatatgatgcagttgtatttgttggcccggcacgaaccgggaaaaccattggccttattgacgggtggattgtttacaacgtcgtgtgtgatccggcggatatgctggttattcaggtttcagaggaaaaagctcgcgagcactctaaaaagcgcttggatcgcacatttcgttgtagccctgaggttaaatcccgcctcagcccccggcgcaatgataacaacgtatatgaccgtacatttcgcgcaggtaactatctgaagctgggctggccttcagtcaatatcatgtcgtcctctgactataaaagcgtggcgctgaccgactatgaccgttttccagaggacattgacggagaaggtgacgccttttcgcttggttcaaagcgaaccactacgtttatgtcatccggtatgacgctggtggaaagttcgcccggcagagatatcaaggatactaaatggcgtcgcagcacaccgcatgaagcaccgccgacaacaggtattctgtcactgtataaccggggtgatcgccggcgcctttactggccatgtccgcattgcggggaatattttcagccagaaatggacaatatgaccggttatcgcgacagcaaggacccggttctggcgggtgaggctgcatttcttcagtgtccggcctgtaaaggcaaaatcactgcggatatgaagcgcgctctgaatatgaagtgtgtctggctgcgcgacgggcagaagattgaccgtcacggaaatatcagcggagaagggcgccgctcacgcatcgcgtcgttctggatggaaggcccggcagcggcctatcagacgtgggcacagcttatctataaattccttactgctgagcaggagtatgaagccacccgtagcgaggaaacgctcaaaacggtggtaaatactgactttgggcggccatatctgccacgcgccagtatggagcagcgtaaaagcgaattgcttgaacagcgagcggaaaatatcctgaaacgatcagtgccggatggtgtcgagttccttacggcaacggtcgatgtgcaggcgggcagaaaccgacgttttgtggtgcaggtcacggggtacggcagtatgggggagcgatggctggtggatcgctacaacattcgtcagtcgcttcgctgtaatggaaatggcgaaagtctccagatagaccctgcaagttaccctgaggactgggaccttttgctgactgatgttttccataaaacctggccgctggcttccgatccggcgaaaggcatgcgtctgatggcgatggctgttgactccggtggtgaggatggcgtcaccgataacgcctataaattctggcgcaggtgcaggcgtgatggtctcggtaaacgcgtttatctcttcaaaggggacagtgcgcggcgcgcgaaacttatcacccggacatacccggacaatacaggccgttcaacccgccgggcgaaggccgcaggggatgtaccactctttcttctccagaccgattcccttaaagaccggattaataacgccctgtggcgtgaatcgccggggccgggctatgtgcattttccggcatggctggggagctggttctatgacgaactgacctatgaggagcgttctgttgatgggaaatggacgaaacccggccgcggagccaacgaagcattcgacctgctggtgtatgccgatgcgctggcgatcctccacggttacgaaaagatcaaatggccggatgcaccagaatgggctcggcgggaaacgtggcttgaaagtacggagacggaagctggcgaaacgccacccccgccgccagtaccgacagccagacagaagacgaggcgcaaaaaatccgcagacaagcaggttaatccctggaccagttcaacctcaggaggatggatatga

SEQ ID NO: 79851 - DNA, 216 bp, Citrobacter koseri
atgacgagaagcgaaatagaaaccatgatccagcgatacgccgatgcggaaattgcagtgctggcgggtaagtccatcacctttaacggccagcagatgtcatatgaaaatctgtctgaaatccgtaaaggacgacaggaatgggagcgccgccttactgctcttaacaatcagcgccgggggcgccccggctaccgactggcgaggtttcaatga

SEQ ID NO: 79852 - DNA, 1500 bp, Citrobacter koseri
atgagcctgttagatgatgcgattggtgttttttcgccaggctggaaagcggccagactacgggcaagggcgatgatacgggcatatgaggcggttaaacccaccaggacacataaagcccgtcgtgaaaaccgttctgcggatcagctcagccaggctggggcggtttcattacgtgaacaggcgcgctggctcgataacaaccacgatctggtgattggtgtattcgacaaactggaagagagggttgtgggcaaacaggggatcattgttgaaccacatccgaagctgactaacgggaagatagccaaaaaactggcgacagagattcgccgtaaatttggcgagtggtctgtcagaccagaagtgacaactcagtttacccggccaatgctggagcgcctgatgctgaggacatggcttcgggatggtgaggtgtttgcacaacttgttcagggtacaggaaacggcctggttccttcagcccgcattcctttctggctggaagcgctggagcctgattttgtgcccatgaccagcgatgagtcgaaaaaactcaaccagggcgtgttcctggataactggggacgtcctaaaaaatatcaggtttataaaagccttccggtttctgggcggcagcccgacactaaagaaattgatgcagaaaacatgctgcatcttaaatttacccggcgtcttcaccagacccgcggtgtttcccttttatctggtgttctgatgcgcctgagcgcactgaaagaatacgaggattcggaactcaccgccgcccgtatcgcggctgcgctggggatgtacatcaaaaagggggacgggcagagttttgagccggattctgtcaacgacgatcgcgaactgatgattgagccgggcatgctgtatgacgatctgcaggcgggcgaagaaatagggatgattaagtctgatcggccaaaccctaacctcgaaacattccgcaacgggcaactgagggcagtggctgccgggagccgtctcagtttctccagcaccgcgcgtaattataacggtacttacagcgcccagagacaggagcttgtcgaatcaaccgacggttatctcattcttcaggactggtttatcggctcagttacgcgcccgatgtatcgcgcatggctgaaaatggcgatagcgtccggtgagatcaagccaccacgggggatcgatatggataccctttatagtgcggtttattcaggaccggttatgccgtggatagatccggttaaagaagctaacgcatggaaaacccagattcgtggtggtgcggctaccgagtctgactgggtacgcgccagtggccgtaatcctgatgatgtgaaatcgcggcgcaaggccgaaatagacgaaaaccgtgaacaggggctggtgtttgacactgaccccgcgaatgataaaggaggcaccagtgccgaagtcaacgaaccgggcgcgccatcgtccgagagccagcgcaaaaagtaa

SEQ ID NO: 79853 - DNA, 2019 bp, Citrobacter koseri
gtgccgaagtcaacgaaccgggcgcgccatcgtccgagagccagcgcaaaaagtaattcctggtttcgcatgcaggccagtaacgataacgccgcagatatttatatctatgacgaaattggctactggggggtgacagcgcgccagttcgtcaatgagctgaaaacgctgggcgatgtaacccacattaatctctacattaactcgccgggtggcgatgtctttgatggcatcgccatttttaatgccctgaaacaccacggcgcggcaatcaccgtttatatcgatggactggcggcgtcaatggcttctgttatcgctatggtgggaaatccggtcattatgccggaaaacaccatgatgatgatccataaaccctggggctttgctggtggtgatgccaacgacatgcgcgactatgccgatttgctggataaggttgaatccgtccttattccggcctatgcggaaaaaacgggcaaatcaaccgaagaaattgcggcaatgctggaggacgaaacttggatggacggcaaagagtgcgtcgcgctgggttttgccgatcaggttacgccctccctgcaggcgatggcctgtattcattcgaaacgtattgaggaatttgaaaagatgccaaacagcattcgtaatatgatcacccctccgcgcaacagcactcagcgtgaagtgactccgccagtttcacaggctaatgccccggcggttccggctaccggcgcagatgaatcaaccattcgcgcacaggtactggcagagcagaaagcgcgtgtaaatgccatcggcgatctctttgccatgtttggcggcaagcatcaggaactgcaggttcagtgcgtcgcagatcctgagtgttccgtcgagaaagcgaaagacctgctgctggctgagcttggtaaatccgcaacgccatccaacaaaacaacccagacgcatatttacgccggtaacggtaatttcgttggcgatggtatccgtcaggcgctgatggcgcgtgctggttttgacaaccggcaaaacgataatgcctacaatggcatgaccctgcgtgagtatgcccgtatggcgctgaccgagcgtggtattggcgtatccagttacaatccgatgcagatggtcgggttagcgctgacccacagcacttccgattttggcaatattctgctggatgtcgcaaataaggcgctgctccagggctgggaagaatcagaagagacgttccagatctggaccaaaaaaggccagttgtcggacttcaagacggcacatcgcgtcggcatgggaggcttcccgtctctgcgtaaggttcgtgaaggagcggagtataaatatgtcaccaccggggataaaggcgaaaccatcgcgctggccacctacggtgaaatcttttctgtcacccgccaggcgatcatcaacgatgacctgaactctctgaccgatgtacccatgaaaatgggccgcgcggcaaaagcgaccatcggcgatctggtctatgccatcctgaccacaaatcagaaactgtccgacggtaaagcgctgttccatgcagaccacaaaaacctctctgcaggggccatttcggtagccagcattgatgaagcacgtaagctgatgcgcctgcagaaagaaggcgagcgttctctgaacattcgtcctgcttatatgctggtgccggtcgggctggaaactctggcgaaccagaccattaaatctgcaagcgtcaaaggggctgacattaactccggtatcaacaacccgatccagaacttcgcagatgtgatctctgagccgcgacttgatgccgccgatcagaacgcatggtatctggccgcagctcagggttctgacaccatcgaagttgcctatctgaacggagttgatacgccttacatcgaccagcaggaaggttttagcaccgatggtatcgcgacgaaagtccgcattgatgccggtgttgcgccgctcgattatcgcggtatggtcaaatcctccggccagtaa

SEQ ID NO: 79854 - DNA, 327 bp, Citrobacter koseri
atggcgaagaattatgtacagggcgggaaaaccattccgctcgttaacagtgggcagggtgaaattctcagcggtgatcccgttgttattggctcggtaatcgccgtcgctgttaccgatattccggcaggacagacgggggacggttttgccgaaggcgtatttctcctgcctaaactgccagctgacgatattacagcaggtgcccgcgtgtatctcaaagatggtgaaatccagcttgacgataccgatgccgtggcggcaggtgtcgcatgggatgttgcaggaactggcgtgactgtcgtcgaagtgaagatcaatgcctaa

SEQ ID NO: 79855 - DNA, 276 bp, Citrobacter koseri
atgcctaatcccttctatgaaatggcaggccgcatggatgcggcgacaattcgcacaatgggaaagacggccgttattaatgatattccggtcgatgtggtgcccgctgagttactgatggaaatgggggcgctgtctggttctggtatatcgctggtggtctttaccgccggataccgggcgcggcggaatgatgcagttgagtatgacggtgaaatgtactcagtgacgcgacacgaactttttaacggcaagccacgcatctttattgaatag

SEQ ID NO: 79856 - DNA, 504 bp, Citrobacter koseri
atgtcgattaaagggcttgaacaggctattgccaacctgaacagtatcagcaaaaccgctgtgccccgggcgtcagcgcaatccgttaaccgtattgccggacaggctgtaaaccgtagcgtctccgtagttgcaaagggaacccgcgttccccggaaactggtgaagcaacgtgcccgggtaaggcgtgcgaccgtcagtaaaccccgggcgcttattcgcatcaatcggggcaatctcccggcgataaaactggggccggccagcgttcgcctgtcgcgccggaaaagggataaagcaggcgtgaacagtgtcctgagggttggacggttccggtttcctggcgcttttatacagcaactgtcgaatgggcgctggcatgttttacgtcgttcaacccgtagccgataccctatcgaagtggtcagcatcccccttgcccccccccctgaccgaagccttccgttcagagttacccagactgatggaagaacgtatgcctga

SEQ ID NO: 79857 - DNA, 399 bp, Citrobacter koseri
atgaaacataccgatatccgcgctgccacgctggcggcgctgaaacgtaatatcagcgatccggtctcctggttcgacgggcggcccggttttattgaagagcaggatctcccggcagtcgcggtgtacatgactgacgcccgggcgacgcccgacatcatcgatgaggatatctggtccgccattctgcacatagaagtctttctgaaagcctcgtccccggattccgctctggatgaatggatggaaagcaaggtttatcccgttttagaagatattccagagcttgccggactaatcgaaacgatgagtgcttccgggtacgactaccaaagagatgacgaggccatgatgtggggctccgccgatttaagctattcaatcagatatgtaatgtga

SEQ ID NO: 79858 - DNA, 411 bp, Citrobacter koseri
atgtcactaaaaactgaaccgtttgagtggaacggtgagaccgttacgcttaatgaattgtccgcgcttcagcgcattctgcatctggagtacctgaaaaaaatcgaaaaaattgatgatggcgactttcagaaagcaatggctgaaacaatccgcactgcggcgtttgttgtggctatgtccctctggcatacccatgaactgaaaggaaaggcagagcccaaaccagaccatgatgccgaagttatcctgatccagaacgaaatcatgatgtcgtgggcgcctgacgctattgccgccgccgattacagcgtcaaactattgtcaggcatgatacagccgccgggtgaagaggacgaaaccgtgacagatgaagctgttacagtggaaaagtcctcgccagtgagctga

SEQ ID NO: 79859 - DNA, 2514 bp, Citrobacter koseri
atggcccagacggcagtgggggatctggttgttaatcttgacgttaactcgtcaaaatttaatgagcagattactcacgttaatcggcagttaaaaaaaacaggtgatgcggctaatgattctgcattacgtattcagcagtcattcacacggcaggaagccgctgccaggaaagccggtatttctgtcgggcagtacaacgctgcaatgcgaatgttaccggcacagttcacggatattgcgacgcagctggcgggcgggcagagcccgtggcttatccttctgcaacagggcgggcaggttaaggactcatttggcgggattattcccacgttccgtgcgttgctgggggccgtatcgcctttgatggttggtgttggcgcgctgtccgctgctaccggcgcacttttttacgcgtggtatcagggatcatccacactttcagatttcaataaaacacttgctctttccggtaattcggcagggcttaccgctgaccggatgctggtgctggcaaggaacggacagagcgccgggttgacatttaaccagacgagcgaggcgctgacggaactgatcaacgcaggagtgcgcgtcggggcaaatttcgatgatatgagtcaggccgttgcccggtttacccaggcgtctggcgttcctgttgataaagtggcggcggcattcggcaaactgacaagtgatccgacgtccggcctcatcgcgatggcgcagcagttccacaacgttacagcagaacagattgcgtatgtcgcgcagttgcagcgtgccggggatgaagccgctgcgttgcaggcggcaaacgatgcggcaaccaacggttttaatgagcagacaaaatccctgcgcgacaatatggggacgattgagtcggctgccgattcacttaagcgtgcttttaaatcgatgtgggacgcggcactggatatcgggcgcccggataccgcacaggagatggtccgtaaggcagaggctgcgtttaaacgcgcggatgagatctggaatctgcgaaaaaatgacggctacgttaatgatgaggcgcgcgcccggtactggactgacagggagacagcccggctggcgctggacatggcgcaacagcaggcgggcattgcaaaagcgaatgaggaaaatgcttcccgtgaagctgctgcggaatctgatcggcagaaatacgccgcgcaggcgcagtcaaattacgccagaacgcagtccgcgcttgagaagtacacggccaggcaaaacgagcttaataaggcgctgaaagaagggcgtattctccaggctgactacaacatcaatatgtcagcagcgaaaaaggagtatgaggattcgctgaagaagccgggaaaggcacccggagtaaagacggcatcgggcgtcagaactgtcgatacggccagcgcgcagacgcttgagctgcaggcgcaactgcgaacgctgcaggagcatagcagcatcactgacacaatcagccagcagcgtcaggaattgtggagacagcaggcgcgcttctccgttcttgaagaggcctccagaacgcgggcattaaccagcgatgagaaatcgttgctggccagcaaaaacgaagtgctttcccgcgctgaaatcaatgcacgtctcggcgatcagattgttgcccaggaacgtctgaatcgtttgcaggatacctcccagaaatatgtcactcagatcggggagaaaacccgggcgcttgtggccggtggagccctgagcagcagggccgcgcagcggcagaacgaagaggcgcaacttcgccagggctggctgaatgctggtggttccgattccgatcagggttatcagaatgagctggcagcgttgaaaaactactatgcagagcaggataacctgcgcagcgactggctttcaggcgcgaaatcagcatgggctgattatgctgactctgccgccgacgcttacgggacgatgaagtcatttgcctccagcgcgtttgacagcatggggcaaaacctggctgacacgctcacgcggggaaaagccgactgggccgacttcacccgctcaacgttgtcgatgctgacgcagatcttggtgaaacaggccatgacgggtcttgtcagttcagcgacaagtgcgctggggtttgctggtggcggctggactggctcgggtgggaagtatgagccagccggtgttgtgcaccgtggcgagtttgtctttcacaaagaggctacaagtcggatcggcgtcggaaatctgtaccggttaatgaacgggtatgcgaacgggggatatgtcgggaatactggcggcgggatggctgcaccgtttggtgtcagcgtgtatgcgcctgttaccgtcacgactgagcagacaggaaacgctacggcgaacaacggtgatcaacttcgccgggcgtatcagaaggtcattgataaatcagtaagggatggtatcgcccgcgagtcacggcctggtggcatcctctggaatgtcaccaatagcaggtaa

SEQ ID NO: 79860 - DNA, 348 bp, Citrobacter koseri
atggcgatagaaacctttacatggagaatccagtccgcagggcagcccacgacaggcagtaaagatgtgatccgaaaagcccagttcggtgacgggtatgcccaggtcagcggcgccgggcttaatgatgagacgcttatttatgagtactcatttacggggaagcgggagactgcgcttgagatttatcagtttctgaggcggcataaaaccaaatcgtttattttcaccccgccattcgacgaggtggcgctctggcgtgtggaggctgacagtcttaagaaagtggttaaaagcaagaacgtcatgaccatcacggcaacatttgaacaggcatttgcaccatga

SEQ ID NO: 79861 - DNA, 756 bp, Citrobacter koseri
atgagtcttaatgctgattatcaaaaacttgagccgggtaatgaaatccggctcgtcgaagtggacggcacggcgtttggcgtgtcggatattctgtattttcatgcgtataacatcgcacatacaccggaggaaatagacgctgctggcggggatgaaagtaaactcccggcaaaatcgatctggtggcaggggaatgaatataaggcgtggccattccaggttgaaggcattgaggcgacaactgacggcaccagcccacagccgaaactgagtgtcgcgaacatagagcactcgattactgctttgtgtctggcctacgatgatatggcgcaggccagagtcaggattcatgacacgctggcgcaatatcttgatgcccgaaattttcctggtggtaacactaccgccgatccgacgcaggaaaagctgaaggtcttttacatcgatacgaaagagctggaaacggatgaagttgtgcagttcattctatcaagcccgatggatctgcaggggatgatgattccgacgcgccagctacattctctgtgtacctggtgcattcgcaataagtatcgctcaggtgatggttgcgattacgccggaacgcgctatttcgacaagaacaacaatcccgtcaatgacccctccctggatgagtgcaacggtacgctgaccgcctgcaaacttcggtttggtgaaaatgaagagctgtcatttggcggctttccgggcacgtctttgatcaggagctga

SEQ ID NO: 79862 - DNA, 711 bp, Citrobacter koseri
atgcgtcagaaaaccattgatgccattatggcgcatgcggctgccgaatatccgcgtgagtgttgcggcgtggtagcgcagaaaagccgggttgtgaagtatttcccgtgccggaatctggcggcggcgccggaagaacattttcacctgtccccggaagactacgctgacgcagaagactggggaacagtgatcgccattgttcacagtcatcctgacgccacaacacagccgagcgaactggacaaagcccagtgcgatgcaacgctgttgccgtggcatatcgtcagttggccggaaggagatttacgtaccattacccctcgcggggaactcccgcttctcgaacggccgtttgtgctggggcattacgactgctggggtcttgtgatgagctatttccggcagacacacgggatcgagttgcatgattaccgtgtcgattatccgtggtgggaagaccagtatcaggataacttttatcatgattgctggtatgaatgcggattccgggagtttgccggcgcgccgcaaccaggtgatatggtgatcatgcaggtccaggctaataaatggaaccatgccggaattttgctggaaggtaacatgctgctgcatcacctttacgggcatctgagccagcgtgtgccatatggcggttactggctggatcgaacaatgaaaatagtgagatataactcactaatctaa

SEQ ID NO: 79863 - DNA, 252 bp, Citrobacter koseri
atgggtgggagtaaagccgatgggacggtaagaatgggatatacagtggggcagttcgagaaacctgttgtagatctaaatcaagctgcgattttggccggacaaaagtgtaaaacgtggggttacgaaggggctgagccatttggcggtcaaacagtccagtgtggtcaaacagatggtttcggtagctgtatcctttccaatgtctccgttgagtatcaatgtacaggtggaaaggccgctcaaaactga

SEQ ID NO: 79864 - DNA, 591 bp, Citrobacter koseri
atgtctgaaataatgactcgcattgagcttggcggagtgcttgggaaaatttttggaaaagttcaccatcgctatattagaacagcaggggaggcgactcattcactaacaaaaactattgatggttttgaaaaatatctaaatacgagccgtatgagaggtcttacttacgctgtatacaaaggtaaaagaaatataggagttgatgacctcggatttcctgtaacaggtgaagtaattcgaattattcctgtgattataggaagcaaaaaggcaggggtattacaaacaattttgggtgcggttttggtcgttgttggcgctattgcgacatatttcggtggtggcgcagttggtgtcccattgatgaaattcggtgcagctctggcaattgggggagttatacagatgctttctccgcaatcaggcgggctggcaagcaaacaagatgccgataaccgcgcatcatatgctttcggtggtgtaacgaatacagccgcccagggctatcccgttcctctgctttacggtaagcgtcgtattggcggtgccattatttcagctggtatctacgtggaagatcaacaatga

SEQ ID NO: 79865 - DNA, 3459 bp, Citrobacter koseri
atggtaactgcaaccgcgattaaaggccgcaagggcggcagttcaaaaacccgcaccccgacagagcaaccggacgatctacagtctgctgcaaaggcaaaaatacttatcgctctcggtgaaggagagtttgccgggcaacttaccgggaaagatatatatctggatggcacggcgcttgagaatgcagacggttcacagaactttagcggtgttgtatgggaattccgctcaggcacccaggcgcaaaaatacattcagggtattcccggtacagaaaacgaaattagtgttggcaccgaagtttcaagcgtgaccgcctggacccgcacctttaccaacacccagctttcggctgttcgcctgcgtcttaagtggccttcgctttttaaacaggaggacgacggtgatctggttggttattcgatcaactatgcgattgacctacagactgacggcggcgcatggcagacggtgctaaacaccagcgtgaccgggaagaccacttctggttatgaacgcagccatcgtatcgatctcccgcaggcgggcagtacctggacaatccgactacgcaaaatcaccgctgatgcaaacagcgcgaagattggcgacacgatgacgctacagagcttcaccgaagtgattgatgccaagttgcgttaccccaatacggcgctgctatatatcgagtttgattcaagccagttcaacggtgccattccgcaaatttcctgtgaacccagaggccgagttatccgggtcccggataactacgatcctgaaacacgcacatataacggaacatggacgggggcgtttaagtgggcatggactgacaacccggcgtggattttttacgatcttgttgtgacagaacgctttgggctgggcaaccggctgacggcagccaacatagataagtggacgctgtaccaggttgcgcagtattgcgatcagcctgttcccgacggcaagggtggaaatggaaccgagccgcgttatatctgcaatgtctacgttcaggacagaaatgaggcctataccgttctgcgtgactttgcagcaatattccgcggtatgacttactggggaggtgatcaaatcgtcgcgctggctgatatgcctcgtgatattgactacgtctacacccgtgcgaatgtcattaatggccggttcacatattcaagcagctcaacgaaaacgcgttacacgacggcgctcgtgtcatggtcagacccagcgaatgcctatgctgacgcaatggagccggtattcgagcgagcgctggtggcgcgttatggcttcaaccagcttgaaatgacagctatcggttgcaccaggcaatcagaggcaaaccgtaaggggcgctggggtattctcaccaacaataaagatcgcgtcgtatcctttgatgtcggtctggacggcaacatccctcagccgggttatgttatcgctgtagctgatgagaatctctcagggaaagtcactggcggtcgcatcagtgctgttaacggcagggtgataacgctggatcgagcagcagacgctgtgcccggtcatcgtcttatcctgaaccttccttccggcgcgtcgcagagccgcacgattcaggcggtaaatggcaggacgataacgatcacaacggcatacagcgaaacaccgcaggtggaatctgtctgggctgtggaatccgatcagctctatgtgcagcagtatcgtgttatcagtgtgtccgacaacaatgacggtactttctcaattaccggctcctggtatgacccggataaaaatcaacgcattgatactggcgctattatcgaccagcgcccagtcagcgttatccctccgggtaatcagtcagcaccgtcaaatatcacgatcagctcattctctgttgttcagcagaatatcagcgttgaaaccatgcgtgtgagctgggatcaggcgcagaacgccatttcctatgaagcgcagtggcgccgcaacgacgggaactgggttaacgtgccgcgcagctccaccacgtcattcgacgtcccggggatttatgccggacgctacctggtgcgcgtgcgtgccatcaacgccgcagagatctcctccggctggggatattcagaagagaaaacgttaacgggtaaggtagggaatccgccgaagccggttggctttatcgcttctgaggatgtggtgtttggtatcgaattgaactggggattcccggcgaataccgacgataccctgaagacggaaattcagtacagcctgaccgggaccgaagacgatgcaatgctgctggccgacgtgccttacccgcagcgcaaataccagcagatgggtctgaaggccgggcaaatattctggtatcgcgcgcagctggtggacagaaccgggaatgaatctggttttacagactgggtgcgcgggcaggccagcattgatgtttctgacatcaccgaggtgattcttgatgacattaaagaatctgacacgttcaaagacctgatcgagagtgccgtggacagcaatgaaaaaattgctggcatggctgatgacattcaacaacaggccgatgaactggagcggcaggcggcggagattcaggagaatgccgacgggctggcgcaggctgcggtgaaaatcgatgagatgtcggtatctatggatggcatcaccggcggcgtcaaaaactcatccatcgccgttatacagaacagcattgcgcaggtaacaagcagacgttcacagacagtgacgaatgccggtaacagcgccagcattgatcgtgttgacacgacaattgccgacgccagccaggccgttgcacgcgccttgatgacgctggattcatctgccgggggtaatgtatccaatgtgacagatctggccgaaacgctggcagatttttcgcaggcgtcagcaacgaagatcaactccctgactgtgacagttaacgggcagactgcggcaattaaccagactgctcaggcggtagctgatgtaaatggcaatcttagtgcgatgtataacattaaagttgctgttgattccaatggtcgccagtatgcagcgggaatggggatcggggttgaaaacacgccttccggcatgcagtcacaggtactgttccttgcagatcggtttgctgttatggcgcaggccggtggcacagtatcgctgccgttcgttatccagaacggccagacgttcatccgggacacctttattcaggacgccacgatcacccgcgcaaaactggctgaaacaatcagttcggttaactacgttcaggggcaggctggcctgtcaataaacttcagaaccgggacacttgaaaactatggttctacttccggtgaaggggcaatgaagcaaacaaaccagacgatcagtgtgaaggatgcaaataacgttcttcgtgtgcaaattggtagaattacgggggtctggtaa

SEQ ID NO: 79866 - DNA, 702 bp, Citrobacter koseri
atggttgccgggatttccgcaacgaccggggatatgacagtacagtcagctacagggagcatgcgttacaatgctggctccggcaaagaacatgtctttaactctgcggcgcagcgtgctctttttaactgccctgtagccctctcctctggttcaattactatcccaggtacggcatcagcgacggcaccttccggcccgggtatacgtggtatttatgcgggcgtagactcagccaactttgacaatgcggctaacatcaacctttattcgtggtacgggattggattctgcaccgcgtacacatcaccaaccaatggtgtacaggaaggaaaacctgccgtgtatatcaatacacgaaatggaacaattaacgcgaaaggagcggttcaggccaacggagttactctgacgtcagactggaacgcaaaagaggaagtaaacatcatcgaccccacagaggctctggataagatcgccgcgcttgatggttacacgttccgctataaggatgcggaatctaaacgtcttacagccggggcattagcgcaagatctagatttagtaattcccgatctggtgattcgtgacgaaggatctgattatctcgttgccgactatatggggctgattggttatcttctcgctgccgtgaaggggttgaagttgaaagttgacgaaatatctaccacagaaaagtag

SEQ ID NO: 79867 - DNA, 555 bp, Citrobacter koseri
atgcaaataggctatgtcagggtgtcaacaaatgaccaaaatacggatctccagcgacaggccctggaacgagcaggatgtgaacagatttttgaggaaaaaatgagcggaacggttgcaaacagaccggcactaaaacggctgctgcgagtcctgaaagagggagatacgctcgttgtctggaaactggatcggttggggcgcagtatgagaaatcttgtgttgctggttgatgaattgcgtcaacgaggtgtgcattttcgaagcctgacagacagcatcgatacatcaagcccgatgggacgctttattttccatattatgtcagcgttggcagaaatggagcgagaattaattgtcgaacgaaccagggcaggtttagccgctgcgcgagagaaagggagaataggagggcgtaggccaaagttaacggcagaagagtgggcgcaggctggcagactgatagctaacggcgtagacagaaagcaggtcgcgataatttatgatgtggctgtatgcacgctctataaaaaatttccagcagggtgccgatga

SEQ ID NO: 79868 - DNA, 192 bp, Citrobacter koseri
atgagcgctaaacctgtaacctggaaaacaaccactgccgattttacttacgaccccgagaggggttgcgtgtaccgggcaatttttggacaagcatcccactggttttgtggtgctctcccccgccatcttgagaccgtcgaagaagtaaagcaggcgatccacgtaaaaatgctggcggaggcattatga

SEQ ID NO: 79869 - DNA, 225 bp, Citrobacter koseri
gtgaaaattatcaagttatacgagcgggcaacggttgaacgccagggggaatatggctgggaaccggaaactatttacgagccgatttatatcgtcgctgaacatatcgaatcaatgagctttgccgggaataccagtctgaaaatggtttcaggcgagcagatcatcgtcagggaaaccccggaagaaattgtttcattgcttgaggtcggggtagcagcatga

SEQ ID NO: 79870 - DNA, 426 bp, Citrobacter koseri
atgagcaacatcgacaaacaggcgctgcgccaattggcaactgatgcgcacgagttgggcatcatcaagcggtattcgaagggactagaggcgcagagaaaattttacgctgctgcaacccctctggttattcgcgcgctgctggatgagctggaagcagataaagagcaaatcaaaacactcgaaagccgaaaccgtcgtctggagggaatcagcaatgcggctgagaggcgcattgctgagcagtcatctcaaaaacggttaattggatggcgagcatcggattataccgatgagacatcagaccctgagttagctaaaaactgggctgcggctattggtgtgctgcctatttttgaaggcgacgtgaataccaaacttagcgccgctggcatcggtatcaaaggagaaagcaataatggctaa

SEQ ID NO: 79871 - DNA, 600 bp, Citrobacter koseri
atggcacagattcaactacaaaagattggccctactatcctgaccccggcaacgcccgaggccagcgaatttttgcaacgtattaaactcggtgagtggattcacgccgactttaagcgtgtccgtaactaccagtttcacaaacgcttcttcaaactcctccagcttggatacgattactggacgcctactggcggtctgatccctgaacaagaacgtaaactcgttaacggtttcgttgatttcctctgtcggcaggttggtgatcaacacagtgtggcactttccgatgcagcagaattgtatctttctgatctgtcgtatatcagcgcggccgatattgccctcctcaaatccttcgatgcttaccgtgattgggtgaccattcaggcgggattttacactgagcacgtataccctgacggcagcagtaaccgccgtgccaaatccatatcattcgcaaagatggacgaactagagtttcagcaactctataaatcggttctgaatgttttatggaattatattttgttccgtaaattcaagaccgttacagaagctgaaaacgtagccatgcagctactggagtttgccgcatga

SEQ ID NO: 79872 - DNA, 195 bp, Citrobacter koseri
atgactaaatggcctaatgaagtgcggaatctgtttctgacagcagtcggcaatgtggcaatcgatcataagaatgccgaaaaactcagaacacatattaaccgtttgtggctggttgataccccagaagaaaccattattcacgaaatatctatccttgctgatgctatggagagcgaaccatgcgcgaaataa

SEQ ID NO: 79873 - DNA, 1980 bp, Citrobacter koseri
atgcgcgaaataattgttgataattttgctggcggtggtggtgcgagcacaggaatagagttagcaacgggtcgtccggtagacattgcgatcaaccacgatccacatgctatcgcgatgcatacagtaaaccacccgaggacgttgcattattgcgaatcagtttttgatgttaagcccaaaatagctactggtggtctccctgtggctctggcgtggttctcgccggattgccgccacttttcaaaagcgaagggtgcaaagcctgtcgaaaaagcgattcgcgggctggcctgggtagttctgcgctgggggctggatgtaaaaccccgagtgatgaaactggagaacgtcgaagaatttaaaacgtggggccctttgctcgctggtgaaatgaggccagatccggcccgtgctggagaaacttttgaggcgttcattggtatgctgactacaggcatacgggctgaccaccctgcgctggcggagtgctgcgaatttctgggcatttctcttgatagtgaagacgccgcgaggctgatcaaggggctgggctacatcgtcgagtatcgtgagttgcgcgcctgcgactacggcgcgccaacgattagaaagcggttctttatggttatgcgttgtgacgggaaaccgattgtgtggcctgagccaacacatggtgatccgaaatcaccggctgtccaggctggtaagctggcgccgtggcgtactgctgctgagtgcatcgactggtcaattccgtgcccgtcaattttcgaccgcaagaagccgctggcagaaaataccctcaagcgcattgcgcgcggcattcagcgattcgttatcgacagcgcgtcaccgttcatcgtgaagtgcaaccacaccagcagccgttcaagttatgattgtttccgtgggcagtcactggaagaacccctgcaaacgatcacgaaaaagcatggttacgccgtcgcagtaccgcatctgacgaagttccgcactggcgcaaccgggcagcccgttaccgaacctgtcccgacggtaaccgctggcacgtcggcgcgcccgggcgggaatggtcatgcacttggtatcgttgaagctgcgctgactccgttcctggctggcaacggcggcagtgagtaccaggctaagccgcgcccgctggataaacctgctcacaccattctgaagcaatcccgcgcctgtcttgttgcgccagtgatagcacgccagtttggggccagcaccggccaccgcgcagatgagccgagcgcgactattaccgcaggtggtggcggtaaatcgcaacttgttacatcgacattgatccagatgggttacggcgaaagaccggggcaggacccgcgagtgttgcagcttgaaaagccgctggggacagtaaccgctggtggtaacaagttcgccgtggccagcgcatttctggcgaagcactacggcggtaactactcagggccgggcgtcgggctggatgagccgactcactcagttacgacggttgatcatcatgcggtagtgacttctcatctggttcatttgcgagggttctgcaaagacggtcaaaaaatggatcagccggtgccaacgattaccgccggaggccagcatgtgggggaagtgaaaaccactctggcagttgagcactacgacgaacagcgcgcgcagcagacgttggcgttcctgcgtgaatattgcggcgaagactgtaccgggcttgtggatatcgacgggatcacataccggatcgttgatatcggtatgcgcatgctgcaaccacatgagttatatctcgcccagggttttcctgagtggtatgtgatcgatcgggacgcagacggcaaccgctacgcaaaagataaacaagtggcgcgttgtggtaacgctgtgccgccgcaatttgctgaagcgcttgtgcgtgccaatctccctgagctgtgtctctcaagggaggttgcagcgtga

SEQ ID NO: 79874 - DNA, 417 bp, Citrobacter koseri
atgcaaagtaagttgatcaaatactggaaggttgaattatatgaggcaccaaaggctaatactggttctgtaatcaatgtaatgctctccggtgaagaaagaagcccatttttaacaggatattccaacacccagttcgatctgcgaaaagctgtgatgaatggggaagagtttattaccctgtgttgtgaacctgattcacttcaaactcgttccgttcgcatcagtcgcatctatgaattcagatgtacaccgatttatgagaacgacgacacttttcaggaagctgctaagccgctaattaagtggctggctgaaaatgttcatccacaccaccaggctattgtaaccagtaaccatgctgagttactggaaagtcagtatgtggtgaaaacggatgagtttgtgaaagactaa

SEQ ID NO: 79875 - DNA, 528 bp, Citrobacter koseri
atgcaacaccttagaaatctgacgaaatacactcctgatgacgcatataatctgtttttgatggacgaacacaatgcggaatttttcatctctgatgatggacgtgactggtatgagtcccaggctgattttctaccggatacactgaaagttgcttacgataaatcaggggttatttgctgtatcagcaaagatgtgtcgagcatttacccgcgtgatttcagcgtcgtagaggtcgaaatcaccccggaaaatcaggatgtggacattatggggggctgggtgtttaaggacggtaaaattcagccgcgcgagtattcacaggatgaactgcgtgtacaggccgaagaaaaaaaagctgagttgctctcgttggctacggctgcaattgcgccgttacaagatgcttttgatcttggcgttgcaacggaagaagaaacagcgcttttgctggaatggaaaacgtaccgtgtccaggttaaccgggttgataccagtaaaccggagtggcctgagctacctgtttga

SEQ ID NO: 79876 - DNA, 978 bp, Citrobacter koseri
atgagtgcccctttcttgttaagcgtcataattccttgctacaactgccaggattatatttatgaatgcttgcaatctgtatgctgtcaaattgatgatagtgttgaagttattgtaattaatgatggttcaacagataactctcttaaagagatagaatcttttatcaaaaaaacgccccagactgtcagagtgatatcacaagaaaatcagggaatatccattgcaagaaataatggaatagaggcatcatctggaaaatacattgctctactggatggagatgatctttgggcgccatccttctgggagaaaacccgtccaataatagagaatggtgagactgatttaatagagtttaatataaaagtattttatgaatatgataataaaatgaaaataccatcaataacgtcatcagatggacattttaaaataaaatcaataaatgatttgcgtgaaacttttcgaagaagtcaatggtatgcctgggccaggatttacaaaaaagatttatttaatgaattaagatttcctgctgggagacgttacgaagatgttgcattattaccaaaaatatacctttcagcaaaagagattcaccgtataactgatgaactggtgctctatcgcatcaggcaaggaagcataaccaactccacaacaagtatggatgttgatgacataatatatgctttgggtgttttcaaagaattagctagtaataaaactaaagatgagattgaagtcatatcaccatctgtatatattacatacaacctcgcgagaaaaatcagcaaaagagtttatgggtattgtttttttaacagcacacaaattcatgatataaaaaaggctctcaagccatactttaaaacgcaaaaaacaagccgtcgtatcagattgttttttatccgggaactttgttttgtaaataaatttaaatacaaattaaggcttctcactggaacgaaatag

SEQ ID NO: 79877 - DNA, 1161 bp, Citrobacter koseri
atgtcaatcaaactacgcggtgacacgtggcactgtgacttcgtcgcgccagatggatcaagagttagacgctctcttgaaacatcggacaagagggaagcgcaagagcttcacgatcgtctgaagtctgaggcgtggcgggttaagcagatcggtgaggctccaaagaaacttttcaaagaggcctgcattcgctggctaagggagaaggaggataagaagagcattgataatgataagagtatcatcacgttctggctgcagttcttcggggatacgatcctctccgatataaccacgcagaaaataatggaggcggtagacggaatggaaaaccgccgccatcgtctgaactgggagatgacccgggacaggtgtttaagactttccaaaccagtaccggagtatatgccaaagctggcgacgaagggaacgagaaccagacacctggcaatactacgggcgatcctcaatatggctgttgaatggcagtggctcgaaaaggctccgaagatatcaacgccgcgtatcaagaacggtcgtatccgttggctgaccgaggaagaatccaagcgcctgtttgcagagctagcgccccacttcttcccggttgtcatgtttgccatcacgaccggcctacgccgatctaacgtcaccgatctggaatggtcgcaggtggatctggataagcgcatggcatggatgcacccggacgaaacgaaagcaggtaatgcgatcggtgttccattgaatgaaacagcatgcggaatactgaggaagcagcagggattgcataaaaggtgggtattcgttcacacgaccccgggctaccggagtgatggctctaaaacggcagatgtgaggaaaatgcgcacagacagtaataaggcatggaagggagcactaaagcgggcaggcattagcaatttccgcttccatgacctgagacatacatgggcaagttggttggtacagtccggcgtttcacttttggccctgaaggaaatgggcgggtgggagactctggaaatggttcagagatatgcgcatttatctgcaggtcacctgaccgagcatgcgagcaaaatagacgcaattattgggcgaaatgtcacaagtacggcacaagaggagaacgtggtttacataaatgcgaggtaa

SEQ ID NO: 79878 - DNA, 351 bp, Citrobacter koseri
atgctttataaatatattggacatctactaaggatggtatctggactttatcagcgatcattctccgaagaatgggatttcaggctgaatgaaataatggtaaatggagcgattgtcgaggctggagagcatactgttacctatcagttcgacggcgatgttattgaaatatgggtatcaaacaagtggtacgccttcggtcatatataccgcgtgaacgataagttagtaagcaaagaatttaaaaatcgccccgcattaaaaacgatgtaccgtctatgggatacctactcagaggcaaggaataaacgccttgcagaagaataccaatctatattcaagtcaaaataa

SEQ ID NO: 79879 - DNA, 183 bp, Citrobacter koseri
atggacatcatcgacactgcagcgagattgaagagcttcagcgtaacgctgcactttccgctcaccgcatcaaccgcagcgccgtatcagcaactcactgcaatgattgtggtgatgagctgccggaggctcgccggaaagcgtatccaggctgcacgatgtgcgttgaatgcctgcaactga

SEQ ID NO: 79880 - DNA, 318 bp, Citrobacter koseri
atgacaacagaatttaaagccttacccgtagagcgcaaccaatacggttactggactcacccgctttacgatgaattttgcgatggccgcgaatccatatcgcccattgagttcaacgcatggctggagaagaacggcctcgagtggaaagtgatttatcgcgatgaggacgacgctgatccagatgttgacggctatgacatttcggcgtggcagccagaaacaccctccggcgatggttggtttgtcggttcaattcacgacacggaagatggcgcggtatgcatctggctacgcaacgttggcggtgcgtcatga

SEQ ID NO: 79881 - DNA, 1080 bp, Citrobacter koseri
atgagcgaagtaacggatttagtcgtcatcgagaagtcgaacgcgatggcagtctttacaagcaaagaacaactcgacccacttctcgagaaaatcgagacagaggcccgcagtctggtgcccgacctgaccacgaagaaaggtcgcgatgccatcgcatccatggcccacaaggtagcccgctcaaaaacgtacatcgacaacgccggtaaagaccttgttgccgaactcaaggcgctgccgaagcagatcgacgaaagccgccgcattgttcgtgagcgactagacgcactgaaggatgaagtgcgcaaaccactaactgaatgggaaaacgccgagtcggcaagaaaggaagcattgcagcatcgactcgctaatttgcgatccctggctgatgtgattgatggcataggtaactacctcccttcagttgaaattcagcagcgcattgagtcagcaaaagcagttgcacttgatagcagttgggaggaagtggcagctgaggctggcgtggctaaagattccaccatccaacaacttgaagctgccctgatcgtcgcaaagcagcgtgagcatgaagcagcagagcttgagcgccttcgtaaggaggcggaagaaaaagctcgaatggagcgcgaggaaaatattcgccgggaatcggccgaacaggctcgtcgtgatgcagagcaaaaggcgaaggctgaacttgaagccgcagcgcgccgcgaagctgaagagaaagcacgtgcagagttggctgaacgccagcgcatcgaagcggaacaccgtgcggcacgtgagaagcaggaagcagaagcacgggcagaacgcgaaaaatctgcggcagtggaagccgagcgccttaaggcaaagcaggcagaagaagcccgcctggctgagcagaagcgcatcgccgatgagcaggcaaaacgtgaagctgacgtgaagcaccgcaagacggtaggaaccaacatcgttaacgcgctcaccagccacaccagtttaacccgcgaacaggctatcgaagtgctaacagctctgaaagatgacctgatcccctgcgcaaaaattcactactga

SEQ ID NO: 79882 - DNA, 171 bp, Citrobacter koseri
atgagtaaccaaacagtcacccataacggcaagcagtacaccgtttccagaatggccgacggtcatcactggcaactgacgtccgtcgataaaccccgcgataaaatcacgatgaaccgctggcagatgcacgtctctggtttgctcgctcaggtggagggagtgaaatga

SEQ ID NO: 79883 - DNA, 693 bp, Citrobacter koseri
atgacacagaaaactatcgttgcctataaagggtttaatgcggatatgacctgccgcggattccagtttgaaatcggtaaaaccttcaagcatgaaggtaaagttgaagcatgcaaatctggcttccactcctgcgagaatcctatagacgttttcagttactaccatccggcaggaaataggttctgtgaggtggaggtatctggtgatgtttcgcgtcacgatgatgacagcaaaattgccagtgcaacaataacaatcaaggcagaaatatccattcatgagatggtaaaacgtgccattgaatgggtatggagcaaggttgataagtcatgtgagcaacagatcatggacggctaccagtccgccgccagcaacaccggctaccagtccgccgccagcaacaccggcgactactccgccgccagcaacaccggctaccagtccgccgccagcaacaccggcgactactccgccgccgaagtcagtggatctcattcggtagccgcagcatttggtatcgaaggaaaagcccgcgcttcagagaaaagcgccattgtcctctgctaccgcgatgaagatggcgacttaattcatatccgcgccagcaaagttggcgagaacggtatcgaggctggaaagtggtatcaactaagcgctgataacgagtttgtcgaggctgaagatgagtaa

SEQ ID NO: 79884 - DNA, 246 bp, Citrobacter koseri
atgaacccaatgcaatttgcaatcgaagctgtaggcggacaaaccgcagcagcacgcctatgtggcctgtcgaatgttgctattcacaagtgggtaaagaacgcggcattgcctcgcactgagtacacagagaaaaccaactattcacagcttttggctgacgcatcaaaagggcagtttacagcggagtggctacgccaggccgcaaaccctgaccgcatcaaacatggctcgcatgccgcctga

SEQ ID NO: 79885 - DNA, 855 bp, Citrobacter koseri
atgacgctggatgaaaaaatcaatcaacttgagaaacgcattactgagctgagccagccgccagttcagcatgaagatattgagctaactatcagcaccgagacctgcgaaacgcatggcccctttgaatgcaggaccaggcatttcttaaactctgtcgtgaagatccccccacgcccaagctgctgccctgaatgcctcaaagaggagctaggccgcttgcaggaggaaagaactagcatcaacgaagcagcccgcaaaagaaacatcgagcgcctgctggacggcctgaacattccggcacgcttcgaaaactgcacgcttcagaactatgagccagtgaacgacgatgcaaaacgcgccctgaaggtctgccaggcatacgccagccgctggcctgagcgcttgcagaagggtggcggattggtgatgtgtggcaagccaggaaccggtaagaaccacctcgctttggctatcgcccggcatgcgatcaccgagcaccaaagctcagctgtgttcaccaccgcgctgaaaattgcccgtgagtacaagtcgacatggtcgaagggctcaatccgtactgaggatgaggtgatccgttacttcacaaagcctgacttgctgattatcgacgaggttggtgtgcaattcggaagcgacgccgagaagttgatcatgttcgaaatcatcaacacccgatatgaacgcatgaagccaacaatcctgatcagcaaccagaccagggaagaactggcagcattcatcggcgagcgcgttcttgaccgcatgagtgacggcggagggtgcactctgtcattcacctgggattcttaccgttctaagggggcagcgtga

SEQ ID NO: 79886 - DNA, 546 bp, Citrobacter koseri
atgagtaacaaatacgaggatctgattaaaaacgccaggatgaatgccgattgcggtgagcacatgtcaccggcagaagtcacgaccctgcttaacgttgttgaaaccacattctctgcgctggctgctgagaatgcacttctgaaaaaatctgaaccagcaccattcagcaagctgatgatggaggctcttgatgtttatatggcgggcgctgatgaagtgcctgagctggcaatgttgagtgcgtataaaaagctgcgagatggattaaaaaccccagcaaccgacgctttcctggctgaagtgcgggcgcaggggcgtaacgaaggcatcaactatgccgccagtcgtctcgccgctgcattcaatcacggtttcgttgataagcctttgtctgaagtctacgacgtggtgcgcatgattctggacaccaaagaagaactggcaaactccacgctgccagccgcagatggcttatcaggtgagtacgctgaagagtttatcgaaaattccacagttgagcttcgcaaaggagcagcccaatga

SEQ ID NO: 79887 - DNA, 1326 bp, Citrobacter koseri
atgagcactaacgcagcagcggtaatcgttccgactgatatcagcgcaatggttcgtgaaattgagattgcttataaccgttatctcactgaatttcgcattcctgacgatcacaaaatagtcgtcaacttctctgccggtaaagacagcacaacaacagcgactattgcccatcacctgttcggcgaccgtgttcaaaacgtaatggctgatacagacaacgaacatgaattgaccgttgattttgcccgtaatgttcatcatcagatcgggtgtaagccaattcagattgttaagcgcatttataccgaaaccgagtttgagcgccgccgtaaatcaatcatggagcgctggcctaaaaaacaggtaatacgcatgggggcgtatcgcggcgtggtcatgccgtcgctggcgcgctcagatacaaaatttggtcaggcttggcgtcgtggaacagcaaaacgttgggggattgatttcgaaacccctcttgatgctgctctatctgttctgcatccgagtggaaacagcttccttgacgcggcgttattgcacggaaaattcccgatgatgcgtgaccgtttttgcactgatgaattgaaaatacagattgcgtttgatgcagcgataaagccgctcctggatgacggcgaggttgtcgttcagtggtctggtgttcgcgccgatgagtcagacaagcgcgccggttattcgagatttgcgcgtgatgagcgtgaccccgatttcctctacaacttcctgccaatccacaaatggacggcggcggatgtctttgcgctgcacaaatatttcggcatcactccgaacccgctctatacgcagggcgcgtcgcgcgtcggttgcatgaactgcgtgttatgcaccaaagaggaaatatcagagacggcggctcgctggcctgaacacatcgaaaaacaccacgagtgggagaaaaaagtacgcctcgcttctcgttgggtccactggatgagtgtcggcacagaaagtcaggcgtggatgcgtgttcagttaggcgttcgggatgtcattcgttttgaactggatgaaattacaggagaggagattgcgttacgtaaacgctatccgataaatctcggtcaggaggtcaaattgtacggactggagccagacgttcagcacatcgactggtcaggattctacggtccgcgcgggaatatgggcgcaccgtccgcgcttgacgttgtcgagtgggccaaaacagggcgcggagggaaaatttacgacctggttaaagccagcctggataccgcagtgtgctcatcccgttacggtttgtgtgaataa

SEQ ID NO: 79888 - DNA, 528 bp, Citrobacter koseri
atgagcaacatcgacaaacgcgcattacgtgaagcggcgggaaatgctactccgggtcgtattggcgatcgcgtagatggaagcatcaaatacacctgtagaggcactgatggaacactggttctttcaaccaacaaccatgatgattatgggtttgttggtgataacagcctggaggatgagcggttcttcaggttatgtgaccccgccaccgtgctggcgctgctggatgagattgatacgctccagtctttccacactgcattcactgaatggcacgacaaaacagagtgggtacagagtgataagcgttttgacgtcattaagccgtggggcaaacatcgcgccgatgtgttgaagctctacatcgagcatctggaggcgaaactccaaaccgctgacaaattgcaggatagcgcgtttcgtcatggtctccagcatggcttcagtttaggtcaaacggataaccaggctgggtttgaagagtgcttatctgcatatggctcgaggggtaaagacaatggctaa

SEQ ID NO: 79889 - DNA, 210 bp, Citrobacter koseri
atggctaagtcaccattacgctatttagttcgctcatataaaaaaacgtttattgcatggggtattcctaagcgaaccgcaaagcaaatggctcgtgaaaacgcacttgttacatggtttgaacaggggcaattggttcggcaggaagtgacggaccagaatacttccgacgattacgtttctgaagatttaagttattggggagactaa

SEQ ID NO: 79890 - DNA, 555 bp, Citrobacter koseri
atggataatcgctatgaaatggcagagcagaacggcatgagccgagagtttgccgactggttctttgataacaaaaaggctggctgcggaaacgtctggttcatgatgatggcggctatgtgggaagggtggaaaggtaatgccgatatgcagtcgctgcccggcatccatagcgctccagaactgaattctttgcaaaataatgccgggtcggtgcccggcaccctgacagcgaatgaactgtctgcaattcttagctggctgacgccaccctatatcatcagtggtacacgctctgacgagttcaacgaactgcgtaataaagtcttttacgctctgcgtgatgctcagaacgatgaacctgtaagccagccttacaagttgccagatggttgggtggttgtgccagttgagccgacacctgaaatgattgctgctgcaatggatagtgatgacgtgtctttcgataagaaggatgacacgatgttctatgttcaccacgatgctatctggcgagcaatgttagcggcagcaccgcagcaggaggtgaagtga

SEQ ID NO: 79891 - DNA, 642 bp, Citrobacter koseri
ttgaaatcgaatgggccaagcagtggggtgaatcccatgcgtaaaccatcccgccgtaagtgcaaagtatgcaatgagtggttcatcccggcatacgacaacattcgctggtgctgccctgagcatggcgctatctacgcgctggagctgcgcgcaaagcaaaaggtgaaagaggaggccaagcgaatcaaggatgaacgccggaagaagcaggaatcgcgccggagccatgcagaacgacgccgggcagtaaagcccctcggtcattgggtgaggatgactcagcgcgtggttaacgattaccgacgtgaactgcttctgtcagccgggcatggctgtatctcctgcggaaccagaactgcaccggtctggcatgccggacattaccgcacgacagcagccgcgccacagttgcgattcaccgatgaaaatatttggcttcagtgcccatcctgtaatgttcacaagtcaggaaatatcgaagcctatcgcgctgcgctggttgaattgatcggcgaagaaagagtgcaggcgctcgagtccaataacgaaactcaccgttacacccgcgaagaactggacggcatccgcgccgatgccagggcgaaacttcgcgccatcaaacagcaggaggcagcatga

SEQ ID NO: 79892 - DNA, 510 bp, Citrobacter koseri
atggatttaaagtcagcatacgagagccaaaagcgcgtggctttatatcgtggtattgagtggctttttacatatgaaacttggctggaatggtggaaaagcaccggtaaattacacctgcgcggcaatacgaaagaaaagccatatatgatgtgtcgggtaatggatcgcggtgcgtattcggttgataacgtttactgcggaacgattacagaaaataatagtgacgcttggcgatgcaatccaaatcataaatctggtggagtgtcaaaactatccaaatccagaaggtctgagatcggcaagctagcaagatcaaaagttaaaactttaactaccttaccaaaatgtgaagttgaaaaaagaattgaagcgataagtcatatagatatgacgaaacttggctgggtaggccaggtttcaaatgcgctaaacatttcgcacacccaagcaagaagattcatcacaaaatactatcagggcgaagtttataccagagcaaaggtttag

SEQ ID NO: 79893 - DNA, 222 bp, Citrobacter koseri
atgagcactaaatgtatctccacaggtggttatccggttgaagtggcaaccatggaagatgtagatggagaagcttacacgctgcctgctgcaactacttccgcgctaggtggcgttaagaagatggaagcacaggatgactccactgcaactgatgttgctggcgtggtagatgacctgaacgctctattggcagcagctcgcactgctggactgatgtga

SEQ ID NO: 79894 - DNA, 162 bp, Citrobacter koseri
atgatcacattaaaggtggttacacaaaagcggtggtgggtaagtccgctgctatccgtgcttaaggcactagtctatgcacgcatcgttaaagagaaacacttcaaacccctgtcaagcttcatcgctcaatggggattcaagttcaaaacagagaaataa

SEQ ID NO: 79895 - DNA, 477 bp, Citrobacter koseri
atggctaggccaaccaagtaccagaaggcgtacgccgagcaggctcgcaagctgtgcatgcttggctacaccgatgctcaattagcagacttcttcgaggtctctgaagcaactatcaatacgtggaagaaagagcacccagaatttctggagtccgtaaaaaaggggaaagaccttgttgatgctgaagttgtcgatagcctctttcagcgagcaatgggttatgttgccccggacacagatatccgcgttattgataaccagatagtcaaaacgcaaatcaagaagcattaccctcctgatactgccgctgccatcttctggcttaagaacagacagaagaaagactggcgagacaaaattgaccacgctatcgagggtgccaatggtggtcccgtagaggttgtcaattacacagcagcagattacgcagcagctcaggcagcaatggaggagaaactaaaaggcctggactga

SEQ ID NO: 79896 - DNA, 1677 bp, Citrobacter koseri
atgaacgaaattatcgaatgggatgatttgtcattccccgagcgtgtagtgattcgttcaaagtccaccaaatcgtttctaaacttcactcgcctgtggttcgaactaattcagggtgatcggcttctggttaactggcatcaccggttaatggcgtcaaagattgatgacctgatcgcggggcgattagaaccaggaaacctgattatcaacatcccccctggcgggacgaagacggaattcttctccattcactttcctgcatacgtcaatgcactggtgcaggaaggcaagctcaagcggttccgtaacctgaacatctcttttgctgacacgctggttaagcgtaactcgcgccgcacccgagacattatcgccagcaaggagtatcaggagttctggccgtgttcattcggcgttaatcaggctgaagagtgggagataaaagacgatcgcggtcgctcgatagggcagacggtatcacgctcaagcaacgggcagattaccgggggtcgtggtggctacttcgggcccgagttctccggcatggtcatgctggatgattacaacaagcccgttgatatgctgagtgagtcgcgcaggaacagcgccaatacgctactggtcaacaccatacgatcgcgccgtggtgataagtcgaaagaccacccaacgccattcgtgagcattcaacagcggcttcacaccgatgacgctacaggatttatgctctccggcggaatgggcgttaagttccaccatgtagccatcccggcactgattgacgaaaagtacattcagtcacttgctgagccctggcgctctctgtgctgggagactgtaaaagacaccgattctgtggaggtgtccggtactcgttactggtcatactggcctcagatggaagatgtgaacgacctcctgcaactatgggagaaagaccgttacacattcctctctcagtaccagcagaacccaatggcgcttactggcggcatcattgataccgactggttccagacctacaccacgcttcctaaacttacccatcgcgccgtatacgttgataccaacagcggcaaggttgaggactggctggactacacggtattcactctggtgggtatgggggtagacggaaacctctacatcatcgatgtcgtgcgcgggcgctgggacccggaagacctgctgaagaaagccgaagaggtctgggagaaatggcgcatgcaagggtcgatgcgaatcatgccaatgcggcacatggctatcgaagagaagcaggccggacagggtctgatcaccacgcttaagaagcgcagtgcgactcccggtcagattgctatcccggtgaaagaaatccctcgcggcgccggccagaacaagctggttagatgccttaacgtcatccctcagattaaaaccggaaaggtttacgtacccgcaacacataccaatgaaggggcggcattgacacacgtctattacgaggacggaacggtagccggtactacctcatgggtaatcaccgcaatgactgaatgcgctgcgttctcagctgacgacagtcacgacaatgacgacatccttgatacctggatggatgctattgacgacaatcttatttctggtcgccagccgatggttatcgacccgagccaactcaggagaatttaa

SEQ ID NO: 79897 - DNA, 1533 bp, Citrobacter koseri
gtgtggccgtttaaaaagaaacaagtcgccgcgcctgagccggtgaaagaacaaaagccggagatgaaaattcgtgctgaggcggtggcagaaattcaggctaaaccacctcgcgagattgaacagtacaagccaccaagcggagttatccctgagagcatagagaaaggaattctggcgatggattcagcgccatacggagcgctgaacgaagcttatatgggatacacctatggctatcctgacagcttcccgggctatccatacctggctacgctcgctcagaagcctgagtatcgcaagatggtcggcactatcgcagaagagatgacccgtaagtggatcaagctcaaaacagtcggtgatgatgataaagcagaccgcgttaagcaactctacgctgcgctggaaaagttcaaggttaaggaccgattccgagaagcagccgaacatgatggttactttggtggcggccagatttatatcgacgtgcaatccgctaaaggcgtgtcagcatggactgaccccgtcgagttgcagtcaaagcttttcctgtcagacaaaaagattaagaaaggcagcctgaaaggacttaccgttattgagccagtatggacttacccgggcgtgtataacacagataacccgatgagccctgacttctacaagcctacagaatggtttgtgatggctaagacggtgaatgcaagccgcatgctggactttgtatcacgagaagtgcctgacctgcttaaggcggcgtataacttccgtggactgagcctgacgcagattgcagagccttacgtcaataactggctgagaacgcgagacagcgttagcgacctgattcattcgttcacaattcctgtgctctcaaccaatatggcgacagtgttacagggtggtggagcagagtcgcttatcaatcgccttcagatgttcaaccagtgccgagacaatcgtggtgcttttgccgtggataacacgccagcacaagaggaaaaggcagagttcattagcgcacctcttggaggtcttgatgcattacaggctcaggcacaggagcaaatggcagcggtttccagcattccactggtcaagctgcttggcatttcacctgccggacttaatgcttcatctgatggtgagattcgagtcttctacgactacatccatgccttgcagcaatccatcttcaaagacaacctgaagcgcgttctggacatcatccagctttcagagtttggcgacatcgacccggatatctacttcgagtttgagcctctctacgaaatgacagagaaagagaaagcagagatccgcaagattgacgctgacaccgacgcggtaaacgtagcaactggagcgctgacgggtaatgagattcggcagaagatcgcaaatgaccctgacagcccataccactcactggacctaagcgatgacatcgaaatcgaagacgactacgaagacgatgaccagcgggaagaagaaatcgactcggcaaacgctgagagcaattcatcctaa

SEQ ID NO: 79898 - DNA, 804 bp, Citrobacter koseri
atgaccagcgggaagaagaaatcgactcggcaaacgctgagagcaattcatcctaatgccggtgttgaggcgtggtatcgcagacagctagacaaccacatcagagagatgcagaagtccgttgtgtactggctgaccgctaactacaaagcgagtggtgcagcggtggcaatggacgcatctcctgccgtgtttatgcgtgatgtcatgaagaagctcgctaagcgatggacaaaggcattcgacaacgtatctcagaggctagctgaaaggtttgccggtgatgcgatgaagaataccgacgtatctctgcataacgcacttgaaactgcaggcttcacggttgagttcaaaatgactgcaccgatgaccaacgcgcttcaggcgaccattgcagagaacgttgggctgatacgctcgattcccgagaagtatttcactgaggttgaaggtcttgtaatgcgctcggttgcacgaggtcgcgacctgtcttacctcactgatgaattgcagaagcgttatggcattacgcgtaggcgggcagttctcattgcacgagaccaaaatgcgaaagccacttctgttatgcaatcagcaagacaacagtcacttggtatcactcaaggcgtctggaagcactctcatgctggcaaagagcccagaccatcgcacgttaaggctgatggaaaggtgtttgagctaagcaagggaatgtacctcgatgggaaatgggtaatgccgggagaagaaatcaactgtcgttgcacctggagtcccgttctaagcttcctgaagaatggttaa

SEQ ID NO: 79899 - DNA, 1176 bp, Citrobacter koseri
atgaaaacaactgaacggttggcatttgaccgcgcatcagtgcgctcgtttgatggcaacggcaggcttcaggtaaaggtcagcaatatcagcaaagcgaatgtctgcccctatttcggcagagagattccaggagctgaacagctcgggttagagccagataagatttaccagttatggcgacaccctgatgaactgaagaaagccgctgcaacattcaacaacatcccccttttatcaatccatacacctgacttccccggcgaccctccgcgtgaatatcgcgttggcgtaacgcattcaaatgcagactttgacggaacatatctgacaaacggtttatcagtttgggatgactccgcaatcgccggcattgagacggaagagcaggaagaattgtcttcgtcgtaccaatacgtcgctgacatgacccccggagttacaccgaatggagagccgtatgacggcatcatgcgggacatcatcgggaaccacgtagcgctggttgaaaaaggccgcgcaggaagcgacgtattggtcgcagattcattacccccggagttaatgctcatgagcaaacgtaaagccgcgattattcgcgcaacgctgaagccgttactggcagctgacgctgatttggaggctgaagtacggaaggcgcttctggcgctggatgaagccgaaaaagaggacgagaaagaaaagaaaccggctgaagacgaggatgacgacaaggacgacgagaagaagaaaaccgctgacgacgaggatgacgaagacagcgatgacaaaaagaaaaagccagcagaagacgaagacgatgaagacgataaagtctccaaaacggcaatggacagtgcgatccgattagcaacagacagagcaacaaaacatgcggcggagaacttccgcaaagtgcgtgaagctgagcaggctgtgcgcccactgattggtgatgtcgttgcaatggactccgctgatgatgtctaccgtactgcacttgagcaggctggggtggatatcgaaggtgttcatccttcggccttccctaagatggtcaagatggctatcgaacagcagaacaacaaacgccctgtcattgcgcaggattccgcatctatcggcgacttcgagaaggctttcccgaccgctggcaaactgaaacgaggtttctaa

SEQ ID NO: 79900 - DNA, 483 bp, Citrobacter koseri
atggcaggttttcagagtgtaattaatcaatatccatcaccgggtgtggaaggcggtttcgcgagcaccaaccctcatgcaacctacctggccggagaagctgcattagtttctggcgaagatggcctgaccgttggtcgatttgcatgggatgttgacggtgtggcttcaaacgctggcaccggcgctccatcaggcttcgttcatcgtgatggtcaggcctcaatcacggtatggcttggtgaagcttcaatgctcattcagccaggccgcgaagtaaccctgatgaccgctggtgacttctgggctcgcacttcaaccgcagcaacgcgcggacaaaaaatcttcgcatctctgaccactggtcaggttcagactggtgccgctggcgcgacaatttccggttacgtagaaacggcattctacgctggcagcgcttgcgatgcgggcgaactcgttaaaatcagcacctggagcaagtaa

SEQ ID NO: 79901 - DNA, 1038 bp, Citrobacter koseri
atgaacgaatttcagaaacactattccgcagctagcggtaaatacggcatcattctgccaggcgctaaagactacctgaagcctgactttgcagaaaacttccagatggcaatggatgcgcagccaacaatggtaactgcaaacaacgcaggtattccggcgtacttcaccaactatgttgaccctgagctaattcgcgttctggtcacgccaatgaaagctgcgcaaatctacggcgaggtgaagaagggcgactggactaccctgaccgctcagttcccaatcgttgaaagcaccggtgaagttagctcctatggcgacttcaacaacaatggcatggtgagcgctaatgtcaactgggttcctcgccagtcataccactatcagactcatacccgctggggtgagcgcgatctggatatgtacggtgcggctcgtatcggttatgcagcagagttgaacgtggcatctgctctggtactgcaaaagttccagaacaaatcctacttcttcggcattgacggcctgatgaactacggcgcattgaatgatccaagccttcagccatcagttacccctgcacctacaggaactggcgatagcgttctctgggacgacaaagacggtcaggcggtttatgacgacatcgctggtcgcctgtggaagcagctagtagctcagacaaagggtctggtagagcgcaccgatcgcctcaagctcggcatgtcacctgtgttagaggtcaacctgaccaaaactaacatgtacaacgtgaacgtcaccgacctgctgaagaaaaacttccctaacctgaccatcgaaactgctgttgagtattcaactgatgcaggtgaaatcgtgcagttgatcgccgagcgcctgggtgagcaggacaccacttatgctgcattcaccgagaagatgcgtgcgcatgctgtggtggtcgaagaatcatcctggaagcagaaaaaatccggtggtacatggggcaccatcatccgtcaaccgctggcaatcgccagcatgctgggagcataa

SEQ ID NO: 79902 - DNA, 342 bp, Citrobacter koseri
atggctgaagtagttactgttggttgcaaactgcctaacggccttttgattgatgttgatggggtggttgttcacctgaacggcgctaattcttcatctgtagttggtggttatggcctgactgagggtgttgataaagactatttcgagaaatggttgaagcaacacgcaaatcagcgctacgtgaaaggcgaactggtattcgctcaggccaaaaccaacagcgcacagtccaaagctgccgaaaatgccaaagtaaaaactggccttgaaggtttgccgcaggataagccgatggaaggcgttgtaaaagacgaagaagcgatgaaggcgcgaggttaa

SEQ ID NO: 79903 - DNA, 444 bp, Citrobacter koseri
atggcgatcgttgttttcgacattaacgcattccgtgagcgttaccccgagtttgacacggtaagtgacacgctgctgaatgcgtatttcgttgaggcaacggtctaccttgataacactgattgcagtcctgttacggatgtgaatgtgcgtgcggtgtatctgaatatgctcgtagcgcacattgccgctctgaattcaggagtaggtggtgaaaatccatctggtctggtaggaagggtcgccagtgcatctgaagggtctgtatcagtatctaccggcgaggttcctgtgagtccatcatcatggtggtatttgcagacaccttacggcgcctcattttggcaggctaccgctccttacagaacgtttaaatacgttacaggcgcatcaccatcattctatcctggacattattaccgcaggccggttacccggaggtga

SEQ ID NO: 79904 - DNA, 453 bp, Citrobacter koseri
atgaccacgtttagtggcggcgctgctttagaagcgaaactggctgaactggcggaaaagcttggcgacggaaagacactaagggtcgggttccttgaaggggctacataccctgaagggcaatctgttccaatggtcgccgcagccaacgaatatggcgacccggcaatgaacaggccgcctcgcccattcttccgaaacatgatcgccgataagtcacctgaatggcctcaggatattgcgaagatagccgaggctaccggttatgacgcagaaacgatgctggggcagatgggtgagcatattaaaagtcagttgcagggctccatcagagatttaatggagccggctctttctccagtaactatcgctaaaaagggtttttcaaagcctttaatatggcatggtgtaatgctaaacagcgtcgattacgacattaaggatggcgtatga

SEQ ID NO: 79905 - DNA, 369 bp, Citrobacter koseri
atgaacctgagaggcatagccaatagcgccacaagatcaataaaccccaacgtagatggcgtgttccgcataaacaccggattcactacgctgcctggtggtaagcgagagcagacgtacagtgatattgatgtaacagtgcagatgcaggagctatcgtccaccgacttacgacagattgatgccattaacattcaggggattctgaagagcgcttacctgaacggaaacttcaacggggttaaccgacctgagcaaaagggtggcgacattcttatcgtgaacggtcagcagtggctggtggtcaaggttcctgagttatggcctgactggtgccgagtgatcgtaaatctacagaggtcaccatga

SEQ ID NO: 79906 - DNA, 549 bp, Citrobacter koseri
atgacagccacagttgacattacagaacttgacctgcggatcgcgctgcaagcgtttctgatggatatcaccggcctcaccatcgacaacgtgctggtaggtcagcagaacctcacgccaatgccacttcatgacttcatcattatgacgccactgaagcagacaggcctgtctaccaaccgcgtcaaatacgacgataacggcgtgtatggcgaaggcaggcagctaaatcagcgcagcacacaatggccctgtcagattgactgttacggcgagaacgcagcagataacgctgcaatcatcggtacgctaatccgttcagactttgcctgtgaatggttcaggcaaaacggcaatgtcatcacccctctttactgctcagaccctcatcagacaacgatgataaatggcgagcaacaatacgaaggccgctggacgatggaattcatcgggcaattcaacccgtctgttaccacgcgccaggacttcatggacagcattacagtcggcgttatagccgcagatttaaaatacccaccggagagttaa

SEQ ID NO: 79907 - DNA, 1479 bp, Citrobacter koseri
atggcaatcccattaagaaaggacgtccagattaaccctggcgttttgcctgctggcggttcagcgcttgatttgaatggcctcatccttaccgacagcgcttatgctccggtggggagtgttatcacgttcacgaacaaagaagacgtagcatcctatttcggcagtgcatcggctgaattcagcatggctgaagtgtattttcagggctacgacaattccactaagacccccggctcgctgctgtttgcacgatttaacccggaagatgcagcggcatggttgcgttctggatcaatggcagcggtaacgttagatcaactcaaattactgagcggcgtattgaccctgaccgttgacggtacggcagtaacgtcatccagcatcgacctgagcacggcaacaagctttgctatggccgctgacctgattgaaacgggtatcggatccagcgtaacggtagagtttgacaccactcagaagtgcttcatcatcaccagcgcgactgacggcgcagcaagcaccattacctacgccaccggcacgctatctgccggccttaaactgacagccgctaccggcgctaagttgtctcagggtgcagacgcagcagtagtaactgaactgatgcaatcagtgcttgatagctctcagaactgggcgatcttcacgacttcattcacgcctactgaacaggaagcactggatttttcctcgtgggttaatggtcaaaactaccgattcggctacgtgccattcacgctggaagaatccgcgctggtatctggctcaaccgacacgctggcttacaaaatcatcagcacttacgactattccaacgtcgtgcctgtgtttggtgaccagactcatgcagcgaatgttattggctatgccgcatctcttgacttcgaccgtcaggaaggccgcgtaccattcaaattccgctcactcggcggcctgctgccggaagtgaccacgtcagctaattacgatgcgctgattgccaacggctataacttctacggcgcgtacacggcgaacaactacgacacccgttactgggctgatggcaccattactggcgacttcaagtggttcgactccttctgcttccagatttggctgaatgccaacctgatgcaggatgctatcgagctgttccagtccaaccgcagcattccgtacaacacacgcggcaaggccatcatcgaagcgtcgttctctgacaccctgaaccagggcgttacctttggcggcatccgaaccggtgtgacactctccagctctcagatttcagaaattcagaatgccgttggctctgacatctccccatcgctgattgctaagggttactacctgtatatcgcagatgccactcctacgcagcgtcaggagcgcacaagcccgagcatgaccctgtggtactgcgacggtggttgcgtacagaaaatcactctcgcaagcattgaggtgcaataa

SEQ ID NO: 79908 - DNA, 441 bp, Citrobacter koseri
atgtccaacactattacaagcgctgattcaatctttgccctcactgttaccaacctgttcccgagcgcccaaacgctggaagggtatgcggctgacgcgatgtttgccctgggggatacggagatggctgtttccgtccgtggcgctgacggtaaactatccggtggttttgttttcggtgagtatctacagacgatcacaatcatgccggacagcccatctcgtgaactgttcgagacctggcagctgacgtctctgacctcaaaagcggtattccgctgcaacgcaacaatcatcctcccggcgattagtcgcaagttcaccctgaccaatggcatcctgcaacgcgttaaagccatccctgatgcgcagcgcgtattgcaggctatgaccttccagatcaattgggagtcggtaattggcgaggaatatagcgcttaa

SEQ ID NO: 79909 - DNA, 405 bp, Citrobacter koseri
atggcacgcaaagaaattttctacaccgtcgaagacaaaggccgtgacaatgggaaggttttctacattcgcgaaatgtcagctactcaggctgagtggtgggcaattcgtgccgggctggcaatggctaaaaacggcgttaatctcccggataacttttcagatatgggtatggcaggcatggcgaaagtcggactcgagatggtggctaaaatccctccagaggatgcacggcctctcctggacgagctgatgaagtgtgttcaggccgttccagatccagccaatcagagcatcaagagaccactgattgacgatgatactgaagaagttatgactcgcctgaaacttcgcggtgaagtctttaagttgcacgtcgattttttgaccgccgccgccagttag

SEQ ID NO: 79910 - DNA, 198 bp, Citrobacter koseri
atggggcagcaaatcgctggcctgaccgactatgccaacgtacctaaaacaatagcgacagttctgtcatcgggtaaatgctcgctgacagagctaagcacaacgcttggcgtagaggatttatggtggtggcttgaggtcattacgattgacaattacaaccaaatggtcatcaacagggctcaggagaatggctga

SEQ ID NO: 79911 - DNA, 1779 bp, Citrobacter koseri
atgccaacgattattgactcactggtagtcactcttggtcttgacccttcagggttcaggaaaggccagacagaagtaaaaaaaggcctggacgaaaccagaaagaatgctgaccagacagctaaagacatggaggccgcaggtaaaagagcggcctcattttttggctcaatccgaacagaattacttgcactggtaggtgtcactttatcggcgcagggcattaagaccttcatcaccaacatgacatcagatctgatgcggttggggattgaatcacgcgctctggatatctctgccaagtcgctggatgggtgggagagagcggcagcggctgctggttcaacagcagagagaatggctggcactctgggtaatttccagaaaacacttaccaacattcgaaccggtggtggtcaggacgatccacttttcggcgcgctggcatcatttgccggtgcgacaggagctaattttgactatcagaacgataacgccgaaaaaataatgcgcaagattgccagtaactggggcaagctgagcaaagacgctcagcgcagatttggcggtatgttcggtttcgataacgccatgcagcaggggctggctaacggttcgctggttcaggatgcagaccatttcgcgaaaatatcccgagcaaccgatgagtccacaagaaaggcactggagtttaaccgccgactggagcagatgaagcagaactttgctgccgcatctcaggtgctctatgaggcgcttattccgtacgttgagaagctcattcccctgattgagaagttcgggatatggattagcactcacggacctgaaataagcaaattcttctccgacacagcagatgaaatcaacaaggttgttgatgctgtaggcggcctggaaaacgctcttaagctgcttctggtgtttgttggcggaaagtggctgctaggaatgaccagttctattggcggcgtcaaaggtgctcttacagcgcttggtcgtgtaagcatgatagccggtctggttgagcttcagaaatatgcagaaaagcttgaaaataagtatgcgtggctgaaagacaaccctatagccaacttcctcaacagcggcgctggaacagataaaaccacggagtgggggaagcaatttcacgactggatattcgacaaaactggaattgagttacctcggggagatgggtacaagtctgcaccaagaggtattcgcaacaataaccctggtaacctgaattatgcaggccaggctggcgcaacaatggaaggtggcgaaggaggtcgctttgcagtgttcgagtcaatgcagcatggcgttgccgcactgtacaagcaactgcaactgtacttcaaacgcggcatcaacactctttcctctatcgtcaaaacctacgccccggcatcagacaataacaacgtagacgcctatatatctgcgctgacaagggctactgggaagggcgctaacgaggtgctggattctggcgacactgcaaccattgcaaggctgatgaagggcattgtcgaccatgagaacgggaaaggctatatcagctcgtctgacatcatgggaggaatccagttaggtgcaggttcatctgcgtctcggaatatgccagcagcggccggaagccagaccaacatcaatatcggcaagatcgacatgcagacatcggcaggtaatgctaatgctctaggtgcagatattcagagaaaccttcagagaaaccgcctggtaaatccagcgatctcagggcagggataa

SEQ ID NO: 79912 - DNA, 804 bp, Citrobacter koseri
atggcattttcactgaacgaaacaacgctacttagcgcgataaacagcggcaatatcttctccatcatcaacagtaccctttcgcctggctacgggatttacctgaagtcaggcctaagggcattgtctccatcctcatttctcgggattgagtatggagctgatgcttcagtggtatcgtctccaattgagcagggttcttacagcagctttaacaaggtaaaacggccgccaattatccgggtgctgtttaccctggagggatggactggatttagcggtagcatccccaacctgaccaacttcacgctgacgagtcgctctgacatgctggcggctctggatgcgatggttgccgatgctcaggtgtacgacattgaaacgccggacaccacatacgaagactatgacctggttagatataattacaggacatcagatcgcgatgtaacccttctgacggtggaagccatcttccaggctgttttgcaggaggccgaagtaactctgacaagcaccacagccaacagcaacaccacatcaaacggcacaagtaaggcagccagcgtcgttacagagaaggcaaattcaacagccaccaactccactcttgaagatgtaaaaggcgcgctaactggcctgaaagaatcagtatccagcgctgcgacgaccgtagccacttccgttacaaacgcagtaagcaatgcaacatcaggtgcaacaagtgccatcaatggcgcggcgacgtcggctattaaaaaccttgcgacgacggtcgatgaactggtggcggggttatcctga

SEQ ID NO: 79913 - DNA, 306 bp, Citrobacter koseri
atgcagaacatttctctaaagcctctcaaggctcaggaagtcagtgttaatcttgatggacagtcagtaactctgcgcatcgtacagcgctctacaggtctgtttatcgacgtaggtctggataacttatggatagcgcaaggcgtgctttgccataactgcaacaagatagtccgttatccgtacctgggatttaaaggagagcttttcttcgctgataccaagggaagccttgatcctgtttatgatgagctaggaacgcgattcaagctgttctacgccacagcagatgagatggcagcatga

SEQ ID NO: 79914 - DNA, 855 bp, Citrobacter koseri
atgacctataaaaagagaaagctgaaatttcagttcacgctgaaagaaggtgctttcgatgagtcaggcaataacatcctgaccatcgacaacatcaaggcggaaattgagataggtgcttacggcgggatatcaggaaccacactggaggccagagtttttggtctgagcatcgaaaacatggcgctgctgagctataagggcatccagttaaatggtgccaggcagaacatgatgaaagtgtgggcggatgacaggccggtattcttcggatctatcaccaactgttttgctgaccttaatcagatgcctgatgccccgctaataatcagcgccttttccacaggatttgaccagtcaattactgcgcctcctttctcaaaagaagggattgccagcgttgcagaaatcatcacgacaatagcagcaagtattggctatacggtggttaataacggagttctggcgaagctggaaaatccttacttcgaaggcaacccgatagcacagattcagcagtgcgctcacgcggccggtatcgagatagactttcggcttggtgctatttacatttggctgcagggtggaagcattgacgacactataccgctcatatcccctgaacatggcttaattggatatccggtattcagtaactacgggattaacttccagtgccagtacagcgatctgattttgcgcggacgcaaggtccagatagaaacctctcttccaaacggtagcgggatttatacggtgcagtcagctattcaccatctttctacatggactgaaggagcgccctgggcaaccgtcgtctgggcatcaatgggacagctaacagtgaggcagtga

SEQ ID NO: 79915 - DNA, 702 bp, Citrobacter koseri
atgaatttatttactacccggcctcaggacacggctacagacgctaactctcagcagttcctgatgcatcagtttctgatgggcaaatcattcatcacgctggcgatcgtaacttcggttagcgagtctggagaagttgtgtcagtcaagccgatggttgagggatttactggtggcggtgatctgattccgaactcagtgattcacggcgtgccggtctggagactacagcgcggagcaagcgcagtgattatgccgccaattgccggtgacataggcctgattgcaatttgcgatcgcgatattacggccgttaagaaaacaaaacagtcagcattgcccggttcgaatcgcacacacagctattcagacgctatctatctgggtggtgtgctgaacgcagagccaagccagtatgtgaagtttgccaatgacgggatagacatcgtttctcccctgcttgttaacgtgaacggaaatatagtttccataaatgcagacagcagagctgagataaatgctccagagattcttctgaatggccaggttgggcagggagagggaagttacggtggaaccgctcattttaaaaacaaagtcacatctgatgtcgatttccaggctggggatatatccctaatcggacacaaaacctcaggggtagagcctggctctggcacatctggtacaccaacaccttaa

SEQ ID NO: 79916 - DNA, 357 bp, Citrobacter koseri
atgctcaccaaatcactgcttttgacagaccagtgggatatcacattggacgacaccggcagcatggcaatcacagccaatccttatgcggtagctcaggatgtagcgtgttcgtgttcaaccttccttggagaggcctggtatgacaccacgctggggattccgtattacgagcgcattctcggtcactggcctggcacgcagctcatcaataccaagatggctaccgaggccaaaaagctttcatacgttcagtccgcattctgcaccacaacagttggcaaagcagatcgccttgcatccggcgtaatgactataaccgaccaaaacaacgttcagaccacaatccaattctga

SEQ ID NO: 79917 - DNA, 1233 bp, Citrobacter koseri
atggctgaagtaacagttagcacagccgtcccctctgtcacgttttccgctaccggcattgccgttcctgacgagatagatattctcaacggacgattaactgaccttgataccgctatgggcggggggatgagtaaaagcctgacgactccgcagggacagattgccatgagcgacacggcaatcatcggagacaagaacgacaatctggcgtggctggttaaccagattaaccctgactttgcagaagggcgcatgcaggatgcaatcgggcagatttacttcatcgaccgcatcgctgctattggcacaacggtgaccgcaacctgcaccggtcttgttggaactgttattccggcaaacagtattgcgcaggatgaaagtggttatctttactactcactggctgatgccgtcattccgtcatctggttctgtcgatgtcgtgtttcagaatcaggcaactggcgcaatagcctgcccaatcggggcgcttaacactatttaccgcgcaatccagggatggtcaggaatcacgaatgccacagctggcgtgctgggcaacgaggtagaaagccgggcaaactttgaatatcgcaggaagcagtccgttgcgggtaactccaacaaccagctcggggcagtatacgcaaatgtgctggcggtcagtggcgttactgatgcatacgtaacgcagaacaacacaggactggctgttactaagggattcactgacgtctcactggagccacattcactctatgtgtgcgtgtacggtggcacatcggaagatatcgcaaaggcaatctggcagaaactaccacccggaccttcgatggtaggcaacgccacgtacacagttgttgacgatgataactacgttcagccgtatcctgaatatgaaattaagtggcaagtaccatcagcggtaagtgtctatttcaaggtagaactggcagataacaacgcacttccgggcaacatcgcaacgctggttcagaatgcagtcattagctcattcaacggtgaagatggcggcacacgagcgcgtatcggttcaaccatttacgccggtcgttactatgcaggagttcaggatatcgatagtgacaacgtagatatcttcagcatcaccatcagccgtgacggaacaacatatcaaacatccgcatcctttggcattgatgaagtgccgacactggacgcatcaaacatctcggtgacactggcatga

SEQ ID NO: 79918 - DNA, 588 bp, Citrobacter koseri
atgataaacgtcgcggatactatcctgacgcaatacgccgacagcccgaaactcaaatccctgatttactcgttcaatgaagccgtaggtattgaaggttttcttgatgatttctatgacgtgatatggaacatcaagacggctgacacctacggtctggatgtgtggggtaaaatcgtggttgtcagcaggcagctgacggtaacagagaaccagatttacttcggtttcaacgaagcgtcatcagcgcctccggttgttgatgaccctcaaccttttgaccaggcgctattttattccggcgagcttctcacctcaaccgtaaaccttaccaatgatgcgtatcgcaagctgatcatgatgaaggccgcggcaaacatctctgactgcaccattccacaactcaacaagctgctgatgttcatgtttggtgagagtggccgctgctatgtcagaaacgacggcgaaatggccatgagttacgtattcgaatttcaactttcaacagtagaactggcgatagcgcaaagctctggtgcgcttcctgccccgataggggtaactgttaatattgttcagcaggtatga

SEQ ID NO: 79919 - DNA, 1038 bp, Citrobacter koseri
atgaacttcacagatatcccggcacggattcttaaagcatttggccttaacggcctgaaaaacaccatccctacggattccagcacctcaacggataacaacggcgtagctactttcgataagggattcccgccaatcacaatgcagccgttaagtgcgggtggcattcctccggcagggaaagatatgaacggcattctgtacgctttaagcctgaaagaacagtgggctgatgcaggcatgatctacccgttcaacagcgacttcgcgagtgctatttcaggatatccaaaggggtctgtgcttcttaactctcagcagtcaggtaagtggctgaacctgaccgatggtaactccacatcgccagagtccttgacaggcgcaagcactggatgggtgccattagataactatggcgtaacgaccatcacaggacttgcggcaagtaacgtcaccttaagttcattacaggctgcaaaagagaggatcgtgcttaccggaacacttacaagcaacatcgccattatcttcccagcatggatgacatcgtgggcggtggtgaataactgcactggttctttcaccgtaacctgcagaacggcttcaggtggcggtgtaaacgttcagactggtacaaccgcatatataacctgcgatgggacctccattactgcagaaaacccactcatggtggctgcgggaacaaaaagctcgcaggcagttaactttggtcagtttgctccaacgttaggaacttccgggcagcagccaatcgctggcggcctgatattgaagtggggagagcaaactttgaacacacaaaacttaaacgtcaccttcccggatccattccccaatgcttgtgtggcccttatgccaacgcacctgctggaaagcacaaatgattatgtatttgctcagtgcacctcaaaaacaacttctggcggcgtaatagctatttatcgagccgcaccagggagtgcgccagctgcaaatgcgcttaacgtaactgccggatggctggcgattggatactaa

SEQ ID NO: 79920 - DNA, 2490 bp, Citrobacter koseri
atgtctttcactgatactcaaagcgctaaaaaatatgcctcgatcgcagaagttgcggcggcgcaggcaaagatatatgcagagaagttagaaaacgctccagattatgccgcacaggctgaggctgctgctgaacaggccagcgattcagctcaatcagcacttaccgcacagaatggcgctaacgcggcagcaggtcaggcgagtgcttcagctaacgaagctgtacaggccgcggctgatgcagaaggtgcagcagccgcggtatttggcagctctctgcacgctcctacaggggaggtgttaagcaccctcccttcagcagcaggtcgagttaacacagttcctgtatttgatggtgctggcgatgctactgtaaaggacattgctgatttcgccatcctggattctaacgggaaaattcccgtatcaatgattccagcagtggcactgtcagaagtgtttgtggtgaacagccaggctgcaatgttagctcttgatgcgcaggagggggatgttgctaagcgcacagatcttggttattcgttcatcctcgcgtctgagccagcatcaactctgtccaactgggtacaaataagtgacgacgttcttgcgcaacttggattgtcaactggtgcaactgaggttggggcagttgatgatgacggtaattcaacaaccgttcagggtgctcttgctctgaaggcgtctaaggcttttctgtctgcatcttctggttccacacggattggtgccggttctacaaccgtagacaacctattagtaaaattcagcccgctacgttatggggccaaagctgatggcactaatgacactgcagcattcacgacatgcatggcagccatgccaagtggcgcaacgatggatctacagggcctgacgtactccgttacggacatcgaagtcacaaaaccgatgcgcattattaatggaacgattaatgtgctgtatggttcactgaagggtggtatatatgtgcatgatactaataatgtgcatatccagaacgtgactactatcgttgactatgcaaacaaatcttcatacacggcagataatgtatctggcattcatttcgaaaactgcgctgacatttcggcaacgaactgtactgcgataggctctaagaatgatgtttaccttctcactgggtcatggggctgtcctatacatgcctatcaatgtgatggagtaacgttccacaactgtaaggcgagccattccgataaggaaggaattatgactcgtttctgtaataacgtgaagtatggcctgctgaccgccacagattgtgggtattcaggagttggcacatctggtggtaatggattaattgcatgcaatatttggtcatacagatctggcctcacaaatgtatcatttaacagcacaaactttacagttgctggtatttacagtgaggggaatttggatgaaggagggatttgccttgggcatacgcacgagattcctcaatatgcaggaagtgggacagcatctgggctgacaattattaattccgccaagaatgggttggtcattgggaagcataagaacataacgattagcggagtgacaattgataccgtaggaacggttacgccaggcgctggcattgtgataaatgatgccatggaagccaattgcaatgtggtgattagtgattttaacctcaagaacatcaccggaacgggtataaattacctgttcaatgggagcacgaatctaacaattgatggcggcataatacagggttgcacccttaactctatacaggctcggcataatgggtatacaaacatcaggaatgtgacattcagaggtaattcatacgacatcgcagtgttcccatttgctacagatggaacacaaaaaatgacagccttaaatattcaaaactgcgatatggaatttacaaccaactggaatgtggtattcagaggtgtgcaatatgttaaattcgacaacctcataaccctaggattcaattctgcaagtgccacgaccatttcatccgtaaggtgcgatactgtggttggtagtacatttgaattgccagattcactggaatttaatggatgtagatttactggaaatgttgggagtggggtagctgctaccattgtcatcaacaatgatgggctggcgacaactggcaaaaggctgaaggtaaatggatgtcacttcagcgataccacgaagaagcctattcaatatacagcttctcgtatgtctatgcagtggggaagaggaaatacaagggggacagatgtaggaactcagacagtaagccttccctctactgttggcggaacagtggttataaacaatagcaacataaccgatgagggcatgcctcttattgttccaagaggtgcgtcgtggtgctatgttacttcctgggcgctagggactataaccttagctaacgggacagcaacatcaataaacgtgaccgtacagcactaa

SEQ ID NO: 79921 - DNA, 1092 bp, Citrobacter koseri
atgaaatcattgaattaccagaggttgacagctaatcaatcagtatccctcgatacattgcgtggattagcggctgtgatagtagtgatctgtcattgcgctcagctcttcattaatcaacatcttcctgaatattacagatttttcgctgttctggctcagtcgtgcgtaatgattttctttgtgctcagtgggtttcttattacaaaatccataactggcaacattgcacgtaatggtgtactggatttaaaagattactctgtaaagagattcgcaagaatttaccctccgctagtattctcatttattattgttgcagtgctcacaattctatctcaccagatttttatttcagcagatggaagtctttcaacagctaatggatgggttaataagtatggctttgacgtcgacattctaagctatgttccatcagtaattatgtctaacgggtttataggtgatatgtctcctaagtccaactcaccattatggagcctatcaatagaggtatggtactacttaatagcgggaatgatattaagtgggagaaaagaacttattatcgcgagcttggcgatagggtattttgggatatcaaataaccctcctttcttctactattcaattgtatgggttgtaggtgccattctatgcctaatgcatgacggagttataaaatattcaaattcagctaccactgccgcgctgctaatctcggctgcgtatgcattttataggctggttgtgatttataatgaatttaacaactctaatctcatgctagcaaatgtctcgattggcttatttatggcagcattgatgcaaaaaagtgtaattgagagagacttaaggctgtccatcatcccatcaatggcatcgttttcgtacacgctttatatcatccatttcccgatcttgctttttgtgttcggttgctcgcaggaatacagtcaggcaacattgttgaatgcgcttacaatggctggaattggattcgtggttagcattgcgacagcatacgtgtcagcaaaattcgttgagaatacgaaactattcacctcaatacttaaacaaaaggccgcctag

SEQ ID NO: 79922 - DNA, 240 bp, Citrobacter koseri
atgccacgcacagcagacatacacgccgccttcgttgcggtcatacagctcaaccctaagggctatcgctatctgagcacagacagcttcatcgagaaattacgggagttcaactggcactttacccgtactgacgccaatgcatggatagagcgctatcaaaaagacttcgctgataagaccaccgacggtagcgataaccgctattggatcttacgcaacatggggagggtgcaataa

SEQ ID NO: 79923 - DNA, 324 bp, Citrobacter koseri
atgggatttgcgtcaccagcgaacgattatgtcgagcgccagctctcgccagaggtaatttgcaacataggggctgagagcagggttctcgaaactgatgttggctttgccatcattgaacctgcggccaaaagcgcgcccggcgatgtgcttttaattttatgtgaaggcaggactcagttcgccaagctcatgggacaggctctcatcactgatgacggaaaggcgatagaaggggtagcgctggaagaggtagaagtgctgggccgggtatcgttcttcatcaatcgcgcattcaacgatgacgggtgcccggtgatgtga

SEQ ID NO: 79924 - DNA, 216 bp, Citrobacter koseri
atgatgcgcccttgtactttgtcacatccccagggggagaagctcttagtttaccgcgtctttcagcgctttacctgcacggaaacccggcactttagcggcagcgatggtgatctctttacctgtttgcgggttgcgaccagtacgggcagcacgctctttaacagcaaaagtaccaaaacctaccagcgctacatcatcaccttctttcagtga

SEQ ID NO: 79925 - DNA, 393 bp, Citrobacter koseri
atgattactaaatcatcaattactttaagtttaataggcttagtgtttttttgtggcatagtaatatacattctgatgtttattgccaataagaatttctatactatatgtgatttatacaaaaagaaatttgggaagttaccattaggtacagaattattttatacatcttcaccatttttcttggtaggatttagtatgaaactagatttcattttatggcctatattgtataatagaaaatcaagatatagtgataatgtaaatgatgtggaatttataagatcacttcctaagaaactcacaagaatctacatgattcactttttttttagtgtaattaccgccttgtttttttgtatgttggtgataatgttatatataataaaatag

SEQ ID NO: 79926 - DNA, 654 bp, Citrobacter koseri
ttgagttggcttctattagaagagcatcataattttgtctctgcatggcagcttattaatggtattgctcaagtcagtagcgtcaatctatcccgttcggcacatttgcttacgagattgaacgagttagatccaatagatggaggatacgtaatcccattttatggatacagaaagtttgacggctatttcctcgcatctgaaagcgaaactgatttatgtatcgaagccttaaaaaaagctattctcttcgagacagtatctttttttgatggtgagaaaaatattgatattccgcttgaagatggattaaaagtgcagaaaggtatggatttctttttcagaaaacaggacgtattaaaagctatagaatataaatcaacggaaatgggagtagagataccactaccctcctgcataacagctacaccgaaaatcaatccgtctatcccaaaaacatccaaaaaaactgaaaatgctcaagcaaggttcataaaaaatcttctcacgatcatgtacggtgaagaggtctcagccaaccccagaagatacattgagggaaaagataatcaaataaaaaaagatatggacgcaaaaggtcttgactgccctagcggaattaccgttgataagtggctttctgatgttgattag

SEQ ID NO: 79927 - DNA, 279 bp, Citrobacter koseri
atgagcggcttcattacatgcgcagcggtagtgcgccgcgtctctcgtggaaaacaagaggtatgcccacaagaatccgcgccccgcaaggcttccgcgccagttgtccagaccgtatttaagcctcatccgtggtttaagcgtgtagcactcgatggtaaatggcagttcgtctacgccgaccacatccgctttctgacgaaaaagcgtcatcgcgtcgatggtgttcgggtgcagggttataccgctggcgggctgaaagtggaggtgctgtcatga

SEQ ID NO: 79928 - DNA, 648 bp, Citrobacter koseri
atgcgtaataccagacacaatcactttcaggtcaactccggccagacagataaatatattcgtatgagctgccaggaggcggaaaaaaacttcgtaaattatttctaccgcccacagagtgaaaatggcgaaataattccggcgacctgcattcagaaactcgacagtggagagtatgacaccgatttagtggcgggcctgcgtctggtggctgctctctggcacggtgtgcatgccgggggttttattctgagcgatgaacagaatctggtgctctggcgctgggtggtggccgccgtgtttgtctgcgagatgttcgataccaacggaagtgtcgaagtgaaaaatgagcagggagagcctgaagaggtcactgtgtataccggagaacatggcggcatcggcatctacccgtggtcggagcgttttgctctggcgcatcacgttgagggactggcgtatgaagtgtttccaacagaaaaggccgcggaaatggcgatggtaatttaccggagcatgcttgagcacgatccggtgaccggatttcgcatgtcggtacagggactgaaggggatggcgcttcttcatgacggttttattgagacgctgcaaacggaaggtattccagcggcaccggtagttcactga

SEQ ID NO: 79929 - DNA, 336 bp, Citrobacter koseri
atgaaaatgaatgacaaaaaccctgagttctgggcggcgttgctgtcaggactaaaaaacgcatggcctcagatcctcggggcatcaatggccggactcattgcctacggtcgcctgatatacgacggtgccacccgtaagaataaatggctggagggcgtcctttgtggcgctctttctttatgtatcaccagtgctcttgatgtggtcggccttccggtatcgatatccccctttgttggtggtgtgattggattcgtcggtgtggacaagctgcgtgaaatcgctatcagtgcacttaaaaaacgggcaggagtgaacgatgacagccagtaa

SEQ ID NO: 79930 - DNA, 366 bp, Citrobacter koseri
atgaagcgcttagccctcttatttcttgtttttatgtcgtatagcgtgcttgcagcgcccgttttgcgctttaagtgcggtgacaataactttgttatgtatgtgaatgcctcaatgaccaaacaggcagtcataatgaacgaccagctaacagaaaattcagccactgaccagtatccgtacggtgacttgggtgattcggtggtaataacatttgatgtatggggggcgaacggtgggatgcataaccactacacaactgttttccctaaagattcaaaaactattaagcaaatagttcagattttagacgcagatgatcgcccccgtggtgatgccatccataagacctgcacgagagtgtag

SEQ ID NO: 79931 - DNA, 240 bp, Citrobacter koseri
atgatcgctctactcgacctgatgctgtttacaattacagtgattttctggagagattttatgttcattgaacgggtttacgataagcgaaatgctggtgggctagcgaaagccagagaatttattctggttggaatggcaaaacacgtacaatccgcagttgcgtcgtctgcaagagtgcagttgcggcaattagctattcttcaccctttttctgtccgcatcacccgcaaaaaataa

SEQ ID NO: 79932 - DNA, 582 bp, Citrobacter koseri
gtggctcgtccgaagagtgaagacaaaaaactggcgttactggaagccgcaacaaaagcgatcgcgcaatccggcattgccgcctccaccgccgtcattgctcgcaacgcaggtgttgctgagggaacattgtttcgctatttcgcgacaaaagatgacttaatcaacgagctttatctgcatttgaagcaggatctctgccagtcgatgatggcgaatctggaccgctcaatcaccgacaccagaaccatgacgcacttcatctggaacagctacatcaactggggcctgaacaacactaacgggcaccgcaccatccgccagcttgcggttagtgagaaaatcacgaaagaaaccgagcaactggcggacgatatgttcccggaactgcgcgatctctgccatcgttcggttctgcccattttcatgtctgacgaataccgcgcctttggcgatgccctgttcctcaccctggcggaaaccacgatggaatttgccgcccgcgatccggcccacgcaaatgagtacatctcgctgggttttgaagcgatgtggcgcgccctcacccgcgaggaaaaataa

SEQ ID NO: 79933 - DNA, 270 bp, Citrobacter koseri
atgaaaaaagtattagctctggttgttgccgctgctatgggtctgtcttctgctgcatttgctgctgaaacggcaacgtccacgacggctccggctgcggctgcggcacccgctaaaaccgcaccggcaaaaaccacgcatcacaaaaaacaccacaaagcagcagcgactcagaaagcgcctgaacaaaaagcgcaggcagcgaaaaaacacaccaaaaaagcggtaaaacatactgcggctaaaccggcagctaaaccggcggcataa

SEQ ID NO: 79934 - DNA, 243 bp, Citrobacter koseri
atgccggatggcggcattgccttcagcacatattgtaggcccggtaagcggagcgccaccaaaccggtcacgctggaagcgaagctgatcggccagggtgacgatccgtggggcgggaagcgcgcgggctttgaagcggaaggtaaaattaagctgaaagacttcaacatcaccaccgacctcggccctgcatcgcaggaagtcgatctgattatctcggtggaaggcgtacagcagaagtaa

SEQ ID NO: 79935 - DNA, 507 bp, Citrobacter koseri
atgctcagtaaactgcgccgctggctgcgtgaaggcgcgatcttactggttctgctggcaggcgtgataatcctgctggatgtctggcgttctccgcagatgccagccatgtttgtcagcacgccgctgcatacgctggacggggaaaccgtaacgctggcgtcgatcagtgaagagcgcccggtgctgctctacttctgggcgagctggtgcggtatctgccgtttcactacgccggatgtcgcccgtttgcagtcggaaggggagaacgtcatgaccatcgcgctgcgttccggtaatgacggggaggtttcccgctggttatcgcgtaaaggggtgacgttccccgtcgtgaatgatagcggcggtgagatatcacgaaactgggaaatcagcgtcacgccaacgctggtggtggtgtcgaaggggcaggtggtaaccacgaccagcggctggaccagctactggggcatgaagttacgtctgtggcgggcagccatgttttga

SEQ ID NO: 79936 - DNA, 624 bp, Citrobacter koseri
atgaaatatctgatgattatgctgttagcgctgtttaccggtctgagcgcggcgaaagaacccgcgccgtttacgctggagcaggaaaagcaaattgaagcgctgatccaggaagcgctgtttaacgatcctgccagcccacggataggcgcggagaaggcgacgctgacgctcgtcaactttacggactacaactgcccgtactgcaagcagctcgatccgttgctggagaagatcgtgcaaaagtatccgcaggtcgcggtagtgattaagccgctgccgtttaagggcgaaagctcggtactgtcggcgcgtaccgcgttaaccacctggcgtgagcgcccgcagcagtttttagggctacatgagaaactgatgcagaaaaagggctaccacaccgccgccagtattaaacaggcgcaggaaaagtccgccgccacgccggttacgctggatgagaaaagcatggagacgttgagcaccaatctgcaactcgcccggctggttggcgttcaggggacgccagcaaccatcattggcgacgagatgatccccggcgcggtatcgtgggagacccttgaggcggtggtgaaagaaaaactggcggtggcccatgctcagtaa

SEQ ID NO: 79937 - DNA, 528 bp, Citrobacter koseri
atgaccatgaagaaaaccctgattgccagcgcagtgatggccagcattttcactgcgccagccgcgtttgcttttaaagagtacccggcaggcgagcctgtcaccatgaatgaaatggagctggcggccgtttacctgcaaccgattgatatggaaccgcgcggcatgggcttaccggcagcaaaagccgatgttcaccttgaagcggatatccacgctgtagaaggcaataaaaacggctttggcgcaggggaatggatcccgtacctgaccatcagctacaccctggtcaacaacgacacgggcgaaaaacaggaaggcaccttcatgccgatggttgccagcgatggcccgcactatggcgcgaacatcaaaatgatgggcgtgggcaactataaagtgacctaccacattgaaccgccgtcaaaagccgggatgcatcgccatactgacagcgaaacaggcgtaggccgctggtggaaaccgtttgatgtgagctacgagtttaaatatgtcggtctgaactaa

SEQ ID NO: 79938 - DNA, 1941 bp, Citrobacter koseri
gtgcgtaacttccgtaactctttgttggttactctctttggcttgtttataagcatgagtgtctgggcgtcgacgaattatgcgcctttgattgaagatatcgaacaacgtcttgataaaacagcggaactttatcagcaacagcataccgacgaggcgcgtcgcacggtacaaatggcctatttcgaggtgttcgagaacctggaagggccgatccgcatcaacatttccgcgcgcaaaagttacgagatggagagcgcattcggcgagatccgtcggatgattggcgagaaaaaaccgctcgctgacgttcaggcgcgcattgactggctgaaagccgcactgcgcgaagtggaaccggtgctggatggcggacatcgtctggtggccgaagagcagcacaacgcgctgtccagagacgacattgccgttcactggcaggagagtttcaggacgatcgacgatctgctggcgcaggcggtcactgaatatcaggccgggaactacagcgttgccagtcagcacgttcaacaggcgcactatcagggctttaagaactctgagatggagatgtccctcagacaaaaccgttctgcaaaagatgccgccgccattaaccaacaattctcatccctgattgcgctgaccgcgcaacctgaccatctcaacgatgtctcctatcaggtcactacgctgctacaggatatcgaggatatcttacccggcttgccaaccacccgtgacgatcagcaggttgccgcagcgcaaagcgcagacaacattccggcggcggacgagggaaataaccgcaccgactgggctgaggtgacgacgggaattaaccagagcattcaggacgcgatagcgcgctatcagggcggcgatgcgaagaatgcgattctggatatccaggatacctacttcgaccgcttcgaagccagcggcatggaaaacaaaatcggctctcgcgattcggcatttaaaaccacgctggaggcgtattttacccgcctggtcagtctgatgaaggccggtcagccggttgagcgcctgaatgcggaggccagcgcgctggcgcaggatctgcaaaaagccgtgacgatgctgggcgaaggcgaagaaacccagtggagtctgctgctctatagtctgatgatcatcgtgcgcgaggggctggaagcgctgctgattgtggcggcaatcgtggcttacatggtgaaaaacaaccatcaggataagctgccgcttattcgtcagtcggtaattgtggcgctgatcgccagcgtcatcaccgccgctatcttccagatgctgtttactaactccggcgccagccgtgaactgctggaaggcataacgatgctgattgccgtcgtgatgctgttctttatgagttactggctgctgtccaaagtggaagcgcgccactggaaagcctggctggaaggcaaactgtctcattccctgtcgcgaggctccctggtcggactatggctgaccagcttcctggcggtgtaccgcgaaggggcggaaacggtgctgttctattacgctctgattggcgatgcaaacacggtatccggccatatggcgattggcgccggttttgtgattggctgcgtggtgctgctgctcgcctggctggtgatgcgttactcagtggtgcgcctgccgctgaaacccttctttatgtttaccggcagtttcatgtatctgatggccttcgtctttgcgggcaaaggcgttctggaactggtggaaggcaaactgttccagcctacgttgattaacggcttccctgaaatcagctggctggggatttatccctacgtggaaacgttgttaccgcaggtcgtattgctgctcgcggcgctggtggcgctgtgggtgatgcggcgcaaaagcgcggttcccggggagacgataaaaaataacccataa

SEQ ID NO: 79939 - DNA, 762 bp, Citrobacter koseri
atgcgcaagggtaaaattattgttgcatcaatgatggtgctttgtgtccttatttttgttgcggcggtggcatggtttatgctgttccagggagaaatgacggagccgacaggggaggaaaaacaggcggcgattttacacgctgcgggcctgatgaaatcaggggcccaggataaaaaatcagtcgaaacgctctatcatcgttatattattcaacgccatgttaatttagattccggcgaactggtggctgacagcagcgcggacgccgcgcgccagaagtgtgaaaaactcgcccctgaacgcgacccagcgcaggttcgtcagcgctgtacggtggcggatgtgttctttgtgaaagataaaaataatgaaattcagcaggttatcattccggttatcggtaaaggcgcgaaatccatgatgcatgcgtttcttgctctggggctggacggtcgtacggtgagaaatctgtattattatcagcaacgggaaacgccgtttctgggggcccgggtggaagacgccagctggcgcaaacagtggccagggaaacgattattagataacagcggacatcctgcattgaaaatagtacaggataaacctgaacatgccgatgaatataccgttgacggtatttccggcgcgacgttgacatcaaccggcgttgagaaaagtattaactactggatggggccgcagggatatggtcaattcttacagcgtcttgccagcgatcgaaatagccttaatctttga

SEQ ID NO: 79940 - DNA, 696 bp, Citrobacter koseri
atgaatgcccgggcgatggtatcggggagtctgccgggactgttgctttgcctgctggcaggactgggcctgaaggcaggtatcgctgaagcagtgcctgaaacttacctggcagcacagggcatcactgtgaacggcagggtgacagccccttcatgtacggtgagactggagaacaaccagatgacgttcggcgaaagtgccacttcaggttcaggtgcggagggggcgacagctgaggacggtgcgatacagacactgaagcttaatgtcagcgagtgtgatgctgatggagtcgggatgctgtttaaggcggattactggcctgatatgccggaaagaggtgttttacggggtgtcaaaacgcgcagggcttcggggggctggtattacacagtcagtccgggcagagaagataatgcgggctggccactgaaactgtctcaggacagtgacgaaaaaccggtaactgacatacgcctgaaaggtacagatgaaagacagtattacaagctgtcggaggtgaattactggtatgacctgaagtcccctctcagggacggggatgagatgattattcccctgacggtttcactgcacaaaacccgactttcagaagaggataccagaagggagggcaaaaggagagaaggtgaactggatggtacattcactattcagctctcctggcgataa

SEQ ID NO: 79941 - DNA, 1065 bp, Citrobacter koseri
atgaagcataacaacgccaggaaagccctgatgatgacagccttcaccatgctgatgatgtgcagtgtggcggaggcaagggagcgggaggtgatgcacagttcacctgtgccggtgacattcggaatgcgggctcttgcgccggacacgccggtctcttcccgcatcgcgttcgtgtcgcaggtcgtcagtctgccacccgtcgtatgcagcgcctgtacggaagaggataaatggacccgggtatggcgtttgtcggatgtgacatatgacagggatgacagtcagagagaccaggggtggtatgtctttcgcagcgggctgaaaggcattggcgtcagcattcaggttgacccgaagtcgggcagggaacgccagggaaacggcaggcaggcggatgacgaaggggagctgaatgttggtctgctccgtttgtcccgggaaaccggggcaggtctggttgacctgcccccggctgagtttaaacgcgtgacgacgtttcgtggggtggacggggaagtgaagtatgttcaggaggacaccatcagggtgtcggctgacatgcgggtacctacctgtaccagcacgacgggcagcctgagttttcagttgccggacatcagtcaggtgtggttacgaagaaatgtggtaccgggcgggtataccgacaatcaggcctcgttgccgcaactggttgtggcgaactgctctgagaacacccggacgctgagggtgcggtttattccgtccgggagtgtgacggattcgaatgaggggcccgataccattcttgtcggaaaggatgagaacgggcaggaaaccggaaccggttacctgatgaagtatgacgccacggctttcgggcgttcgcaggcaggtgtggtgcagtggaaccggaatgcgccactggtgctggagaatccgcagccgactgagacaggtgatgcactgagtgaaggaattagcgtaacgctgagggcgtattacgcccgccccctgaacgacatcgccatcacggcggggcaggtgacggcgaagggattgtatcagatatcttatgactga

SEQ ID NO: 79942 - DNA, 2946 bp, Citrobacter koseri
atgagaaaaccgggtccggacataaccgcagaaaccggattcagactgaaaacgttaacggtttttgtgaacagtatgttggttgtggggatgagtctcgccaccggtagtgcagagggcagtgacggaggcgggatgccgggggtggaggcatcgacagccctgcagggtgacagtgagcaggggctgagttttgacagtgacttcctggggatgggcggcggtatcggcggtcagcatgttgacctgggatattttgcccataagggaggactgctgccgggaaactatgccgtacaggttacggtgaacggcaagctcgtcgatcaggggcgtctggtcacctttaaatcgtggcctgaccaaccggggaagttatatgcctgcgtcactgccggggaaatggcggagtggtgggggattattgcttcccggcgtggagcgccggaggcgacacctcgtcgcacggataagggaaaaagcagcaatgccccctcgatctccgcgaatgctctgtcggtaaaggacgatgcagaacacacgggtaacgctgacgggagcgcgacagcgcctgtcgggggtatcccggtttcatcgggaaaagcgcctccggttatatcgcaggcggaagcagataaacccgtagtcgtggtctctgcacagagtgatgacggagagcgagcgggaaacagcggagttcccccgtcactaccggaagaagacggtgacgtcagttgtccggtggggggggtgacggcgatggtaccgtatgcgaaggaggtgtttgattttaacaaacgcacgctgacgctgacggtaccgcaggcttctctgggacctgcctcccggtttcgcactccgcctcatctgtgggatgaggggatgccagcgatactgatgaactacaactacaccggaagccagcagaccggcgggaatacacggactggcagtaattttctgggggttaatggacagttgagcctgctgggctggcgaatgcagaacaacctgacctggtatcagtctcagggcggggaacaggagttgaacgcatcgagcgcgaatgcacagcgggatttttcggtgctggggggcggggtgctgactgtcggtcgcaccacctccggtggtggtggggtggattcggtgtcgtttaccggcatctcggtggcatcggatgacgggatgctggatccgaagttcaccacctacacgccggcaataaccggtattgcgaattcgccggccactgtgacggtgcgccagtacgggaaagtgatttaccagcagaacgtgcctcaggggccgttctccataacggattttaaccgtagcggtaacggcgcggtggatgtggaaatcagggaatcagacgggcggacgcggcattttacgatggctcaggcgagcagcggtaccctgatgaaccgtggtgccacatcctggagcgcctctgtcggtaaggcggcaaacagtgaggggtatgctgatgatcggtttgtgcaggcgggggtttcttatggcgcctgggcaaacacaacgctgagtggcggggcattactttcatcgaattatcagtcgctgtccgtgggcggcggactgtatgccggtgcctggggggccgtaacgtacacgctgaagacctcgcgggccgacctgtcggtggtgccggatctgcacgagggtacgaaaaccggggtttcacatgatgtgggctggtcgagaagttttggtgacacctccgtgggggtgacctggtcgcacagtcagacgagggatttttatacctactctgacctgttgtccctgaagccggacaacagcggagataacagttctcagtccggcaaccagaaggacagctatacggtgtcgttgtcgcagtcgctgggggcctggggaagtgtctccctgagcggaacgcgtaccacccagtgggacagcagcgatgtgcaaaacaacgtgtcgctcagttacaacaccaccgtcagggatattggtatcggggtggcgctgggctacagcacgtataacaacagcgacagtggcagtgatgatggctggacgggaagtaattccggtagcggcaacaaaaccgaccggacggtgtctgtcaacatttcactgccgctcggtaaatggctgaatgccaacagtgtgaacgggacatattcgtactcaaggacgaacggccaggtcagccagcaggccggcgtcagcgggtcggccctgaatggcgcattatcctgggctgcctcgcaggggctgacgggtaaccgcaacgggaataccagtatgtcgtacagcggcaattatgggtccctcagtgcggggtacagctacggtgccggaagtgaaagtgtgtcttacggagtaaatggcggactggcaattcatccgcatggtgtgactgccggtaaacagcttgcgcttggcggcgggaatgcactggttgaaattccgggcatcagcggggcgagtgtcaacggcgccgttacggactggcgagggtatgcgctggtgagtggtctgacaccatatgaccggaaccgtattaatgtggacatgaccaatctgccggggaacgttgaactggatgcgtccagtaaaaacgtgataccgacgagaggggccctggttgaggtgccgttcaggagtaacaaagggtaccgtatgatgctcacccttgagcgtggtcaggatgcgaagaatgcggtgccgttcggggcgatggtgaccctgaaacaggacgacgataccgccatgcctgttacggggattgtgggggatgccggtcaggtatatctgtcagggatgccggtgaagggcgtggtaacggccagttggggagatactgctgatgagcaatgccgtgcagagtatacgatgccggacggaacggatgagcagaaattgaacctgctgtctgttccctgccagtaa

SEQ ID NO: 79943 - DNA, 810 bp, Citrobacter koseri
atggtcctaattgacaaccttttgccgggttggccggggcgtaaaaacacacctgaaaaaagagattttggaatgatgaataagcaaatgctgtatggcgcttttctcgcgtcagtgatgtcggtggggagtgcagtggctgctgagggcggggtgtctctgggagggacccgtctggtctttgacggcagtaaggatgctgcctcaatgacggtaacgaactcttctgcggcggatgtctggctgatgcgtttctgggtatctccgtacggggatgatacgggcgatgacggaaaaacggcctctgttccgtttgcggtgacacctcccctgtatcgtcttgaccctaaagctgcggtgcagttgcgtgtgaaccgtctgtcggattcattgcctgcagaccgggagtccatcttttatctgaacaatctggccatccctcccaaaaaaggggagaagagttatatgaaagcggtacagagcggtctgcagttcgcggtgaactcccgcatcaagttgttctaccgtccgggaccgcttaacaatcctgatgcagtgtcggcggcaccgtcaaaactgacggcatcagcctcaggcaaggatgtgctggtgaagaacccgacaccttattacatcacgatggtcagcgtgacgattaacggtaagagtgcggcggttgaaggaggcgattccatggtggcaccgttcggagaacttaagtttgcatcgccggttgcccatggaaccctgaagtacgccactgtcaatgaccgtggaatgacaacggatgccctgacaaaaacattctga

SEQ ID NO: 79944 - DNA, 600 bp, Citrobacter koseri
atgacgaaaagcagaagatatctgacacaaaatgaagttgaacgtctcatcgaagcatcaaaagggggccggaatcctgagcgtgaccattgccttgtctacatgtgttttttgcatggtttcagggtcagcgaagcccgttaccttaaactgtcagatatcgatctggaagaagggtgcctgtatatccatcgccttaagcagggattcagtaccacacatccgctactcgggaatgaggtgagagtcatcagaagatggctgaaggtcagaaaaaagatggcgggggcggacagtgactggtttttcctgtcagtcagaggagcaccattgacgcgtcagcgtatatatcagctgatacaaaggctgggtgaaaaggcggggatttcggtatgttcgtatccgcacatgttacgacatgcgtgcggttttgcgcttgcagaccgcggcgtggatacccgactgatacaggattatctgggacaccgaaatatcaggcataccgtgcgttacacggcaagtaatgcaggtcgattcgatggagtatggtgttcaaaaaataagcgcaaaaagttacaattaggaccaaactgtaattaa

SEQ ID NO: 79945 - DNA, 582 bp, Citrobacter koseri
atgaagcgcagacaccttacaggaaatgaagttgaaaagttgctggccactatacttaaggaaagtaattcacatcgtgattattgtataattatgatggcatttattcatgggttaagggttagtgagcttatatccctgaagatagaagattatgacccgttatcacgacagattagtattcacagacttaaaggcgggttaagcacgattcacccggtgttacctgaagaatataccgttcttcagcgctggattaaagagagaaaacactgggcaggcagtgaggagaaatggttgtttttgtccagaaaaggtgggaaactttcccgtcagcgtatttatcatctggttcgacattatggttttatagcaaaactccctttgccggttcatccacatatgctcagacatgcatgtggttataatcttgcagaccgtggaaatgatacacggttaatccaggattatcttggtcaccgaaatataagacatactgtacgatatactgcggctaattccgggcgttttattaatgcctggcgtcaggatgttataagcttatttaagttgacaaagtag

SEQ ID NO: 79946 - DNA, 132 bp, Citrobacter koseri
atgagcaagacagggttctggtggaatgccccctacggttccccccgggctcgcggtcgcggcggtgaaccgaaacctggcaggttatacctggactggcccctgtatttccataccctgttgatcacttaa

SEQ ID NO: 79947 - DNA, 684 bp, Citrobacter koseri
atgaaaggtgccataaaccgcgaaaaggcttttatttcgctttttaaccagacagcgagataccaccatcgccatcaggtctttgaggactttgtcagttgcagcgtgattgcgctgcagaacggcctgcagttctgcgaaaaacgggagcaaaagtacatgcgcatagtgagccggtatgagaaagaggatgtcagccacatggcacaacttctggcgcatgttgttaacggactggaagaggagtacagtgactttctgggtcgggtgtttatgcggctcgaactgggtgacaggtaccgtggccagtttttcacaccgtggccgatcggcaggatgatggccagtctgcaactgggggatgtcagagagacgtttcgtgagaaaccgtttataaccctccgtgaacctgcatgtggcgctggatgcatggttctggcctttgctgatatattacgggaagccggttatgcaccgcaccggtatctgtgggtttcagccacagatatcgacccgctggcggccgggatggcctacattcagctgtcactgtgcggcgtggcgggagaggtggtcataggtaattcgctgaatgacgaacgctggcgggtgttatatacgtttggacattatcagggaaactggtccagccgtttacaaaccgtcctgaatcaggccacctga

SEQ ID NO: 79948 - DNA, 948 bp, Citrobacter koseri
atgttttcatggtgcaataaccgcctggaaattaccggcaaatcggtctgtctcgatgtcatgcagtcctggatatcgggtacagaaatacctctctaccgtcacgccatccggcaggcaataaggctgtttcttgcaggctgtgccgggttactgaagccggttaaggcgacggaatatgctgcatatccacagctgacttccgcagggaccggttcgtcggttgcgcccaaccaggctttccagcattttcttgagttgctggaaaaggatgcctggcttgacggtaccacgatttcccgtatggagaagatatacctccagtcggggctcagcgcagtcaaatgggagaatatcccgtttaccgcgcgccagataatgacgcacctgatggcgcttcattacgctgactggttcggtatggcaggtgccggcggcgcattcgatccgcaggagcactgggaatggctcggtgaaatgcctgagacgacatgtccgtgcgacatgctgatggtgatgccgtcacggctggtcacggagctgaacggtaccagcggactgttccggggagtgaacgcagcaccggatctgtatatgcagctctttggtactgaatacccggccgggcagaacgttgagtggtaccgtgacggaataaacacactgtcgctgacgttcaactcaccgtggtatccgccgtcaggtgaagtcatgggagagatgtcgcagttctttgactgcgaaatccgccattactggaaatcaccggatgtgcatatatccggatacaactgctttgacaggggcgaccatgtcgacagcggggcatatccggaggaagtggtaccggtgtctgcgggtgaaggtgccaggatgtatctggtgagtccggacacaccgccagcgctttcggctccggcgccacattacgcagggctccgttcctga

SEQ ID NO: 79949 - DNA, 984 bp, Citrobacter koseri
gtgaaaaaatccacatcccgcaaaacaactaaaccatctgcggccaggtcagacctgtaccagcaggtcaccgacaaaatcattgccgcactcgaaaagggtgttgcgccgtggcgccgcccgtggcgttctgcacagaacgtgcatggcagcgcgttaccggtcaacgccaccaccggccgttactacagcgggatcaatattccgcttttatggatgtcggctgaggagagaggatatctctccgatcgctggctgacgtaccagcaggcgaaagccgtgggaggccaggtgagaaagggggaaaccagctcgatggccatcatctacaaaccgtttgagaagcaggcgagggatgaacaggacaacaaactgttcgatgacgccggtaacccggtcatggagcagttgtccatgcttaaacccctgcagctttttaacgtggcccagtgtgacgggcttccggacgcggttgccggcataccagcagcggctccggaagaaaggccgtcggtgctcagtgagcatcagacggggcaggtactgaccatactgaacgccaccggcgtgacgtgcacgtcgtaccgtcaggaccgggcgtactaccagccggcaacggaccggatagtgatgccggccacctcacagtttgtgtcagaggcggattactggtccacgctgttgcacgaactggtgcatgccaccggccaccgtaaacggcttaaccgtgagggtatcacttcgtcgtcccgtaaattcggcgacctggtgtatgccttcgaggagttagtagccgaaaccgggagcgcgtttctttgcgcagagctgggtatctacggtgatgtgcagcacgaaagctatctggccggctggctgaaagcacttcgtgacgacaaaaaagcatttttccgcgcctgccggtttgcccgggaagcgacggaataccttctgcagccgctgaacggtcagtccgcagcggcgtaa

SEQ ID NO: 79950 - DNA, 309 bp, Citrobacter koseri
atgaacagtatacttctttcactgatcgtccatgcgacagccggactgaaccgtctttatacggccatgagctcacgtcagtctgagtggttcaccaaccgcagcggccacagcagtttccggccggaggtgattccggataatggcggttttaaagcggtgatttcgcggcgtacgggctacagtccgcgcgactggcagtaccagcagtgtgcgactgccggcaggttcgcctcagcacgaatggccatgaaggcaggacgtgaaatggcgcagcagctggctggccttcgctaccgtttcgactga

SEQ ID NO: 79951 - DNA, 360 bp, Citrobacter koseri
atgtccatttacgatatcagtgttgaacgcattcacgcctgcacgctttccacgacggcattcatcatgatgatttcagacattgagggcgcgttacaggtcatcaatgcactgaatcacggtggtgtgccggatcatattgatgaggatggctggccggatcgaacgatacagattttgtcgattgcacaaacgctcggtcatgcccgtgaagctcagttgatcccggaccgtttattcgaaaggtatgtggctgacctgattgtccttggacaccagacagacgcatatgcctggaattacgggttcagggcgggagtggcccgtgcgatcgagcttcgttacgaggaacagatgtga

SEQ ID NO: 79952 - DNA, 390 bp, Citrobacter koseri
atgatctttcttcatttcatttactgtctggctgttctggcggatcgcgtgatgtgcttcattgcgccaaaaacgctgtttgctgaatggtttttctggttcaccggtgatgcgaagtcgttacttcttgtcgtccgtgagctggagcttgcacgttcatatcagaaggacgaaaccacggaaatgctggtcgagttttcggtctaccatgccgcctttttcttcggagaacgcgagtattacggactgaaggtgcgatggccacgctggtatattcgtcatctttatcttaccggtatgcagctcgatgccacacagtggcaggaaggctgtcagaacggattcagcgaagctgcagaacgggaagctgaagcggctgctcattgctga

SEQ ID NO: 79953 - DNA, 906 bp, Citrobacter koseri
gtgtccagaaaagaaaagttactcacgcgtaacctggtgactctcgtcaggaaagacggcggcagttttaaaaaacaggctgattacacaaaaatcatggagagatttggagcacgcctggcggctcttaatattcagattggttctgctcagcagctgaaagtcagacatattgaattatatatctacagccggctcgcggatagtgtatccatcaggacgttacaaaatgaaatgtcagccgttcgcgtgatgctacgccaggcaggtaaaaccatcatggctgatccgaaacatgaacggctcagtaataaagtgctgggaattagtagctcaagtcgtaaaggaaccaaacgttcagttacggatgaacgttaccgggatattctttcccgtcttgaaaaggcagatgaaggggttgctgcaacagtacgtttatcacgttatcttggtttacggaatgaagaagcggttcaggccgtaaaatcattaagctcctggcagaaggcattacagaagggcgacaaaaccctgaccgttattttcggtacgaaaggcggacggaaacgggaaacgactattgttgatcgcgaaaaagtaaaagaggctgtgaatttggcggtaaaatatgcacgggaacatggcggcaaacttattgaacgggacggacttaaagcctcccttaatcattatattaatacgttgcgccgggagggggaattaacaggtggtgatgaaacgccgcacagttttcgctactcctatgcagaagaatcatttaaatatcatctgtcccgtggattcagtaaagaagaatcccttgcattaacgtcaatggatcttggtcatggtgacggacggggaacttatatcaagaatgtttattgtcagtccctgatggattga

SEQ ID NO: 79954 - DNA, 480 bp, Citrobacter koseri
gtgacgaatctctttgctgactctaatgcctatacacaggcaggagaatattactacagaaaaagaaaatcgttgatgcttgagtcagtcttttcatggaagcatttcagtaatgaaaaattcagaatgagtaaaaaggaaaaacggatatttaatattaaaacattttttaaagatattgctgatgtgtttaacttcctttgctggggattcggagaaaaaccatccagagcattagtgatatcctttattgtgattttattgtattcctgcgtttattacctaaatgaaaaatcatccacccaaacgctgattgaatcgttgtatttcagtatcgtttctttcaccacgcttggcttcggtgatatcacacaaaaaactggtttcctgcgtctgttttcggcactggaatcactttcaggcctggtcctgatgggattattccttgccggatatgcgtccaaaacaaaacgctattaa

SEQ ID NO: 79955 - DNA, 453 bp, Citrobacter koseri
atgaatgaagtccctttgagaaatattggtggcagtatggttgtacaccaggctttcctcgcagggaaattgcttgattttatatcgatggatcaacttactctggttaaccctcataataatcaacatctttatctttattgttcctctgctgttaatctccgtattgttggcggcatcccatttgtgaaatttcgggagtgtaaattgtcagaaatacaaaccaacaataatggactggttctggagaacgggagttatcaggaattatccttcagtcgttgtgatgtggatttaagactaagctctgccaatatgatgcatatgaatgttcataactgcaatttcaatgcagtctgtgatttcgctcgttttgacagtcagtgtaagtttacttatgacagaaatgataaattttcatatcagtctgaaagtgattttataaagaggtga

SEQ ID NO: 79956 - DNA, 261 bp, Citrobacter koseri
atgaggaaacttcctcattttgaagaatggatgacagtgcagggtgtaaccagagagatgatgtttgagcacggacttgcccggtttattatttctgatgctacgctctggcattgtgttcaacgggataaaaattatctctgggatgacggtgtgatgaattttcaggagagaaagaaatctggctggataaaagaatataaattttttatgccttaccttatctggctgaggaagaaaattgataacaatgagtactga

SEQ ID NO: 79957 - DNA, 342 bp, Citrobacter koseri
atgaagaataaaatggtctggtttctggggggattacttcttgccgctggcaacaatgctatggcggggagagctgatacagcgggagggcggcaagctcagcaaatgctttcttctgatatagagcgtcatacaaccgctctatatcagaaatcgcaggcaactgccaggggagtgatcgcggatgtcagtagtacacaaaccaggcaacagcagaaactggcattacaaatgcagatagaccagttgcgcagtgaattaggtgggacaacggattcagcccgacaacagactcttacccaacagctcagaaaactggaaaaggaacgggctggtttatag

SEQ ID NO: 79958 - DNA, 411 bp, Citrobacter koseri
atgacatcattattaagtgaaaatgaatataaagagttggctgctgctgctgaggatcagagtttggattccgtttttagttattcaattcctgatattattgaaggagataaggaattttcttttgagcagcggaaagaagtattttttgacgttctttctcggctgttgaaggataaccgtatcagattatccaggcatggaaagtttctggttggttctgctgatgaactggtggaacagtttcgtcaagcatttccccaaactgaaaaagagctactaaatggggtctggttttatgatgatgtttgtcctggagaggtggtttggattcatgatgatggatctttgtcatggacttttagcggagttggggcagcgaaagatggttcagtggaatggaagtactga

SEQ ID NO: 79959 - DNA, 10356 bp, Citrobacter koseri
atggcaggggataatatacggttttcacagcgtctgttaagcgggctgctcagcctgctgattgccgcccagccggtgcttcctgccgttgccgcgaccatcaccccgaccggcaacacgcagatggataaggcggcgaacggcgtgccggtggtcaatattgccacaccgaacggggcgggtatttcgcacaacaaattccaggattacaacgtcggtaaagaagggcttatcctcaacaatgccaccggtcagctcaaccatacgcagcttggcggcatcctccagaacaaccccaacctgaaggccggaaaggaagcgtccggcatcatcaacgaagtgaccggcacgaaccgttcgctgctgcagggatacactgaggttgcgggtaaggccgctaatgtcatggtcgccaacccgtacgggatcacctgtaacggctgcggctttatcaataccccgaatgcgacactcaccaccgggaaaccggtgctggatgcgaacggcaacctgcaggcgctggaagtcacaaaaggcagtatcaccattgaagggcagggcctggacggcagccagagcgatgcggtgtcggtgattgcccgggccacagagattaacgcggccctgcatgcgaaagacctgagcgtgattgtcggggcaaaccgtgtcggggctgacggtaaggtcagcgcccggcagggcgaaggtgccgcaccgaaagtggcggtggataccagcgcgctgggcggtatgtatgccaaccgtatccggctggtctccggcgagaaaggcgtcggcgttaaccttggtaaccttaacgcacgccagggggatatcacgcttagcagcgccggtaaactggtgctgaaaaacagccttgccagcggtaacaccgccgtgaccgggacggaggttgtgctttccggtgaccatcaggcgggcggtaacctgaccgccaccgctcagggcgggctgacgctggataagtcccggattacgtccggcagatcactacagctgacaacggccgggaaactgacgcagaacggcggttctctcactgcggcaaccgacacccggctgacggccggaagcctcacccagagcgcggatgcacaggccggggccgacagcaatcttgccatcacggttgcagacagtgccgcgctgaaggggaaaaacgtcgccgggcaggataccacggtgaaggcaaaaacactgacgaccgggacggaactcagcgccgcgcgccatctgtcgctgaatgctgaacagaacgccgcacttgatggtgtggtggttgccggtcagcgactgtcggtgaccggcggtggggacctgacgcaacgcgggacgctgagcggtacagacatcacgctcagtggccggaatatcacccaggaggatggtgcagaaagcagtgccggcggcaacataaccctcaccaccagtgagcatgccaccctgaaagggaaaaccgttgccggcaaatccctttctgtcacgaccggtagccttgataacagcgggacgctggccgcgggaggtggtgcgacgctgaaaaccggttcgctgaccagcagcggtaccgttcagggcggcagtctggcggtccgggccacggacctcgccagtaccggcgacctgaaaagcgcctcctcgctcgatattggtgcccgcaatgtcactctggcgggtgatacgggcgcaaaaggtaaaaccgccgtcgccgcctccggcaggctggacaacagcggcacactggtcagtgatgatgcgctgacgctgtcggccactcaggtggataaccggggaacgctctccggagcgaaaggactggcggccaccgcggcaacctggaccgccggtgataaatcggtcacgcacagtgggggcgcgctgacgctggatacccgggacaccgtgcttgccggcgaaacgagtgcaggcggcgcggtttccgttaagggggatacgctgcggaccgcatccacatcgcagcttcagggtgacagtgtggtggtggatgtccggtcggcgcagcttgatggtacgcaggcggctgcgggcagcctgcgcctgtcagcccgtgactcactgacgcacggcggtaaaagttctgcagggacacttgacgccggtaccgctgccctgaccaacaccggtacgctgacggctacctcgctcacactgaatacgccggcactggtgaacagcgggctgatacaggggcagcagaccctgaatctgacgacccggctgctcgataaccgggcggtggggacactcaccaccgacggaaacctgcaactggatggtacggatatcaccagtgccggaaaaatcattaccggtggcaggtttgacctgcgtaacggccgtcttgttaaccgcggggatgtcagtggcgcagacattttgctgtcggatgtgtcactgaataaccttcaggacggcctgatatataccgatggtctgctgagtcttaccggtagtacgccggataacgccggtgaaattcaggccggacgcctggcgctgaccgccgatcgcctgtccaacagtgggacgctgcgtacgctttcgtccgcagacatccagctgagcgatgcgcttgttaatccggggcggctgctcgggtacggttcgctggacgtggcggctggcgggctgcagaacaacggtacggtggcggctgaaaacctggtgctgtcgctttcctcgctggaaaacaacggactggtgcagggtaaccgctctctggggctggatgttccccggctggttaacggtcgcgacgggcaaatcttctccggcagtgacctcgccctttccctgaccgggtcggaaaaccatggcctgctgcaggtgagcgggcagctggcgctggatggcgacaccttcacaaacgccggatacctggtggctgacggactggatctgcgcctgaccggaaacctgtataaccgggccggcggagaactgctcgcgggagacacgctggccattcagagtgccggcctggataaccggggccttatcctgggtgagggcagtgcggatgttcatgccaccgcacttgataacagcggcacgctggcggcggatgcactggcgctgacggcggatgttctgggtatcagcggtcttgtccaggggatgaaggccctgacgctggccgcccggcagattgataccggcgggcaggcccgcctgctgtctgccggggatgttgccatccgggcggatggtgctctgacctctgccggcacgatccagggacgtgatgtcacggtcagtgcagcggactggctgcataacggtgtgctgctggcaacaggccgcctgtcttcggttgtcaccggactgctgacgcaaaatggcgagatgatgagccagggcgacagtgatatacgcagccggacactcaccaacaccggacggcttctgagcgaaggcggaatgcgccttgatggcaatatgctgacaaacagcggggtcattcagggcggttcgctgtccacctcgcagtccgggatcaccaacagcggtacgctgacggggctgaccgggctcacgctcactcacgataacctggtactggataatacggcatccggtaaaatactgacacaggggctgctgacggtcagcgggaaaacgctcggcagccagggtaactggcagggtgaacgcattcttctccgggggcagacgctgacccagagtggcggagccatacgggcagcggatgcactggatctgacgctgaccggtaatctgaccacgggccgcggcgcactgatttcttcaaacggccacgcagccgtaaaagcgctggccattacccatcaggggcagtggcgggcaacgcgtctgctgattgacggtgactccctgagaggaagcggtgaaagcagtggtgtggaacagctggatgtccgcaccggacaactgacgctggagaacggcggggcgctgttgtcgggtaacacgctgacggtgaacaccggcacgctcagtaatcacgggcggatgatggggaacggggtggacatccgcacctctgcactgacaaatgacgggcgcattcaggccgataacggtctgacgctcgtcaccaccggaaacatcacgaataatgccacgggagtgatccagagtgctaaagccctgtctgttaaagcacctgaactcatcaattacgggcttcttcaggggggcacggataccgggctgaccttctcccgccagctcagcggaaatggccgcatcctcgccgggggaatgctgactcttgacgcaccagagctgaataacaccggctggcttcaggccacgtcgcttgtgctgaacgcagccacattaaccaatgccgggcaggtggtggccggggaggcgacgctgggcggtgacaccctgactaacagcggtacgctgcaggcgggttcgctgaccctgaaacataaacaacagacgcacagcggaaccgtactgggccgccagtccacgtcagtgaccgccgatcgtgtggatctggccgcgaacggaaaactgtacagcggtggcgggctgtcagtggttgccggtgcgctggtacaggccggacagattattgccggcggcgatctgacgctgaaactggtgaatgcttttactgcctcgaataccctggcggccggtggtgtgctgtcagttgacagccggaatgccattaccacccgtggcaccctgcagggtgaacgcatcagcctgacggcaggcggcgcgttcaccggtgacggcctgttgtccatgggcagtggtggtggcctgatcagcgccgccagcctggtgctgaatgcggcaggcaagctgcaggccggtggtgatgtggtcctgaccagccggggaaatgccacgaacaacggatttacaggcacctccggcgggctgacgatgaatgtcgccggcacgctggtgaacaccgccctgctgtatgccggtacaaacatggatttgtttgccggtgctctgcataacctgcagggggatatcctggccggtaaccgtctgcgtattcagaaaaacgcggatggccagcgtaacagcgaggtgctgaaccagtccggcaccattgagacgcttcagggggacctgaacatcaatacggcctggctccgtaacacccgggccgggctgaagaccggggaagccgtcactgaaaacctgatgagcaaatacccctggctgacgccgacgaaagctgatattccggtggactgggaggggatccgtgtctcctttgatgtgatcgcctgcccgacgagcctggggatgacctggtgcaacccgaactattcacccgggccgtttggcgggggcaccattcaggtgccgaaaccgcagtcgggctataaaacactggaatttgctgtctcaaaatcctcccttgccgtgacggcggaaggcggcgccgggcttatcagcgcgggcggcaatgccaccgtgcatgccgacacgctggataatgaggccagtaatatcctggcctccggcagcatgacgctgagcggcaacacgctgaataaccgatcctggttcccggaaacggtcacccgctacgtcacctatgattttgacgatgcctataactctgtggagctgcgctataaggcgcgttccggttaccgtgaagaggtgacacaggggacgccgttccgttcagtgttgcaggcgggcagcgcgctgaaggcgtcctttacgcagcagattaacaatggcgcgatggattcgaatgccggaaaggtcaccagcaccctgcgaccaccggtgctgaacctgcccggtcgggtgagcaccggtagcggtcagcaactgcttgcgccgggcagtgcagagcacgtcagcgtgggcagcccggagtggaaagacctgttgcagtcagccctggtgcagatacagggcggaaacgttcccggaaacatttccggcaatgcgcagcccggggacatccggccagggcagatccccgggcagactgctgacaaaccggcggttgataccggcgcgtatcccttgccgtccggggataatggtttctttgttgtttcagcggatccacagagtccgtatctcatcacgatgaacccgaacctgaacggactgggtgaactggatccgcagctcttcagcgatctgtataaattgctgggaacccggccggaggcggctccccgggaaacccgcgccaccttcacggatgagcagaaattcctgggatcgtcttacctgctggaccgcctggggctggcacctgaaaaggattaccgttttctcggtgatgccgcgtttgatacgcgctatgtcagcaatgccctgctgaatcagatcggcaaccgctatatcaatggcgtggggtcggatctcgaacagatgcagtacctgatggattcggctgcgcgtcagcagaaggcgctgggactggaactgggtgtctcgctgacggctgaccagatcgggcgtctgacaggcagtatcctctggtatgaagaagtggtgataaacggccagcgtgtgctggttccccgtctgtatcttgcgccggacgatgtgacggtcaggaatggcagcgtcatcgccggaaacaatgtcagcctgagtaccggtaatcttgcgaacaacggcagcgctgtcagtgcggataagaatctgtcggtgacggctgcgggtaccatcagtaacagcggtaacgctgtgctggacgccggggagcaactggatttactggccggtaatgacatccttaatgtgagctcggtaatcagtggtaagaccgtcgcgctggaagcgataaacggcagtatcagcaacctcacgcagggcggacagaccacctggcgcggccagaaagatgtgctttcctggacggaaaccgaccgcccggcccttatccgctcggatgagagcctgagcctgcgtgccggggacgatattctgatgaccggcggtcaactggaatcgggcggggatatgacgctgtctgccggcagggatattgatatagccgcactggaaacccgtacccacactgaagaatacgatgaccgtaagaagctgaccacccggacctctgaaacccgggatgctgtcagacagacggggagttccctgacgtccggcggcgacatcatcatgtctgcggggcaggatctgaatgtggctgcctcatcggtggtggccacggacgatattacgctggcggcaggccgggatatcggtctcaccaccgcgacagaaagcgaccacagccacaaagagaagaaggtggccggcggtggtttcctcggtaacagcagcaaaaaaaccatcacggagtcgggcagtacccgcgaaaagggctcgctggtcagcggtgataacgtgacggtgatggccggtcatgacctcggggtttcgggctcatcggtggtgggagaccgggatgttgccctgcacgccgggaacaacgtttctgttgaagcggccacgaatacggacatgtactggaagctgaaagaggaaaaacgcagcggggccttcgggggcggcggactcagcgtgacgttcggcaaaagcagcagccgccatgagctgaaagagaaaggcaccacgcagagccagagtgccagcaccataggatctgtaggccaggacgtcagtatcacggcaggcaaccagctgcacgtcagcggttcagatgtgatcgcgggccaggatatccggctgaagggcgacagtgtgattatcgatcccggccgggatgagcgtacccgggacgaaacgtaccggtacagttctggcgggctgagcgttggtcttggcgggtctgcggtcgaagccgctgtaaacgcggcagagtcggcaaaagcggcagaccgctatgaggatgaccgtctggcagccctgaaaggcacgcagtccgttctgtccggcgtacaggcggggcaggccgtgcagcagtcctctgccagcggcaacccgggtaatgctatcgggatcagtatctcggtgggggggcagagcggaaaatcgtcatcccaccagtcatccagcgtgtcatccggttcgacgatcaccgccggtaataacctggacattacggcgaccggtcaggggacgagccggaacagcggcgatatcatcgtggccggcagccagatgaaggccggtaatgacgcccgtctcgatgcagaccaggacatcctgctggcggcggcgtcggacacacagcagagcgctgccagtaacagcagtaagggcggaaatattggcgtcagtatcgggctgggtcagaacaccgggataagtatctacggtaatgcgcaggcctcacaggggcgtgagaaaggtaacggcacaacgtggaatgaaaccacggttgatgccggtcaccatcttagcctctccagcggacgtgacaccacacttgccggtgcgcaggccagcggtgagcgcgtgacggcagaggctggccgtgaccttaccatcaccagtcttcaggacagcgatcgttacgacagccgtcaggccagtgcgtcagcgggcggcagttttacctggggagccggcggcggtggttatggcagcgccagccgcgataatatccacagcaactacgattccgttaatgagcagagcggtattttcgcaggccagggtggttttgatatcacggtgggcaaccatacgcagctcgatggtgcggtgattgcctcgacggcacctgccgacaggaactcgctggacaccggtacgctgggctggacggatatccataaccaggcggactacaaaaccagccataccggtgtgtcggcggggatgagcagcagtggcggcagcctcggctcacagctggccggtaatgcgctcgccaatatggggaactcactggttgcgggtggcggcagtgaaggccatgccgatggcaccacatcgtcggccgtcagtgcgggcacgattactgtccgcgacccggccagtcagcagcaggatatggccggactcagccgcgatacggagaacgcaaatggcagcgtggcaccgatatttgacaaggagaaggagcagcgccgtctgcaggaagctcagcttatcagccagataacggggcaggcgggtgatatcgtccgtacccatggtgacatggccgcgctggaagaggcccggaaggatccgaaaaatgcggggatgagtgaagacgcactgcgccagacggatgcttaccgcaacaaaatgaaggagtacggcaccggcagtatgccacagatggttgtgcaggccatcggcggcgtgctgggcgggctgtcagcggataatctggggcaggcgctggcaggcggcctgaatccggcagttgcccgtcttatcaaggcggagaccggcgacaaccgggaagcgaacctgatggcacatgccgtctggggcgcactcgccgcgcagcttggcggtaaaaatgcgacggccggtgcggccggggcattcagcggtgaagtggccgcgcggtacatcattgataactactacggtggtcgcattgacaatctgagcgaacaggagcggcagaaaatcagcatgctggccaccatcgcctcaggcattgcgggcgggctggccggcaacagtacggcgtctgccggtaccggtgcgcaggcgggcaagaatgcggctgaaaataacgccattgcattcccgataacacctccacctgttgctgtaccgggcagcactccgggagccagtggccggggcgatgatgattttgatatgggcgctggatgtgaaggaacacgtgaacaatgtgctgttcgtgaccctgatcgtgatggtaataaacctaacgtttcaggaaatctttcagatgaagagaaaaaagagcttggtggctccggctcaggcacgccaggaggatgggagcctcaggatgaagagaatgcccgtaataaagaactagtacagtaccagcaacaaaaccggttcaatgaattgagcaaaatttttgacaagagccactcggctcaggagctaactattgacggtcagacgatccgtcagggtgaaggcgcaaacagttacggaacaacgaaaatctttgaaagtcagaacctgactgataaacagatctataattttgcccaggagctggccgggaatacacctttgagagaggtaaggccagggatttatacagcagagcttagcaatggtacttcattaactttgagaaatgtttcgagttcgcagaccggcgccaggtggactgttgatatcaaaggaaatcaacagttgagtgatatagctaataaatttaaccgtgtggaggtcaagtttagatga

SEQ ID NO: 79960 - DNA, 1692 bp, Citrobacter koseri
atgttgaaggcattaaaaaaaggatctgcagtacacttcgggctgttggtactcgccgccagtcttttctcgtccgcggcatctgccgctcccctgtctccggccgaccgcaacaccattcagcagcaacaacagcaactgctcgacgaaaaccagcgccagcgtgaagagcttgagcgtagcgtggtgctgccccgtgttactgagcctgaaacaccgcctgccacccggggcccctgttttgtcatttcccgcattgagattgacggggagacccgcctctcccgcaccgcctccgacaggcttaccgccccgtggctgaatcagtgcctggacatggcgcgcctgacacagctgacccgccgtatcactgactggtacatcagccggggattcattaccagccgggcctttctgacagagcaggacctgtcttccggcgtgctgcatattgccatgctcgaaggcagactgcaggcaatccggcttgaaggcgtcccggaccggacgctgaacatgaccttcccggggctggaaggcaacattcttaacctgcgtgatatcgagcaggggatggaacaactgaaccgggtgcgtcagacgccggtggcgattgaaatcctccccggtgaccgacagggatactcggtggtgaatctgaccgccacgccggagtttcctctctccgggtccgtgagctttgacaacagcgggcagaaaagcaccggcaccgggcaaatgagcagcgctatgtacggcaacaacctgctcggcctggccgataaatggtttgtcaccggcgggcgcagcagcgatttttccgacagtcacgatgcgcagaatttcgcagccggcgtcagtatcccttacggctacggcctgcttgattacagctacagctggaataactacctcagtaccattgataacaacggttaccagtggcgctccaccggcgatacggaagcccaccgtctgaacggctcatgggtggtattccgtaacggtgatatcaaaaccagtgcctttgccggcatcactcaccgcattaaccacaaccggcttaacggtgcgctgctggaaaccagcagtcgcaaactctccagtttttcgctgggggttaaccatacgcaaaaaatgttctccggcgtggccacgctgaacccggtgttcacgcagggggcgccgtggttcggtgcagaggatgataacgacaaacacggcgacgtgccgaaggcggagttccgcaaatggagcgtcagcgccagtttccagcggccactggccgacaatctgtggtggctttccggcgcgtattttcagtggtcccctgaccggctgtacggcagcgaacgtctgtccattggtggcgagacctcggtgcgcggatttaaggagcagtacatctccggtgataacggcggttactggcgaaacgaactgaattattcattcctgacgctgccggtgctgggacaaatcagcgcaatggcggcgtttgacggcgggtggctgaaaaaggatggttttgacagccaggcagccggaacgctatggggggctgcgctggggctgaccagtgcaggcaggtggttttccagccagtttactgtgggaacgccggttaattatccggactggctggcgccggaccatctgaacatttattaccgggtggcggtggcattttaa

SEQ ID NO: 79961 - DNA, 927 bp, Citrobacter koseri
atgaaaaagaacaccacgccaaccctgcacgacgccatttttaaacagtttctggctcatccggatacggccagagatttccttgaactccatttgccgccagcgttactgggtgtctgcgatctggacacattaaaactggaatcagggagcttcctggaggaggatttacgaccatactacagtgatgtgttgtattcactgcgggccggaaagggcaggggatacgtctattgtgttattgagcaccagagcacgccggataaaaccatggcctttcgtcttaccaggtacgctattgctgcgatgcagcgtcatcttgatgccggccataaaaagctgccgctggtgatccccattctgttttaccagggaaaaatcagcccttatccttacaccatgaactggctgcagttgttcgatgatccacagcttgccggcgaactctaccgtaacgatttccctctggtggatgtcaccgtcattccggatgaggaaatcatgcaacaccggcggatggcgattctggaactgctgcagaagcatatccggcagcgtgacctggccgaactggtggaacaactggtcacacttttgctcgcaggatatactacaaaggagcaactggtttccgtggtaaactatatgctccaggcgggagaggcccgcgattcggcgaatttgttaaacacactggcatcacgggtgccgcagcatgaggagacgctgatgactattgctgaacaactgcgccgggaaggcgagcagcgtgggatccagaaagggcgtcttgaaggtattcaggaagggcgcaaagaagaagcgctgaaaattgcccgcgccatgcttgccaacggtctggatcatcattctgtgatgaaaatgaccggtatttccgaagacgagctggccgaaatacggcattga

SEQ ID NO: 79962 - DNA, 204 bp, Citrobacter koseri
atgagcagccagcagctcccgatctctgcgggaaacaaggatatatcccctgagctgcctcccactcagtgggagaacgacaaatccttcatcacagtggcagtgttaccggtgctgatagctaccattattagtaagcaggctgctgcttccgggctgtatatggctgtaacagcgtggtattatctcagtggattcatttga

SEQ ID NO: 79963 - DNA, 372 bp, Citrobacter koseri
atggaaaacaacggttttgacccgaaagatattgaagacttctgcgatcgccagaaacgcaagcgtgcgtccgctcagacagccagaattgattttgttgcacgcgataaagaaaaagtggcctgggcccccgatatccccgcagaagagatgaataacctgccgccagccaaagttgatcgtggttttctgtggagtattgtggaaggcgcagcgtctgtatttgatgccgtggtgaaatccgccgctgcaggcgctatggattcactgacgaatggcaattcgcgtaaacgcatagatgagcataaagagtttatgaggaaaagaccatggttatggcgaagctgggaaaacgaaaatgattttaaataa

SEQ ID NO: 79964 - DNA, 1566 bp, Citrobacter koseri
atgacagcgaacagttttctggaatatatcctcgtggtgctgggctggctgctgaacaacgcccagtggaccatcctgacctccacagggctgtttgccctgcccattgtgtttaaggtggcgggtatctggatcaaagtgagggaagagggcgcggatgaaggtaaccaggggctgctggcgatgccgcgcatcgagcatgcgatttacctgacttactgtgtcatcctcttttgctgtatcccgctcattccggtggatctcactgccatcaaatatgacagttcgcgggcgaaacagtgcggattcagcgtgccggcaccgcagcagtcgggctataaggcgctgattaatgattttgacggacggacagcagaggtgccggtgtggtggtacctggtacacatgatatcgaagggcaccacccaggctatgatatcgtccattccctgcggcaaggagctgcggcagctgcgctttgacgtacagaacacgaagctgcgcgaccccattctgctccaggaagttcaggagttcgcggatcagtgttattcccgggcgtattaccggctcaaaagcaccaacagccagctcagtgacgcaaccattaactccgtgggctggattggcagcgactatttcctgaacacgccgggatattacgattactacacgtcgatgacaccgcgggcccagtggccgtatgacagcaggcgtgatgacgggtatccggataccgggcgaggcggctttccgacctgcaggacctggtggtcagacggttcggacggcctgcggagcagggtgctgggtaccttcagtgatgagacccgcaagtccatgcagcgttctttcccggggaaacagtgggaggagatggcgctgcgctggctggttagcccacgtaatgccgggttgtccggcggcggtaacacctatgcagtcggcagcgccgacaccacatcgggcatgagcaatattacgcgcgcactgtcgacagtgggcgtgggaatgaagcaggcggaagcactgccgggttttgatgcgcttcgccaggcgctgccaatggtgcaggctctgctggaaatgatgatgattattgctattccggtgctgatgatgttcagtgcctatgaaccaaagacggcgataacaatctcattttcgatgttcgccctgatttttgtctcgttctggtgggaactggggggctggctggatgatcggcttatcaccattctgtatgacacaatggcagcacagggcgcgggtgactcttcaattccctttgccgggttcttcagttcgacgtcggatggctggatcatgaatctggtgctgggttccatgtatctcattttcccggccttctggattggcatgatgagctgggcgggagcgcggattggggcaatggccaaccatataggtgaagggacaaaaatgcctcaaatggcgggcgaggaagctggtaaaaaagctcaggggctcgctattgatgccgcaacagtaccagtaaaaggtgttgcgagtggtttgaatgcgtacagtaaaggaggtaagtaa

SEQ ID NO: 79965 - DNA, 369 bp, Citrobacter koseri
atgaacctgcagcgtctgaatttttccgttctgcgcggccgtgccggccgcgttctgctgacaatcctgtatgtgctgctgtttagtgcgctgatgctggcgtttgcggctgtgatgttcgaatacgacccggacgggcgtcacctgagggggtggcttcgtgaaagccgcccctggctgtttgtctggcgtatggcgctgtacggctccgtggcacttttctggtaccggaaggtgcgtccgaagctgctgaaacgctggccggaagtggcagagagactaccgcggacggaactgattgtggggctgtattttgtcggctgcgagctgctgtttgcctggtctgcgatgcgggagggggtcttatga

SEQ ID NO: 79966 - DNA, 1425 bp, Citrobacter koseri
atgacacagcaaaaacgcttcttttatttccttctggccggagccgtcatggcactgtccacagcgccggtcgcttatgccatcgatacgagcctttcctcatccggggcgtcggtcagcggcggggcgcttaacgacaacctgttctattccattggcggcggctccgtgatttcacccccgccggggcgcaacaacatggcccgtattggtctggacgggggctggagcagcgacctgatgtgcggcaacttcgacctgagcaccaccgttggtaaccagctgaacggcatcaccagtggttttaaggacctgcagggccgggtgattcagggtgcaaccggcgcggtgatgagcatgccggcgatggccattcagcgcgcgaacccagggctctatgagatgctgacaaacggtatcgttcaggccggattaagttttgataaagccctgctgaactgtcagaacatgtcgaagaagctggccgactacacgatgggcaacaaatggcagcaggccgcggtggccgaggagtacaaaaacattgtggccaccagtggcggagatgcgacggccagtgaccagaagctgcagcaggccaccggtgaggagggcgtcaactggattggcggggaaaaacggggcggtaaggggcagccagcgatacagcccacccatgacctggcaaaagccggctacaacatgatgaacggccagccagtgaacagtaacagccccgtcagtaccgccagctgcaatggcacgctctgcgaacgctacaaaaccccggaagaggctgccgccgcagtggtgaaggtggtgggcgacggtgccatccgtacctgccgggataccggtaactgtgccagtggcggcacggaaaaccagcccggcaccgctattgccggcaccggtttttctcctgttcttgaggaggccacgaaggaaaatctggaacagctgagcaaactggcctccggccagctcccgccgacggcagagaacctggagaagctgaaagccggtaacctgccggtcacccggggcgtgattcaggcactgcgtgatgatccggacaggaatgcgctggtacagcgtctggccagcgagctggcgatggcggacactgtcgagatggcgctggggatgcgccggatgctggtcaccgggcagtctgagccaaatgcagctcagcagccactggcgctggaagagggggaccgccggattgaggctattgaccgggagctgaatgccctgaagaccgagatggaggtgcgtaaggctatcaccagcaacggcatgctgacggcgctggagcgccagaatatgcgaaaccaggataaccagctgcagcagcgtaccggcagccaggacaaagggtttggccagatggagcagtcagcggagggtggcgcaaaatga

SEQ ID NO: 79967 - DNA, 972 bp, Citrobacter koseri
gtgaagatgactctcccccgtccacgccgtctggctgtggcgatgttgatggcctgcagtggtgcaatggccagcgtgaataccgcgagcctgattgccagtgcagccagccccgactgcctggaatggcgcgtcagtggtatctgctactggctcctgtgtacaccgattggctgctcagtcaaaacctcagtaaaggtcacccactacattccggaagcggtggtctcggcttaccagaaccccggggataatccgtggacggagatgaacgccgccagcacggtcacggggggcgcggaaagtgcgctgattacgggtgctgccggcatcgatgccggtggcgggcgccaggaaatgaaggctcccgggcagcgcaagcagaacctgcatttctactacggcgatgcatacggtcatccggccacccgtatggtgggtggcatggtgccgggttattcctgtgattccgccgcaaccccctttatgccctatttcagcagcgccctcgatgcgctggtctggcgcaccggcgtgccggaaatcctctatccggaagcgctggttcccggcgagcgggaactgggcagcacgacgtccggcagcatgtggggtaatgtttacccgcgcagcggcttcgtcacccagaccgatggctacaaatctgccgccgtggtggtgcagcgtgtggcggacatcatcacccgcagcggccagcttcatgtctataccccgctcaccggccagacgtccccgggctactggccaccggagccggtcagggaaaacaccggtacgaagaatcacaaatggcagcgtctttctccgcagctttcgcagacctgcgcggtattcccggacaccggtggccagcaggcgcaggacggtaattacgcctggtccctgtggcagccctacagctgctgcaagcgacgtggccagactttcctgtacagcaccgatttctcctga

SEQ ID NO: 79968 - DNA, 402 bp, Citrobacter koseri
atgaataaattccttctgtgctgcccggcagcattacttttttcagccagtgtgactgccagtgcagtggtgtacaccgataccgcacatccagtgccgggtgggcagagcgagccggttgttgtgctggatgcgctcgaccatattttctctcagtaccatcagctgccggctgacccggttcaggcagaacgcatggcgcgcgaaattctggcatcagcagcattcaggcagatgcagccacagctcgttaaggcggctgaggggctgaagaatgcctgggcgctggggctggaaaagtatccggcggtggtctttgacgacaaatatgtggtgtacgggataaccgatgtcgcggtggccacgcagcacctgaatgcctggcgggagggacgtccgtga

SEQ ID NO: 79969 - DNA, 273 bp, Citrobacter koseri
atgacagagccaaccaatgaagaccgactggccagagcgctggatgccgtcgccatggcgtcaacaaaaaaaatggcagagcccgacctgttactgattaacagtctggctgctggcatgaagcgtaatctcgatggctatgttgcagagcaactggaagcggcgatcaaccaggcaaaagaagcgtccgggaaaataaaagacaaacagcggtactacgatcacttccggacatacctttacaaatttgaaaatggcatcactctggtctga

SEQ ID NO: 79970 - DNA, 183 bp, Citrobacter koseri; identical to SEQ ID NO: 29432

SEQ ID NO: 79971 - DNA, 519 bp, Citrobacter koseri
atgaatctggagcaggttgccaataccgttatatctaacttgcaactcattctggatgggcaaggctggcctctggctgtcgggcctcttgctgagggggattaccaggcgctctccacgatgtttgcagaacttaactgggattatgcgttttctgcgtttggtaatcgggaagataagttcgagtttacggtgaagttgctcccccacagtggagggcttcccgcaggagccgcaatgtgcgtctataatgttgaaacgaacagttttgacatacagtttgtggagagttttgtcaggaatgtccctgaccatccgcttcatggaaagatgatgaaaataacagtactcgccgcgtatttgttttgttcgatggttgattgccccatagttcatgtgatagaaccagatactcaggaactgatggaaatttacaaaaccttcggttttgaaggtgattcagtgctgatgagcgcatctatcgcaacaatagaagcggtgatcatgagctatacttga

SEQ ID NO: 79972 - DNA, 1428 bp, Citrobacter koseri
gtggaggacggggcattcactgtagcccggtatccccggaatgtcccgaaaggggaaatgcttgcccgtgccggtattgccacggtcgttcaccccgtcaccctgacgcgttttggctgctttgaaccggaagagtttatggaatgcctgacgcgggtgcaggataatctgacgtcataccacgaacagctcacgcaggatgagcgcgggtactggagtggaggctggcgtgcgtccctgagtctgattgacttcgccacactcagcgaggcgtttgttgagcgtacccggatggtcagcgagaaaatgcttgatacggaaacccgtcgggcatggacggcgctgcggtggtgtctggccaactatgcggcgctgtgtgccggcggggaatggcgttaccgtaacgggcgggtcagcggcagtgtctgtttcagaattttgctggtcgagtcgacgtcggccgacgcctggaccgatggcgaaacgtatatcgcgtacaacattgatatcgtgcgtcaactgaaaacggatgcgctgatgacagccagccggttgttcagcctgacggagcatgaagtggcgcatgagggcgacagtatggactgtggccacgacgaggtgttctatcagcgcttccacgatatcagcacggagatggcgccggaacggcagcgatacatgcatatctggctgatgaaatacaccacaagtctcgagggggaggggaaacgcgccagtggtaaacactggcgggaacggtggctgacggaacgggccagtaccggccgccagaagaaggggcttcccggcgtgactgacgatactggcgtggcgaaagcggtcagcgcaccggttgaacctgaagatgagcggctgctgaaccggctcaacctgcagctggccggtgccggccatgcacaggctcccgaccccgactggactgccgtgattgccgaaggactgaaagagagccagcgacgtcaggcggaacgtgctgaggagatgcgcctgatggccgatgatatcgccgcatggtatgcggaggagcataccgacgcggatgaggaggatggctatgtgctgtggatggaggagacacgaaaccggcttctggggatgctgccgggtgcgacagcggaaaacctgaccgatcatattgttcagttcatgatgcatgaaacgtattcagcggaagaagagcaggaagcctggcgcctgcgcgcatgggaaaatccgggggcatgggaaggccagcgcacgcagaacgaagcagaggcggtcattgccggcatgccggcagactggttgcccctggtgaaggaaggcgagacgcgctggatgattgagcgcaatgcagcagcagcgggttttttgtgtgaggaggattatctgctctggcgccgggataatgaagataatctcttctga

SEQ ID NO: 79973 - DNA, 861 bp, Citrobacter koseri
atgcgattaccttttgagctcgatccacagattatccatcacatcatttacagccaggccgggtcgatcggcaaagccattatcgaactcatcatgaacagcgtggatgccggtgccggtgcggtgatgattgacatctcgccggaaggtttttcctgccgtgatgacgggcagggctttgcctcccgggatgacgtcatccgctattttggccgtttcgggacaccgcaccaggaaggggatgcaacctatggccgtttccggctggggcgcgggcagattatggcgcatgcccgtaccatctggcgctcccgcgaatggcagatgacggtggatacccgtgagatgggatacagctacgggctggatgcgctgccggagccgcagacaggctgttttatcaccggtgaatggtatgagccgctgagcggccaggagcgtatgtcctgcattcaggaaatcagggacctggtgcgttacacccccgttaccgtgcaactgaatggtaccattatcagccgccggccagaaaacgagaagtgggacgcggaagatgattttgcgtggtaccgcctgcgcgatgaaggggcggtatccatctacaaccagggcgtgctggtccgccatgacccggggcataactggggtgtcggcgggctgattgtcagtaagcagccggttgccctgaacgtctcccgcacagaaatcctgcgtaagacctgtccggtctggaaggcattgccgggaaatttggccaactggcggcgacgttttccggtacgcagggaaatcaccgcaaaacggagtcccgccgggaaaaaagcgcccgggcactgctggccggggaaggggatttactga

SEQ ID NO: 79974 - DNA, 234 bp, Citrobacter koseri
atggaactgaaagacaaacttgctgaagaactggaaaatcggggtcagtggtaccgtgccgcccggcgctggctgtccgtcatggataacgccagtggtgacaaagaacgggaagcgatcgcccgcaggcgggagcactgcatcagtatggcatcaagcataccaccggacagacgcagggcagagacaaagcgacgttataaaacgcagggccggtataatgatggttactga

SEQ ID NO: 79975 - DNA, 345 bp, Citrobacter koseri
atgacgttgaaaaatgcagaaacacggctgacccttcagttaaaggaagcagaaattgcagatcatttaaaaaaaattttcgccagcgaaatctgtgagcgtttgtactacagccgggaagtaaaggatgatcggatctatacagaagccctgtttaaactgaaaaatgtcatccatgcgctgttttatgagttcagaatcaacgataagggacaggttcaggtaaaagaattttaccgggacgacgaagataaagacgctctccggtggcagctcagatcctttcaggactccctgcataatgttcgtgggatgctgacatgcccttttatgcgggaaaaataa

SEQ ID NO: 79976 - DNA, 405 bp, Citrobacter koseri
atgacaaaactgaccatgactccgccggcagtggttccggacagggcgctgatcgcctcggtgattttcacggtgccgccacagggcggagccacgattggcgaatcagacaaccgggcgctgacggtactgcaggatgaaatccggacccggctggtgcagccggtgctgcattccgtgtatccccaccgggtgggtcgacgcagctgcctggccgttcacttaagcgacatgcacgggaaaacgctcgatattctcatcacggtgacgggcaatacggtctggccgggagagggggattacagcagtagcgtgcggtggaatatctgcgtgcccgatgccaccgacatgctgtggctgcttcgggggattgagcaggccaccagtggcagtttacgccagtaa

SEQ ID NO: 79977 - DNA, 2832 bp, Citrobacter koseri
atggacgtgttcagtctgtttcgtaaaaagcctgagccggcctcgcgccagttgaaaggcgacggcccctttgccatcaacgggtatgtgccccataaacgcccgggcaaaatgacgaaggccgatgaggaaaagtttctttatccggtgtcgccgtcagttatcgatctgctcccgtgggcggaatatctgcagaatgagcgtgccattctgctcgatgatgggatctccgtcggggcggtatacgcgatcacgcccgcgcccacggaagggcggccggattcacggctggaagagatcatggacatagtggagaacgccctgcaggacagcctgccggaacgtgaggcaaaccagtgggtggtgcagtttttctgccaggatgaacccgatctgacggcgtatatggacaccctgcgcggctatgtggtcccctgggccgagggcactgaatacacgaaagcctggctggccgagcaggagcgccatctgaagagtgtttctgtggagcagggactgtttattgacagtgaaatcaccggtgcggcctggcgggggcagacgcgctgcgtgcggatggttgtttaccgttgggtggagcagccgtaccgcgacatgctgtcgccggtggaggcactgaaccaggtctgtgaccgcctgagcagctcgctctccgtggcgggcatcaaatgccggcgccagaacggcgagcaaatccatgactggctgttgcgctggtttaaccctgatccaaagtgggtggacagggagaccctgtaccgctacgcccgccaccgtgatgacgtcccgggggaactgccgctgctcaatgattttggcgaaagcatatggtttaccaccccatggagcgatgcggagaacggggtgtggtggtttgatcatgtggcgcacaaggctgtggcagtacaaaagatacgccggccaccgacggtaggccagctgaccggtgaggtgcgccggggtgaaaacatcaatgccatgatggatctgctgccggcggggacggtggtttccatgacgctggtcatccaggcgcaggaccggctggaagaggactttgcgcggctgagccgcaattcgatgggggaaaacgtcgattccctgcgggcgcgtgaggatgcggcgatcgcccgtacttatctgggcaataaacataagctgtaccgggctgccattaccttttttctgaaggcacctgacctggaaacgctggataaacactatctccggatgagtacgcacctgctggccagtggccttgaacccatgctgccggagcatgatgtggcaccgctcagtacgtacatgcgggccctgccgatgaactttaatccggatacggacaggcgtaactggtacacgcggctgatgttcgcgcagcattttgcctgcctggcaccggtctacggacgggataccggcaccgggaatccgggattcagcctgtttaaccgggggggagagcccctgtcattcgatccgttgctgaaagccgatcgcgaccagaacgcgcatctgctgatgttcgggccgaccggttcgggtaaatcggccacggtgacgtcgctgatggcccaggttatggccgtacaccgtccccgggtttttcttgttgaggcgggtaacagcttcgggttactgggggactactgtaaggctcacggactctcggtaaatcgggtgtccattaagcccggccggggcatttcgctggcaccgttcagtgatgcgcacctgctgcagcttgaggatccggcgaaccttgtggtggaagaggacaaactccccgatttgaatgatgtcttcgacgcggaggaggatgaagatgatgaaaaacgtgatgtgctcggggaaatggagattgccgcccgtctgatgatcaccggtggcgaggacagggaggaagagcgtctgacccgtgccgaccgcgggatgatccgtgaggccattattctggcagagaagaaaacctttgctgagaaccgccagatgctgccggaggatttaaaggacgcgctgctgaatattgcccgtgatgacagcctggatgagcaggggcggccaaaacgtacgccgcagcgccgtgcccgcgcagaggaaatggcggaagccatgcacatgttcacggaaggctttgaaggtgagctgtttaaccgtcccggtacgccctggccggaagtggatatcaccattgtcgatctcggtacgctggcgcgcgatggctacagtgcccagatggcggtctcgctgattgcgctgtttaacaccatcaacaatattgctgagcgtgaccagttcggcgaacggcagattgtggtggggatcgacgaagcgcacctgatcaccaccaacccactgctggcaccgtatctgaccaagatcgtcaagatgtggcgtaagctgggtgcctggctgtggcagttcacccagaacctgtcggattatcaggctatctcgaagaagatgctgaacatggcggagtggtggctgtgtctgaacctgccgaagggtgagattgaggaggtggggaaatttaagacgctgaccaaagaggaggaagccatgatggcttcaacccgcaaaacagggaattacacggagggtgtggtgttatcagcgaaaatgaaggcgttattccgggttgtccagcccagtatttatctggcgctgggacagactgaaaaacatgagaaggcgaaacgccgtgagctgatggataagtaccactgttctgagctggaggcggccatccggattgcgcgggaactggacaggactcgtggactcagaagggagccggagaacgtatga

SEQ ID NO: 79978 - DNA, 405 bp, Citrobacter koseri
atgccggtgaataaatttgtgattgttgcttttcttgctgcactggtgaccggctgcagtacctcaaaagaggagatgctgccacccggtgacagcaccatgctggagttatggaatgacggggcatcagcctcgcatgccaccacggagagccgcgccaccctgcgccgtccggtgtcggacagcgaacggacgctgtcacagcagacccgggagagctacagccgtacccaggaaaatgaaattcagcaggtatttccgcgtctgccgaatccggatctggtgatgtatgtctttccgcatctggcaggcggtaataccccggtaccggggtacagcacggtgttccctttttacagccaggtgcagtatgcgctgcccggtgagcgtacgggagatctctga

SEQ ID NO: 79979 - DNA, 255 bp, Citrobacter koseri
atgcagaacaacaacctcaataagtatctgactgctgttttgctggcggctttgttgtccggctgctgcacacctcaacagaaaacacagcaaccagacagcattccgtcagttctgtacaacagcgacagaacggctgttgcagaaagcgaacaacaaacccgggaaaggctccggcagtcaaagacggcgctggaggcgctgatacagaacccggcatgggaggattgcaggagagaggaggtatgccggtga

SEQ ID NO: 79980 - DNA, 1548 bp, Citrobacter koseri
atgacaaaagccacatccaatattctggtcagggttgtcgtgccggtggttgtggtggtggcgatcctgatcaccgttaaatcctgttcatccgggaataacgccccggagcaggcgcaggggcagggcacaaccagtacggtcctgaacgacctgacgccggaagaactcaaggcgctgggcgtggaaggcgatacggcgcaggacacgttacgcactatcgccggtaactttcgtacggtccgcgaacggctggactcgctcgacggcgagaataaaaggctccgggaggagaacaaacagctgcgccagaccggcagtaacgttgacggtcagataagccaggcagtgaacacggtccgcaatgaagaggagcagaagcgcagccagttaaccgccaagcttaccgacctcgacgcgcaactggcccggatgatggagcagatgcagggcagcggcgggacggcgaaatccggcaacgccgggcaaccggtgggcggctccgggagtgatatccccgtcgggttcggctatgacgacagtcacaatgccggcagcagtaccacacagcccggtgccgacggcatgctgtgggtggagccgcgtgacggtatcgccacggatgcaaacggccgcccggtcggtggcggtaatacaaataacgccaccgggttttcctttgccacctcctttggtgaggcggccggcgacaccaaagccgcggccaccgctgttgtgcagaaggcatcagaggcggttgatgagtctgccgagcctgtctacaccctgccggagaattccacgcttattggcagccgggcgatgaccgcactgctcggacgtgtgccgatcgacgggaaagttaccgacccgtatccgttcaaggtacttatcgggaaggacaacctgacggccaacggcatcgagcttccggatgtgcagggggcgattatttccggtactgccaccggtgactggacgctgtcctgcgtgcgcggttcactcaccagtgtcacctttgtgttcactgacggcacgatcagaacgctttcttctgccggtggccagcagcgcggtcaggggaacggtgaaagtgccggtcagggcgggcagggtagccagaacggcaacggcagtattggctggatctccgatgagaacggtattccgtgcatctccggggaccgtaaatccaatgcctccacgtacctgccgaccattagcttgctggcggccgccagcgcggccggggatgccgtcaccgaaaatcagaatacctcccagaccaatggctatggcggtgtgacctccacgctgaccggcgatgccgggcaggcggtgctgggtaaggcgctgtcgggcgggacgaaggagaccgttgactgggtgaaagcccgctacggccagacctttgaggccatctatgtgccgccgggccagaagctggcggtacatatcacccgccagctggccattgattacgaagaaaaaggccgcagggtgaaatatgacttcagcctggccggcaacggcacgggcatggattaa

SEQ ID NO: 79981 - DNA, 879 bp, Citrobacter koseri
atgaaaaagttcggtgtctttctgacggcgctcctgctgttgccagccgtgaccggcgcggtggagctgatgaaatgggagcgtattccgctgcaaatccccctgacagtgggccaggagcgcattgtctttgtggataaaaacgtgcgggtgggtttcccggattcacttaataacaaactgcgggtgcagagcagtggcggggcggtgtatctcgatgcacgtgaggcgtttccggtgacccgcctgcaactgcaggacaaggagaacggggaaatcctgcttctcgatgtcagtgccacagaggggaaaacgtcccgtgaacccgtgaaagtggtgtatgacggtgaggtggcatcggccacttcatccgctgagcagaaggtcagcggcagcaccggaaacagccagccggcggaggagaaaaaagcctcccgcaaaccggcgaagctgaatgcaccactgcccgtggtgctgacccgctatgccgcccagagtctttatggccccctgagaacggtggaggcggtgcccggcatcagcccggtatccctgaaactgccgtcgcgtatcaccactctgctgccgtcagagcaggtggtggtcacaccgctggccgcctggagtctgcagggcagcagcgtggtggccgtccaggtgcgtaaccgttccgctgacaaaattatcctggatccgcgtgcgctgcgtggcgactttctggccgcgacgttccagcaccgctggctgggcagggcgggaacgccggaggacaccacggtactgtatctggtgatgcagggacgaccggaaggcgcgtttattgcagaggctgcgttgccggtatccggtaaaacggcagggaagagggcggcgaaatga

SEQ ID NO: 79982 - DNA, 660 bp, Citrobacter koseri
atgagccgctttcgtaatgccatgaccgcccgggatcaccatatctggtccctgcgactggtcagcatcatgctctttgtggggctggttatcaccagcatcggctggatgcgggcgccggacaatctcactatccataacccgccggatctgcgttcgggcagcacccgcaagtggtgggaaatccccgaatccacggtctacagcttcgcgttctatatcttccagcaactgaactcctggccgaaggacggggaagcggactatccggcgaagattgcgcagatgagtccctatctgacgccgggttgccaggccttcctgaaccgtgacgcagaggtcagaaagaacaatgacgagctgcgcgaccgcgtgcgcgtggtctatgaagttccccggcgcggctacagcagtgccagcgtcaccactgtctcgcaggatctgtggatcgcccgcctcgacctggtggcggatgagtattaccacaccgagccggtcaaacgggcgatggtgcgctatcccgtccgggtggtgcgatgggaaggcgatccggaacgtaaccccttcggtctggcgctggactgctatgagggcgtgccgcagcggctggaagctgtaccacaggcggagccggagaaaaagtcgggggtgtttcagtaa

SEQ ID NO: 79983 - DNA, 375 bp, Citrobacter koseri
atggccgttattgattttctgcctgaccggctgaacaatccgccggtggtctggaaaggctacacgtccggtgagtttatcctggcggccgcctgcgggatggtcgccgggatcccggtggcggtccccctgtcgttcgtctcctttatcggctggctggcgttcccggcctgcatgctgctgatgccgctggtctttctttttagcgggggtgtagtgatcagccgtttaaaacgcggtaaaccggagaacttcatctggcagcggctggagcggtttctctgccggctccggttttcgtcatccctgcttcttgcttcccgtggatgggcgatgaggcgtacccggcaggtgaaaccgggaggggacgtatga

SEQ ID NO: 79984 - DNA, 369 bp, Citrobacter koseri
atgaaaaacacctttgttaacgtttaccgccagttgcttccccgtggcagacaggcgctgctgtttctggcggcgctttactccgtaccggcactggcggatttgcctccggtcgagcctcctccgacgggcggcggtggcggaacctataacagctttattggttatatcaaactgggggcactggcgcttggtatgctggtctgtgtggcggcattcctggcggtcgcgcataacgtcatcggctcttttatggatatcaagagcgggaaagggacctgggctaactttctggggtatctggtcgtgggggttgtggtgatcctgattgtgatttacctcgccaccaaagcatcagaaatcctgtaa

SEQ ID NO: 79985 - DNA, 240 bp, Citrobacter koseri
atgaacggggcgcagcgtaacggctgggacgccggtaccggtggcttcctggagcccgggcaactgaacacccttatccttggcgcgctggggatcgtgattttcctgttctgcgcctgggcgctggtgaccgcctaccggggactcgccacgcaggccgtcacgtggcggcagttcatggagatgattgtgcgcatcatcctgctcatcctgctgacactgttttttttcttccactga

SEQ ID NO: 79986 - DNA, 315 bp, Citrobacter koseri
atgcgccattcaatcatcctttctgctttgctgctggcatccctgccagccatgcaggcccgggcgtccgaaaaggacgagcttgccctggtgatgcgccagctggatcaggtgcaggccggccttgaccgcgctcgcgtggtggcaaaccagaaccaggaggcgcgcttttactttgactaccagcaggcctcccgggatatcgccaccatgaagcaggggatttccacctaccttgagccctcacgggcacagccttccgtacctgttgccgtgaccggtcagtaccgcgctgaagagcccgactggcaatga

SEQ ID NO: 79987 - DNA, 246 bp, Citrobacter koseri
atgaacagagattacccactcagtcaaatcacactgaatctggcgcggtcagtcgccggaatcaggccatcaccagagctgcaggagatgcactttgttctgcaggatagtagtcacactgtgctgatgccgctggaaacgctcctgcgatgtctgcgcgaagctgagaaacagggtgaagtaccggttcttcctgtggaatggtgggctctgctgaactgtaaatacccagaaatcagtcagtga

SEQ ID NO: 79988 - DNA, 759 bp, Citrobacter koseri
atgtcacagcatgatactgaccaccgccgcagcgctcctccccggcggacatcctccgggccgttcggcctgctgctgtgggacctgccggcagctgttcttggcatcctgctggggtcactgctggccagcctgctgatcgaatatgcctgtattgcgtttctctggccggatgagggggcggtgcacagctaccgggtcatgcaggccgaaagccgctggttgtctgatggttatgcccgaagcctgctgatgtcggcaccggttgagacggtgagccgctggatccacgttgcctggcagtggctgtttgttgacagcggattcagtggctggctgcaggcattccggcatcggtcgtcacagggggcggggctgatcccggccatgaacggctttgccgccacgctgacagactggctgggcgaatacctgcaggcgacggtgtgggtgacgctgatattttttatccgggtgatgatcctgttcctgagcctgccgttgttcgggctggtcatgattacgggcgtggtggaagggctggtacggcgtgatttgcggcgttacggggcagggtatgaatcgagttttgtgtatcaccatgcgaaacgctttatcagaccggcgctttacggtccctgcatgctgtacctggcgtggccgacggcggtatggcctaacctgttgctgctgccggcagcgctgctggctggcacggttctgaccattacggttgcgacatttaaaaaatatctttag

SEQ ID NO: 79989 - DNA, 2121 bp, Citrobacter koseri
atgagcgatcgttatgtgatggagtccctgctgcgcccgccggttgaactctactctgccacggtagccggcagcgcgacacttatctgcctgaccgccccctgggcagtggcgctggccccgtccgtcagctgggtaaccgccgccgggttcagcgtgctggcgctgaggcgcacccggcaggggctgaaaattctgcgttaccagcgcaatctccgccgcctttcccgctatgcgctgaccagcgcgcagatccccgtcagccggcgtcaccttttcctcggtaaaggttttcagtggacggcacggcacacgcagcgggtactggaagcccggcggccggaaaatgaaatctacgttcagccgtcagtgctgtaccgtctggcccgggacatggagcggaagctggagtacagcctgccctggctgtgccggctgacccgcagtgactcgccactgaacccggtgcgcccattgccaccggtgggcggaagccctgtgtatcacggcgtggagccggatgaaaccacggtcagtttcgacctcggggagcgtgttggtcatatgctggtcatcggcaccacccgtgtgggcaaaacccgcctggcggaactgatgatcacccaggatatccgccggcgtaatgccgcaggcgatcatgaggtggtgatagtgttcgaccctaaaggggatgctgatctcctgcgacggatgtatgccgaagcccaccgtgccgggcggcaggataacttttatgtattccatctgggctggccggaaatttctgcccgctataacgccgtcgggcgtttcagccggatctcggaggtcgcttcccgtgtggccgggcagttgtccggtgaagggaactccgcagcgttccgcgagtttgcctggcgggtggtgaatatgatcacccgtgctctggtcgggctggggctgcgccctgattttaccctgatccagcgctatgtgatgaacatcggcgcactgtacgaactctacgtggataacctgctgagtgagaaggccccgcagctgatgcaggtggtacatgccctgatgggcagcggcgtcgaggagaaggacatgccccgccatatccaggggcgcaccaacagcctgaaaatctgggcggtggagcaggtgctggcgagcgatgaagggctgaggcttcaggatccggtgatggaagccctgagtaatgccgtgcagtatgaccgcacgtactttgacaaaatcgtcgcctccctgctgcctttgctggagaaactgaccaccggtgagattgcggcgctcctgtccccggactatgccgatctggatgatccgcgaccaattctggactggcacaacattatcaagcagcgcgggattgtctatgtcggtcttgatgcattgtcggacgcggtggtggcgtccacggttgggaacagcatgtttgcggacctggtctccgaggccggctatatctacaagtttggtcttggggatgaggagggggagaacccgaaaaaagtcaccatcaacctgcactgcgatgagttcaacgaactgatgggggatgagtttattcctcttatcaacaagggcggcggcgcgggcgttcaggtgacggcgtacacccagacgctgtccgacatcgaagcgcgtatcggcagcagcgcgaaggccaaccaggtggtgggtaacttcaacagtctggtgatgctacgcgtcagggagaagagcaccgcgatgctgctgactgaccagttgccggaagtggatgtctacaacaagacgctgacatcgggtgtcaccgatgtcgcccgccccggggaaggaacagactttaacagtaacgtccaggatcaggtcaacctggtgaaggctccgatgatcaccccggcggacgtcattaaccttcctaagggacaggcctttgccctgctggaaggggggcggctgtggaaagtcaggatgccgttaccggtggatgatgacgatccgctgatgccggagagcattcagcggctggcccgccagatggagcaggagtaccggaccggggaatcgtggtggtctggctcaaaagtcccgcttcctgctgagccgggagggccgtatgtcacagcatga

SEQ ID NO: 79990 - DNA, 408 bp, Citrobacter koseri
atgagcgattttctgtttcatgaacgtcagatggcgtacctgcacggcctctgcctgaaccattatgaatttgacgacgtctttcttgaggcttatctcgcgttatgtgaggaactgcgttttcatgcggcgcagggcttttatatggagcttgaggtgaccagggtgccggagtccaggcgggatactgccggctggaaaacggatctgttcagtacggcactccgtttttcggctggcaccggcacccgggaggtactgcccgcgaatatcccgctggctgtgacccttcgtgatcctgtggcggcacaggaacttctcggggcactgcaggcatggcgggatgcccgccagcgggcttcccggggcggcctgctgaaccgcctgttacgaaggtcttcccgatga

SEQ ID NO: 79991 - DNA, 375 bp, Citrobacter koseri
atgagcaaaaaatttgatgccatttccctgtttgtttctgatctgatcttctctccggcagcccggacggcccgggatgtcttgtgtatcctggtgcaatttgttctgagaatattcatcctgcgcccgcttgcactgctctgcggaatggtgctggcggtgcttgtcaccattccggttatcgtttttatcaacccgtcgtttactcctgatgtgctgaccggtgggctcttacggatacaggatctgctgcccgtggcatatacaccgctgttcctggccggcctgctttttgagctggtttatatggtgagccgtttaacggggttgccgtatctctggctgaatggcgcgggtcagggaaagggaagataa

SEQ ID NO: 79992 - DNA, 666 bp, Citrobacter koseri
atgataccggatccacttctcgccgggctgctgagtccgtaccgggggacgatcgtgctgattgcggccggcgtgatggtattgctccttctggtattcagtcggcgcaccgtcagtcagcggcgtcatcacagttaccggaaaaaagccgcgcgggcgctgctccgtttgccgcaactgcgtggcgaagctgcccggatggtctggctgcgcaggatgaacccgtatgtctttgaagaaatgctgctgacggcactgtccaggcaggggctgcgtatccggcgtaatacccgttacagcggcgacggtggtgcagacggccaggtctggattaacggccagcgctggctgattcaggccaaacgctacagcgcgaccatcagcgctgcgcatgtctgtgcgttcggacaactggctgagcgcgaagggtgtcctgggctttttgtgcacaccgggcgtactggtgaggccagccgggaagtctttcgccgttatgacaacatcgttcttatcagcggccagcgactgctctggctgctgtccggcgaccggcgctggattgacggcccgggtgcccagcccctgcacgcaataacccgaaaccgttcccgccattcaccatcacccgttaccgaaaaggaaaactgccatgagcaaaaaatttga

SEQ ID NO: 79993 - DNA, 513 bp, Citrobacter koseri
atgataacgagacgcctgaatttcacactctgtgccggtctgctggccttcgcctcctgttccccggccgccctgacggtggtggctgacctgggcggtgactccacggccggtttttttgacgcgctcagtgcgcaggggcaaagcgctccggcgtcacctgtggccccgcccgtcccgctgtccattgcggacatgctgcctgtcagtacgccggagctgtcgccggggcaggtggtctcccggccgctgcagttgcccggtctgccgccggtgtttgtggtaggggacgatgaactgtcccgccggtggctgcagcagcgcggagcggaactgacgcgccttggcgcgacgggactggtggttaacgtggccacagaggaagggctgcgcgcactgaaagtgctgttaccggggacagaaatggcacccgtgcggggtagtgatctggcacagcgcctgaaactgactcattacccggttctgatcaccgcagaggggatggcgcaatga

SEQ ID NO: 79994 - DNA, 609 bp, Citrobacter koseri
atggcaggtcgcagcattctgatggcagcactctgctgcggtctggcttttgccggcgcggcgaaaagtgctcccgtagggcagagtattccgtccgcgtaccgcctgattgcagagcaggaacgggtgccggcggagtcgctgtattcgctggccatggccgaaagcacccgtaaaaccgccgccggggcgaaaccctggccgtggacgctcaacgtggcggggaaggggtatcactatgagtcgcgggaagaggcctggcaggcgctgctgggctttatgcgccgttatcccctgaaacgcatcgatgtcggtattgctcaggtgaatctcggctggaacggacagtattttccgtccttccgggatgcctttgatccacacactaacctacgggcagcagcccgcattctgagggcctgctatgacgcccgtcccggaagctggatcagggcggccggctgctatcaccatcctgccggggggaaaccggctgataactacatggccacggtccggcgcaaactcagccagattaccccggaaacgccggagaacaagcctgttgtcctggcaagcaaccaactcacctggattgaaccgcaatga

SEQ ID NO: 79995 - DNA, 726 bp, Citrobacter koseri
atgaaaaaataccgttttgccggtctggcgcttctcccgctgtgggctgtgatggcctcagctgccacggtgcctggcgctgccagccagagcagcgtaacaaagacccgggagcagcagagcagccaggtgcagacgcagcagcaggcacagcagtggggactgtccgacagggagtgggcgcagtaccagtccctgatgcagggggagcgcgggattatgtccccgggtcttgaccccctgacggcactgggcgttgaagctgacagtcaggctgaccgtcgccgcctggcggaactgtgggtcagacatgagtttaagcgtgccgaaaaagagctggcctttcagcgggaaatcaacgccgcctggctgcggctctacccggaaacgctggccgtgaacatgggcagcaatatggccggtattgcgcatgacacgcagggccggctggcgctgttcgtgaaggaagactgtgcccgctgtgatgcccgcctggcggcggtactggccgataaccgcccggtggacatttacctggtcggcagcggtgataacgatgacaccgtccgccggtgggccacccgccataacattccggtggagaaggtacgcagccggcagattaccctgaatcatgaccgggggatgtggctgcgttacggacagggacagatgccggtcattctgcagcagggggaaaaaggatggcaggtcgcagcattctga

SEQ ID NO: 79996 - DNA, 885 bp, Citrobacter koseri
atgtcatccagtcttacatcgccagaagcactgctgaatgaggagccggatgtggtttctcaggagccgtcaccggcgttatccgtgtcaccggcgtctgtaccccggcggcctgctctgcccacgaaaaagctccttaaaaccgggggcttggttctgctcgtcctgtcactggcgggcagtgtggctaccattggcgtgatggcgagccagatgtcagcgctgaccatccgggtgaacagccttgatgccgcctttcgcagcggccagatgagccagctgtcatccaccgtcgccggcctggaaaagagggcgctggcgcaggagaaacagctcgcctcactgtcctcagacctggcatcagccagagatgccacggaacacctgtccgcatccctttcagaccgcgatcagaaaattcagcaacaggcggacgatatccgtcattaccgggatacggtcacgcaactggaagggcgggtcactcagctcgaaaccggccttcaggcttccgcagagcgcctggctgaaatggataaggcccggcaggagaaaaagccagccgcaccggccgtcagggcagaaaaagcggcgccgtccggtaagcctgcgtctgtcacgccatcaggtcagaccgcaaaaaagggtaaccggtcagtcaggcgcgctgcgacgccggctgcaccgttcgttctgaccgggattgagcgtcgcggtggaagcaccttcgcagtcgtgatgccccgtggcgcggccgccgtctcgcagatgaagctcctgtcccccggcgaccgtaccggggactgggtactgcgcgccgtgcacgggagcagtgaggcggtcttcaccatcagtggtgaagaggttcgtgtaccggttcagtaa

SEQ ID NO: 79997 - DNA, 1116 bp, Citrobacter koseri
gtgaaaaaacgtataaaaaaaatgcccttagggaaggccctggataagtattatcgtacggtttccgttaacaagcgcgggtacatgcaggagttctaccgcatcagcgtgattaaacgctccgcgctggcagataagtgcatggatgaaatcaccttggtggacattgcggaataccgggatgcacgccttggcgtggtcagcaagcgcactgggcgggctatcagcccgaatacggtacggcttgaacttggccttctgtctgcgctctataatatcgcccgcattgaatgggggacctgcacgcataaccccgtggagcatgttcgcaagccacccccatccccgggccgcaaccgtcgcctcacctcaacggaagagcggcgaataacccgcgcactgcgaaaacgcaaccctcagcaactggccatcttccagctggcgctggagaccgccatgcgccagggtgaaatcctgtcgctccgctgggagtatgttgacctccatctgggcgtggtgcacctgcccgtgaccaaaaacggcactgcgcgcgatgtcccgctctcttacaaagcccgccaggtgcttcgggagtttgccggcccgctgtcggggccggtcttcacctatacctccaacggtttcaagagcgcctggcgcacgctgattgcggagctgggtatagaggacctgcatttccacgatttgcgccatgaagccgtgagccgcctgttcgaactgggcacgctcaacatgatggaagtggcggccatctcaggccacaaaagtctggccatgctcaaacgctacacccacctgcgcgccacccagcttgtcagtaagctcgatgcccgccgtcgccaggcgcagaagtttgctgctctgtttgtgccctatccggcagagctggaggagagtgacgccggtatcaccgtacgtttcccggacctcgaacacccgaaagttactgccgcgacgcgggaggatgcgctcagccgtgcgtcggtggatttactgcggatacaggcaatggcggcaagagccggctcccggctgccgccgccgggacatgtttccgttaacgacagccggcgaatactggtgaacccgttatga

SEQ ID NO: 79998 - DNA, 210 bp, Citrobacter koseri
atgacaaccagacagacaagaagtgcagcagaagccatccgccttattcaggacgcggctgaacgtaaaattgagctggcatttgatgtcagcgcggatgagttctttaccctgtcccgtctggtcggcgataagggcggtaaaattacaaagcccggagagtatttcgtcatttccctcaagaactttcctgttcccccgcagcgatag

SEQ ID NO: 79999 - DNA, 1455 bp, Citrobacter koseri
atgactgaaatgacgcaggcaactgtgcgaaccccggataagggacatgtgattgtcagtaccgcagcggggctgattatcctgttgctggttgtcctgtgggccggtgaccgctggatggattacgtgcagcgcaaggagtggcaggtgtctgccgtacaggtgacccgctttgtgcaggcggtcagggcctatacggggcgttattacgacacgctactgaaatccacgaccaccacgacaccattgaccgtgacggtggatatgctcaaaaacaccggttttctggagccgggattcagcgggacgatatccggcgggcagcagttacaggcggcactggtgcgtaacgccacgaacacggaacagttgcaggggctggttgtcagccggggcggaacgacactgccgtatatggcggttcgcgatatctcggtgaatatcagtgccgggctgggtgcctatgtctggggcagtgccaccgtcatcaccggtgcgatgggggcatgggaggcaccgatggcgtcatacggtatcaccacaacgggaggtcatattggcgtgctgctgaccacggatgagctgaatgcagcccgggaagacaatgaccggctttaccgttttgcggtgacgggaaaaccggacctgaaccgtatgcataccagcattgatatgggcggtaatgacctgaacaacaccggcacggtgaatgcgaaaaccgggaaatttaccggtgatgttgctgccggaggcaaagttgatgccggcggaaatatgacggcgggcggcggcgtcacggcaaacggggacatccgcagcaatagtggttcccttgtcacccggggtaataacggctggcaaaatgaaacgttccagggcggattttacatgtcggattacgactgggtaagggctatcggtaacaaggggatttacaccggtggtcaggtcagaggggggactgtgagggcagacggaaggttgtctacaggtgaggctttacagcttgaaaaagtgtatacagcaggcacttcctgttcgccaaacgggcttgtaggccgcgatgcgtctggcggcatactttcatgcaaagacggtgtgtggcgttcacccgatagtagtaatgctacatatacagctatcggacattttaaaggggcatattccgggaaaaatgcatcggatcgccctctgaaactttatgtcataggcggtaaaccgccatcccggaaaattaactacggcgatgctgatgactgcgccaacacctttgctcttgcagcatcggtgaacggaataaatattgccagatctgttagtgcgaactcaacttggcataaatcgggaaccattgtgtttgatattcctgttaatgcttcatacagcattacgtcggataatatgcgtgattatggttgtgattacggcagttttgatgtcgtagcgtaccgataa

SEQ ID NO: 80000 - DNA, 651 bp, Citrobacter koseri
atgtctgtgtcgctcagttccctgatgctggctgggctggttttcgggctctgcgttctgctgttccagtgtatgtcagtccgctggcggggcgatctgtgcggcattgacccggctgaatgctggcaggcgggcagtgcggcgatggccgtaatggcgcacagtgccctggtgacgttctgtagcctggtgccatcggaaggggatgtctaccggactgccggtgtggtgctgctgtccctgtttctgcttcgcctgacgctgacggacctgatgaccggcctgttgccccgggaaatgacggtcagctgtctgctggccgggctgctctttgccaccggtaacggtgagctgaccgggcatatcctggccgctcttgtgctgtggctgttgctggcggttgccagggctgtcgctggctggctttaccggacggaaacgctgggactgggggatgtgtggatgggcagtgcgctgggcgcctggctgggctttttcccggccgtgaccgccctgctgatggcatggagtggctgcctgctctggatgctgctcagcggcacacgaaagactgcccttggtccgtggatgagttacagcgcgcaggcggtggtgttattaacgtttattgagcccttcgtggtgtggtga

SEQ ID NO: 80001 - DNA, 477 bp, Citrobacter koseri
atgaggcgtctggtctttctgttgctggctgtgctgtctttcccggcccgggccttctgttttgaggcggcgggggtgaagtaccgtgttgacccgctgctcatcagggcgattgccaccggtgaaagcagtctccggccccgtgtcacgcacgacaaccgcagccgggagaccggcaaaattgtcagccgtgattacgggctgatgcaggtgaactcgacgcacgttcccgatcttatcaggaagggaattatccgcagcgcggacgatctgctgacgcgcccgtgtcttaacgtgcaggtcggcacctggatcctggcgaaacattttcaggtctgcggtatctcctggaactgtctgggctcctacaacgccggcttccgtaaggaccggcacgagacgcgggaagcgtatgcgaaccgtatctacgccatttatctggagctgctgagaaaagagcggggtatgtcgctgtga

SEQ ID NO: 80002 - DNA, 597 bp, Citrobacter koseri
atgtcattacagtcagtttcagcgcgcaggcgtatatccgcaaaaccggaccgcggccacgttattgtgcagaatgcggcggggatcctctggaccattctcggaatggtggtggtgaccgtgatggtctggtctatctgggggatgtttaaccgttccattgaaaccagcaacgtccagtccattgcctctgccgtgaagggcaacatgaagcagcagggtaaggggtataactttaccagcggaacctccatgaccgggaatatgatccagcgcggactggcaccgggcaacatgaccatcgtcggggataaaacatccggcagcgccacgctgtggaacacctggaacggccaggtggtgatagcccccgtggccatcaacggctacaacggagggttctccatcacttacaacaaggtgccccaggaagactgcatcgatatgagccagaaactggctcctgtgttcacctcgctgacagtgaacagcagcgtgcacaacggtgaggtgaccggggagagcgccggcaaggagtgcaccaaagacagcggtggtgacggtaccaacaaactggtcttcacctacaacgggtga

SEQ ID NO: 80003 - DNA, 1113 bp, Citrobacter koseri
atgtctgatgtgcgtttcactccgtcacggcccatgaatctgtggcagcgctgcctttaccagggcagccgcctgacgtttaccgccggttaccgccagccgttctgggagacgctgcggtttctgctggataacggcaggccgatgaaagaggccctgcggatgatcagtgatatccatacggatttcggccgccgctggcacccccttgatgaactgatccaggactgtctgcagtcgctgggtgaaaacaccgaagggcatcagttgccggacgtgctggcccgctgggtgccggaagatgaggcagcgctgattggtgccgggctcaaaagcgggcaggtgtctgccgcgctggcgcaggccggcaaaatgattgatgcccggctgcagatcctggcgcaggtgctccaggccgccatttaccctctggccctgctggcgattttcgccgcgatgctggcactgaacagcctgcaactggtgccccagctcagcaaactctccgatccggattcatggcagggggcgctgggcgtcctgaaaacactggctgacgtcacatcggcctggggcgtgtgggcggcggttgccggcatggtgctgattgccctggtgttctggtcgctgccccgctggtgtggccgtctgcgccgggtggcagacatgctgatgccctggtcgctgtatgccgacctgcagggggcggtgttcatgatgaacgtggccgccctgctggaagccggggtgccggagattgagatcctccggacgctgcggcggttcagttcgccgtggctgcgcgagcgtatcgatgcggccattgccggtgtcaaccggggtaactcgctggggatggccctgcgtaacagcgggtatcacttcccggataaagaatcggttaactatctggccctgctgggcaggggcgatggcgcgggcgtgcttattgcgaaatacgcggagcggtcactggagaagacccttgcccgtgtggcccggcgtgccgccacggccaggatggtgtctatcctgcttatttttgccttcttcgccctgatggggctcgttgcgatggatatccaggcgatgtcccagtcttccatgcattaa

SEQ ID NO: 80004 - DNA, 1545 bp, Citrobacter koseri
atgatgaatatgcaggtgagtcctgacattgatgagtttgtgtttgccgaacagcgtgacggccgcgtgctgctggttatcgacaagaaccggcgggcagatgcggggatccagcgctgggtgatggaccagaagaaaaaatggccgcaggcaactgctgagtttgtgtcgctgggtgagctgaaaacccgaagggagcagggacaggcgcataccggcgagctgacccctgtcaccggggagcataccgcgctgtggagcgacacccagaagaaggccatcgcgtatctggcgctggcccagcgcatgtcagcatctgatattcatatcaccgtcatgcgcgccgccgggattgcggtcattgagatgcgtatccacggcgagctggaggtgattgatgaactgaccgaccgggaaggggatgcgctggtctccaccctgttcagctccatgtgtgacgtgcggatcccaccgctctttaatgacggtgacatgcaggccgggcgtatctcggcagagtttgcccgggcggccgggctgttcggtgcccgctaccagcatatgccgacggtggacggggtgtatgtcgtgctgcgtaccatcgtggatgacagtgaccgggtgccgacactggagcagcagggatttctgcctgaacagattgccgtcattcatcagatgctgcgccgggcgcagggtctggttctgctgaccggcccgaccggctcagggaaaagcaccacgctgcgcgtgttcagcagcctgtggctggcccgcacgcgctaccgcaaacggatgctgacggtggagaatccgccggaagggcggattgccggtgccatccagacaccggtgattgacgggaactgggaccggagtaacgccgcggtgctccgcgccgatccggatgccattctgttgggggagatgcaggagattaatgccctgatggcggccattcatgcggccaataccgggcatatcgtgtttgacaccctgcacagcaacagtgccaccggcgcactgccgcgcatggaggtgatgggcgcggacaggcggctgattgccgatgcggaactggttatcggtcttatcagccagcgtctggtcccggaactgtgttcgcactgcagtgttccctgggcgcagaaagcgccgctgttgccggcggaagagcgggcatacctggagaaatactgcacggtaccgggtgtctgttccccggaaaacctgcgcttccataacccggaagggtgtgagcactgcaaccggacgctggagctgaccggccgtgttgtcagtcggggtgtcaccgggcgtaccgcgatagccgaggtgatccgccccgatgcgcgttttatggcgcagtggctcgatcacgggacggccgctgcccgtcagcactggctcaacaacgggggcgtcagccggtgtacccacctgctgcaccggctgaatgccgggcgggttgacccgcttattgccgatgaaatcgtgccgctggatgaggatgaactgctggcgcgggaggtgccgcatgtctga

SEQ ID NO: 80005 - DNA, 555 bp, Citrobacter koseri
atgtacagaaataagacctgccggtggctgctgtgtggtctgactatggtgctggccgggcaggcgtgtgcgacgcaggacaggaccacggcacctgccgctgatgtgacggatgcgcagggccacactgtcgcaccggcaacggatgcgtccgctgcggcggacagcctgaccatccttcagtttgaggacgtgattcaggacaaccttctgctggagcagcaggtgcagcgtgcccgactgcagcgccaactgcaggagaacagtggtgcgtctgagcctgccgtgacagcggcaccggtttacggcacggcgcccggtatgccggggcagcctgttgtgcaggagagcaaacccgccccgaccgtaccggcccgtccgcgcctgcaggatatctgggggcgccccggtgacctgcgtgcgcgcgtcagactgcctcacggcgggatagtggaggtccgtaagggcgatagtcttcccggtgaaaaacagaccgtgtccgccatcaccccggatgtggtccggctgagtgacggcagcgaactgacattctga

SEQ ID NO: 80006 - DNA, 1317 bp, Citrobacter koseri
atgatgaaacgtcttaaacctgttctttttcgtcccacttcccggcgggagcgcacgccggggtacctgctggccgacggtaagaccggctgggtagcggggatccgttgggtacagggcggtgtctcgaccggcctgacccgctaccgccagactgacagcttttgtattgctgccggaaaaggcaccgggcaggtgtccggtctggtcagtccgcaggacgtgcgccgggggatgacgctgtattcgctggcgatggtcttcctgctggcggtcggcggcagcagttacgggatttaccgtctcgatggtgagcgctgggtgtttcttgccactgtgcgcgggcgcctgtcagtgatgggcgacatcaccggttcactgaatgacgtgctgatggcgcgtaaccagtttctggagtttaacgagccggatgatgcgtgctggcactgtgtcgcagagccggagcaggctctcagctggcaggcactggtccgcgatttaccccgggcacacctgagacaggcccggctgcgctcaacatcaccggcccggcttctgcaggtgaccgccggggtggtggtgctggggctgctggcgttatggctgcaggatgcgtcctcccggcgggcccgacaggccgcggctgaagctgcatggcgggcgcagcaggcggtggaggtaccgcagccggaaacgcaggccgaactgccgcatccctgggccgaccggatgacggtaccggcattgctgagtcagtgccgggcatcccgcgcgccgctgcggatggcggtggagggctggccactgacggcatgggaatgtaccgcttcaccggccggactgcgcctgaattatgccgccacgccgggtgtcacggtggaagcctttgcccggcaggtgcaggtgctgtacggccgtcccgccgccttcaacctgaaggacggagcgcaggggggcgaggtgttctttccctttgagacgacagagccggccggatggctgcgggatgagcttccggggccggcagatacgcggctgatgacgctgctgtcggacctgcagcgccgggatatccgccattccccggtgtcattttcagaggtcacgccgccggagacagcgccgggaacgaaatctgacgtgccggtacagacgtggcgcgaatacaccttctccgtgaccacgccgttacgcccggagttgctgttcacgggtgtggatgacaccgggcttcgcctgagcagcatcggtttcacccggagtacgcaggggcagtccacttacaccattaaggggagtttatatgtacagaaataa

SEQ ID NO: 80007 - DNA, 1695 bp, Citrobacter koseri
atgacctccctgttccgtaagtttacacacgcgtccctggcgttctccctcgtcctgctttccgggtgtgcgctccaggaaatcgacaaaatgggcgctcaggcccgccgtgacggtgataccgcgcagcgtattcttcagagccgcaccggccacagccagccggtggtgacctggacggataaaccctgggttaacctgaccccgatcccgacagcagagacgtccgtttctgcggcgggaggctataccgtgccggactgcccggtggtgatcaacagtggcggaggcagtatcaccctgactgaaatcggtcagcgcattaccgccacctgtggcctgcgtgtgtccgtcacgccggatgcgatgcagtacctggggacagctgttgccgcgggcagcacgcagcagataagcgggacactgccggcaccggacgacaacgggcgggttcccctggcgactatcggtaacaccccggccccgcagcaggcagctccggtactctccgggagcggggcgctgaccggatttaaatgggacggcaacctgcgtggattgctggatacgctatcaagccgcctggggctgtccgtccgtacggataacggtaccgttgttttctaccgctacgacacgcgcacctaccagctggccatcctgaacaccatcatcaacagttcggccagcatcaactccggcaccgggacccagatgggggccagcggctcgtccgggaattcatccggggatgcgacgtcggcccagaaaaccggctttgacctgaacagcaatctgtacgatgacctgaagaatacggttgagcggatgcttaccccacaggtggggcgttactggttgtcggcatcgagcggtaccctgaccgtcaccgacacgccggaggtgctggcgcgggtggggcgttttgttgagtacgaaaacaaagtgctcaaccgccagatccagctcgacattaagatccttagcgtcacgcagacgcacaacgaagagctcgggcttgactggaacctggtgtacagctcgctgcgcaatgccggtgtgaatgtctccggtaccttcaataatgcttcctccggcgccacgtccgccacgtattccattctggacacggcgaccggcagcgcccggcactttgccggcagcaatctgatcatgaaagccctgtccgagcagggggatgtcagcgtggtgaccagccagtcgcgcgccaccaccaacctgacgccggtgccgtatcagctgtcaaaccagcaggggatggtaaccagcgccagctcgaccgccacggcgaacgtgggcgtgacgtcaaccatgaccaccaccacgctgaccaccgggctgttcatgacggcggtgccctatatcgaggagaacggtaacgttcaactgcagtttgcattcagctacgacagcccgccgaagattgagtccttcttcagcgccgacggcaacacccgtaatgacaccgcgaattactcccgtgaggcgatcacccagaaggtcaacatgaaggccgggcagacgctgatgctgaccggctctgaccaggtgtcgaactcggctgatcgccagggcgtgggcgctgcagatttcttttccctgggtggcgggcgtaagggcacgaacaagcgcacgacgctgattatcctgattacaccgatcctgatgaactga

SEQ ID NO: 80008 - DNA, 444 bp, Citrobacter koseri
atgggatacggcgcactcattgtcgccctcgccatgctgttcatggtgatgacggagaacctgaccgctgacccctccctccgcacggacacgcgggatgtggcggcggaggcggaaagtcttgcccgcgacatgctgcgcaccgccagtgccgtgaacgactggcgctattcccgcccgctgtctgacggcagcctgaacctgaaccagctcgggctgtcgccgtccccggacgcacgtatccgggccgtcatcagtggtggccgcctgtgggtctggacgacggacagggaggggctgcgtccggcactggcccgactgtcttccggctcggcgctggctctctccgtgaccggcggtcatctgctgatggcggatggcaccgacatgaatttacccctgccgtccggtgtgacggaagggaatgtggtttacctcaactga

SEQ ID NO: 80009 - DNA, 1314 bp, Citrobacter koseri
atggttaatttccactggcagacggtacagcggctcagcgcgatgacgctctgccttattgctgccggctgtgcagatcagcactcacgcactgaacctttcagtcgtgtgcagggaacttcccgggttcaggatgtttaccagaaccgttcgccggaagtggtgcgttacgatcgctacacactcgccagcacccgcccggcagatgcccagcgcgatccgctgaaccagattattgatatccgaatgccggtacaggtggtgaacaccatcggggaaggcctgcgttatgttcttctgggctcagggtattcactgtgcgcgggtgatccgggtgtgtattcggctctgttcatcaaaccactccctgccatccagcgttccgtcgggccggtgaaactgagtgaagccctgcagatcctggcgggccccgcctggcgcatgcgggtcgatgaccttaaccgcgaaatctgttttgtcctgagggatgaataccgtcatctggcacctgccgtatcgcaagctattgtggtgaaaagcaacgccggggcggcgtcttctgccggttccctgctgaccaggaacacgcctccggccatttcaggtggaagcagcagtttcccgctgccaccggcacgccctgactcagccggcacaccgtcagcatcagtccccgcggctgcacctgcctttcaggcggcaactacggcagatgtcgcggcgaaagccccgcgcaacccgttctccggtggacagtccgcacccgcgcaactgtcaacggtgccatcctcttctgctccggcaaaaccgtccactgcactgccgcccgcaccggcaccgtcctcgctgtcagccacatccgcgccgctgaacaaagccgcactgggtgtgccaccggccggtgtgaagacggcttcagcggctgttcctgccagcgcaccactgacgaaaccttctgcaccgacgacagcagcgccagtattcaccccgggcacaccggtgatgacgccttccggcgggcaggtatggcgtgccgcaacggggaccaccctgaaggagacactgcagggctgggctgcttccgtacgctgtgaaagcggcagcagcccttactggacggttatctggccgaccccgctcaattaccgcatcgatgcgccactggtcctgaccgggaattttgagtccgtggtcgtgcagctgtttgaactgtacaaagcggcacaaaaaccgctgtatgccacggcgaaccgttaccagtgcctggtgtacgtcggtgacacgccgccggcaccacagcagggtatgcgctga

SEQ ID NO: 80010 - DNA, 210 bp, Citrobacter koseri
atgggaacccggataacggcagatgaactctatgacgaaatgtgcagggtcatcggcgacatcgtgatgacatttcatgattacaacatcgagcccaaacatattgtcattgccgacgcgctgagaacggctatggcatcggaccatggcgaaggaagcgaattaacactgaaggccatggcgctcgcgatcaaaaccctggaaacctga

SEQ ID NO: 80011 - DNA, 231 bp, Citrobacter koseri
atgaccgtacaggcaaatatgcatgaagccaaatctcatctgagtcagcttgcagatcaggcggtggatggtgagattgttatcatagcaaaagcgggaaaaccctacgtcaggctggttcctgttatgcagggagacagggttccgggcggatgcaagaggcttatctccatggatgaggctttttttgaggccgatgctgaaatccagagaatatttgaaggtgactga

SEQ ID NO: 80012 - DNA, 249 bp, Citrobacter koseri
atgactatttctgctaagcatgtacgttttgacgaatctgccatgtgggtggaactgagcgatggtcgtgtgatcggtgtccctctggcctggttcccccggttgctcaatgccactgatgctgaacggaatggctatgaactcagcaagagagggatccactgggacatgcttgatgaagatatctccgttgaaggactgctcgccgggcgtggagatgtaacccatattcctgcacatgttgcctga

SEQ ID NO: 80013 - DNA, 243 bp, Citrobacter koseri
atgccggttatactgagacttaatggttttaagttttttttctattctaacgaggggaacccccttgagcctgctcacattcatgtcagaaacgctgaaggtgaagctaaattctggctggaaaaggaagttaaactgagcaggaatgatggttttgatgcccgtacgctaagggatttgacccggacagttgaacagaaccagacgttgtttgtggaggcgtggaatgactatttctgctaa

SEQ ID NO: 80014 - DNA, 540 bp, Citrobacter koseri
atggcagcacgtggagtgaacaaggtaatactcgttggatacctcggacaggatcccgaagtccgttacaccccggggagtaaagcagtgaccggtctgaatctggccacttctgaatcctggcgtgataaacaaaccggtgaaatgaaagaaaacaccgaatggcaccgtgtcgttctgttcggcaaactggcagaagttgccggtgaatatctgcgtaagggttcgcaggtctatattgaaggccagttgcgtacgcgcaagtggacggataatgccggtgttgatcgctggacaacggaagttgttgtcggcatcaacggtacgatgcagatgctgggtggccgtaacggtggtggtcagcaacagccgcaatccggtgccggtcaggcgcagggtggctggggacaaccacaacaaccgcaacagtccgcaccacgaaatccatccaatgaacccccaatggattttgacgatgacataccgttcctggggcatggttatggcgtatgccgcaaggcaatctacgcgatttcatga

SEQ ID NO: 80015 - DNA, 498 bp, Citrobacter koseri
atgactgcaaacaattctactgcttcaaacaacgcttcttctacccagaacggccagaaaaaagagtatttcaacctcaataccagcggtatcggctatctgagtaatatccgccgtgtcagctcaccgaacggtgaatttacctgctgtgttatcaatgccctgtccggtccgaccgataacgccagttacacgcgttttgacgtcaccatcgcaggggcagaagccaccagactcattaaccgctgccagaaggcatgcgatgaagaggaaaaagttctgctcggctttgtgctgagtgggctgaaagcggatgtgttcaccctgcaatcgggcgaacatgccggtgaagcccgtccttcactgaaagcccgcctgattaaggtggagttcatcaagaaagggcaggaactggtctacaaggctgaaaatacctccacgcctccgtctcagggaaccgccgcggctccgaaagagtacgcacaggattctttctga

SEQ ID NO: 80016 - DNA, 2025 bp, Citrobacter koseri
atgcggctttttatctgcgaaaaaccttcccagggacgggatctggccggcgttctgggggcaacccgacggggcgacggatacctgtccgggcagggtgtggtcgtcacctgggctgtggggcatctgctggaaaccgctccgccggaggcctacgggcagcagtatgccggtcagtggaccatcagcagtctgccgatcctgccctcaccctggcaggtggtggtcaagaaggagacccgcgatcagtttaaagtcattgagaagctgctgaagcaggtggacgacgtggtcattgccaccgatgcggatcgcgagggtgaagtgattgcccgtgagttgctggactactgcggctggaacggtccggtgcagcggctgtggctgtcagccctggatgagacgagtattcgtgctgcgctgtcagatctgcgtcccggtgctgaaacgctagggatgtattacgccgggctggggcgtgcccgggcggactggcttatcgggatgaacctgacccgcctctatacattactggcggcagacaccgggtatcacggtatggtctctgtcggccgggtacagacgccgacgctggcactggtggttcgtcgtgaccgtgagattgcggcgtttgtgccccgtccgtactggcaggtgaaagccatgctcagtgccggcggggtaacgttcccggcgcagtgggtaccggcaaaagtctataccgatgaggaaaagcgctgcgttcataaggacattgcgcagcaggtcgtgcagctctgtcgccaggccggagcggcccgggtgacggaatgcgaaacaaaacgggaaaaggcctcagcaccgctggcgtactcgctggggacgctgcagcaggactgcggcaggctgtggaatatgtcaccccagcaggtgctggataccgcgcagagtctgtatgaaaagcacaaggcgaccacctatcccagaacggactgcggctatttgccggaatcaatgcgggaagacattccggcagtgctgggtgccatacgcaatacggaccccgacatttcttctttattatcacagctcgataccggctttgtgtccgttatctggaacgataaaaaaattaccgctcaccatggcatcatccccacccgtaactcggtgcagctgtctgccatgaccgaaacggagcggcaggtatacatgctgatacgccgcaactatctggcacagttcctgccgctgcatgagtcggatatgacgcggctctccctggatattggtggccagctgttcagaacgtccggccgcgtggaagtgttaaagggctggaaggtgctgtttgagaaggaacaggatgagcagaaagagggcgatgatgaggcgactgatcctctgccggcgctgaaaaaggatgacacctgtgcggttagcggggcggaggtggtacaactgatgacccggccgcctgcgcattacacctttgccacgctgattaaggcgatgatgaatgccgcgtcgtatgtcaccgatctgacgcttcgcaatgtgctgaaggacaatgccggactcggaacggaagcgacacgtgcgggaattattgacctgctgcttaaacgcgagttcatcgtgcgtaaggggagccagttgcgggcgacggaactggcgtgtgacattattgatgcgctgccggtgcaactgaccgaccccggaatgaccgcgctctgggagcaggcgctggatgaggtggcggcaggacgaatgcaactggatgatttcctgcaacgtcagatgaactggacgcgccaactggtatctgcgggaagtcagcagaaggtgaacctgcgggttccgccttcgccgccctgtccgctgtgtggtggcaaaatgcggcagcgtaaaggagaccggggggcattctggggatgtctgcgctacccggaatgcaagggcgttatcggcaatgccggtggcagtaaacgtcctgcgaaaggcaggccccggtccgttaaaagcagacagactaatcagtcgtaa

SEQ ID NO: 80017 - DNA, 729 bp, Citrobacter koseri
atggcagaaaatactgagaagaaaacccgggcaggcgccctgcagtcggagctgcatattgcactccataccaattatgcgattgggttgtggaccgggcgaccggaagaaaaagatgagtcgggtaaaagaatcaaacgacaaataatgggtatgccccagtttttatcgagggcatctctgattaacagtgattcgttaaagaacgatccgtgggctgatatggccatgattaaccttgaagagaaaatcgatcaggcacatcagcgtatgaaagcactgattggctctcttgaggagaagatggattttattcctgaaggcgtgaccctcacggatgctcattcctcagaggcgctcgatatcagcgtattcagcaattcaccgttgggttaccgctgcgtcttcctgctgatgggctttgatcagtttgccaaaaaagtgctgcaggcagcgcattatggcctggtcacccggaaagaaaagtatgcccttatggatgcaggcagtcgccttctgcgggaagtttttggggttgtacttcgttatcgcagaaccggtgtcacgcgtattgacgctgctgaaaataatgaagtctggcgtcaggcatgtacggaatatggtgagccagaccgggacgtgctgctgggagacaaacgttcggcgttctcccccccggtgaatgaagcgagtgtgaatctgctacggttgcgttacagcgcggactaa

SEQ ID NO: 80018 - DNA, 1308 bp, Citrobacter koseri
atgtttttggacactgccgggaaattcccggcagtgctgcagagtgtggcataccaggaggagccggggatgggattaccacctgacagtattgttgccctgacgctgtcccgtatgcagcagaaccttgagctgcggggcggctccggtgatgtcagccaggagcgcagtggcctcctttatatggggaatgtgcatgacgcctttccccgtcgtctgtttttggacacccggctgtcccccctggacaagacggcctgggtgatgatccgtcttcatgcacagcagaatgacggtgccgtgtttccgacatatgatgaactgcagcagcagctcgcggccgcacactccgacaaggcgtcacgggaaaccatcagccggacgctgctgatgctccgtctgacgggctggctcagcctgtgtaaacgggtccgtgatgagcacgggcgtgtgcgggggaatatctacgctcagcatgatgaaccgctggggctccgtgacgcagagacgttcgatccgggctggctggagctggttgcttcctgctgtgcccacaaaaacaaaagcatacgtatgacggccactggtgtgctgaatgacatcctccgggatccgggtatgcgccaccgtcacagcaggctggcgctggttgaggagcgtctgggcgcgccgtcaacgccatcacagatggcctcgcagcggatacaacagcgacagtcagtctcaccgggttcgaaaatcgaactgagtgaaaaaagcataaaaaacagtcacattttgcagagttcgaaaatcgaacccggtactttaccagaggataaatcacagagttcggaatccgaactcagcctgaaatcaggcacttacaccggagttcgaaaatcgaaccgtaacgtacgtaatatcacacacagtgtgaataaaaaaacgtacgtaccggacacgcgtctgccggagaacttcctggaaagcctgagccctgatgaccgccggatgctggtcacgcagttctcctcgctgccggacgcagttgcggacacgctggccggaatgctgcaggagcagctggcgcagaaccggcttgccaacccgactggctggatgtttgcgatgctccggcgtgcccgcagtggcgaactggctctgccggaacccggcagaggcaccgcgggtacagcgggcagcgctgctgtagctgctgaaccggtttcgcgtacggcagaacctgtcccgccgcttccggtgaaacgtgcgtctccggatcgtatccgtgatgtgattgcggcgatcagggcacgccagcactga

SEQ ID NO: 80019 - DNA, 237 bp, Citrobacter koseri
atgcagctgtctgatttcagtaaacgccagcaggttccgcctgcggttcgccggcgtgcggcccgtctgttcagccggctctgcagcggaaagaaaatcttccgccagctggggctgaaaggcaacggttatctcaaggtaaatgtcggtcccttctggcgcctgctgagcaaggatggcggccggcagtggtggctgatggatcatgaaacctataaccgggaaattcgcaggtaa

SEQ ID NO: 80020 - DNA, 600 bp, Citrobacter koseri
atgagccagcataacctgtccggcgccaccgtcacgatcctgtcctccctgctgatggatctgaaggccggtaacgtccgccgctgccagtcgctggggatgtcccttgaagaaatcagggcgctcagccagatgagcctggacgaactgcattacctgagccagtcccatgtctcggtgctggatgtcagtatcaaccatgacaacttctggctgatgctgaaccaggcgcgtaacgagcagaagaacctgctgatgattgaccgggcgctggagctcggcgggtcaatggatctgatggcgaaatatttcgggttatcccccacggaagtcagcgcccggcgccggctgatgggaattgaaagccggcaggggcggaccctgtcaccgagcgaggaggaggatgcggcactgtgggagcactggaagaactccggtatgacctcgccggactccctccctgcgctggaggtcatgatgctggccgcggagcagaacgaggtctccctgacggccgtctggacccgcgtgtgccagtggtgccgggaagcccggcatgtgacgcgtcttccacaccaggcggaaaggaaggaggcctga

SEQ ID NO: 80021 - DNA, 747 bp, Citrobacter koseri
atgtctgacagggaacgtctgctctcccgtatccggcgcctgatggcgctgggctcccgtaacagtaacccccatgaggcggcccgggcgctggggcttgcccagaagctgatgctccgccacaacatcgcgccggatgacctgtcgctgaaggatatccgggagtctgtctgccatcaccccgggacggatgcgcagaccattcccgcctggctgaatgcgctggccacggtggtctgcatgtcgacgggctgccgctgctggttcggctggcatgttcataccggcctgaaagggacgcggcgtacccgccgctccctgcatttttatgggctgcacgagcgtccggaggtggcggcgtatgtctttactgtgctggcgcgccagctgcgtgccagtacgaaggagcatatgacgaaaaaaggtcgccccggccgtgtccgcctgcagacccggcgtaaccgtgccgaccagttccgggaaggctgggtcaccggtgtctggcaggtgctgaaggatttttccccgacgcctgatgaggggcaactgctgcagcgctggctcactcagcgcctgaaaagcgatgcgctgaacgctgttaccgtgcgtgaagccagaacatgccgtggtgaccgggaggcacggcttgccggatggcatgccggccaggacgccaggctgcaccggggcctgtccggtgcgttttcgccagacctgctgacaaacggaggagagacccgtgactga

SEQ ID NO: 80022 - DNA, 213 bp, Citrobacter koseri
atgtttattcagcagggggtcagtgccgtacgcagccggctccgtagcggaaaaccatcactggaattctgcgactgttgcggtgcgccgatcccggaagcccgtcgccttgtcattcccggtgtggagctgtgtaccggctgccaggacgtcagtgagaagcgggagaaacaccattctccggtttcaggcgggaggacgcgctatgtctga

SEQ ID NO: 80023 - DNA, 1722 bp, Citrobacter koseri
atgaataatgtccgtcatatcagcagcctgggtgatgccatgctgcagcgcggaagaacaccgtcggtgcctgcagataatgcgcaggccattcagcccgtcagtgaaatggcgatggtgctgacgctggatcagctgcgccctaaccctgacaacccgcgtacaagccgtaatccccgctatcaggagatcaaggcgtccatcagggcgcgcggtctggattccatacccaaagtgacccgggatccggacggtgacgatgtctatattttcagtgatggcggtaacacccgctaccagatcctgacggaactctggcaggagacgggggaggagcgcttctaccgcattcacaccatcttcaagccctggccggggcggctgaaatgtctggtcgggcaccttgctgaaaatgaggtgcggggagacctgtcattcattgaaaaagcgtttggcgtgcacaaggccagggttatccaggaggaactgctgggccgcagtgtgacgctgcgtgaactgtctgacctgctgaatcaggaagggtatccgattgataactccagtatcagccggatggaagacaccctgaattacctttatccatatatgcccaatcagctcgataacggtatgagccgcgggcaggtcgtccctttgcttgggctgcgttcttctgcgctgaaagtctggaaagcgttcagtggtgagatcaagccagacacaacccttgatgaggtttttggtgtcacctgccggttatttgatgatcctgacagttattccctggaaatattcagggacgagtttatcggccagttactgaaggcgctgcctcaccccagcctgaactacgatcgctggctgattgaacttgacccgaaagagcagcgacgccgggaacagtttggcgatccgccgcccacacctgccctcacgcctgttccggagcggacaccttcccgttcgcgttctgaaccacaggtactggaactgccgcctgacgatacccgggaaaccgccatcacaggactgcgttcaggcacgctgacgacgcaggggcgtccggagccagctcccgggttgcctcctgaactgcccggcagcaatctggtcagtgacgacagcccgtcgcgccaggaaatccagatggatttgtatggcggtgcgccggtgctttccggtgagcgtgacggttcagacacctccgcggcagcttccccggtcgcgtattccggcggggcgctggcatccgccttccgggaagacacttcggaagacgagctaccggtcagctctgtggcttttgcggccaccgggctggagccggtgagcgatatctggcatatcccggcgttgctggatgatgtggagcatctgcaggacatggcctaccgtctggcctttgaggtagcggaagccatggggtgcgaagacagcattcaggaggacagagcccctgattcagccggtttttccgcatcagagaacggtaatgaatttgtgcttttcctggccggtttgtccggcaggctgccgaataaacagtgcaatatgttcatgttctgtctcaacttttttggctcacagtcagccggggatacgcccgttttcgctgatatccatgtggtgaaaatgatgcgtcttatccgcgttatccgccgcctgcgtgagttacagcgccaggccgctaaaggagggggaaatgtcgcaggatctcaatga

SEQ ID NO: 80024 - DNA, 1359 bp, Citrobacter koseri
atgtcggagcttaaaaatgcccttgaagggctggcctctctgtctcttgatgccgagcagtgtgtactcggtggtctgatgctggataacgatcgctgggatgaagtcgccatgattatcagtgcggaggatttttattcccgcccgcaccgcgtcatctaccaggagatggcgcgtctggttaacgcgggatgtccactggatctgatcaccgtcagcgaaagcatcgagagccagggcaagctggagcaactcggtggttttgcctatctggctgaaatttccaaaaacatccccagcgccgccaacatcatggcgtactgcgaaattgtggcccgctacagccgggccagacagctggccagaatcggggcagatatcactgctgaagtccttaaacccggcagcgatatcgcccatatcatggagaaagccgaacgggatatcacccgcctggctgagcgtgctgaaccggaacaggccatcacgctgtttgacggaatggagaaactgctcaccgaactggagcgccgctgcggttctccggatggtattaccggtacgccctgcgggttcagtgagcttgatgccatgaccagtggcctgcaggcaggcgatctgatcctggttgcggcccgtccttccatggggaagaccgcgtttctgataagcctcatcctgaacgccctgatgaagacggttgattccgtggcacagttttacagcctggagcagccggcggagcaaatccttatgcgtatgttatctgcgctgggtggggtggatctgcagcggatgaaaagcgggctgatggatgacgaagactgggcgcgtgtctcttctgcatcgcagatcctgatggaagacctgccgcagcggctgattattgatgattccagcggcctgacgcctgccatgctgcgtatccgtgcccgccgcaatgcccgtaaatacggcaaaccttcccttattggcctggattacctgcaactgatgcgcagccctgaacaggagaaccgcacccaggagatagcggagatttcccgttccctgaaggcgctggccaaagagatggagtgcccggtggtggcgctgtcccagcttaaccgcagtctggaaagccgggcggacaaacggccgaacaacggcgacctgcgtgattccggtgcgctggagcaggatgcggatgtgatcatcttcatctaccgcgatgaggtctatcacgaaaacagcccggataaggggacggctgaggcgattatcagcaagcagcggcaggggcctaccggcgttgtccgcctgaaattcgagggtaaatttacccgtttctctgaactgtctgtggagggacgctactga

SEQ ID NO: 80025 - DNA, 978 bp, Citrobacter koseri
atgcattcaaaaaatgacgttgcatcattgggtctcaccaaaggtggtgagggtaaatctgtactttcttctttctccggacagcctgctgtaccggtctccagacccaggatccttcctgttgtatccacaaaaggtggcgagggtaaatcaactcagtccgctaaccttgccggtttcctggctgacgccggactccgggttctgctcatcgatggcgatcacgcccagccaacagcaaccagtatcttcccgctggagtacgaagctccctgcggcctgtacgaattgctgatgcagacggtagatctgtccaaccctgacaatatcatttcccgctcttcgatcaaaaaccttgatgtcattatctcgaatgatccccgtaatctgctgccaacggcaatgcagaacgcggctgatggccggatacgccttcgtaacgcactttctcatccgctgttctgtacatatgacgtcattattatcgattcacagggctcccgctctgtcatgtcggagctgattatccttgcttcgacgggggagatgatcggtgtggcgaaacccattctgcccgatgttcgtgaattcctgcgcggaacggtacgtctgatggaagagctgttgccctacagcgcgtttggtatccgtatacccgatacccggcttctcatcaactgcatggactatgacagcctgtcggttcagtcactggctgagattaaaaaaattattgaagatcgacgttacagccagcatgcggacaaaatcagtatcgacctgctgtccaccctcatttatgacctgacggtctatgttcagggacacgtaaaaggcgttcctgttcatcgtcttgagaagaaaacaacgcgcgtcagtgactcggcgttttcctccatgtacctccttgcctgcgagctcttccctgaatggaaagaaaagtttgatgcgctggcggaggaaggggaggacgcgtaa

SEQ ID NO: 80026 - DNA, 477 bp, Citrobacter koseri
atgagcagtccaaatatcctgttaacccgtattgataaccgattagttcatggtcaagttggcgttacctggacatccactatcggcgctaatctgctggtcgttgtcgatgatgacgttgcacaagatgagatccaacagaaattaatggggattaccgctgaagcttatggttttggtatccgcttcttttccatagaaaaaaccattaaagtgatcggcaaggccgccccacatcagaagatattcctgatttgccgcactccgcaaacagtcagaaaattgctcgaaggcggcatcaccctcaacgacgttaacgtcggcaacatgcatttctctgaaggtaaaaaacagatcagtagcaaagtttatgttgatgaacaggatcttcaggatctgcgcttcattaaacagcacggtgtgaacctgtttattcaggatgtccctggcgatcaaaaagagcagatccctgcgtaa

SEQ ID NO: 80027 - DNA, 807 bp, Citrobacter koseri
atgcatgaaataacgttacttcagggaatatccctggctgcattagtcttctttctgggaatcgatttttggctggaagccctgtttttattccgaccgattattgtctgtacgcttactggcgccatcctcggtgatattcatatcggtttgattaccggtggtctgaccgaactagcgtttgccggtctgactccggcgggaggcgtgcaacccccaaacccaatcatggcgggtttaatgaccacggttatcgcctggtccaccggtgtggatgccaaaaccgctattggtctcggcctaccgttcagcctgctgatgcaatatgtcattctgttcttctattccgccttttcactgtttatggcgaaagccgataaatatgcaaaagaggcagacactcatgctttcgcccgcctgaattggctgacgacgctaattgtcgcctgctcttacgccattatcgccttcttgtgtacatacctggcgcaaggtgcgatgcaggcgctggttaaagccatgcccgcctggctaacgcatggcttcgaagtcgctggcggcattctgcctgccgtcggttttggtttgctgttgcgcgtgatgttcaaggcgcaatatatcccttacctgatcgccggtttcctctttgtttgctacatccaggtcaacaaccttctcccggttgccgtcctcggtgcaggctttgccgtgtatgaatttttcaatgcgaaagcaaaacaacagtcgcaaccccaacctgtcgccagtaaaaatgatgatgaagaggattacagcaatgggatctga

SEQ ID NO: 80028 - DNA, 792 bp, Citrobacter koseri
atgggatctgaaatcagtaaaaaagatattacccacctgggtttccgctcatcttttcttcaggccagttttaactatgaaaggatgcaggcaggtggctttacctgggcgatgctcccggtactgaaaaaaatctataaagatgataaagccggcctgagcgcggcgatgaaagatcatctggagttcattaatacccacccaaacctggtcggctttctgatgggattgctgatctcaatggaagagaaaggagaaaaccgcgacaccattaaaggcctgaaagtcgctctttttggccctattgccgggatcggtgatgccatattctggttcaccttactgcccattatggcggggatttgctcctctttcgccagccagggaaacttactggggcccattctgtttttcgccgtctatttgatgatctttttcctacgtgtcggctggactcacatcggctattcggtaggcgtcaaagcgatcgataaagtaagggaaaactcgcagatgatcgcccgctcggcaacaatcctcgggatcacggttatcggcggtcttatcgcctcctacgtgcatattgatgtcgtgacctctttcgccatcgacagcacgcacagtgtagcgctgcaaaaggatttctttgacaaggtcttcccgaatattttaccgatgggctacacgctgctgatgtactacctgttacgggtgaaaaaagcgcatccggtactgttaatcggtgtgaccttcattctctctattgtctcttcggcactgggcattctgtaa

SEQ ID NO: 80029 - DNA, 720 bp, Citrobacter koseri
atgcaatgtatacagtactgtcacagttatgacgcattgagcaatcgcgccagcgagcagatgattacgctcatacagaacaaacctgacgccacaatctgcctggcaacaggcgcgacgccattactcacctatcgttactttgtcgagaaaattaaccaacgtaagatcgatatcgagcgggtggttttcgttaaactggatgagtgggttggtattccgctgaattcacctgcaacgtgtgaatctttcctgcaacaacacatcgttcaaccgctgggtttacgagcagaacagctggtcggttttcaatctgaaaatattaacgagcaggaatgcgagcgtatcacagagattattgccagccggggcggcctcgatttatgtctgctcggaatcggaaaaaatggtcatttggggttgaatgaacccgcagagagcctggagccgttttgccatatcagcgtacttgatgagaaaacgcgccatcatgacatgttaaaaacggctgctaatcgtgtaactcgcggcattacgctggggttgaaggacatcctgaatgcaaaagagatcttgctgctgatagcaggtgaagggaagcacgatgcggtagaaaaatacctgaccgccaccgttactactacaatccctgcttcatttttatggctgcaccgtaatgtgagttgcctgattgacggctcacaatatcctgataaataa

SEQ ID NO: 80030 - DNA, 1065 bp, Citrobacter koseri
atgaataagtttattgaaattgccgggcgtaaaattggtgctgacttccctccatatatcattgcggagttgtcagcaaatcataatggcgatattaatactgctttccggttgatcgagatagctaaagaaagtggcgctgatgcgatcaaaattcaaacttatcgaccagatacaataacaattgattgcaataaagaagattttcagattaaagatggcctgtggaaaggaaaatctttatatcagctttatgaatgggcacatactccatgggagtggcaccagaagctttttgagaaggctaaagaagttggtatcacgatgtttagttctcctttcgacttcactgctgttgatcttctggaagaactggatgccccagcttacaagatagcctcatttgaactcgttgacttacctttaatccgctatgtggcaagtaaaggaaaaccgatgattatgtcaacgggtatggcggatgaacacgaaatccaggaagctatagacgctgcgtacggtgccgggtgtaaagaattggttgttctgcattgtgtcagtggttatccggctcctgccgaagattacaaccttgcaaccatacctgatatggcaaaacggtttaatgtaatcactggtttgtcagaccatacaattgataacaccactgcggttgcttcagttgttcttggtgccaatattattgaaaaacatatcaccctcgaccgcaatggcggtggcccggatgatagcttctccctggaacctaaagatcttgtagcgttgtgtcgcgatgcgaagacggcctggatggcattaggtcgggtgaactatgagcgcaaagaaagtgaaaaaggtaatctcaaattccgtcgttctctttatgtcgtaaaagatgtgaagaaaggcgaaaaattgactagtgaaaatgttaagagtattagaccggggtatggcatggcgccgaagtactatgatgaaataataggtactactgtaaatcaaagtttagaaaaaggaactccgttaagttttgagctgattgaaaaaaataatgcttcttaa

SEQ ID NO: 80031 - DNA, 642 bp, Citrobacter koseri
atgcttaatgtaacgttattgtgtagtgatatcgaacacccggtatatgtttacctcagtacgtggcaagagagaaataaagataattataatattgaattagtcaccagtgttgcagatattaaaaatgcaaacggtgttctattccttatatcctgttccgaatttatcaaaaaagagattagggagcgattcgaatatacgttagttcttcatgctagtgatttgccacaaggacgaggatggagtccgcatgtatgggatatcttaaccgggaaagaccgtatagttttatctttgctaaatgctgaatcaggtatagatacgggagacatttggagaaaaattcatatacctctagatggcactgagttatttgatgaaattaatgaaaaattatttggtgcggaaatcgaattgattaattggttctgtcaaaattataaaacagcgacgccgacctctcaaactggaaacccggattattacgaaaaacggacgcctgaaaacagcgagttggatactgataaaacaataagagaacaatttaatttgcttagagtatgtgaccctaatcggtttcctgcttatttcatcattaatggtcaacgatacaatatcacaattaaaaaggttaactaa

SEQ ID NO: 80032 - DNA, 1116 bp, Citrobacter koseri
atggctaaatatatagcgtttcgtgctgatggaagtgtcgatacagggataggccatatcaaaaggtgcttatctttggctcaaaaatttatgagggaaggttttcaggttctcttcatttcccgaagtctgacaccagtgcttgaagccgagataaaaacatcaggtgctgattacatcaggatccccactacgtcagagcgagaaaacagatattttcattcagcctggcttaatggaactgaaagtgatgatgcctccctctccagagagatattggtgaaatatggttgcgaaagtaataatgaacttagcttaattgttgtcgatcattatgcgcttgggaaaccatgggaaactgaactgaattcattggcacctttgctggtaattgatgacctttgtgatcgttcgcatcactgtaactggctgattgaccagactatcggtcgccagaaaggggattatcttgcattagtaaatagtgattgtcagttactattgggacctcaattttccctgttaagggatgaattttctcaatggagaccaaagtcattaacacggcgaaaagatatccaacatgtaaacaatattttggttacgttgggtggtgttgacaaaaacaacaaaagcctaatgacactttcagcacttgaaaaaagtcattatagcggcaagattacacttattgttggctctgggaatcctaacttatatagtttagaagacgccatctcaaaatcacttaataaaattagattagttattaattctgataaaatgtcagaggaaatgactgacgctgatctatgcattggcgctgctggtacgacctcgtgggagaggtgtgcattaggattacctacaataaatttggtaattgccaagaaccaggaaactatcgctaagaacttaagtcaagctggcgctgcaatcaactttggactcctggaaaacgaagacgatatattaaggcttaagaatttgattgatcatcttataagtgatgtcgcaattttaaaaaaattgtctgaggcttcttctcaagtctgtgatggcacagggttgcacagaatttattctacagtgaacgagaaattatgcttaatgtaa

SEQ ID NO: 80033 - DNA, 1068 bp, Citrobacter koseri
atgtcaagacttgatcatctgcgttttgcagcatttatccttgtcatattccatcattgcaggggaagtatcaattacggcggttctgtcagtaatttgcaagactttgcatctttatggattagatggggttcttctggagtaagtctttttttggttttgtcaggattccttttctgcataatttcagatgctggaagaaaaaaaatacaatattcaagcttcgtaaaaaacagaattcttagaatcgcccctctaactgtaatatttgtatttattgccatttgtgtagaccaaaccaactctacaccaatggatatttttagaattttaacacttcagcttaacactggctcaccaggtactggctggggttataaattgtacccaatgggcccgatatggacaattgctgtagaattccagttctatttaattttcccgtttcttgcaatatttttatctaaaggaggcctaaagtcattgtctggaattgttgttgcgtttgttttaattaaattgtcgctggtgatatttaatggtcctggtatctattataggctttatcattcaataattggaagattagaccagttcttaataggaatgatggtaggttatttgtatgttaatgggtatattaagagttcaaaagctccacaactgattatgatagtcgcctcgatagctatcatatcaatcttcatgcacttaaactctcagatgacaaagtggtttatgccattctcattcacatttgaagcatttgggtgggcattattaatattgggatatacgacattgagcattaatataaataaaagaactgactcaatcattgcatatcttggagggctaagtttctctgcctaccttacacatttggtggtggcgaaagctctttatatgacaatattaaccccttccccggataaaatgtctgcaattatcaacactattttattcatcttaccagtcacgataattgtatcaatgatcacatatacattcatagaaaaaccatttctaaacttacgtgtgaaatacacaaatggtgataacaaatga

SEQ ID NO: 80034 - DNA, 1029 bp, Citrobacter koseri
atggtctccattttggtgatcgtggtcatagctaatagctacaaagctggaatagcggctaaagaaatattctccgattatattatcgatgcaagcaatggggatactataggtttatggcagggacgcattgcaaataacgggagggctctcggtcttagccgagctgtaaaaaatcgaatgggttgttccatgactgtaggagcggggagcatagtggaggttgccagactgtggatttggcttgaagaagagtctgcaattcactattgcttcccaaacagagactctggtggtggggtctctacctattctagatttaatatttatgacgcctcgggtgatgagacttctgtcagtatagtattcggagactatgcgtatgctacggaggatagacctgcggacttgaacctcttattgggaatcaaaagatctggactataccgatttagttatatacctaatgaattgacaaataatgtaggatatttacggataggtaacggaaaaagccaaagtatgtcagtcaaagggttgccatcggcatcagtttgggctatgccgaattacaacatgatgcctgttattgctgtagatagtaaagataaatcagtatgtattgatggcactctttatcagggatatgcttttctgttttccacaaatcgtatatttgcaaatgattggtcgcaaagtggatatatctcactcggtgtaattagaaatgctgataacactgtttcattatgtatctttaagaatgtatcaggtgcgatctcaagaactgtacttgccacttcaaccggcactatcactgtagatcgagtaatgattgaactactcatgagcccaacaggcagcatcatgtacgtagacgttaatggcgcaaggcttatcacatataccaaagcagcatctgttgcaatgcttccaacttatggagtagcaggagggattgtatacctgacaggagtaagtaccacctcaggtaaaaccgtttaccacaacccaccatccatattttaa

SEQ ID NO: 80035 - DNA, 501 bp, Citrobacter koseri
atgcacattttttgccaatggcgaaatcgccgtaggccggataaggcgcttgcgccgccatccggcattgccgaaaatgagcgaccgatcctgcctgatggcgctgcgcttatcaggcctacaatgctgaaccgtaggccggataaggcgcttgcgccgccatccggcattgccgaaagtgggcgaccgatcctgcctgatggcgcttcgcttatcaggcctacaatgctgagccgtaggccggataaggcgcttgcgccgccatccggcgttaccgaaagtgagcgaccgatcctgcctgatggcgctgcgcttatcaggcctacaatgctgaattccagacagcaaaaagccagcccgtgggctggcttttctgaattggtcggtgatagaggattactcgccactgcgtggctcgcccttcgggccgttgctcgcgcaacgttctctcgctacgctcgagtcgaacctcttgcccccggaggttctcatcctcgttaa

SEQ ID NO: 80036 - DNA, 735 bp, Citrobacter koseri
ttgttcgcgcattaccgtgacaagcgactaacgggtgaaatctactttagtgagaagtggaaaaaaggtgccagcccggtaactatcaatctggagcaaagctatctgagcagcgtgtttagcgagctggcccgtcttggagaatgggcggcaccaaacccactggaaagcatgcgcaagttcactattgccgaaaaagaaatggcctggctaacgcatgaacagatcacagaacttctgtacgactgccaacgccaaagcgccctactcgctttggtcgttaaaatctgcctgagtaccggagcacgctggcgcgaagctgtgaatctcacgcgttcccaggtaaccaagtaccgaatcactttcgtcaggaccaaaggcaaaaagaaccgcagtattcccatcagcaaagatctatacgaagaaatcatttccctggacggcttcaaattctttactgactgctatttccagtttttatccgtaatggataagacctctatcgtgctcccgcgcggtcaacttactcacgttctgcgccatacttttgcagcacattttatgatgtcaggtgggaacatccttgccctccagaaaatcctcggccaccacgacataaaaatgactatgcgctatgcccatctcgcgcccgatcacctggaaacggccctacgctttaatcccctggcaagcatgggtcaatcatccttagatgcagctcacatgcgcgcctga

SEQ ID NO: 80037 - DNA, 300 bp, Citrobacter koseri
atggcagtacgaaaactcgacacaggaaaatggatttgcgaatgctatcccgccgggcgcagcgggcgctgtgtgcgtaaacagttcgccactaaaggcgaagctctggcttttgaacgccatactatggaagaaacggaggctaagccctggctgggtgaatcagtagaccgccgaacgctgaaagacgtcattgaactctggttcaaactacacggcaaatccctgaccgctggcgagcatgtttacgacaagttggtcctaattggtcgatgcactcggaaaccctctcgctactga

SEQ ID NO: 80038 - DNA, 1989 bp, Citrobacter koseri
atgattattggcgttattttaaggaatttcaaaaactttaggaatcaacattacattccactaactatcaatggtaactcctcttggttaattggtgaaaatggtgttggtaaaagctcaacattacaagcaatagataccgttctcaataagccagatattagcagattggacataaacaacgatgcacgtagtttaggttttgacacaagagaaccattcattgtgccgatttttctcatccgaaaagataaagtcaaaagtaatacctcaaactatcgtgcattagaagtaataagtaacataacttggcaagttgaaacagaagactttaactcctcacaaaaagcattagctgataaattcgtcaaccacagggcattaattgaaacacaatatcatcataaagattattttttagtaccccttggtataattaaaagagctgcaaatgatgctccagtgcctttcatgtcaatatttgaatccattgatgattataaaattgatactgatgagttgatgcctgaatctgtagcaaataaccctacacagagaaaatattttttcgtgaccacactctacagggctttagaacacatccgagagatgtataattatatttatttgcccgctgagataacgacatccgaatactcacaaatagagagtgatttactacaatcactattaggtgagaatcttcaacaaaaaatcagtaagataataaagaaaaaagacatcacggaaataaatcagtatcttaatgaatttgtcgatgggctatcagaaaagcttgataataaatatcattttaaaaaaccaagtcagcgacaaaattcatttacccaacggcatatgattgcaaagatagttgagtcatattttagtgacaaaatactgcattatattgacggtgtaaataaagacacgcccatacataatcttagctcaggtgaaaagagaaaagcgttactagatctttcaatgggtttcttaaaagaaaacccaaacaagactcaactaataacaattttagcggtagatgaacccgaactatcattacatgcaacatcatgtttcaagcaatttgagaagataagaaagataagtgaattaggtattcaaacattatgcactacgcattggtatggcttccttcctgctgcaatgagcggaagcgcaacctatgtttcccctaaccaatcgtttatcaagtgtataaatcttgaatactacagagatgaaatatctgagttagtaaaagagtcacgaggttcatacttagatactttggaagtaaaaagtactcatgatctggttcaatctattatcacatcaataacctcctcaaacaattacaactggatattgtgtgaaggaagaactgataagaaatacattgatgcccatctagagtttgaagaaatagatcgcacaaaattaatagttttaagtgttggaggttcatttgcattaaaagatatctattcttatttaatgcttgccttgaaggatagaaggccggctataaaaggaaaagtgttttgtttactagatactgatcttgcatacgataaatttgacgtctcggatagcataccgcaaataaaaataagacgactactacttcgtgacgactttgctgatgttgaattacttaagactactgacaatagggtatctcctccaaccgaaattgaagatgctcttgatgggctatttttttacgaaacaatatatcagttatttattcgaggggaggaacggttctcatttatagttgatgttgaaacactttcctctgaagtatccgctggaatattagaccttaccactagtcagaaattaattcttaagcaattttttaatgaacctggcaataaaaataaattttgtgatatatattccgaagtcatttttgatagcgatgatattcgaacgccaagttggttattggatatcatcgatttttttgaagcgaagtga

SEQ ID NO: 80039 - DNA, 930 bp, Citrobacter koseri
atgtcaacttcaaaaaacacatttcgccatattggtaatgatctgaaaagctcgataatgaagaatcgagggggtcaagaggtcattgcaaggattttaaaggcatacggttttacatcacgtcaggcgctctgtaaccatctaggcatttcacagagtacgatggctaacagatacgctcgtgatacatttcctgctgactgggtaattatttgcagtatcgaaacaggcgctgccatcgaatggatcgcatctgggaacggctcattagctcaaagcgaaccctctttggacattccaaattctcaaacccatgatgatttagcaagaggcgattctactagtcatcatgggttcccaaatgagattgaacttgattttagccaaggcggcaaggctgcgattgagcgattagttgaggcttatggattttcatcgcgacaagctcttgcaaatcatctaggcatttcaaaaagtacattagccaatcggtacatgagagacactttcccggcagattggattattcaatgtgcgctagaaacaggtgtgtcacttcgctggttgtcgactgcccaaggcccagctcagatcgatgagaaatcacaggttaagagtttaaataaagaaattttagataatggcaagttgagggtaccaggatatctactatttgattcaagcatactccctgaagatgttgatggtatctccgcagtacaatctgaagatgctatttatattgtcaaaagaggggaaagtgatatccgtgatggtttgtggatgatagcaattgatggaatttattctatacgggaattgagtagattacctcataatcgtgtaatactcgaatcgaaaactaataaaatagaatgcaatattagtgatattgatataattgcaagagtgatcatgacctgcaaataa

SEQ ID NO: 80040 - DNA, 240 bp, Citrobacter koseri
atgctgaacaatgaaccgtcatttgcatcactacttgttaagaaaagccctggaatgcagttcggtcatggctggattcatttaccggatgggaaaaagtggcatccatgtattgaaatgtctccccggaagcaggctgtccggggaaaaggaaagaagagtctgttacatcgcttaatggttaacgcggtatacagcctgcgaaccatgcgaaaagtttctcctggaaggagagcttag

SEQ ID NO: 80041 - DNA, 459 bp, Citrobacter koseri
atgactaaacaaagctccgaatacttccacctgcattactgttattaccttgaggtgatgacggcaacgcttcacggtcgagctgacaaattgatgacagctattcagcttattagcggtacagctgtattcgcgaacactggtctggaatggttgttcgccttgcccgttgtcgttattgcgacaattcaactcgtgtggcagccaggcattatttccgaacgtgctagcgtgcaaagtcgccagtacggggaattgctttatgcaggggatgaactaaccccgaaactgattgcgcaaaaattgaaaacgctgcatcactctgattccgcacctttcggttctttgttaaatccagcctataaaagagctgctattgcgtgtggtcggcctgatgacactaagctctccttccaggagaaacttttcgcatggttcgcaggctgtataccgcgttaa

SEQ ID NO: 80042 - DNA, 342 bp, Citrobacter koseri
atggctatagaaggtagcacagcgacagttccgcttagccctgggcagcgactggagggcctgaatcacatagcggagttgagagcgaaagtgtttggtctgaacatcgagcgcgaacttgaacgatttattaatgagatgtgcgatccgcgcgacattaatcacaaacaaaacgagagggcactggccgccatattcttcatggcgaaaattccagtagaacgtcacgacgtcaaaattagtgagctgacgacagacgaaaagcgagagctgataaaggcaatgaaccattttcgtgcagtggtgagcttatttccaaaacggctaaccatgccgaattaa

SEQ ID NO: 80043 - DNA, 804 bp, Citrobacter koseri
atggaagcgaacgctcctggaaagctgatatggcatgtcgcctgcgatgagtcaggcatagatggtcagcgattttatggatttggcagcctgtggatgaagtaccagaggcgtggggacttcgtgcgcatcattcgtgagcttagggaaaagcataattgtagtgatgaaataaagtggcaaaaggctcattcaaaacgcaatgcggctttctaccatgatctccttgagactttctttaagcaccaatggttggcgttccactgcatcattgttgaaaaatcaaaagtcgaaaaatcctttcatggcggcgactacgacttagcaatgcgcaagcattttggcaagctgattgaaactaaaatcggtaacgttatcaaggctcatccagaccgggaatgcgagttccgtgtggaggttgatccccttccatcacgatataaaaaagcggatgaggcatttgaagtcattactaaccatacgctcgccaaaaagtttgggcgtaaagacattataaaaagcgtcgtcacgaaggattcaaaatcttctgaacatattcaaattgcagattttctgttaggcgctgtgatgtgcgcttaccaaggcaaagccacttcagaagcaaagctggctgtagcaaacaaagtggcctcttatttgggatgggattcacttatgtatgacacttggccaaaagagcgcaaattcaatatttggcttttttttgataggtcgaaaggaccaagggatattcttacccgagatgtgaatttgaagtatgagttgcccaagcctaaaaaatag

SEQ ID NO: 80044 - DNA, 525 bp, Citrobacter koseri
atgactgttttgcaccttgtagcagatcatctagctaagcaggctaatacaactcgcaggaaaggcgaggggcatacagtattagctgatgcatatggtcgctcagctttcaatcgatactattatgcctgttttctcaacgtgcgtgagttcgtatcaactattgactcgaattggggtaaggttaaacacgctgaggtgccaacattattacgggtgagtgtaaataaaaaaatagatattgaactcaagaagtccgaaaggattggtgatttaacccaaggtgagtatcagtcaaaaaaaagcatgttacttacatctttggataatatggcatctacaatgtccttggcgtatacaattagaggggttgtggattacgagcctgaaatcgaaatgatttttggcgatggttgcttttctattaacgcgacatcagttgcctccgcgaaaggttggttgcaaactattaatgttgaaagagcaaaggttgccaaaatcatgagggaggttggctttgtctaa

SEQ ID NO: 80045 - DNA, 738 bp, Citrobacter koseri
ttgtctaaccagcaattgttatccgagctactgtcgaggttcccattcataaaaattaaagatgttactgattttatggatacaatcctgttgattataccgatggacagaattgtacctctggctgcgtcagaatacataacaaaacgtcagatttcattgttagttaaaaaaatagaagaagagctaaacactaaggttttaattagctactctccattttcagataaagaaaatattgagatggggttggaggctttagcaaggagtaattttaaaaaaggaaaagtatctgatttgaacttatctttctctgattcgcaacaagctttgctttataccttctgcaagaacctgactacacctgaaagagataaatgggaatcattggtttcagcgatgctgaaaaatttcaatattaagataacttcttttgtatatgaggttaaaaataatcctgaacctacaatgatgatgcttttgagagtagcgaaaaaatgtcagccatttggtctgcaagggctatttgatgagcttgataatggtgattaccatattgaatcgctagactggctcaatggaaaactggacaatttacgtaaaaaaggttttttattaaggagtcacgacggcacttatagaatgactttggcagggttagaaatagttcctgtatctaaatctagtcaaagctctgatattgaaagggtcctttatcttgcgcgcaaacatctatag

SEQ ID NO: 80046 - DNA, 978 bp, Citrobacter koseri
atgaaaacgccactacccctattctttacgttcgctgatgctgagcaattgcttaaggcattgagtaaacctctgagagagagatattctgctgagcttttgcggttacaacagttgggacttccaccattagtatcttggagtgttttgtctgtcgctattggtgttagcccacaatttattacatcgatattaaagaataaatcaaaatactatcgtgtttttccgatagctaaaggcaaaggtaaaaagaagcgcattattgaagcaccaaaagttagcttaaaaatcattcagtcatggtttgcatatcatattagtcttaatgataatatcacacttagtgaaaatgcatatgcgttcattcctggtaaaaacggaatatatgatgccgcaagtgtgcattgtggcgcaaaatgggtcatgtctattgatcttagggattttttccatacgattacatcggaagcagtggctttagcattaacggagataggttatagagaagaccaggcgtctaagttgagcgaattgcttactttgaatcatcatcttccccaaggtgcgccaagcagtccggttatttcaaatttagtatttagcaaaaccgactttaaaataaatgaattaattggtgagcttaatgttaaatatactagatatgctgatgatttgactttttctagtaaagatgaaggttttgatattgattctctgaaggaacgtgttgttgaaatattagtttccgatggttggattgttgctgatgaaaaacttaaaatagcaaaagtacccaataggttaaaagttcatggctttttagtgcatgaaaataaaccgagattgaccaaaggttaccgtaacaaaatcagagcgtataggcatctactgaacacagggaaagtggttttagaggacttggataaaattaaaggacatataaactatagtgattatattgatagattaaatgaatga

SEQ ID NO: 80047 - DNA, 291 bp, Citrobacter koseri
gtgaaaacgaagatttgcgccgctgggctgacactcttttgccttctgatgttgtcaggctgcgcgaaagacccgccatcgccggaggtgcagcttaccgtgagtggctgtccaaaggtgactcagtgccgcctggaaaggtccgcgccgcgcagtaacggcgatctgctgaccctgttggatgaaacggaggccgcctgggcggtctgtgcagacaaagtggacaccatcgtgtcatgccaggagcgaaacagtgaacaagccgcagtccctgcgcgcagcgctaaataa

SEQ ID NO: 80048 - DNA, 1854 bp, Citrobacter koseri
atgaaaaacaccgatattgaaaattttttaaaacaatacattgatgcaaacaaccacccagggtacggcattcttatttctggtgagtggggggtaggaaaaactcactttctaaaaaaaataattgaatcagtaaatgagcctaaaaaagttatttacgtaagcttgtatggaatgagtaacaccagccaaatagatgatgatttttttaaattacttcacccaatcttgggaagtaaaatatcaaaattcgcaggaagaatggcaaaattggcagtcaaggcaacacttaaaatcgatttagataacgataataaagaagatgccactttagacttacaaataccatctataaaccttagttcattagttgaaatgaataaaaatgtagtaatcgtaattgacgaccttgaaagatctaacattgactatcctatactgcttggatacataaaccacttagtcgaacacgaagaattaaaagtaatcattgctggtcacgaacctgtagttcaaagcaaattcgaacaatatagaataatcaaagaaaaaacaataggcaaaactttcaacatttcagcagattacaactccgcaatcgaaacttttttatcgtcagtttcaacatttacagtaagaaatattttaaagccaagaaagatcatgatccttgacgtcttcctctcatcaggatttagcaaccttcgctttttgaggcaatttttcatagagtttgaatttgtcattctaaaattaaaaaataaaataaactcaaatgagtttgttgacgcctttttaaaacaatacttaatattttgcattgaacacaagagtggttttttacaatacgaagattttaatgatatggattcaaacccatatacccttgaagaaaaagaaacaaaaatcgcccacataagagataaatacaaacacctagaggagtttaaatatatacttaacgctgtttcatggcgtgatattgttatacatggctgcatggacgaagcgcatattaatcagcaagtaagtgaaagttcttttttcatttctaatgagcggaaaatgcctatttggaggatgctatgggaaagtagattattaaacgacgaagattttgattatgctatcgctcaagccctacttagcctagaaaactgcaccatcacccaaataggcgaaatacttcacatttcggcaagcttcattcaattcatagataatgatgtaatagatatgaagtttgaaacgttagagattttggcaaaaaatgccatagaacatgccataaaacaagcgacctatagctttgacactaacagtcatagctgcggaaatgaattcgcaatgacatggaacggtcactattataccaactatgaaaactccaaagtcacttcattagtctcgtttgcaactgagacccttgagaggaaggtatcttttgaaagggaagatatagctattaatttattttctcgtattgatggaaccccagataattttattaaagaaatatattccaaccccaactcaactacatcttttaacgaaatatcttttttgaattacatccccccgaaagagttcatgaacaaattaattaacctccaacccaaaacacgttcaagactcgcagcagcactatctagaagatattcatcaggaagtgcatacagaaaactgactgccgaaattgagtggctcatccaattgaataaaatagctcaagaaacaataaaaacattgaaaggggcaaaaaagctttttatgattgaatttataaacaacacattatcaaacgccatataccagctaaaacaagctcaagaagaaataaaaaccacccattag

SEQ ID NO: 80049 - DNA, 618 bp, Citrobacter koseri
gtgcaggcggtggttacggcgcttaacagtgcgctggccctgaaagcgccgctggcaagtccggcactggctgcgctggttggttcttccccggctgcactcgatacgctgaacgaactggcggccgcattaggcaacgatccgaactttgccaccacaatgacgaatgcccttgccggaaagcagccgctggacagcacgctgacagcgctttcaggtaagacggtggcagatattctgcagtacctgggcattgctgaactggcgaaaacgccccgttatctggtcagcaaaggctctagcgccaatggctggtatgaggtttacagcgatggattcaaacgtgtcgggcgtcgatggtatacatcccagccattaactattccaaaccctgcaagcggtgtcgttgttgcttacccgatcagttttactaacgaagtgacttactacagttcagttgctgactttaatattgagaatacgtttgagagtgctcagataggacaagccggactctcaagtatttgtttagcaatccagcttacaacactttcttcaagttcaggtacgtcatacggttcaaagtttgcaggtagttatattgcggaggggtattaa

SEQ ID NO: 80050 - DNA, 216 bp, Citrobacter koseri
atgtggtattgggatcctgttagttgtaatgaagcattgcctggcgttcacgatttgagtttatgcacaaatatatctgatgatgatcatcccttcaaaacaaaattaacgccatcaggaaaacaatggggaagcgatcacaataaaactcctgttttgattgatgatgatttattctcatttgttcacgatttgggttcactcaaagaattataa

SEQ ID NO: 80051 - DNA, 483 bp, Citrobacter koseri
atgactttttatcatgcatcaacaaatcaatatcaaattggcgacttaataattcacacaccaggcaatatatgtgtttattaccctgaggtgaacgttgagctcgaccgagtaaaaccgcaggatatgcttggtcgtgacagtgctatctacataactaatgattgcgcatttgctaaatacttcatcagcacccaacatagcaatagcccaacttttgtatatgaagtcagtaccacagacatactcaacgaacacccatttgctgtagtccatcagatagatcagagtataaaaacatctaaaacctcaaaagtatcagcattatcggcagagtattggcaaccaaaccaaaaatggaatttttacgaataccttgtttccagcataacaatcatcgatataatgcatgtagatgattttgatattatgttagctaaaaatccatatttccaagatgtagacaaagccaaatcaatataa

SEQ ID NO: 80052 - DNA, 507 bp, Citrobacter koseri
atggtttttagtgagattactgttctgtcatgtcagatagttgcgtctttgctgatggggtgtgattatttcatgccttccgcatggagagctaagcttaatcaaactctttttggatacttttctcgattaagagacaatcttgacaaagatatttcacagaaaatcaaagaaacattcgcacagttaaaagtaatatctttttgtttatgtttaatagcaattgcctatgcaatatactactttagagtttcgttatatgaaaatttaacgcctatgttgtatttgtgcctcgccatcatttcaattttatgtgcagctctggccctacatgtaatcattggccacgccgtaaaattgcttgtcgcattgggtatcggtggagtatttttcagaagtatttctgttttcctactcaaaacagaaaaaggtccccttgctggaactgggtttctcatgttacttgtatcattcattatgcgttacgcgaacattactcacacctga

SEQ ID NO: 80053 - DNA, 1650 bp, Citrobacter koseri
atgagtgataataacctgcgtctgcaggtggttctgggggcggtggacaagttaacccgcccctttaaaaatgcccaggctggctcaaaagagctggcagcagcaatccggcagacccgtgaccagcttaaacagctgagcgatgcgggaggccagttaaaatccttcgacaggctatcgcacagcctgagccgtacaggtgcggagctggaacaggcgagactgcgcgcgcagatgatgacgcgtgaaatgtcagcccttgaatcccccactaagaagcagacccaggcactggaagcgcagtggcgtgcggtttcacgccttgagcaaaagcagaagcaggaaacaaaccagctatctgcagtcaggggtgagctttatcggctcggattgtcggcaggaggcggagcgcgggaaaccgccagaattacccgtgaaacagagaagtacaaccagaagctggcagagcaggagcgcaggctgcgcgagatcggagaacggcagcgtaagcttaatgccatcaaagcgaaagcggagaaaacccgtgagctgagaaactcaatggcaggaaatggtgcgggagcaatggctgcaggtgttgccacgggcatggcgctgctggctcctgtcagagcttattcagaatcggagaacgctgctaaccagctcgccggttccatgatggggccgggcgggaaggtcgcgcctgagtttgaaaaaattaacaagctggcccttgccctgggtgacaagcttcccggcacaacggctgatttccagaacatgatgacgatgctgcggcggcagggtatgtctgcccaggtcattctgggcggtttgggcgagtcagccgcctatcttggcgtgcagctgcagatggctcctactgcagcagcagaatttgcggcgaaactccaggacgccacgcagacctcagaaaaagacatgatgagcctgatggatctcatccagaaaggtttttatgcgggggttgattcgggaaatatgctgcagggcttctcaaaaatcagcagcgccatggacattatcaacaagaaagggctggatgcggcgaaaacttttgcgccgctgttggtgatggcggaccagacaggcatggcgggagagtctgccggtaatgcctacaggaaagttttccaggccgcgctggatgctgacaacatcaaggcggttaacgatgacctgaaagaaaagggcgcgggaattaaattcaacttttctgacgggaaaggtgggtttggtggtctggagaatatgtatgcccagctggataagctgaaaacattgaaccctgaaacccggatggcgaccattaaggacctgttcggcaacgactcagaaaccctgcaagtgctgaataacatgatttccaaaggcattcagggctaccgggaaaccgcggctaaactcgaaaatcaggcatcgctgcgggagcgtgttgatgcatccctgggcaccctggggaacaaatgggaagccgctacggggacattcactaatgccatggcgagcatcggggaaacggtagcacctaccctgaaaaatatggctgactggctgggagacctggcatcaagccaggacggttttgttaaacgccaccctttgcttacctctgctttattctag

SEQ ID NO: 80054 - DNA, 1131 bp, Citrobacter koseri
atggcagcaggatttgccgttgccgcaacggctataggggcaatttctttggcgctggcatcaatccttggtccaatggcaatcgtcaaaatgagcgcgggtattctgggggtgaagtttacctccgtgggcggtctggttcgtaatgcgctgggggggatcgggaaatcagttgtatggctgggccgcctgatgatggcaaaccctattcttgcggtgatcggcctgattgccatgggtgccattcttatctggcagaactgggacacgctggggccgaagttcaaggccatgtgggatgggatttgtgctgccacgacggctgcgtgggaatggattaaacaggctgccgataatgcctgggaaggtatcaaatctctttttttcaattacaccctgccgggcctgattgctaaaaattgggatgcgattaaggccggagcgtctgaggcatgggcctcagtccgtcagactatcagtgataaatgggccgccattctggcagacgttgccgcgctcccggcaaagttccaggagatgggcagcgctatcattgacagtattctgaacggcatcaatgcgaagtgggaaacgctcaaaagcaagctgtcctctgtaaccgattatctgccggactggatgaccggaaataataaagcgtcaggaaaaacgcaggtgcaggtggtagggggcgcagctgctgcagcggttccgtttgcggggatgtatgacagcggtggcgtcattcctcgtggtcagttcggtattgccggggaaaatggcccggagcttgtcaacggcccggcaaatgtgaccagccgcaggcgcacggcagcgctggcgtcagtggttgccggaatgatgggaactgctgctgctcctgcagaggccgctccgctccatcccatgagcctgccagtagcaacatatcgcgcacctcaggagaaagccgccagccagccgccatctgtgcgctacgaaatcaacgcgcctattcatattgtcgcccagccggggcaaagcgcacaggacattgcccgcgaggtggcaaggcaactggacgaacgggaacgccgcgccagggcgaaagcccgcagcaacttcagcgatcaagggggatatgaatcatga

SEQ ID NO: 80055 - DNA, 216 bp, Citrobacter koseri
atgatgaattgtcctatgtgcggacaggcggcacatacccgaagcagctttcaggtttccaacgaaaccaaagaacgctacaaccagtgcactaacatcgaatgcgggcataccttcgtgacgcatgagacttttgtgcggtcagtgtgccgaccgcaaaaaatcagcgcagcaccgcctcatcccaaaggtatgcaggaacaatttgcttactga

SEQ ID NO: 80056 - DNA, 588 bp, Citrobacter koseri
atgagaacccacgaccggggttcgacaactggcggcagccagttggacagaccgcgaacgcagagagcgggctgcccgcagggcgagcgaagcgagtcaatccccccctcaccgccatattcagaaaagagcgcgtacgaaagtacgggcttttttttcgcatattgcacgcactgtggggggatgagaacccacgaccggggttcgacaactggcggcagccagttggacagaccgcgaacgcagagagcgggctgcccgcagggcgagcgaagcgagtcaatccccccctcaccgccatattcggaaaagagctcgtacgaaagtacgggcttttttttcgcattttgcacatcgccggatggcggcgctcgcgccttatccggcctacgttgcctgataaacgaagtgactcctcaccgccatattcagaaaaagagctcgtacgaaagtgcgggcttttttttcacctgttgcacatcgccggatggcggcgctcgcgccttatccggcctacgagtggcgctctgtaggcctgataagcgaagcgccatcaggcttctcagaaccagggaatggtcgccgtag

SEQ ID NO: 80057 - DNA, 1077 bp, Citrobacter koseri
atgagtgatattgtttatcttaaactcattggtgagcaacaaggtgatatttctgatggatgtggcacgactgattcggtcggtaatcgttggcaacgaaaccatgtgaatgaaatatttgtgttttctttgagttcgggggtaacgaatacaggtaaaggtgcgaatctacagagcttaacattcagcaagcaaatagataaaagttcaccgctgttagctaatgcgattaataacaatgaaaacctgtttctggcgttttggttttaccgcataaatagatatggtcaatgggagaagtattattatattcagctcagaggtgcttcaatatcaaggattcagcttcgcattataaaagacgagatagatacagaaacaatatctgttgattatgattatattctcagtaaacatctgataagcaataccgagtgtagttatcttgccctgccagcggaatacaataagctgtttgttccaacgccgaaaacccagactcatactcttaacagcgctggcgtagggcgactgctggcggctggagggatttataatggtaatgtcgggggattcagggacaccgctgagaaactgggtggcgatgctgttgagggttacgatcagattcttaacgagaaaacagttggtgttgccataacggcagcctcaattgccgcagtgtatgggctggggagggtggggttagaatcagaggttcgagcacttgaggaatcgaggcgaattgaaaccaggaccgctgtaagatttaatgattttaaattttctacaaagcagttacagaaaaaatttaaacatgctatagactttggcatttctggtacaactaataagcaaaatctggtgtcgtttgaaaatgcagtgaggaaacatatggatatggttgatactattaaaataaaggggaagtatcgatgggattctgatgtctgtcactattttaatccatcaactaatcttaatgttatgacagattttgatggaaattttatctcaggttggaagctgtctgaaagacaacggcatgatttactggcgttagggaatgtgttctaa

SEQ ID NO: 80058 - DNA, 1503 bp, Citrobacter koseri
atgaccatcgaccaaaatcaggaaatcctccgtaccgagggactcagtaaattctttcccggcgttaaggcgctggataacgtcgattttagcctgcgccggggcgaaatcatggcgctgctcggggaaaacggggcgggaaaatcaacgctgattaaagcattaaccggcgtataccatgccgatcgcggcacaatctggctggaaggtcaggcgatttcaccgaagaataccgcgcatgcccagcaactggggatcggaaccgtctaccaggaggttaaccttctgcccaatatgtcggtggcggataacctgtttatcggtcgtgagccccggcgttttggcctgctgcggcgcaaagaaatggagaaacgcgctacagaattgatggcctcttacggcttttcgctggatgtgcgtgagccgctcaaccgcttttccgttgcaatgcagcagattgtcgctatctgccgggctatcgatctctccgcgaaagtcctgatcctcgacgaacccaccgccagcctcgacacccaggaagttgagatgctgtttggcctgatgcgccatctgcgcgatcgcggcgtcagcctgatttttgttacgcactttctcgatcaggtttatcaggtgagcgatcggatcaccgtgttacgcaacggcagctttgtcggctgccgcgaaacccgcgagctcccacagatcgaactggtgaaaatgatgctggggcgcgaactggagacccatgcgctacagcgggcagggcgcaccttgctgagcgataaaccggtggctgcctttaaagattacggcaggaagggcaccatctcgccgttcagcctggaagtccgccccggcgagatcgtcggtctggcagggctgttgggatcggggcgtaccgaaaccgcagaggtgatcttcggcatcaaaccggccgacagcggcagtgcgatgatcaaaggtaaaccgcaaaccctgcgatcgccgcatcaggcttcatgccttgggatcggcttttgcccggaagacaggaaaacggacggcattattgccgccgcatcggtacgggaaaatatcattctggcgctacaggcgcagcgaggctggctgcggccgatttcccgcagagaacagcaggagattgccgagcgttttatccgccagttgggtattcgtacccccagtgcggaacagccgattgaatttctctccggcggcaatcagcaaaaagtgttgctgtcgcgctggttgctgaccaaaccgcagttcctgattctggatgaaccgacacgcggcatcgacgttggggcgcatgcggagatcatccgcctgatcgaaacgctgtgtgcggacgggctggcgctgctggtcatctcctctgaactggaggaactggtgggctatgccgatcgggtgatcatcatgcgcgatcgtaaacaggtggcggagatcccgctggcggaactgtccgttccggcgatcatgaacgccattgcggcgtaa

SEQ ID NO: 80059 - DNA, 2619 bp, Citrobacter koseri
atgagcaacattcacgtcatcgcccatacgcactgggatcaggaatggtatttcaccttgcaggatagcaatattctcgcgtcctggaattttgcggatgtgatccgaaccctggaacagaaccctgcgtatacctgttaccacttcgacggccaaaccgctgtcgtggaagatttcctggccgtcaatcctcaatactgcgagcggctgaaacagctggtcgccgacagacggctttttatcggcccgtggtacacccagacggatacgtataatgttcatggcgaatccatcattcgcaacctgaaatacgggatactttccgcgcgtaaacttggccatgccatgatggtcggctatttacccgatacgttcggccataacagccagctcccgaccctgcttcgcgggtgtaaccttgataacatcgttttctggcggggcatcaaccatgatacgcaggttgaaaagagtcagttcatctggcaagcgccgtccggcgcgcaggttatcgcttgcgccatgcccttcggctatggcgcggcaaaaaatattcgtgcagacaacgcgcatctgcacgacaaaatattcccaatcgtcaaccacatccgccaacgctctggcctgaacgatctgctcctgccctgcggcggcgaccaggtcaatattgatccccatctgccggagatactgcgtatcgccagcgcatgttcccctgagagcgatcgttttcagatctcctctctggaagcgtacattgaccgcctccgacaacaggcatcgggatatgatcgctggcaaggggaattaaaatctccccgctatacccgcattcataaaacaatcggttcagtacgttacgacatcaaaaagaagaattatgatgttgaacagttcctgttaggcaagctcgaacccaccattgcgctggcgcgttatcagggcattgaggtcaacgtgcagtgggttgaccagatatggaaaaaccttctgcgtaatcatgcgcatgactccatcggcgggtgtaacagcgatgccaccaatcgcgatattctccatcgccttgagcaaacggaacaacttagccatagcctgtggaatctggtcgtaaaagaactggcgaccgccagttgtgaagagggcgatcttttcgtcatcaaccccagcgccaccgcctggtcaggcattatcaaagccacattatatagccgtacggccggtattgaactcaaccatcatacgcgtcctctttcgttcagcgttctcgaacgcacgcaggtctccggcgggcgcacggttcaggttactgtgcagggcgaaaaagaggtcgaacttccgccttattaccgctggcaggtcgctattgacgcgccagcgttaccgccgctgggttatacccacattcaggcgcaggaatcgtcacgcaccgcgccagcaatgcgcaactgcgctgaaagcgccattgaaaacaatgattaccggctggcgctgcgtgccggttcgctgtcgcttcatgataagcgcaacggccgggtaatatccgacctgctgacctttgaagactgtgcggatgcgggcgatagctatgacttttcgccgctggagggcgatgttccgcagcgctgccacacatttacgcttattgcctgcgagaaaggcccgcacattgaacggataacgctaagcgccacactgatgctccccccttcgctggcggcacgagcggcgcaggatgttcagccctaccctgtacgccttgtctgcgagcttcgccagcatgacgctcagctttttatcgacgtttcgctggaaaacaccgtctgcgatcaccgcctgcgtttactcatcaacagcgacattcgcaccacggaatccatcgcctctcagccctttgccgtcatccggcgtcctgttgccgatgcgccagccgactggcgtcagcactatcgggaaaagccggtcgatattgaaaccagcgagggcattatcgccatcgaggaaaacaaccgctcgctcatcatcaatagcctgggcatgaaagagtttcagatatgccagaacgagacggcgcagatagcgttgacgttgtttaaatcaacgggagtcctgggacgtgacgatcttgactggcgacccggacgcgcttccggcattaataataccgtcgtcaacacgcccgacgcgcagctgcttaaaccgctgcatttcagcctgacgttagcgcttgccgatcgggccgaccctatgacgttaaggcatcttgaaacccgcgtgacgcgccagccattcacctggcaaaatcagacgttgaacacgctggacaaccgcctggagcgttttacgctcaattttgtttcgcgctcgctgccggaaacattcagcctgctgacgcttcccgaaccgctgatgctttccgcaataccccatgcccatacggtagacggaacaatcattcgcattttcaatgccggagagcacccggtgcagctcccgccttcgctaagaaatattccgcaaatcaattatctggaagaacctgtcgcagattgcaccaccattttgccttgcagtacgtgtgattttctttttactcatcaggagcgtaacgaaaaagtatga

SEQ ID NO: 80060 - DNA, 543 bp, Citrobacter koseri
atggtcgagtttttcacctccgctggcgacaccgggcgcggtttttacgccatgatgatcgccgcagggacggccttcgacctcggcggccccatcaataaagccgctggttcggtggcgctggggcttaacggcgtcagcgaaaccttcgatttaaccgccagagagctggcgatcgtcattccatctatcggcgtcggcctggcggcgttgctgaataaccgttttggcctgcccaacgtgtttagcagcgaagaaaaaaccgtcggcggtacgtctttactgctgggattcattggtatttcagaaggcgccattcctttcatcctgaaaaatccacgcctgattccggtctttatggtcggcgcgatgtccggcgcgcttattgctatcgcactcggcgtgaagcaatcgctgccgttgcctgccatctggggatggccgctggcgacaaatgtcacagggtatctgatcagcgtgtttgccggttctcttgtatgcgcgctgggcgtgctcttcgccagccctaagatcgccaaataa

SEQ ID NO: 80061 - DNA, 1677 bp, Citrobacter koseri
atggcgcttacagatctcgcaatccggcatgccaggccgcttggcaaggcatacaggctctctgactgtcacggtctttacattcaggtgaaccccagcggatctaagctgtggtatctgaaatttcgctttggaaacaaagagaaccgtatggcattaggcccttatccgcttatttctctcgcactggcaagggagaagcaagcggatataagaaggcttattttagaaggcattaatccggcggaaaaacgcagagaggacaagcggggtggagagcccctttatacgttcgagtccgtggcgcgcgaatgggtctccagtaacataaactggtcggcggaacatatgaagcgggtgctgcgttattttgagctttacgtctttcccacgaacggcagttgcgacatcaccaaactgaaggttaaagatctgctggtgcccatcaaagaggtggagaaagcgggcaaattggatgtcgcttcccggcttcagcagcgtaccgcttgtgtgatgcgctatgcggtgcagaacggcattatcgatcataaccccgcatcggatttaaccggggcggtctccacttccaaagtccgtcaccatcccgcgctggatcttcatcttattcctgattttctggaacgaattgatgactacaaaggtcgcaagctcactcaactgacagtgaaactggcgctgctgctgtttatccgctccagcgaactgcgttttggccgctgggaagagattgatctggataacgccatgtggactattcccgctgagcgtgagccaatcccggacgtgaaatactctgagcgtggggcaaagatgcattccccgcatttggtgccgttgtcgcggcaggcaatcgtgctactgaaagagatgaagcagtattgccgtccggggacagagttagttttccccggcgatcataactatcgcaaaccgatgagtgaaaataccatcaacaaagcgctgcgggtgatgggctatgacacccagagagacgtctgcggccacggttttcgcactatggcctgtagcgcgctggtggagtcgggcctgtggtcaagcgatgcggtggagcgccagatgagccatcaggagcgcaagcgcgtgcgtgcggcgtatattcataaggcgcagcacctggaagaacgcagggagatgatgcagtggtgggcggattatctggatgcaaaccggttcaggcatgttgtgccgtatggcttcaaaaagtcgccgggaggcgcactcgaccatatgagtttccaggagcgcaatgaccggcaactggaggagctgaaagccagaatactcgctgactcggaatggctgacggcgtctgaattatccgcaaaagcgggctttcgttccgccgatcctgaggtaggcccgaaaggctggaaagccgccgggaagatattctcgctgaaggtcgacggggaggatttatatcctgattatgttcttgatgagaaaatgcggcctctcaaggttgtggggttgatactctcgctgttcaaggaacgcaaaacgccgtggggactggctatctggtttggttcggcaaaccgcaggttgagaggtgggaagccgaaagatttgctgatttcgaagtcagagttggttctgatggcggcgcaggatgaggtggagtcgggggagtga

SEQ ID NO: 80062 - DNA, 282 bp, Citrobacter koseri
gtgctgcgcttggcgatccacaccgggattggcaacattaccgataaccatatcctttcctcgatgacggtgaaggacagggtctggaagtggctggcggaacagacttgggccgaactcaccgcctggtggccggccaccttgagctttgagccgctggccggcgagcattcggccacctggcagcagctcaccggtgcgatcttccgcagggcgatccgcgaacggcaggctgacagagcgggacagtctgttccggcggaccgaggaagacggcagtga

SEQ ID NO: 80063 - DNA, 861 bp, Citrobacter koseri
atgataacgtcagaaacaggaaccagttttagttttaacaaactgtatatcattaacatgctgggcactggtgattttaatacggccagcaggctttatgaagatatcatctattgtcagccaactggagtgattgaatacctggaaataaaaacgagagaagaactggatatctttctggcggatcaaatcaggcaaacggaaaaggggctccggccgatctaccatttcgaaagccatggtgataaagccttttccatgattggtgatacagatcgtatcacttggcaggacctgtcatcgcagctcagcttagtaaaccgggaaacggattatgcgccatttgttttcatggcttgttgccacggatttcatgcgatttcggccattaccctgcataatctcacgcctttctattatctttttggcccagtcacaagtatcaccaccggcaatttactggcgtcaaccctggcgttctacaaaaaattatttgaagcattaacggtagaggatgcgatctcagcgctccctgctgatattggcgtttactgcgcggaggcgttttttattcagttgcgcatcagacatcttgccaaccagcatatcgggcgtaatttggacaaacatgccaagcgccttgtggaactataccgcacagaaaatatgctcaatcctcatccgaagtcttatgctgacgttatgacgttttttctcatccagttaaacgacctgaaattactggaacaatattatctgaacagtgcccggctttttctcgggaaagcaccatccctgtcattcagggatatatatagcagggcgcaacagcattacttttctggtgagaataatagttaa

SEQ ID NO: 80064 - DNA, 1137 bp, Citrobacter koseri
gtgctaatttttaatacggaaacatgtctttaccctaactgctttaatgacaatattaaatctcatgcgatatcaagaaaattctctctcgaaacgatcgctgaaaattatcatctgtatcatttccagcctcgtcagataagtcgtaatgaaaaaataccattctttaaaaaaatcagcacattgaaagctacagcacatggcggtttttgtgaaacgcatgattctctctttaataaactggatacagatgagatccatactataaaagatgtattattacaggcgtatcgctccttatgcattattaacaatgaagaaaaaacaactgccattaacatctatggcttaaattcgcctgaagcatataagaatataagcattgaggacgtcagggatttccttgataatagtcaatactctcatttaataccaaaattagataatgaacatgttgtagatattgtcaaaaagaaaatgcattttttgctttctgagcaagtcgacaaggacttaatggaaaccgaaaaactatctgattacttacttcgtctatctgatttcatcgaggatgaaaaggtgcccaccggtgaattcagaacactaacaactgaaaacatggggtatcggataatttactacaaaacaaatttcaagatacctgtcagtatcaactcaatgagcaatggggcatttgacggcaagatctttaaaacctattcaatcgttgtgccatatcgggactccaatgtaataatctgtatcatcccgaatgaaataggatatgccagatattacgaagataaaattgatgcttattttttaagccgcctgaatgtaataacatttgttgaatcattgatgtcaacctgtgatgggtggtttattaaaccatcaattattgatggcatgagtgatgaaaaaaagaatttttttatgcaggactgtatgttctataatgaacgaaaattatatgcagagtatgatttctctgttttcgatgatttgaaaattaaaatatgtactgaagacgacatagccttgccatctgagaaactcgccagtattccacaacgagaagattatgaagtcagatatgctgctatgttgaaatctatttctggaaaaagaaattaa

SEQ ID NO: 80065 - DNA, 486 bp, Citrobacter koseri
atggctaaaaaaacagcgcctttgcttccagagactaatcagttgcttgttgagtttggtgagcgccttaagctggcgcgtctgagacgcaaacttacagcaaagcaggttgctgaacgggctggaatgtcgccaatgacactgcgttctcttgaatcagggggggctggtgtgacaatcggcgcttacttgtcagttatgcagattttggggcttgagaaagatctaatcaaacttgcagccgaggatgagcaaggacgcctgctccaggattccaggttaataaacaaagcgtattcttctcgtccttctgcagtttctcgcacaaacaggcataccgggaatgtggtaaaacgcgacgcgtctggtaagcaatccatggtcccatcaaaaaaaacagcaaatgccgaactaaaaacacctgtcgcgacatcgacatccctagctgcactgttaaaaccaataaaaatcctaaaaggtaactga

SEQ ID NO: 80066 - DNA, 1269 bp, Citrobacter koseri
atggcaatgattggcgtgtatgcggactgggatggcctgcatgcccccagacgaatcggctttttgcatagtcgccgggcccgtgcgcgggaaatatttgaatttgagtacgatccggatgctttagccgatcccgagcttaacttcctacagcttgaccctgaaatagtcttgtttggaggagcgcagtatccaacaccaccgcgcgataaatttggggtttttggtgactccagtcctgaccgttgggggcgaacgctgatgaaaagacgtctggaacgggatattcgcgaagggcttctgcctgaagggacacaactgcacgaatccgattatcttctgggtgtgcatgatctttatcgagttggtgctctgcgctacaagttggaagatgaaggtgagtttcttgataatcgaatggatgtcgcggcccctccatttaccgaaattggcgcattagaaagagccagtcggtcacttgaggatgatccggataacagagcattgatgggccatgaatggctaagaatgctaatagcaccaggcggttctctcgggggcgcacgaccaaaggcaagtgttgcggatgacaatggacatctctatatcgccaaatttccgagtacaagagatgaatacgatgtcggtggttgggagatggttgttaacgctctggctgtcggttgtggccttaatgtggcttctgcacaagcgcgaaaattcgccagcgatcatcattgttttatggtgcgtcgttttgaccgtaccgatgctggccagcgtcttcattttgcatctgccatgacgttgacccgacaccaggatggggatgattactcaacaggcgtcagctatctggagcttgctgaagttctcatcagaaatggtgcacagaccaatgctgacctacaggaactctggtcacgcatcgtttttaatattctggtctctaactccgatgatcatttgcgaaaccacgggtttattctggttccaggtaagggatggcgactttctgaagcctacgatataaatccggttcccagatctgatggcttgaagcttaatataactgaggcagataacgcgctggatctggaattagccagggaagttgctgaatactttcgcctgaatctggccaaagctgatgagattattgccagcttccgtgggatagtcagccagtggagaactattgcggacagccttactcttccttacagggagcaggaacaaatggcggaggcgttcagacgtgcaatgtga

SEQ ID NO: 80067 - DNA, 456 bp, Citrobacter koseri
atgatattgatagaaaaatccagcccagacacgccagaatctttgtaccttattgaaatgctatccgcgacgctgtctgagattactggcgatagcggaaagactaactttaacgtcgataccatgaaatctgatcgagcgctgtgggtagtggcaaaagatgaaaatggcgaggctatcggttgcggggcgatccggccaatatctgaagatattgctgaattgaaaagaatgttttccgtcaataaagcatccggaacaggtacagcattgctccggtatcttgaaggtgaagcaaagtcgcttggatataacgaaatcaggctagaaacccgtaaagttaatacccgcgcagttgctttttatgtaaagcataactatcaacgcatcgctaactatggcccgtatgtgggtaaagatgaggctgtttgcttctcaaagcacttatctctctag

SEQ ID NO: 80068 - DNA, 1761 bp, Citrobacter koseri
atgaacatcatcccagagagcaagagcctcgaaaaaattctcacaggcttagaaacaaaatatactgttcctgattaccaaagggattactcttggtcagttaatgaagtagaaactctttggactgatatcgttatatctcacaagcaacaatcagaatatttcatgggtactatcgtacttaaaaaacatgaaaaggatagtgatatatttgatatcgtcgatggtcaacaacgactggccactttttcgatgttatttcaagtttttgccagtctaggtgattccttttcttcaaaccataaagtccttgagcaggttgagcgaagcccgacatctcttgagttagcaaaaaagttatctaaagttgcccgtgctcgtttaagagaacccagtgaaccagataactattatttacgattaaataaaaaggataatgaactttttgaatatatagtgcgtgatgaaagcgtaacatcttttagtattgaagatgcccttaataagattaataagagtgataaaaggcttctcaaaacgaagaaaacattcactcaaaaaattattgaagagtatactggtaaagatgcgttacaggaaatttatagtacactcgtgcatattgtaaaaaggctaaaatttataacgattgaagttgaaactgattatgatgcttttctactttttgagtccttaaattcaaaaggaatggatttaagtgtggcagatctattaaaaaataaaatattgatgaaggccaatggtgatgagcacactagtgaagtattactaaataattgggaggcaatgatttcctcagtggagtctagtcgattgtcacctgttgattttttacgggtatattgggaggcaatacaaggcgctaatattacaaagaaagagttatataaaaacatcggcgttttcatagataagtctaatgatattttatctttttctaaacagttaaaagatattgcttgtgatttttcaagttatgcttctggtgatcttctttttcccactagcattcatcagacagggaaggataaatatcttgcattttgcggtgaaataaatagtctcaagtatacaacctgcctaccattgttgatgtatactcatcagcataaaccagaaatgcttggttctttagctaaaatgagtttatcgttcttattcaggtggatcactataggtgattattccgttggtggggcaaaaaaaatacttgatgaggttataaaaagattacaagcaaatcaagataagacatccattttagagccttttttatcccaaggcgacaaaatcggcgatgatgctttcattaactcaatgcgccaatttaaagcccatgataatcaaatagcgaagtatattttatctaagtactacctttttatgaataaagaacaaagcattccaaattatggtgaggttcatttggaacatgtaattcctcaggtttgttctttatgggagaaggacgaaaagttttctctccctaaaggggcttatataaaagattatatctataatattggtaatcttacattgcttcataaacaaattaatcagagtataaaaaataaaacgttcgataagaaagctaaggaatattcggattccattttccctgaaacaaaaaatattttttcactgtttgaagacggtttgtattggaatgcggagattatagatagacgcgggcaggaaatagccatgagatcaccggatatctggcctttatcaatttag

SEQ ID NO: 80069 - DNA, 513 bp, Citrobacter koseri
atgaaacaaatgatgttaagcgcgtgttttttgctggtggcgggtaacgctttagccgctgacggaaccattcattttaccggaagcattaccgaccaaacctgtaccgtcgataccggctcacaaaatctaccggttgatttaggcaacgtcgcgcagaccgctcttaacggtgctgcagggatgaaggcggcacctacgcgtttcacgcttagcctgagtgattgccctgacaccgtaacgggggcaaatgtgaaatttgacggtacctctgatggcgtaaaccagaatctgctggcgctggatagcggtaccgggatcgctaccggcgtggggattgaaattgccgacagaaatggcaccgcgatcccgctgcacacagcatcgacggattacccgctggcagaaggtacaaattcgctggactttgtcgctcgctatgtctctaccggcaccgcggtcacaaccggcacggcgaacggtacctcgcagttcaccattaactacaaataa

SEQ ID NO: 80070 - DNA, 681 bp, Citrobacter koseri
atgaacaggtatgcagacgttgcgctggcgctattgctggcctccttcaccgtgcaggcgcaggccggaatagtgattggcggcacacgcgtcatttatgacggagataaaaaagagacctccgcatccattcgtaatcccgagaaatccagtgtttatctggtgcagagctgggtggacaacggtgagcaaaatgcgaaagcgccgtttatcgttaccccgccgctgtttcgtattaacccgggtgaagagaatatcctgcgcattgtgcgtaccgggggaaatctgccgcaggaccgggaatcggtcttctggctgaatgtaaaatccatccccgcagccgatgacagtaaaccccgcactaatgtgctgcaggtggtggtgaagtcgcgcctgaagctgttctaccgtcccgccgggctggacggtagacccgaggccgcttatcaccagctctccgtcgcccgcagcggcaaccgccttaccatcagtaaccctacctcttattacgtcacgctatttaccctcaaggtggacgggcaggagattaaagacgcggacatggtgccgccgaaaggcagtgcgagtttcacgctcccttcggcatctgtctccagcgtgagctggcaggccatcagtgactacggcggcgtcagccagactgaaagccgcaggctgtga

SEQ ID NO: 80071 - DNA, 2532 bp, Citrobacter koseri
atgaaaaatccaacttcccggctgatggtatttctgctggcgctgctgctggtgatggttctgctgctggggtatctccgtcacgcggaggctcgtgagatcttcaaccctcatgcattggagatcgacaatcccggccagccggtggcggatttatccacctttgccgaatccggcggtcagttgcccggcacctaccgggtcacggtctatgtgaatggagaaaggcaggggggggcgcaggatatcgcgtttatcaccgggcctgacaaaaagctcagtgcgcaggtcacgcccgcgatgctgaaagcctggggcgtcaaaacggacgtctttcccgcgctggcggcgctgccccctgagaagccgctggaaaatattggtcactacatcccgatggccaccaccgatctgcgtttcagccaattgcagctgaatgtcagtatcccgcaggcggcaatggatgccagcgccagaggcgcagtggatccgtcagaatgggacgaaggggtacctgctgcgctgctgaactataacttcagcggcagcaacacctggcacgacggagaaaacggttcagataataactattacgctaacctgcaaggtgggctgaacctcggtgcatggcggctgcgcaactattccacctggaattacgatgacgaaaacggcagccactgggattcggtgaacacgtatctccagcgggatatccagcgcctgaaagggcagctcacgctcggcgacagctacaccccgtcggacatctttgacagcgtgcagtttcgcggcgcgcaactcgcctccgacgacaacatgctgccggacagcctgcgcgggttcgccccggtgatccgcggtatcgcgcagtcgaatgcccaggtgaccattaagcaaaacggctacatcatctaccagagctatgttgcgccgggggcgtttaccatcaccgacctgtacccgacttcgggcagcggtgacctggaagtgaccatcaaagaagccgatggcagcgaacgtaccttcgtccagcccttttccgcggtaccaattatgcagcgtgaagggcatctgaaatatgccctcaccgccgggaagtaccggagcggaaatgaggacagcgacgaaccgcagttcggccagctgacggcgatttacggcctgccctacgccattaccgtctatggaggcacgttgtactcggaggattatctgtccggtgcgggcggtctgggttttgggctcggcgaactgggttcgctgtctgctgacatcaccgccgcacacactacattgaataacgatgaaacccacgacggccagtcgtatcgggttcagtactcgaaggattttcagactaccgataccagcttcacgctcgcggcctaccgctattccacggagggtttctacaccttccaggaggctaacgctctgcgttcggacagcgatgatggctggcggatgacgtacaacaaacgccagcggcttcagctggatctcagtcagagcgtgggccgctacggctcggtttttgtctccggctaccagcaggattactggcacgaagacggttatgaacgcacgctgagtaccggctggaacgggaatgtaagtggtatcagctacagcatcacctacagctacagtgactaccctgagagcacgcagcctgccgatcagcaactggcgtttaacatccaggtaccactgagcacattcctgcccggacaggcggcaagcaatgcttgggcccgctacagcgtcaacaccgctaaacatggcgacacccggcagcaggcgggactcaacggcacagcgctggctgacaacaacttaagctacagccttcagcagagctacaccaaccatggcgtcggtggttccggcaacatcaatgccgattacaaaggcggacagggggaaatcaccggcggctacaactatgacgacgatacgcagcaggtcaactatggcctgaagggcggcgtggtggttcatccgcacgggctcacgctttcccagccgcttggcgaatcgctggcggtggtcagcgccccgggcgcggatgacgcgaaggtgcagaacaacaccggcgtttacaccgacggacgcggctatgcggtggtgccgtacgttaacccgtacaagaaaaaccgtattgcgctggataccagcacgctgggcgatgaggtggatatcgacaccgctgtgcagaccgtgacgccaacgcagggcgcagtggtgatggcggagttcaacacgcgcgtcgggcgacgggtgctgatgacgctgctgtatcgcggactgcccgtaccgttcggcgcacaggcgaagctgaaagaggggggcagcggcattgtcggcgacgacggccaggtatatctcactggcgtgccggaagcgggcgagatcgtggtgagctggaacggggcgcagcagtgcgtggtgcattaccggttgccggaacaggaaaatcagccaccggtattggcggtgagtcaggaatgccttgaggtcggaaaatga

SEQ ID NO: 80072 - DNA, 1005 bp, Citrobacter koseri
atgaacatgtggcgatggatgattattctggtcgggctgacagttagccaggcttcatgggcgctgtgttccgcatcggggagcttctcaataagcccaggtagcatagtggttcagcgggacgcggtagttgggcagcctatcagtgactggctgatgtctaaccagggcgtggcctaccagaactgtaattacgacagcacaacgcaatatcttattgtggcggggattaaaaatacgggttcaaaggccagcgtcacctggaatggtgaggcggtgtttaacaccaatgtagcgggggtaggattcgtttttgaaggccgcacgtcattcgacagcaaccctttacccgataactggaccggtattgccagcggccagtcacaggtcttcaccacccagaccagccacagttcggggtaccatccttcgattaacgatcaggcgcggatccggctgatcaaaaccggcaatatcacgccgggaacgctgagcggtaacctggggcgttttatagccgggactcgtgagaatgcgcagtggtcaaatgaaatccctatcgctttttccggggggcaaatcacgaccgtcgcctgtacggtgaatacccctgatgtagacgtgaatctggaccaacacaaaaaatcggaatttaccggaactggttcggctaccgaatggaaagccttcaatatcgaactcaattgtgacaaaagttcccgcatcaatgtccggatcgatgccacacaggatccgtcgaatatcgctggtgtgatgaagctggatagcgcggctggcgatctggcggcgacggggatcggcgtccagctgtactttgcgccggataacagcgcggtgcagttcgggcaaacgaaattctattacacctcgccgaatggcggttttgaaacggtgcagcttaaggcgcgttattaccagacgacgtctgcgatcacggctggtgaggcaaacgccacggcgaccttcacgctgacttatcagtaa

SEQ ID NO: 80073 - DNA, 375 bp, Citrobacter koseri
atgatgacctaccgtgcacgtatcgtcgccgtcggggtgtttgttgccgacggcctgaccgacaaaatgctcatcaccttcgacagcaacgggccgaaggactgcctcgattactcgctgtcgctggaaaccttattacgcgaagagagcctgttcattctgcccggtgacaccctgttactggccgggttcagctacctcattaccgccgtgggcaaaggggcgcagcaggcgctgtttgaactcggtcacctgaccatgaagtttgacggcgggctgaatgccttccatcccggcgtggtccacctctccggtccgttgcctgcgcttgcgtccctgcacggggaactggtgattgcggagggacgcccatga

SEQ ID NO: 80074 - DNA, 984 bp, Citrobacter koseri
atgaaaagaaaattaaaaaagaacacaagatttatagatgcaaccgaactgccgcttgaagaatggcttgatatgatttcggttgatcggagcgagcgagattatgatataatggactttcaatttccaaccaccaaacatttagaagaatacattatcaacattgataaatattcagaagacgatgtaaaagatctaatttacaaatttataattcccactgcatttttaggcggtgatgatatcatcagaaactgggtttttgatagtggaaaatttaacatcagagaaatattcaaccatgaatcatttcttaaaagattaatttcagtaaatgaaaagaatccgccatggcaatctatctcatggattcttgatttactacccaacaacccttatcaagcagtcagtgtcgttaatgcttatgtgacagcgcacattatgtttctgtctgacaatggattttatcgatgtgaggatattatttcattaataaatgcaaaatttatcaatcatccactgccaactaaagatctgataagaaaaatatcctcacgtgattttgaacttctttgtggttatttatataataaaaaaggatatgatgttaacatcactaaaaaaactagagatggtggttatgatattattgcagaaaaaggcagtggaagggagcacgaggtgctatatattgaatgtaaacaaaaagaaactaaagttggagtagaaataactcgaaatgctttgggtttgctaaatataaaaaacgctacaaagtcagtaattataaccagtaactatttcacgaaagatgcactaaagatttcacaagaatcaaagcgacttgaactcattaacttagacgatttcgataatgatatgcgagaatatgttgatcccagatgggtttatcgtatcgatggatacattaaagaaatgagaaatatttccaataaaaacgtaatccctaacatggccaattaa

SEQ ID NO: 80075 - DNA, 309 bp, Citrobacter koseri
atgcgcagtagctcattatttctgttactggctttactcacagtatcgcaggccaacgcctccccggaacccacccaactcgctctcgcgctgaaacaactcgacggcgtaaaaacctcgctggcgcgcgcccaaaccagctccagcaccgacccgcagtcgcgctacttcttcgactacttacaggcgcagcaggacatctctgccgttgaacaaggcatccgccgctaccttagcccgccaagggcgcagccgcgcaccgtccagcccctgagcgccagctaccagcgggagcatcctgatgactga

SEQ ID NO: 80076 - DNA, 510 bp, Citrobacter koseri
atggaaaatactgatgtctggctatcaaggataggtacttttgttaccataatcggtgcgttgtgttcattatggggatggaaaaagtctcgagaggccgctacggaagcccaaaaagctgtagccaccgttaattatcaacgcaatataagagaagttggtaacctccatgtgaagttatcaaacacaattaaatcgctacgaaccataggcccggggtcaaatgaagagaatgtacgcggtataagtttagtcccaattattactgaaatagaggacttcatagacttattcgcgacgcaagcaattatacctaacaataaaaaaagtttgaatatagattcagagaagttttgtgttgaaatcagggaaaacatttctcaactttcagatgcaaaaactcctacagaaaaattaaagattggaagggctttacacgcgaaaatttcagctattcagccccaaatcaatttacttgctgatgatttaacatttaacactcaaaggtga

SEQ ID NO: 80077 - DNA, 552 bp, Citrobacter koseri
atgcaactttcagatggtgaaaaattaatactaatgatgctgtgcgatttatacgataaaaatgagatagaaggtgaaatcgatcacgtatttgttcgcgacactatattcgaaaaccaaacatgggctctcccttggaagcttagtggtatcccattcaaaaatacagaaactccgccattagtcaaaaaagtcttagatatccttgatatgtggagggttatcgagtatagctatagtgaacttactgatgaagagaaagaaaagttagaaataagcgctgcaccatttgggaaaaagccattattcaaggggtttgatggtaataatgaaacagagtatcttgcagcagcagatttcattataaataaactggataggtttgaagaatttaagttaagagatttaaactcgcacatgccttcactaaatacctatgagcgtatggcaaatgtttttaatcctatattccgtgaaaatattggagagccattatcagtagagcaattagttttagttttacgtgaaaaaacgcatccgagtcgccgataa

SEQ ID NO: 80078 - DNA, 633 bp, Citrobacter koseri
atgagtgaacaacgcccgtctccttcgcgtccgacacagggaccaataggctggctactgtcgctggccggacggcttatagggctgattactggcgcgctggttctacgggtagtgctggaactggcggggctatatttctggtggccgcaggaggggagcagacatgtttttcaggtgatgaggcaggagcaggcggaactggttattgcgttgcagccgcaccctctagggaatgaaattctggtgctgcgggaaaaaggggcaactcgtgtgcctatggccaacaggctcctgcagaaaccgttcaccgccctggcttatacgctggtgagttttatgctacgcctgatatggcttgccgctatgctccccctgctttgcctgtgtgttgtaatcgggctggccgaaggtctggtacaacgggatttgaggcggtttggctccgggctggaatccgtttttctccatcgttatatcatcagggctggcagttcagtctccacaacactgtgggtgttttatctggcgcagccattgtttctaccagcaatactgcttttactacctgccgtcttatggtttgggataacggtatggatggcagcaggaagctttaagcgatggttataa

SEQ ID NO: 80079 - DNA, 2001 bp, Citrobacter koseri
gtgctcattaaacagctggtattacataattttcgggtatttaacggtacacataccattgatctggcacccagaaagcgtccgcacgatttgaatccacgacctattgtgctgtttggtggtttaaacggcgcagggaaaacgtctatcctgtcggcgatccgcatagcgttgtatggacgactggcgtttgggctagcgactcaacagcaagagtatatcgaacaactcagcgcattgattcataacggcgcgtactatattgagcagccggaagaagcatctgtagaactgacgtttacctataataaaggcggtcatgaggccgaatttaccgttacgcgaacctggaaaaaggggaagagggaccgcctttctctgcaacaggatgggcagccactcagtgagctggattacgatcagtgccagggatttctaaatgagttaattccgcatggcattgctgatttgttctttttcgatggcgagaaaattgcagaacttgctgaggacgaatccggtaatattttacgtactgccgtacgacgcttattggggctggatctcatctctaaactgcgtaacgatttaatgatttttgttaagcgtcagcaatccagccagctagcaagttctcagcaacaacagattgcagagcttgaaaaacagagtaaagaattagcctgccagacagaagcactgctggaaagcgccgattttgccaaatcgcggattgagtttctgtctaaagatataacccgttatgaaggcttgctaaatgctcaggggggcgcttttgcccagactaaagcacaggaaaaacagaaagtcgaaacgctgctaaaagataaagaacatctggaaaaagcactgagacaagaatgcgatggctcgctaccttatgcgcttgcacccactattttgtctcgtttgctgcaacaaattgctgatgaaacgcagattaaacaggcaaaaagctttgaaaaagagctgagccagtttttaacgcaactcagaaatgatattgcatttcgttctgcggggactggcaaaatagcagctgaagcgattaccgataatctaaaagattatatggcaacgaaaccaaaaggtgatttgctctttgacatctctgagcgtgaagctggtatgcttcaacagtctattgagatagatagtaaaagagcatggcagcgttttgagctctatcgcacacagttatctgagattgaacaacagttagaacaagcggctgctaatattgcccgcgctcctgaagatgatcagctgatggatctctttgagaaattacgtgacctggataggcagcgcgaagcccaattgcagaaatataggtcattgctggaagatgctaaacgcacgaaacagcagcaactggattgtgttcgccagattcaaaaagcgcatgatgccgctcgttatcagcacagttatagcagtgcgtttaagaatgctcaggaaacgataaacttactcgatcgctacagcgatgtattaacccaggctcgagttaaaacgctgtctacaaactttgagcttgcttaccgtaagttggctcgtaaagaggatttacaacttagtgcgcatatcaatcctcaaacgtttgatgttgaattaattgatgagaatggctcagtaattaaccgtaagttactttctgctggtgaaaaacagatttatgcaattgctattcttgaggcgctggcgaaaacctctggccgtgatttaccagtgatcattgatacaccattgggtcgtctggactctcaacatcgagataaattgattaatcactacttccctgaagccagtcatcaggttgtgttgctttctaccgatactgaagtagatgaacgttattttgttgatcagttgcgtgatgatatctctcatgcttatgagattgtgtttaatgcacatactaaatcatcaacgctgaaaccaggttatttctgggaattaactaaggaggctatctga

SEQ ID NO: 80080 - DNA, 354 bp, Citrobacter koseri
atgctcccaaatcgaatggcgcttagccgtcagactgaagaacagcttaaaaagcttaaagggtatactgggattacacccaatattgctgcccggctagcatttttccgctcggtggagagtgagtttcgctattcacctgaacgagatagtaagaagctggatggtacgctggtgctggataaaattacgtggctaggagaaacgctgcaagctacggaattggtgttgaagatgctttaccctcaactagagcagaaggcgatgattaaagcgtgggctgcgcatgttgaggatgggattgcggccttgagaaattatcgtagtataaattctttagtccacgctttataa

SEQ ID NO: 80081 - DNA, 1209 bp, Citrobacter koseri
atgagtagggaaattaaacttccggcgatcaaggttgaacaacccattggaacgttttatgcagtttcgattagctctgatttattatcaaaggttgcgtttagctctagagctgagtataaaaacaaagatctccaagatggttttttgtccttattgaaaggcaatcaacgtgatttagatatcaaacgtagtaaacaaataggacaatatattgacagcatagaatcaacctttcctaattctataattcttggagctaatttcgatagagatggtaatttaattgaagattacgatatacgatggagggtagaaaaagatggagaacagtatttcttaattattccttcagaggataatgttgtcgctacaataattgatggtcaacatagactatccggctttaaatattctgagcgtaaaaacatggaccttttatgctctgtatttattgatcttccagccccgtatcaggcatatatttttgcgacaattaattttaatcagaaaaatgttaataaaagtcttgcatatgacttatatggcttcagagttgaagaagaagaacgaaaagagtggtctcctgaaaaactcgctgtctatatttcaagaagattaaataaatactctatcccattgaaagataaaataaaattaggcgctccttcagatattgacgagacaagtgaatccagaaaattcatatcattatcaactgttgttgatggtattataaaattaatcacaaacaaccccaaaaaagatagggatcaacttttaaatttcaaaaacaaaaatggccgccaagccttaacagataaaatgcctgcacagccattaaggagtctttatttaaactacaaagatgatgagatcgagaaaataattaataaatatttttccaaatctaaagaattattatgggactatcaatcagaaacaagctacttacttaaaacgattggttttcaaacacaatttgaaattcttcgtcaatatttgctggctacatctgattatgaattaaacaatatagacgaaaaacttaccttgctaagggaaattgatttttctgatatcttttttacagcttcaggtattggtgcctcacgaatgaaaaatatagcgttgattaaaatcggtttaaagccccttgctgacttgaaagaacataaagactataacgattatatgcgattactataa

SEQ ID NO: 80082 - DNA, 492 bp, Citrobacter koseri
ttgagcaatgacactgatacagtaattgcaaatgataactacattaagtcgacttggtgtagattcaaaaatgcttttactgaactttctttttggcgagagcttatcgcatatttcattttaggaagtttagggttatggcttccatgctttttgaatatgcctggcgcaaacacagtttttgatccaatgaatgttttaacgtttggtcttgttactttattcattattctcgaagctagagtttttatggctgaaaacgatgatgggcgttcaccgggaacaaccaaggtaatagtattggttggctttgtttttttatgcattgggtatgttaagggcgtattaacaaatggcgtggcgatagtttggggaattagctgggttcatttatctctttttttcaccatattaatttggatagttaatcatgttaatacctcaagatatgactctaagaacattaattctatgctcggagggaatgtatga

SEQ ID NO: 80083 - DNA, 5061 bp, Citrobacter koseri
atgtccgaaaaacagtatgaaacctatctggcagaaaccttcattgaatgggttagcagcatcatccagcctggtgagcgctaccagtttaaatctcccgatccggataatgccttaaagctctggaaggctttcgactctttagcgaatggaaataaactagaaattgtaccggggcaatttcttacctacgtccaatgtaataatatccagcttattccggtactgcacggcagcactccccctgcatttacagaaaactatatttctcatttacgcgatcaggtttctggccgcaatggcatttttgcccagacagcgttgttgattatccacaacagtatgctggataccttactcaatagtaccaaagatgtcgctgcaccggatgctatctggcatccagaaaccttccgtcaccagctcgaaaagttaatcacaacggacagcgcccgttctcaagtatcccgctgtttgctgggcgatcagttgacaacaatattggatgaaggcgcaacggtttttggattttcatcgttataccgtctgctggacgacggcaatctggatttctcagagctaaagttattcaacgataataacctgctgaattttagtgataagcagttgcgcgcccgactcaatgaaaaccaaaagttatatcgccagatagaggacagtgttgaacgctacagcgggcaactggagaatgtactaactgaatttagtgcaaaattcattcaggagcatttcgttgacaatgacgattggcgtgaacttgatttctccgtctacctgaatgaaaaagcacaaaacagtgaacagaaactggtgttggaaaacattactgctgaaaacggtgaggtctggcaaagagccaaaagcaccagtaaagcaggtaaacgagatatcagtgtcttggttcaggttctaccagggcagtcacacgttgagctggagtttatcttccagggtaacgaccttcaggacaatcaggtaaaaattgctcatcatcgtccgttacagaaagaacgattctggcgtactagccggctcggggggagaaactctaagattctggcatcagtgccttttgatggtcggccctgcttctttagcctcgaaatcattaaccgcaataattcagcagaagagtacaagtttcgcctgctgttagttgaacaagggcaattctggcttaatgaaatccagcattgttatcgtattgagcctggtaaaggtcaattaactctgcaactggaagataatgagttacgtattgctgagctcggcgacaagacctgtttgcttgatgaagaaagtgatgatgttgattgtcagcgttatgcactcgttaattttgaaacgctggcgaatcaaagtgagctgatcaaatttaccttgatttcaggtgactcccgtttactgtttaacatcgaaggtccaggagcagaggaaggattaacactgcctctgctttttgatcagggtcgtttcaataaactctttaaagaagaagggaatgcaacctggaacaagttgaaaggtcgcgtcatcctggacaatatcgaacataatgtggttggtgttcgccagcagttgcttatgcaagagtacgccctgatcgagcgtaatctgctcagcactggcagtaatggtagtgagtttgcactggatgagcttctggcgagctatcccaacctccataatgcgtaccaccaattgttcgtttactatcaacgtcgaaataccctgccgagtctggtgtcatggtcagcggaatatcgtgtattagtcagtcacatgatcgctacttttgaacaggcattacagcaaatcagtctgagcagagcattaaccatccaagaaaaacgtctgttacatctggggatttgccgcagcgacgattatgaacgtctctcgcctctgcacccattggtaatggcttatcatttacagctagctgaaactattatcgccgagcccggataccccacatcggcttccttcgcttcattaccagagattactctcgatcgtctggtcgtctctggcctaatgccatttgtgtatcatagcgaacatgaatacgcacagttacaaccgatggtagaaaaccgcttctggatagatattgttccccagcgccagatgagccacgaatatgttaagcgtctggtgaaagacaagctaaatgaatttacagatgcctattctcggctgttccagagtgcaggaaataatgccctggttattaatgctattaatatgggagaaaccagagaactattcctgggactggtagattattttaagcaggaaaaagataacgcaatttcgatacacgtaaactgctatgacgaacgtctgctacccaatgcctttgaccgctttgccgaaagcggcagctatgaacaactaaaaaatgatcttggtctgaacagcggtgcgtggcgttctgaagccgatatgttgatcgatctgcttcgcagtcgcttaacattcagcaaatttatcctgccaccggaaagcgatcaactggcttacgcccatctcgcatttttcaccaacaccgcgccggttgattgccgccaaattcgcattgaggatgctgccagcggggtattatgtcatggcttgattgcaggcgaaggggctgaaacacaaggcgatgcttactttaccgcgtttggtctgcgtaatgtcgatactgaatcgtcttgcgccctgcgtctcgcccgcttgatgggttgtttgtggcaaccagcacggcaaagcaacagtcagtatcacggtcaggggattagtctggctgtcagcggcaactttaagcaactgctgaatcgctcttatgatagttctctctggaccactattatcgaccctaaggtcacactcgatttctttaccagtcaaaaagatgtcgtactaattcattactctgaccagtacaccagttgcgcaggttatgacgccgtaaccgtcactaaacaggttgagttgttcctgcgtctccttcaaacagggcaatccaccgttgatagccagcaactacttgctgaatttaatgcctttaacggcgagtggctgttgaaaatgttgcgttcaaatgagaaggagcgcaaagagaaacacggcattatcggtgcatacaaattcgtacagtctatgctgcaccagtcagatatttgctgggtgccactgtcagtagctgagatgatccgcgtgtccggcaacgtcgggctgaaaatgaaagaaagcgatttatcccgccatttacagggttatcagaaaggagcgatctctgacgatgtgctctttgtcggcttcaaagataacaatctgcatctgttaccactcgaagtaaaaacaggggctcgtcccgattacaaccatgctgggcagcaggcccgcgagctaaaacgctatttacagcaagatattcttgggccgcaaactctggcatcacaattatatcgggcactttttatccgccaggtattaatgcaggtagagaagttgcgtctgtatggtgtactggataacgacaagctatcccctctgctggaacgacgtgaatggtggctcactggcgactatcagttaggtgagcttgctgattatgtagaaggctttgtggtagcgcatgtagacagcggaacctgttttgatctctcttataaagaaacggcagagaatattcttcagatcgaaatcccctattcattgcttccatcgttaattgcagcacaaggtgatcaacctccactagctgaacgctatcgggtgccggaaaaatatctgctcaaatcagagtgtgatgtcaattcttcacatccagtacaggtagcaacaacaactgagccgcagctcatttctgtgctggagcttccacaatctgaagcatcggcactaacccccagtaatgtcagcaatacaccattacaggtcttgtttggtcatgatgctgtgcgtcagaatccattgtactgggagccaaccaacaccgctaagttcatgaatactaataccggcattattggaacaatgggcaccgggaaaacccagtttactaaatcgctggttacgcaactgatgcgcaatcagtcctgtaacgttgatggtaaaccgattggcttgttgatcttcgactataaatccgactatgtggatgatgcgtttctggaagctacgggagctaagaggtatcagctatcattgttaccttacaatccgttatcgttatttggtgatatgcccatgttaccgaggcatacggccatggcattcgctgaaacaatgggcaaagcgtataaccttggcgtaaaacaacgcatgaagctggttacgctaataatggagtgctatgacttagcaggaatagtgcctcatgatcgatcaacatggaatcgtgtagcaccgactattgaagatgtgtggcagcagtacctggcacaagagaaggtcgacgaagattcattatatgctgcactttataatctggctggtttccagatttttgaaacggatccagagaagatgaccagtttgtacgatctggttgatggagtcacagttatcgaactcgctggttatccatcggagattcaaaacctggtagttgcactgacactggatcttttttatgcgcagatgcaaaagcgtgggaaaccgacggtgcgaggtgattatcgccagttaaccaaaatgattctggttgatgaagccgataactttatgcgccaggattttgccagcttgcgtaaaatccttaaagaaggtcgtgaatatggtgtaggggcgatcctatcaacacaagaaattactcactttaaaacaggcgagaataattatgcttcttatattctcacttgggtaattcatcgagtttctgagatcaagaatgctgatatcaaggccgtattcaacattgatgataaaggcgaacaggagtctttgatggggcagattagacaacttgagaagcattatagcctgtatgtagatggagataaacaggttaagaagatgcgggatcgagcgttctgggaattagtatga

SEQ ID NO: 80084 - DNA, 1326 bp, Citrobacter koseri
atgtatcccattgcaacaaatttaaaagttagtaataaccagctggatagctaccttccaatacgtaataagaataacaatattgactggcaaatcgtcacaggtttagtactgagctatgccgtgaagtataaaatcgatacttacagtctcgagcagtttcgcgaggattgtaaaactcatctgcaaatattgatcgatgaacccgcgttcttgtccgtgctggaacggatgtatttttccaatcaggatatttttcgtgtatctccccttttcttgctgttccacgctcagtttgatggtgaaaagataagtgcaggctcgactgccgacaaacgccttggaacactgtttgctaatttgatgagaggttttagccttaataacccgatacaagataagttgaattttattgaaaaagagatgctgaataagctcaataaaaaattaatccgactaggtgaggggccatttgcaaaagaacaaccttatttaccctatctggtaacgtgttttcagtctgatttggcgtttctggcagagcatccacaatatcttttgcaggaactgaccaatactctacgtttgtacgcctttagttggtgcgcacaactggcgctcaatctggacaactggcaagacggcgagccgcagagtaaatcattgttctttatcctcgatactgaaaaagctagctcagaacgagataaaataaagctcttcggttataaatggtttgcccgccaaagtgaaaaattgttccccatactctctgcattagaggtattacaagtaaaaggtgaggaaaagcgccctctttggcaggtatatcaagattgtttaggttattcagatacatcgaatcgagtactgagtgaactcaatgattatatacagaagtttattagtaaggaggagcgagatcttcctgaacgcgatcgtgctacaaacctggaagatgcctttaaacagctgttatctgttgccgttgaacagtttcagggtaaaaaaaccgagcgagcagcggtaaatcgtaaatatatcaacgagctggaaagccagatttgtactgacttcattcaggttcgtggccgagcggggaaagtgctagtactgaatcaggatagactactactactaactaaccttaccgtgggtaaaaacaaaaaactccggctgcatgagctgctacgtggttttgagcaacgcggattttatctggataaccagtctacacaaatgctggttgcgttttacgaacgcatggggaatgtggagagaatgagtgacagtggagacgccgtatatgtccgaaaaacagtatga

SEQ ID NO: 80085 - DNA, 1650 bp, Citrobacter koseri
atgagcgcgatcacattacgtaaagcgttaggtgtacttgcgaagtcatcttcgttttccgtaaccacagaaactcatcggcaaaaggatgtgttagatgagctaaaagaacaactctttgttaaacaagagattgaagaagagttacagcgttatctggataccgctgctcccggtgagatcatttttctatgcgggagtagtggggatgggaaatccgaaattttgacccgctgtaagtcagaaccacgatatcaacagaagtttagtttccatctggatgcgacacacagctttgcgcctcaacaatcagccattgaggcattgaatgatttatttgaaaatcatcattcgcaatcatacccgctcctcatcggtatcaacaccgggatgctcgccaactttgccagagaaggttctgagtcccatatggctatccgcgccgctattgactcattcttgtcatcgcaacaggaaggccaccgtccttaccgcaatgaacattgtacattctttgatttcgaacattatccaaagttcgagtttgacgaagagcaggaatactccccttttatcaaaaaattaatgaatcacttaacggggaatgacgacaaaaacctgttttacacaatttatcaacgtgatgaatcaataggacatgatttaaaaaccgttgctaactttaaactactgtgcatgcccggtgttcagaatgttttaataacacagctatttaaagcccgattaataaaagatcaatttgttaccacaagaaccttattggattttttacatcacctgctgacagggcctaggtacctgtttgataatctttttaatggtgcagaaaatgatctaattaaaaaggtttctgattttgatcctgccagattgcatacatacgagattgatcaatttattttgcgctatgagcttggattagttgatcccgaactggatgatttcctgagtacacttgcgaaattacatcttacgtttgatcgtcaatgtgttaagcctggtgacgcagcttccttaattagacttttctggctactacaacatgaatctttaggaaataactatcacaaaagattctctgtattctttaaagaagctctctttgagcgttattcagagatttggcatcttcataaaaactataccgcagatccggaacaaaaaagaacactaaatcgcttttactctttcgagcttatcgctggtattcagcgttacgcaaaccgtaaagcacctgaactgagtacccaaaaagaagagttctttttaggcgaatttggtgggataaaaatcacagcacctgttgcgctgaaaccggactgggattccattctcaagaaaaacacagcccatgcaacttgtttcgatatctatttaaaagtaggacaagatccgctggatccgattcgggtcggtcttaatttatttgagctattgagcaaactgaataatggctatcgccctaataaatatgataaaagtgcgattgtcttacttgacgaaatcgttgaactaatcgcagaaaaggcaaaatccagcagcgaaatcaagttttatgatggcctaaagcgggtttatagtgcaagagcggacgatgacatgattactatcagcggcatggagggataa

SEQ ID NO: 80086 - DNA, 1428 bp, Citrobacter koseri
atgattgatgattttttaaaacgggttgaaacattaggttatatggtgaaaaaaaatgaaggcggggatgtgttcattggttttgaatgttgttttcaatggcgtttttttctaaaaaatactgattcagataaagttatcccatatttctattatagacaacagagagtagaggaggttacagatttacatgaaataatcccaagtgttttggcggcaattactaaatcttatgggaatagttcatttcgcttccttggcgaaacaaatgaatttagttgcatagaggatgagttatatgggatgtattggtttcccacacaacctttaaatgagcatgttagaaaaaataatgaacaggattttgagtgtttgtttaaaattcttacggacctttatatgtttcatcttcatcaaggtgatgttttaggtatatgcccaattcaatacgaagattatttttctgattcaccaaagcttaatgcttgggtgagtaagattcactcgttcattggcgaaaatgagtcttacgttgcaaatgggcgtatcaatcctagttggttttactttagaagttattcttcggcattttcaatagtatatagcccccatatagctggggtgttgaataaaagagcaagtgctatcggtgctgagaacattttggatggtgtgacctcgaagattgaaatatataaaaacattcgaacaatcatcccctttgaatatgaaaaattagttaaagaattattagaaaccgtagaggattactctgaagtaaatgtgattacgcaagagaatcagcttgtttttattagtgatagtcatattgtttttgtatattgcaattgcgggtcagaatatgtctcttacgaaaaagaactcatccgccagcggcaacaaaaggaaatatcacttttgtttggagatcgtaaatttttgtggaatattatagatcgccagtcaagttcagattttgaggacttgattcttgaattacttaatcgtgaaccgtgggtctactccgtaaaaaaagttgcaccaactaatcaaggtgacaatggaagggatttgatttgtgaatatgacatgatgcatgatgagcgaggagtatctagacgggattcagcattaaaattaggtaaaatgattattcagtgtaaaacaaatttgaagtcatccaaaaaatcatcaatagggaagtcggatgttgatgtagctaatactatttttgattaccgccccgatggttatatgttagtcgttaatactcagatcactcgtgatttaacggaaatgctagaacggcaaaaagagagaaaagagcagaacacaattcgctggtggaacgcatttgatatcgaagatagattgcgtaaatatccggatattctggttagatataggcatttggtagattatgaatga

SEQ ID NO: 80087 - DNA, 1362 bp, Citrobacter koseri
ttgaaatctaaatatcctggcttctacagtacaccggaagaatcactttcggagatttggtcaagtgattcaacattgttcgtttttgatacaaattgtctccttaacctctatcggtgtgaagtacatactcgtgaagatattttaaatgtcatgtcggcaatatcgagtcgaatctggctcccatttcaagttggattagaattccaaaaaaatagaagaatagtaataaactcgagcattgaaagtcttgaaagtattaaagtggcgcttacaaatatatatactcaaaatatgcttgagcatggaaaagtaaaacgcacattatataatacattaagtgatgaaattacaaacttacaaaacaccattagagagccaataaatacattcatcgaaaatgagatcacccctagaattaaaagcaagcaagatatttcatcacatgattttattcgtgatgctattgataatatcattggagaaaatatcggtgatataccgacacaagaggctattgatataattgataaagaaggagaacaacgttactcaaaaaaaatcccaccaggctttaaagactcagcaaaaaaagatataacttatcacgcaggcattacctttcaagacaaatttggtgatttatacttatggaaagaattaataaataaagcctccgatgaaaacattaaaaacatagtgctaattagcgacgatactaaagatgattggctatttacatacaaaaacaccacacacggacctttggagtctttaaaaacagaaatatgccaacgcgctaatataaataatttcaagttaataaatcaatttacattcttaaatgatgctaaaagattccttgaggatgttaatgtaagcgatgagtcactagaagaaattgaaaaattatccctcaacaagggtttttcagaattacatgatgaaattgagtataaaaatccacactcgttatataaaatcgactaccatgagcatctagaaaaactttacgtaccccacacggcaggaagtcgcgagaaaatagtaatgcacgctaatgagcaactctcaattttcgaccgtttatcagatcaatgtttatctattttaaatgagttagcagcgcttaattctgagataaccgaaacgtacgaaaatactgagtactttgaaagacaatcatacttatctaatttatattcctctgcacgatccctatctcatgatttaagtgaattaataattcaacaaggcgaacttaaaaaaataatccgatttacgtctaaactaagacaactatgtcaccgtcttgagatagaaaatattaatacaggaagttacttacactcattatattaa

SEQ ID NO: 80088 - DNA, 183 bp, Citrobacter koseri
atgaatttggggaggcgcaacgcctccctttttgacgtctttgtaggcctgataagcgcagcgccatcaggcaaaaacataccgccggatggcggcatgaatgccttatccggcctacggttttacgatttttattgtttttacttcaaggacaatcaaatggttacaggcccgattttgtag

SEQ ID NO: 80089 - DNA, 804 bp, Citrobacter koseri
atgacggtgcaaggtaagcaatgttcattcgagataacacccagtaacacgaatttcgcattcacttacacggtagaacaggcagatttagagaacaatacatacggttcgatggttgcggacagcggacccgtgactgtcaaggtcgcggtgcccgaaggttgcgagctcgattccataaaagcaagcttaggttacacctccggcgtagtcaagatcgccaaaaacatggcggctattaccactaacaacggcgggacattccctttcatgttcggcctaagcaacgtcacatttttcaccgacgctagcggcacccagggcgcgatacccggccagcaggggagtaacttgttcgccacctcggaccccgccccagccggcggttcgttccagtacggttacacaaatacgaacagccgttacggaacagtcaacaacggatacccgcccttgacgggtaacgtccccgcgggccatataaaggctgcagatggttcatactcgtgggaaaactcaggttattacggtgcgtatttcgttaccaatggagttgccaagttctataacgtaaatgacaacccgcttcagggtagccccttgacatggcgtccaaacccatcggaagacggatcgggcacgcccccgccggtcacccgttcagtggtattcgagttagccgctttaatatcacagttcccgtactcacgttcagacgccactccggatgtctccaccgtatacgacacacagaataaccagccgattacggccacagcaacgttaacgtttacgagtgtataa

SEQ ID NO: 80090 - DNA, 204 bp, Citrobacter koseri
gtgctgcttaaaccagagccccatccagtcaaaaccccgcttggttttcccgagctgtgttttgtccgggtggagcgtaaaaccgaaattatacagaaaatgtttcaggttcctgaccgcacggcgcagagtccagcgggtcggggcaaggatgatgaagtcatccatgtagcgtgcgtagtgcacgcgggtgtaacgggatga

SEQ ID NO: 80091 - DNA, 444 bp, Citrobacter koseri
atgaccaccggctccgggaatgtccctttcactcagggctccctgatggccggcctgtccggagagcgtacgctgtacggcggtctcctgtatgccggcaactacggcaacggtcagcgtggaatgacgtatggcctgagcggcgggttgctggccacgggggagggcgtggtgcagacgccggatgtgagcaatggcgccattctggtccgggtgccgcaccaggcgggcgtccggattgccgggagtgatgcgacgacgaacagccaggggctggcggtggtcagtagcgttgtgccgtaccgggaaaataccgtatcactggacacaaacacgctgccagcgggcatggcggtgccggatgcggtgacgctctggccgacgcagggggcgatagtggcggcggacttcatgccgaaggcaggtagcggtcaggtccggtga

SEQ ID NO: 80092 - DNA, 558 bp, Citrobacter koseri
atgggccgacatcgccgtccactgctgctttttcttatactgggataccagagtcatgccctggcttcccggccactacagaccaggcacatacctgtgttgtcacattatcataaaatgaggtttcagcaacgaacaaccggcttacatgatattccggcatcttccgctgttattaaaaccctgatggctcagctgggaaaaccctatcgctggggagggacttctccgaaaaccggcttcgactgtagcggactggtctggtatgcctggaaaaaaaattatcatatccgactcccaagaactgctgaagggatgtacaccgcatcacaggcacatccggtgcagtttcagcatcttgcgccaggggatatggttttcttctctatgaagggagagcggattgatcacgtcggtgtttatgtgggtaacgggcatttcattgaagcaccacacacggggcagaatgtcaagatagccagccttgaacaggaaggttacctccgccactacaggggggccagacgaatactgacttcctgtcagtcctgcagttaa

SEQ ID NO: 80093 - DNA, 237 bp, Citrobacter koseri
atgtctaacactaaatccagttttgagatgaccgggatcctttcagggcaagaagcctgtaaccataatactcctcaggagatgatcgccattttccagcagacgagggagccgggcatgaatgtttcccatgtcgctcgcctgcacggtattcaacccagcctgcagttcaagtggaagaagctatatcaggatgctgcctcaccgccgttgctgttaccaaaggacagggaatag

SEQ ID NO: 80094 - DNA, 360 bp, Citrobacter koseri
gtgagaaaagaaatattcattgctctggtgttggctatcgggagtggcgtatcttttctggcgggagcggcagaaaacaacatattgtatttacctgaaaagggggtgatctgcgacgtgtacgtctgtgccaacgcaacaggtatttctgactcgctgacgacaaaatacctgggtgctggaaaaggtcagaaactggcggcgaagggagagttcaatcgcactacgtttacttttgcgaacggaatttactgtgacaccagggagaaactgtgtcgtaaagaccgttactttggagccgatggtaaacatgcaggaaagattgacagtaaaacgacacaatggctatttgcccaatga

SEQ ID NO: 80095 - DNA, 423 bp, Citrobacter koseri
atgttacctgctgaacgaatttttcatgctgtacctgcggggatcgccagatgtctgcaactggtgctcaacgtagcgttgttattgctgggactgatactggtctcttttctcggaaaagagacatggcatcttgcccgggtattgttgcagccagtgacggataacagtaaatacagcatggtggccggattgatggtgtattttctgtactttgaatttatcgcgctaatcgtgaagtactttcaggcgggatatcacttcccgctgcgttacatcatttatattggcattacggcgattgtcaggctgattattgttgagcatccgtcttcgcatgatgtgctgctctatgctggcgcaatccttgtgatgattatgaccctgtggctgtgcaattcaccacgactgaagcgtgaatga

SEQ ID NO: 80096 - DNA, 1203 bp, Citrobacter koseri
atgaatacaaaactgtccgccattacccgcagcattgccctggttttatcaggctctgctatttcattaagtgccaccgcggccaccacctattatgaagcccgtaatgatgcaatgggcggcaccggtgtggcctcatcccattacagcgccgccgcgctggtcaaccctgccctgctgacaaaagccagggcaaatgatgacttcgcacttatcctgccgtccgtcggtgcccaggtctccgatccggaccatctggaagacggtgcggatgacgttaaggatgcctgggaccgttttgacgacagcctgaataccggcgattcgtccgcccaggccgctgagctgaaacgccagctcaacaagtttaaagatactcatgcgaatgcgcaggccggtgtctctgccgtggccacactgccgaatgacaccctgccggccgccctgttcgtgaaagcatggggaaccgcctcggttgacggtaaggtgtctcagcacgacctggattaccttgatgaggtcgctgccggagctatggccaacaaggacaacctcacctcaaaagcctatggccgtgccgctgtcatcaccgacgtcggtatcgccctggcgcgtgagtttgaatccttcggccacacctggtccgtgggctttacgccgaaataccagcgcgttgacctcttcaactacaacgttgcggtgaaggactacgacagcagcgacttcgatggtgaccagtaccgcaacaccaaaaacggcttcaacgccgacctggggctgagcgctgatctgacggaaaactggaacgtgggcctggtcgcacagaaccttattccgcgcagcatcgacagcagggaagtgaacggcgagaaagccaccttcaaagtgcgccctcaggtgacggctggtacgtcatggactaatggcttcttcaccggcgcggttgacgtggatctgactgaagccagtggcttcactgatgacaaaaaacgccagttcgccagtatcggtggtgaaatcaatgcctggagctgggctcaactacgtgctggctaccgccagaacatggcgtcctctgacggcagtgccttcacggccggtatcggcatctccccgtttgatgtggttcacctagatatcacgggtatcgctggcaccgaccgcacctacggcgcagtcgtgcaacttcagttcaccttctga

SEQ ID NO: 80097 - DNA, 1026 bp, Citrobacter koseri
atgtacccattaaacatcacctccattctggccagaatcacgctggcacaggatgacaatatgaaacaactggtcacgcaactttcggacgggaaaaagaccgccggaagccccgtctccatccgtttccggcctgccgtgagggagttcgtcatgcaggcgtccggtcagttagggatttcatccgctgaactggtcaatatcgtgatggaaggagtcatgcgtgaaaccctgacgcccggacaggcagcggtgtcacgtattccggagcgcttctggctgctgatggacgaacacggcctgtcgccctcttctgtcgtgacgctgctgtccggctggaatatcgggctgagtattctggcaaaccgggaacgcaccatggattacctgaccacctccgtcctcgaccaactggctgaatggtttggtgtcaaccgtgaatggcttgaaggcgcagcggtaccgccagcagtcgtgcacgggttcagggactggtatcaggccgctgaactgctgagggacaggcttgccggcgcaggacactcaggtaaaccggcaaatacagaaatcatttttctgcgcgacaacttatctcctgataatgaaagtaatgatattcagggaaatacgcgtgtcggcatctgcctggcacaatataaattaatgaacgggcttccggttaaaatcgttgaatatctgggacaacagcttgttttcgatacacataaaaatccattcacgggatttatgagtctctgtggccttcttgtggaaagaaacagactgacagacgtacagacatttacaacgccagcgcatttactggagctgttatattccggtgcagctttacccgtatcagtgctcagtaaaatacgaaatctgcatcttaattcacatgaccagcattataaaaaattctggacggccagagagcggcgccctctgattgcgccacaggaatatattactgacgaatgggagttcattgcaggagaaattaccgatatcacacagccaaaataa

SEQ ID NO: 80098 - DNA, 558 bp, Citrobacter koseri
atgcaaaaactgatgataccggcagtggtactggcctggacggggttgtgctggctggcatgtctgatggtcactggcaaccagctgactgaattatggtggcttatgtggctggctacctgcctggcgcccttcctgctggccccccttgcgctgcttatgcgccggttcagccggcaggcctgtgtctgcatcaggaagaaacaccgggtacatatccacctcaatccctggcagcccaccggcaacctctctcctgcccgcgtggcctggttctggagtgggttgattcagtccatgatatccgccgttcaggagccgggagccacggtcattatcacttcccacctgctgacaccgcaccgcatccgccagttacgcaggtcactgccggcggacctgtgccactgccatgtgttgcccgggtgccgcagcgtgaccgccacgctggcactgcagctggacaccctgctgaaacagtggcgctggataaccccatcgcagccgcgtaaccccgtactggttgttcgcagaaaatcttttccggcgaaaaaataa

SEQ ID NO: 80099 - DNA, 1527 bp, Citrobacter koseri
atggcggtcataaagcggggactgaaatggttaaccgggcgcagtagtgggtctgtaaacagtcccgtgccggattctgtccgaaaagaagataaactgtctccaaagtaccggccggtcatccccggagctgagctgctggcgacagcccggcgacaaaagcagatccgcatgctgcgtgagaacagcccgctgtccggacaggttatcaatgcctggtggataacgccgctggaacagctggcggagcgggttcaggatgtgcctgcctgctgggagggtgcttattctgaacccgggggcttcattgacctgagccttgaggtggccgtccgggccgtcaggctgacacggggcatgatgctgccgcccggggccactccggaggcgcagtcggaacaggtgccgggctgggtgtgtgccgtgtactgggcggcgctgttccatcatctcgactggctggccggggtggaagggggtacggagaacggccgggtctggtatccgggactgagtgcgccggcagtcccctggcgtatccggccgcgaagtggtgacgcggcaaccggttttaatgtgatgtacattgccagtaacctgctgccggcctccggcgttctgtggttacagcgctggcctgcattaacacaggctctttttacttacctgagtggtgcgaaagcacagtccggcatcctgcacagcattatcagtgatgcccgtgccagttgtggtcctgatgtctccggtatggctaccgttccggcaccctcagcgacccctgtggcagctctggtaccggcagaaagtcagccggagtcccccagattatctgtggctgaagctaacccattgtcaagtaaggataatgcttctgtaactccagttcagattgcatcctcagaaaaccactatgatgcctctcagacagcaagcgtaccggctacagagcctgtcccgcctgcattgatttcagcttttggcagcagcgaagaagaggcaggggatcagggcggggaggcaccagagggagaagatgatcagatttccactgcggccctgttgtctgtcctggacagcgtcacgtccggcagcccgggagatagtgccgggcaacagccgacgccagagagcggggaagcggtaaaaacaactgagcacggggagttattttttgtctggctaaaacaatcggtcattgacggtacgctgagcattaaccagcaggacagcgtgctccatattatggccagttttgttttcctcatctcacctgattgtttttatcagtatatgtccggtgcagaagacagggttcaggataaagatttaattcagcgtggttttgaagagctgaatattcattatgaacgaaatggtaagggtttataccattaccataaatatgaaatgcccgatcagaaagggcgctataccaaagtgtccggatatatgatcccgtccggcattcttttcagtgaagtaaaatgccctgagagcagtacatggttatcaccacgtacataa

SEQ ID NO: 80100 - DNA, 960 bp, Citrobacter koseri
atgaatcaagtcacatttaaagatctgctgaacgcatattttaaattcagaatgctgcgccctgctacagtgtggagttacaaaaaaacggtggcgtcgttacgtaagtttgccggggataatattctgcctgaacaaattaatcagaatctggttgtggactggcgtgaacatattatttacggtgaattgcagagtaaagtgacctggaataataaagtcacccatatgcgtgcgctttttaattttgcgtatgacaggaaaattctcccgcgtgaaaaaaatcctttcaatggtgtcagtgtccgtccggataaaaagaagaaaaaaacgctgacgaaagaacaggtcagacaaatttatttacgaatggaggcactggaagcagaggagaaagatatttctctttccgcccgtcgtaatgcgttacgtcctgcctggttctggctgacggcgattgatgcactcaagtgcaccgggatgcgtcagaaccagctgcttcatatccggctctgtgatgtgaattttgtccagaactggattagtcttcgcccggaaggctccaagaaccacaaggagcacagagtacccatcacggcaggattgcggccacgtcttgaaaggttgtacaggcgtagtcttgagcgtggtgccggaatggaggacagactgtttcgggtgacccgttttgtcgggggcaaaaaaacagaggtcagtgcgaattatgatcacccaccactcagggcgtttttccgccggctgtcacgcgactgtggcttcagggttagcccgcaccggttccgtcataccattgcgacgaacctgatgcgcacacctgaccggaacatccaaattgcgcgggatttactggggcattcgtcggttacggtcacgatggaatatattgaggcggatctgaaggaggtgaagaatgtgcttgaggaacttgaggcggcatag

SEQ ID NO: 80101 - DNA, 1161 bp, Citrobacter koseri
atgatagggagcttcgctaaagagctaatagctgagtttgatgctacaaaaacgcttcgctcagatgttgcaaaaccagtgtggcacaattcgcttcgtttgccaaagaacgagacattgactgatgctcaatggtctggaatagcagatgactatatgaaacgcatggggttctctgaaacgcatctacgtgcatacgtgctccatgatgataaagatggccaacatatccatatagtagcaagtcgcatagatgctacatcggggaagctctaccttggtaaaaatgagaacctggcaagcacgagaataattcagcaacttgaaaaagattacaatctgacaagaaccaaaggaccaaaagcatcttcagcagcgccctcacctaaaccgaagctcaaaaaatcccgtaatgagctgatgacagaaaagagaactggtgagctatgccctaaaaccatcatccaagatgcacttgaagccttgcttgccaataagccatccattactgaatttgtgcatcagcttgtggcacaaaatatcagagcaatcccgaacatcgcttctactggacgcatgaacggcttctcattcgaatacaacggtatggctttcaaagcatctcaggttggcaaaagctattcctggacagctttacacgacaaactcgattatcagccggaacgcgataatgctttcctgtttaaactgagagcatctgtcagtgaagcaccttgtgtgttcatgactccagatgctcctgaaatcacaacagcagccgttaacagccccatagaagcgcttatccatgataaccataaccgtgctgatcaggacgaatacactaacgcttctgtaaagcagcttaacctagaagctggtgctggtgctggttctggttctcaagaagcgtttgcaaccgaagcggtaaaagaagccacaaagggaagctatacggtttcaacgttcagatggttagagatcatcccctatatcaataccattattaccatcttcaaaaacctcaaaatcccaacccttaaacgcccaagaaaacacaaaaccatcacgggtgtgaagacgatagagataacacctctcccccaaaaaaatcctaccgaatcagtatctctactcagaagagcctcgctttcgatgtaa

SEQ ID NO: 80102 - DNA, 375 bp, Citrobacter koseri
atggaaaatacttttaataatgcatataaaaaagaattacctcaaaatttgttgagaacacattgcatcagtgttcgtttgaatcaagatgagctacagcttctcaacacgaaacgcggtgataaaagcaagggagagtggcttcgtttagctttccttgaaaagctccctgtagcagttcctgcaataaatattgaagcttggaaatcactgagcgaaatatcacagaagctgaacaagcttgtcgctcatctggataacaaaagccagggaaactctctgacgcaaacagaactattcgcagtgaagcgccaaatatctgagcttcgcatgaatcttgtcagtgcagatctatggagagagaaaaatgaatga

SEQ ID NO: 80103 - DNA, 234 bp, Citrobacter koseri
atgaatatagttcaaaaaagtaattttagcagtaacattcaaaacgatgatggtcttattcttgccggttgtattaaggaaagattgaccgaattggttgaactacttggttctggtgttgtctgccatgaatctttggtcagagaaataaactatctcttggaacaatatgagacgatagttgaaagcgcagaggagttcaattcgttgagcactcgttatgacaattggtaa

SEQ ID NO: 80104 - DNA, 156 bp, Citrobacter koseri
atgaaaataaaattacatgctcaagatattattgaaaataaatggcaggaacataaagcctttttatctttaattaagtcaaaagttgaggagattaataaaaaatttgaatatgatcctaagagtgatacttttagaaatagaaaaacgcactaa

SEQ ID NO: 80105 - DNA, 162 bp, Citrobacter koseri
atgtctgatctgaccagtagtgagcgtcgaaagttggaaaagctgcttggcatgggtagttgttatgtcctgaatttctccgaccgtacctttggcgacttcttcgacgagtactgggtcgagatcgacgccgagcactaccgcacaaagggagcgtcctag

SEQ ID NO: 80106 - DNA, 966 bp, Citrobacter koseri
atgagtctttcaaacttagttaactatgccacagataaagaacggtttcacactatcgagaattacattgatttttgcactcgatacttggagtacgtggaaacagaattgcaggctcgaatcgtttcacagaatgaaatccattaccagttttttcaatataaacaagatggtagttttaatattacgcgaccaattaattcaaggttaatgtatgacgcggatagcttttctcaggctgtacaacgatttcgtttgacacttacccagttgagagatgggcaaaagccatccgatgacttgcgtgagaacctgatttgtaccatctacacgcttcaacaatccatcggtgcggcacttgatggcttgcctgctggtaaatcaaatcaggcaagaaaggtgaatggggatttatttgagcggcttattagattgttgatcgtgtcgctcaacgtcgattgtgtttctggaacaatgcaggttccagttaaagatgaaggtggagctgagcttttcaaatcaagctatcaacatgatttgatgctgagtaagggtgatgagttgaagataattggctctgtcaaaacttcaagtaaagaccgaattgacaaagtctttatggataaatttctatataaccgccttaccgataccgcgctcccgcacatcgcaatatttttgaacgatgtacagcgtaagaaatccaggcgtgaaaatgaatatggtgtcagcgctacgttcttgccaggacatttcaaagcgtacactgttaagctaaatccgttggatggcgtgtactattgtgatattcggccaaatatggttgatgacttattgctcgcgcaacacattaagaccatcgatcatttcttctattctgatctgtgggaattattagaccggccaggtcaaacattagaagaggttgctatcaaagaagaggatagtgatgaaggcagtgagtaa

SEQ ID NO: 80107 - DNA, 1008 bp, Citrobacter koseri
atggcgatgattgataaagacgttgttatgagtgaaacgacagaagtgctgagagataaaccggcttctggatctgcgtcggctaccatgtcagccaatgcttatcctgtcgaaaaggatattaattttaagccagtgacagagggattcaggctccaatatgagcacccgaatgggcgcttatatcaaggtaattcatttgattggctcgaatcacttgatgacgcaagtgttgatcttgtttttgctgatccaccatacaacataaaaaaagccgattgggataattttgagagtcaagagaagtatattgaatggtcccttagctggatcaggcaagcgtctcgtattctaaagcctaccgggtcgttgtatgtgtgtggattctctgagattctggctgatttgaaacaccctgcctcaaaatactttaaacattgccgttggcttatttggcattacaagaacaaggctaatttaggtagtgattggggacgttcacatgagagcatcattcactttaggaagtctgatgcgtccaggctgaacattgatgatgttcgcaccccatatggggcacatacgcttaaatatccatcccatccgcaagcggagtctagcgcctatggtaaaggtgcaaataagaaacgtgataactggatgcctcatcctaaaggtgcgaagccgaaggatgtatttgatattcccactacctgcaacggaatgggagagaagactccacatcctacgcaaaagccagaagaattggttcggaaactcgttctcgcttcatcgaacgaaggtgatctagttattgacccattttctgggtctggaactacggcagtcgtagcagaacagctcaaccgacagtggatggcgtgtgatcttaatccacaatacaacgaatgggcgattcaaaggattgaaaacgttcggcgcatgacgaaggacgagtggatagcgcacgatcgaaaaacagcagaacgaagggaatctatccgatga

SEQ ID NO: 80108 - DNA, 219 bp, Citrobacter koseri
atgtctcaatacaagatagaagaaaaaatcgaatacgatccagatggaaatgtcatatcaaggctatggaatgtctaccatgaagacgggcgactcgcggaagggggactgttatcgaaggaagtggcacagcaaacggcgaatattttgaaagaaagagaaaatttaagaaaaatagaaataccaccgtcaagcaggaatgagaaaaaccttaaataa

SEQ ID NO: 80109 - DNA, 429 bp, Citrobacter koseri
atgattaatacggtttaccttagtctgaagaaagtatttaacaatgaggtatcagtagaacgcttttttgagaaaggtttttcatatttgcattataagcatatagcagcattatcagcactggcttttgttgaagacaagataaacgctaacaagttaaatacatacagcgatattattgtaaaattggatcttgatgattttgcgtttgctgtcgtatgtctttatgagatgtacgaggataacgatattccattcccacttcagagaaagaaagaagtaatgttatcaatattgcagtctctggttgataatgataacgctgatttggatgaatatcaaagaagaacagaacacgttctgtctggtgcttataaacttgaccaatactggaagcaagaaactccattatatggaaggaagcattaa

SEQ ID NO: 80110 - DNA, 825 bp, Citrobacter koseri
atgaaaacagatcttgcttatcgctatgcaaatgctgagtcgttttttaaaatgatcgaaagccaggagttgtggtttactgatttgcggaatatgaatgattgggatgaatattctgccggatttaggattgcccatgatttgataatgagtgaatttccagattatgccagcgtgttagagaatatctcacgcgagaaaatgcacgactatttcatgatgctaatctgctctttttcacatgatggcgactgtctgagcatgtggcgcggttatggggataacggaagaggcgctgcggtcggctacagtacaatcgacatacagaatggtcatttggctcaaaggtatctaaaaaagcaatctcctattcaaggaaaagttatgttccagcccattatttattcggaagaagaatataaaatactgataaggtattacataaaaaagattttcaccattcctgacaaccttccacaaagtgaaaaggaaaccttcctaaatgttcagtctcgtatgtttggacatcttcttatgaggttgtttacctgttataaaaatgattttttcaaagatgaaagagaggttcgagggtttattgaaataagtgataccgtagatccatacgatattaataaacgcaatactgattttggtgaggcatcatatcataagataagttcttccttttgtggtgagccatcaatcagagaagttgttctaggaccgctctatgaaaaatcagatgaggatgttcgctcaaaactggatgctgtagggttaatggacgtaaaaataagacgttccaggggcacttatcgatag

SEQ ID NO: 80111 - DNA, 609 bp, Citrobacter koseri
atgagcgttattgagacattaagagagctttctgaagtgtggtctttgtttagtgatatgcctgatgatacaacacttaacgtcgatcttgctgcgctttaccttggtatcagtgtaaagtcattagcaagatacaggcagaatggcggcggaccacactacattcaataccaggcagaagacagtaaggcccggaatcaacgggtcaattatctcttaagagatctccgttcctggcgagatagccacagggtaagtagcacaatgcacgctgcccaggttcgagggttagcctttacctctctttccgatttttgtgaacctcaacctttttggtgcatcactaacggtagtggctctgcaagtaaaattatatcccatgcattgacccttcctgatgatgatttcaagctacttctgtctgagcctgatgcagaagtcgtttggatctctgtagaagaagctctttttgttgattggactaatgtggatgaaaggaaggaatggaatgatttgttcaatgaggttctaacctacttaataaaaagctcaaatgtggctctggaaaagcaaaatattgaaacagctcttaaatcaaaaggaatgtaa

SEQ ID NO: 80112 - DNA, 2235 bp, Citrobacter koseri
atgagtattgaaaactttgaaatggaattagataaaatcaaaaactcaaaaggcaagaaaatcaatctagttgaagattttctaatcgatatttaccgtcgccttgatcatactgagaattataattcgtgtattaaagctatatgccatattgcaaaccttcaattagaagatgctatggttcaacaactcttacacgattgcatcattaaatcgagaatatttttatatgatgatatgttagggaatagtgatatcggttataacccaaacatttctccacaagacatatttttaaaatctttctatacaagttcggtgtctgaaacaacgctaactaaaccgcaaaaagagatttttaatgagtttcagaagagtaggcgattgattgtaagcgctccaacttcatttgggaaaactagaataattagagagatcatttctcacaatgaatacaaaatggttgttatcattatgccgacagtatcattactttctgaagcatataatgatttcaagcatgaattctctgatagatatatagtgtcaaagtcatctaaaataaaaatagaggaaaaaaaagaatatatccttattcttacgccagaaagaatgagtgttttaatgcaagataatattaatttgagagtcgacttttttgtaatggatgagatttataaggctgactataaactaaatgatgatagatataaagtatttgcagatatattatatagactaacaaaaagcggtgcagacttatacttgattggtccatacattagcgcattcagtgaaaagttcagaagtaagtttaatatcaagatgctcaggtatgatattgaaatagtccaaaaagattattatgaacttgatgttgtttctcggagaggttcacaccttatcgagggggttgatattcgtgtcgttggtgataaatataaaaatcttaaaaaaataacaggaaatgataaaattgatggtaaatatttgatatatagatatcaaaaacaatatgtggaaagtttagctgaaaaattcataaaagacttagatgataaagaatacaacagaagcctcgtcgactatctggagaataatatctctaagagttggtcattagttcagtgcttaaagaaaggtgttgcctttcatcatggtgcaatgccgaggcatatacaagatctacttatagatgagtttaataaaaataacgaagaaggcgttaagtatttgttttgcactacatcgctaactgaaggtgtaaactccactgccaaaaatgtcgttctttatgatctaaaaattggagatggaaatcaaataaaaagtctcgatagaagaaatatagaaggtcgggctggccgatttatgcaacactttcttggtagagttttttatttcgaccatgttgatagggatattaatgaggatactaatgtagaaatagagtttgtggatagtagtaatccagatatagaaacattggttcagttaagcgagagtgatataagtgaagattctcgtaataaatataaaaattttgttgagtatctaagtgggttaaatatcccactcaatcttttaaaggataataagttcgtcgatatcagcggtcagataacattgatagagcatttgagaaatgatgctaattttgctaattatcactattccactcaatatcctgtcattgaaaagctggaaagtattctgtcaattatctatgattgcttatttactaaaagcaatcgtggcaggaattttgatggtgatatagggaaaaaaatattattggatttgactaagtattatatttataagcaaccctcttttcccgttcttctaaactctggaactctaaaatatttaagggaaaaagaaaatgctcgtataaggctaacctttgatctaataacaaagtactttgaattcatttggccccggtatataaaagcttttgaaaacctattcaattttgtagcagaagagaaagggacaaagaatataagtctggattacattgtttctcttctggagtatggtactaacaataatcatgaaattatcctgcgtgatgcaggtataccaagagagataataataaaaatatcaactatattttttaattgtgaaagttatcaggatgttcaatcaacatacaaaaaaagaaggggcgaaataataaataagttgagcaatatagaattaagaattttagacaaatatatttga

SEQ ID NO: 80113 - DNA, 882 bp, Citrobacter koseri
atggatgactcaataaaaataagaatcaacaaccaaatctttaagtacgaagttagactaccttcatctggtgttgatgataacacatttacactggatttttttgatggcaagtatcgccaagatgacttggttggattgatccgagatgttgtcccttacttctccttaacagcagatgaaatgaaagagctagatccttctgagatcaataaacgcagctttactcgaatctctgatgccagacgacaggcaaagggagattatggagagttaatgctatttttaattctgagtattttctatgatgttccgaaattcgtaactaaagcaagattacgttctacaacgagagagcagataaagggatttgattgcgctcacttctctgtggataatggtaaaattactctttggctaggcgaggcaaaatttcaccaatccatcagcggagctatttcatcagcactaagttcattgtctgagcatcttaacgacaaaagcagaatagctagtgaactgaaattattaggtggtgaaatagagattaataagacacttgataaaaatctttacctgcaattgaaaagctatgttgatggtggaaaaagtttagattcagtcgaaattgccgtccctgtattattgacttacgatagtaaatatatacttcagtgctgtggtaaaggtaaggttataattaatcaagaccctttcctctcagagctgggaactgaactgactaaacattttcaagatatatataaaaaaagctggccaaaagattccaacatcaaattagtgtttttcctttttccgtttgaagatattgcaaagttgaaagaaaagattgagttagttgaacaggcgatgaagttttaa

SEQ ID NO: 80114 - DNA, 1869 bp, Citrobacter koseri
atgagatcatggtttgatagaaatagatctgaaggtttcttattatcaccaggagatcagacaagttgtggcggttatatattgaagagcaaagaacgctatactcttgatggcatggaaatagtatatgaaatggatgaatatatatgtggtgttaatggtcaaaaatataaaattaaaggtggtgtgcctagaggctcatggattgaaagagggaaagaaacatttcgtcggactcacttaagttcctgggatagtgatatggattctgaagggcggaaagtagaaccaccatcggtatcgataaagcgactcagagaagaaacatccttgtacagggagagagccaattcactgaatttttctgaaaacggatttgaacacaataggtttctcggaagtgctggagggacgataaatcttaggaaaaaaacaatcgttaatgatgaaaatgaagatattttttcacatagatcactaaattttaaattccgaaccagaataagtaatgaattatataatcataacttaaaaatgggacatgatatgtctcaatacgagacggaaattatctgttcgctggctggttcagcacatagcagaggtacatgtccttgccattgtcgattcataccccatttaaatattacatacagatatgatgattatattttagcaagttatgaagcagcaaacagacctcaaaaatccacacctttggcccacacaacaagacaaatttcagaatccaggcaatcagttgaacctggtttttgtgtagtaccggaattgacgacacctaaatcatatgaatgtgagttaatgattaatccaccatcaggagtaaaagagttatatcatcagttgaatccagaaaaaaagaaaaggccaggttcaatcttagttgttgctgatccactatcccagtcgtctgaaaaaatttcgaaaatacaaacggcgagggacaaaattgataaagcacttgaacctctgactaatgaggaagccaaattattgtatgaaaacagaaccccaatagatatattttcatctaatatatatagcgatgctttaggacaaagtggggatatcttaggttatataaaggatgctggaggaggttattatgaagaaataaataaaacgctcaatgaaatacaggagctttataaaaaaacatatagcagtaattctggtcgtatttctggagaggagttttttggtcagcgagaaagactgttcaggaagttagacggcattttgattaagttttcaaaagaacggttaaatttaaaacaatatgaaaatataaaacaggcattaggtttatcaaccaaatcgattatgcataaatgggatcaaacaggagtgaaagatatcgagggatatgcaagctatatagagaaatccgcaaaactaatcaaaattatgaaaacaacgggttacgtaggtataggacttgattttgcaagttatacaactaacgtttatgaagcttgcacaaaaggacgtgaaagcgaatgtagaaaagctgcgataacggagtatagtaaattcggaggaaaacaaacagcaagtgctgctggcggtgttgttggaggaattatggggagggccgcttgtacgtgggttttggggttgattacatcagaaagtggaggtattggcgcaggtttatgtttggtaactggtattggttcaagtattgcaggaggaaaaatttctgaaaaatggggggagatatatggggagaaaattggaactactatgagtgataagatagatagttcagaacctataatacgtgatccagactcttttaatgaagaagccggagcgcttttatatgaaaaattatttaatcattaa

SEQ ID NO: 80115 - DNA, 420 bp, Citrobacter koseri
atgaaaaattatttaatcattaattttgaaacaattggtatgagtcttttcatagctctcgttattatgatgattatattgattttcatatcatcaataattaacaaagagaactacaagaaaataactcatctatatgaagagagatttggaaatcttcctcatacggcaagaatggcaagaggtgctagtttaattggttcgccaggaatttaccttgcaaaagtagatttcattatgtctagtctgatacttccatataatagagtgtttaatcatgatatgagtattgaagaatatttttttattcggactctaccctcagaattgactacaggtttcaaagttgaagccatattatggattatcgagtccattgtacttgtttgctttatattgttgaacgttttcttttactga

SEQ ID NO: 80116 - DNA, 276 bp, Citrobacter koseri
atgttcgtgtctgtctttttcagaagccagcagtcggttgcccgcttcacgatccagcacatcatcaggctggcgacgcgccgacccggccaacggcagcgaactaaagcgctcgccctctttacgcagcagcaattccgggctggcgccaagcagcacgccgccatcctccagaggcacatggaagttgtaactcaccggattctgcgccaccagccgctccagcagcgcgccgctgtcaatggtggcatcggtcgtaatatcaatcaggcgtga

SEQ ID NO: 80117 - DNA, 753 bp, Citrobacter koseri
ttgaataaattaacgtgtctgagcagtgtcgtcatactgataaccgtatccggtgttaatgttgcttatgccgatcctcaccttacccttggtgttggggctgatattcttcagtcaccttataaacagtatagccgtgatatctatcctgtccccctcatcaactgggaaaacgatgattactggttccgggggctgggtggaggatattatctctggaatgacagaacggataagctttctgttatagcctgttattctcctgttcattttacacctgatgacagtaacaaccgtcagttgcaacgcctgaataaacgtaagggcactcttatggcggggttatcatggagacatctgttcggtccgggatttgtgcgcacaagtattaccagagatattctcaataacagcaacggtaccattcttgatgccgcatggttgtacccttacacaactggtctctttactttaacacctggtgcaggcatagagtgggacaatagaaacgccaatgattattattatggtatttcacacaaagaaagcgcccggagtggccttaagtcatatcaggcaagtagtagttggagcccttacctggaagtaacgctgaattatcgttttgccgctaactggagtttttatggttctggcaggtatgtgagactatcgaatgaagtgaaagacagtccgatggtagacaaaaactggtctggacagttcctgacaggatttacatatactttctga

SEQ ID NO: 80118 - DNA, 1260 bp, Citrobacter koseri
atgcgcatgtcccttttgcttcctgggtgcgttgtcctctggcttccgctggcaggttgtgaccagaagagcagtgaccagccatcattcccggtgagctctccggctcccggctatgtttcgcaacccccgatgagtgctgaccagctgaattcactggtgtcgccagtggccctgtttccggacaacctgctggcactggttctggttgcgagcacaacggctgatgatgtcgccggcgcccatgcctggcggctggagaatgccaccctgaagggggaggcgctcacgcaggcggttaacgggcagccctggcctgcagcggtaaaatcgctggttgcctttcctgatgtgctgtcgcagatggcgataaacctgccgtggacccgggcgctggggaatgcctggacacagtcaccctcatccgttatggatgcggtacaggtgctgcgccggcgcgcggcacaaaatggcgcgctgaaaagcaccccgcagcagaaggtggaaaccgtggcggatgatgcgccggcgaccggaacggggtctgtatccacggccaggtcgtccgtcaccatccggcccgcgcagcccggggtggtttatgttccggtttacaacaccgtggtttacggtaatccgccggtgggatattaccccgggtatgtgccgcctgcgtacagcaccactgacctcatgatgaccgggcttatcagttttactgccggcgtgatggtcggggcatggtcggacaacaactggggctggaataactggggggtgaactgggggagggctcccgtcgtggtttacaatcaccggacgtttgtcagccgtactgttacagaccgcaattccttcagatggcattcccgttattctggtccgggtccggtaatcagtccgcctctgttttcgggaagggccgccctgccttcggtacgcaatccggttgttaatcccctgccccccgggaggccggcctttaacgacagccggcttgcggaagcccggcggtatcgggaggctgaaccttttcacacgcatgtgcatggccccctcagggaaacatacggactggtgccttctcgtgtgaggggggccggacctgcgctaaattcccctgctcagcctgttactggtggtgaattactgcgccgtcgtgatatgccggggagggaccgtgctctcagtgttcatcctgaggacatacaatctgtccggggtatgacggagcaccattatttccgtatgcagaaataa

SEQ ID NO: 80119 - DNA, 1137 bp, Citrobacter koseri
atgaatctgaataaaatcgcagtggtcatcctggcaatgactggcgctgcaggcgcgaatgcagcagaaatatataaccaggatggtaataagcttaatctgaacggaaaggtggacggtctgcattatttttcagcggaccaccgccaggacggcgaccagagctatgtccgtatggggtttgacggtgagacgcagattgcatctgatttaaccggttacggtcagtgggaatataatgtccaggctaacaataccgaagtgtcagacaatcagtcgtggacgcgtctggcctatgccgggctgaagtctgatgaactgggttcctttgactacgggcgtaactacggcgtgctgtatgacattgaggcgatgacggatgtgctgccggaatttggcggcgatgcctgggcgcaggcggataactatatgaccagccgtgcgaatggcgtggcgacctggcgcgccagtgacatgctcgggatggtggaaggtctggacctggcggtgcagtaccaggggaaaaacgaaagcgcgggtaacggtaacgaagggacgaataatggccgtgacctccgctttgaaaatggcgatggtgtgggggtttctgctgtttataacctgggctggggtgtggggctgggtgccgcgtattcgtcctccaaccgtacgagcgcccagaaaaatgccggtaacaatgcgcagtatgcctccggcaaccgggcagaggcctgggcgagcggtctgaaatttgatgccgacaatgtttatgtggcggcgacttactctgagacgctgaacatgacgccgttcggctctgcggacagcgcggcaggtggcgggattgcgaacaaaactcgcaatgcagaaatgaccgcacagtatcagtttgactcgggactccgtccgtcggtctcgtatctggtctcccgcggcaagcacctggggacggactcgggtgatgataagttactggtgaactatatcgacctgggcgcgacttattatttcaacaaaaacatgtccacttatgtggattacaaaatcaacctgcttgacgggcgtgatgatttctaccgtgacaacggcattggcacggacaacatcgtggccacggggctcgtttatcagttctga

SEQ ID NO: 80120 - DNA, 129 bp, Citrobacter koseri
atgaatacggtagctgaggtgtttgcgctgctccggtcggcctgggaatgggccgcatcaacccatccggtactggtgtcactggtgctgggcggtgccatgttgtggattattacgcgccacgactga

SEQ ID NO: 80121 - DNA, 315 bp, Citrobacter koseri
atgaggctcggtcagttgcaccgctacctgggggaactgctcgcgctgggtgtggacgagcatatgccggtctgtattccggtgagtgacatgccgggggtgtctgaagtggaccgcgtgacggaggctgacggaggatacagtgaggatgcctcgccggggtatgcggggtttctgaagcgtgaggggcgggtgatggttctcaccagtggcgcggcacatctggagagcctgaccggaagccaccggctttcggccccggtggttgcggtaccggcgaaaagctggccgtccggagactggcggaaaaaataa

SEQ ID NO: 80122 - DNA, 624 bp, Citrobacter koseri
atgcaactcctgagaaaaaagaagcccctgaccggggaaagtgacgccccggaggcaacccgtcccacggaagcggtccggggggagccggtgaacacggcgaaaccggaagagggcgtaaagtcccctgaactgctgaaggatgtggtgcttaccgccgtacgcaaggatgtttttattgcccacggcgcccggctgtccgggctgattgaggcggaaagtaatgtggtcactgaggggtgtatagaagggaatattctctcgacccaccaggtgcgtgtggacagcggtggtgtggtcaaaggcgatatccgggcggtacacattattgttaatggtctggtgacggggcgctgttacgcgcaggcggtcactctccaggagcaggggcggatagagggtgatgtcttcacggacgagtttgccattgagcgtggtggcgtctttatcggtcagtcatgcctgccaccggcagaaaacccggagccggtgaagggggggcgggataccgccagagccgccgcccgcagtgaggagcacaggggggcgccctcccgcaaagcccctcagtccctcagcaaccagccggaaggtggtacggcatcgccggaggtgagtgaatga

SEQ ID NO: 80123 - DNA, 276 bp, Citrobacter koseri
atgaaggataaagtatgttccggcgatggcataaggtttgccgtgcagtacgtgaggcgctgtctgcgccacgttccggaagagtggcagcgtctgagaggcagtgcggtggtgtcgccccgttttcgtcgccggttgcgctggctggtactggtgatgattagccgtcgacgcgaagtcgattttccggcgctggggaggctcagcgtcaacgggatacgtctctgggtgctctgttttttcatggccctgtgggtacttgtccgtgtttcctga

SEQ ID NO: 80124 - DNA, 3129 bp, Citrobacter koseri
atggcagctttttttattgaccgtccggtgtttgcgtgggtgatagccctggtggtgatgctggccggcgggatagccctggtcagtctgccggtggcgcagtacccgactgtagcgccgccggccattcaggtcaccgccagctacccgggggcggatgcggccaccgttcaggacacggtgacccgggtgatagaacagaatatgaacgggctggacggcatgctgtacatgtctgcgaccagtgatgcaatgggcaatgccaccctgaccgtcacctttgcgaacgggacagacccggatattgcgcaggtgcaggtgcagaacaaactgcaggctgccatgtcacagctccccgccgtggtgcagtccctgggggttaacgtgcagaaggccagtaccggttttctgctggttgcgggatttaccgcagcgcccgggagccatctgacgcagggggacctggcggactatgtggcctcagagattcaggatccggtgagccggctctccggcgtgggacaactgcagctctttggctcgcagtatgccatgcgcgtctggctcgacccggagaagctcaacagctacagcctcaccacccaggatgtggtgaatgccattaagtcacgtaacaaccagattgccggcggtcagctgggcgggttgccttccccgcaggaccagcggatgaacgcctccattattgcccagacccgtctgagtaccccggaggcgtttgcggacattcttatccgggttaacccggacggctcgcaggtgcgcctgcgcgacgtggcccgggtggagctcggcagtgagaactacgccaccagtgcgcagtataacggtcgtccggcggcgggactcgggataaaactggccccgggggccaacgcgctggacacggcggcggcggtgaaggcgaccattgacgggctgtcggggagttttccggacggaatgcaggtggtgtggccctatgacaccacgccgttcgtgaagctgtccattcaggaggtgtttcagaccctggcggaagccatcgtactggtcttcctggtgatgtacctctttatgcagagcctgcgggccacgcttatcccgaccatagcggtaccggtggtgctgctcgggacctttgcggtgcttcaggtggcggggttttccgtcaacaccctgaccatgtttgccatggtgctggccatcggtctgctcgtggatgatgccattgtggtggtggagaacgttgagcgtgttatggaggaagaggggctgtcgccgaaggaggcaacccgtaaatccatgtcccagatacagggggcgctggtcggtatcaccatggtgctgtcggccgtatttgtgccgatggccttttttggcggtgcaaccggcgctatctatcgccagttctcggtgaccattgtgtcggcgatggtgttgtcagtgatggtggcgatgatactgaccccggcgctgtgtgccacattactgcgtccccgtaaacaggacgaggagcgcaccggaggcatcgccgggctgtttgcccgcttcaaccgcctgtttgagaaaagtactgaccattacacccgcagtacgggaaatatcctgcgccgtaccgggcggatgatggtgctgtatggcgtgctggttaccggcatggcgggcatgttcattctgctgcccactgcgtttctgccggatgaggaccagggagtgttcatgaacctggtgcagttgccttccggcgccacccaggcccggacgcaggcctcgctggacacggtgacacactggtatctggaccacgaggcggacagcgtgaactcggtgttcacggtggcaggctttggtttcagcggcaacggccagaacacggggatagcctttgtcagcctgaaagactggtcacagcgtccggagcctgagcagcatgtggaatcgattatcacccgtgccaatcacgcctttgccggtcttgtgcatgacggggtggcttttgcctttaacctgccggccattaccgaactcgggacggccaccggttttgacatggagctcattgaccggaacaaccaggggcatgaggccctgacgcaggcgcgtaatcagatgttgtttatggcaaagaaatttccgggcgtggtgacaaaggtgcgtcccaacggactggaggatgcgccgcagtttcgtctggacgtggaccaggtgaaagcggaggccctgggggtgagcaatgatgacatcaactccactcttaccaccgcactgggcagtacctacgtcaatgacttcacggaccgggggcgggtcaagaaggtctacgtccaggcggatgcgccctggcgtctgctgccggatgacatcaaccgctggtatgtgcgcgggaacaacggtcagatggtgccgttctccgcgttttcgtccgcacactggacccgcgggtcaccgcgccttgagcgctacaacggtcagccgtcaatggaaatccttggcgagccggctccgggacgcagtaccggacagaccatgatgctgatggaaaaactggcacagaaactgccgccggggtttggtatcgcctggaccgggatgtcactccaggagcagctttccgggcatcaggccccggcgctgtacgccatctcgcttgtggtggtgttcctgtgtctggcggccctctatgagagctggtcggtgccgctggcagtgatgctggttgtgcccctgggggtggtgggggcgctggctgccgccatggtacgcgggctcagtaacgacgtctattttcaggtggggctgctgaccaccatcgggctgtcggcgaaaaacgccatcctgattgtggagtttgcgctggagctgctgaaggaagggaaaggcgtgacagagtcgattctggaggccgtgcgcatgcgtctgcgcccgatactgatgacctccctggcgttcattctcggtgtgctgccgctcgtggtgagcgacggcgcaggcagcggcgcgcgccatgcggtggggaccggggtgatgggagggatgattagcgccacgttgctggccatctatctggtaccggtgttttttgtggtggtgatgcgccgcttcagtccccgggggacgacgggataa

SEQ ID NO: 80125 - DNA, 1110 bp, Citrobacter koseri
atgatgacgcgttcttcggaccccggccatccggttcgggatgaggtggatttgctggcgctgctgcaggtgctcatccgtggctggtatgtctttctggctgccgcctcaactggtctggtggcggggatgttgattactttcctgttgccccggacatggacaagccatgctgtggtggtgttaccgggaacagaagagttaaggggattaagtcagacagtggcgcagatgcgtgttgccggactgacgccgtctgttgacggtgactggctctgggcacagttccagcagactttcagcgcacggagcgcacaggaagcattcattctgacggatggtggcggaaacggcacgctggccgggcttaccgtccgtgaacgccagaggcgcgttgcatccatagctgacgggataacccttgctgaaaatggcggacagaagccgaaccctctgccttacgcctggctgaaactgtctgcgaagggcgatacgccggacgctgcacggacgctgctgactaactggttgcataccagtgctgcccgtgtggcggagcaggcgcgcgacgcccttgccagtcaacgcgacagcgcccttgatgtggcagaaggacacctgacgatgatgacgcagcaggaagctgaccgccgggcagttcagataaaccgtctggagtatgcactttccctggcccgtgcagcaggtattcaacaacccctgtggacaaagggatacaccctgagcgatgacccggacttcccggtctccctgggtgcgtccgggttggcggagaaactggcgttactgaaacgtgatactgaccccggctggctcagtacgccgttgcgtgaacagcaactgaaggtccggaccctgcgggcgctcagaacagaaggcgtgcgtgtgcagccataccggctgctggcgtccccgtcgttaccgttgtcaccggatggtccgtcgcgcagcctggtggtgttactggccgtactgctctgtcttatcggcgcggcaggtattgtcctgctgcgtgatgcgctgtctgtccggcgggcggtcactgactccccttcagaagtacgggcacttatggagatgaaggaataa

SEQ ID NO: 80126 - DNA, 1275 bp, Citrobacter koseri
atggaagacgcgtcaattctggcgcctgaggcagacggtatgctcccgtcagcccgacgtctgcgcagtgtggttatcggactgatagcgctgctgtcgggctgtgaccagtccactcccccggcagtgcagccacatcctgtgggggtggtgacgctgtccacgcagcgagtaccggttcatgttccgctgccgggaagagtgtctgcccggcgggtggcagaagtccgtccacaggtcagcgggatcctgctgcagcgtcgtttccctgaaggtgcggaggtaaaggcaggcgacccgctgtatctgatcgacccggcgccgtatcaggctgcactggcgcaggccacaggaaaccttgcccgctcgcgtgccgcagcggctcaggcgtatcgtacggcatcccgttaccgtgcgctgctggggacgaattatatcagtcaacaggatgtggatatggctactgcgcaggcgcgtcaggcagaagcgcaggtgacggctgatcgggcggcggttgaccgggcgaagataaacctgaattacacgaatgtcagggcacctgtggatggcgtgatcggtaagtctttctttaccgaaggtgcactcgtgactgacggtcagccccagccgatgaccgtgatccagcaactggatccggtctatgtggatctgacggaagacagtgacgcctggctgcggctgcagcaggaactgcattacggagccgttacctccgcggccgggcagcgactcccggtgacagtgaatgtaggggcggggaaaagtgccatgtcagtcaactgcagtctgttattttcggatgtcacggtggatgtgtccacggggtcccttgtgctgcgggcgcaatgcccgaacccggagcatacgctgttgcctggtatgtttgtgagggctgtggtgtcgccaggtgttcgtgagaacgcgttactggttccgcagcaggcggtgtcgcgaacgccggatggtcaggccaccgtgatggtggtggacaaggacaaccgggcacagttacggcctgtccgggtggcagaggcggccggagaccagtggcgggttactgagggcgtgacggcgggagatcgggtggtggtcacggggcaactgatgctgcgtccggggatgccagtgacagtgctgccagcggcatcggagggcaatgtcagaacggggaacctggcttcccgtgatgcagggcaaccggcggatgaggcggcagcggaagaagcggccaggaaggagaaagaacatgcgtaa

SEQ ID NO: 80127 - DNA, 264 bp, Citrobacter koseri
atgactcagtaccagaaacccgctgtatataaagacatgtcatcagaagcggcctcaggagtaccggagggtagtgcagctccgacacaacacggtcaggatgaacatgcactgacagaggcaggaatatgcgagcaaatgctgacgcctgcggaacgtgcgagacgtgaggattacctccagtccattaatgaggcccggtggtttgctgcggcttttattggcgctgtttgcgtgtgctttctggtatacatcgtgctgtaa

SEQ ID NO: 80128 - DNA, 741 bp, Citrobacter koseri
atggctcccgtttctgcgtccgtcatgaaaagtggtgacctgccggccggcgccgggctgcccgacgcttcggtgctggtctgcgcggataatccgtggatacgggccggactcgcggcggtggtcagtgaggtctcgccgaaggcgttactggaggcgaccgtcgggcatgaaccttgcccggcaggcattcccgtcgtgtcccgaccggagcccggtgatgatgacccgcaggcgttatcggcgttgttgttctggttacccgagctgcaccagggactgcctgaagcggtctgccgtctggctgccttgctgccattgtgtggcatgggttcgacggtgctgctgctttcacgcacactgccgccctggttataccggacgcttcgtaacctggtgcccgatcgtggtgctctgcctgaacggttgtttcttctgccagaccacgtgcctcctcagcgactgtttctggcgctacggggtggcgtcccggacgaagctgtattgctgcatgacggcagcgggcagagaaaccagccgggcctctctgccggagaactggtggcactgggtgcatccctgaacggagtcgccatcagcgagctttcggcactcaccggctcacgcaaggcaaccctgcaccggcaacgctggcaggcgctgcagaagaccggcgggttacgtatcaagaacctccggcatcacacgcggcacagacatgtgatgccggagaaagactga

SEQ ID NO: 80129 - DNA, 477 bp, Citrobacter koseri
atgagtcctgggttactgagcgcaggggggggcgacctgaccttattcctgatggggggcgtttttttactgaccatggtcgtccatgtctgtgtgtccatcttccctctgagggaggagggaagacgtatttttcgccagtcacgggcggggattgtccgttggtttgccggtgaactctccccgtctctcagtctgttctgggggctcctgctcaccgtcctgacgacgctggcggggataatactgagcgcttacccggggagagatggggtcatgctggcggggcccttgccgggtatcacggtgacggtcctggtgctccaggcgagcctgcgacggctccgggggcatggtatcagaaaattctttttctccgttctggtcagcctgctggtgatgtttctggctggcctgttactgatgctgatgtccggggaggtgggaatatggctcccgtttctgcgtccgtcatga

SEQ ID NO: 80130 - DNA, 387 bp, Citrobacter koseri
atgaatagctccgtggtgtgggtgatggcgctggcagatttgtccggcctgcgggtacctgtcggaggaagtgacgcgacagacatcaaaaccattctcgttatctgcggtgtatctctgctgatctgggggatggtcctgctccgtgccgcccgtatacaggccggtgacgggcagggctggatggcctttcgtgaatggggcggtccggtcaccctctccctgggggcgctggtgctcctgtccatcagcgatggcggggaggtggaccgatttctggcccgttcccactggcacctgcttgaacggtttgaagtcgtgtccgccattgggggggatatggttaaccgtgtgtttccctgtcgtacgggaggaagtaaaggatga

SEQ ID NO: 80131 - DNA, 447 bp, Citrobacter koseri
atgaataacaaaacaaaatctgccggtcatttgccggccgaagacccggtggaacagaccgaaaacgatcgggccggcaagactgaggcggcggctcttcccgtctatctcagagtcgccctgtgggtgctggtccagggaaggggggtcacccgggatgagatagcggaggagttccggatttctgtgcgccaggcgggtgacctgatgctctacatcagcacttccggcagcaagtacgtggatgcgacccggacaacgctgcggggccccggccggggtatgcaggcggtgctggaggtggcggcggttcacacgagccggtatgtccagcggcggacgggcaggccgaaaagggcccgaccagctccggacggcggaacgccggttgcgctacgagacttgttcctgtacgggagccggagaagagataacgatcatgaatag

SEQ ID NO: 80132 - DNA, 255 bp, Citrobacter koseri
atggaaataaacagcctgctggccacgcatcctgctgttcttacccgcagggggagccggcagggatgggcaagagcccgacaacggtatcgtatgcttgccggcagtgcagcgagcctggagcacgcttcagcctggcgtgcggcggctgaatcctgggaagccgcactggcggtggcgtccggtgccaacgtgatgtggtgtcgtaaacggcgtgactggtgcctcgccatggacataaaacccgggcagtag

SEQ ID NO: 80133 - DNA, 264 bp, Citrobacter koseri
atgagctggacgaaggacggagcggcgttgtcggactgcgtacagggaggccagggagccggcgcctcgcgttcatccctgtcccggaacgcctcagacctcgaacgactcgggcactgggaggaggcgacccggttatgggccgcagcagcccgggttgccaggggggagaatgtggcgtggtgtgaggcacgaatggagtggtgcaggcacagggccctgtcgggcatcccgtcagacacaacaggcagtgccggggagtga

SEQ ID NO: 80134 - DNA, 1233 bp, Citrobacter koseri
atgatttttccaggtcagtcccgtgcaggacgcgtggcgacattctgtctgggggccactctctgtgccccgctttatgcggcgcagggtagtccacaggaaccgtccggcccctcgccagccgcggcactgtcgcaggctgatgcggaacaccttcctcttcagcccgcgacaacggccccttctgctgtggcctctgtggccggcgcgcctgcactgacgacggaacaatataacgagatgctggaagcactcaggactcaggtcgcgcaacagcgtgcactgctccagatgctggctcagcgctccggtacgcttcctcctgagtcgcaaccagtgccttcgcaggacacgaccggaagtccggttccggatgcacaaagcagtgttgcatctcagcctgctacggcaccggatgccataccggtcaccggcactgagtcctctgtgtcacaggcgatgccggcagtcggccagccatctgttacacctgacagtactgctgtgacgacgaccgggacatcagaacccgcatctgtggcctctgctgttcacgatgcgtcaggtgagatgcctgcgccatccgtgccagtgcttgcagacaatccagttgctcatcaggcctacgccagcggcgtgagtgtctggcgtgaaatccggaactctgtggccatgcaggaagcgctggggatccatctcgacccgcaactggtactgatggggcttgaggacagtgcaggcggaaagacgctgaagctcagtgagcaggcaatcaccgatgcgatgtcatccctgaatgtggaataccagacacgggcggcagacgagcgtaaacgacaggaaacggatggaaaggcttaccgcattgcgttcagtaaggaaaaaggggcattcagtgatgcggggtcatggtaccagatcctcagcaaggggagcggaagaacgctgtcagtcaatgacagtgttcagctcagtgtcactggcacgttgcctgacggtacggttttcgacgcaagcggacagaatggtcaggttcggcaggtgaaagtcggcgcactgttgccggctgtggccataggacttcagaaaattgccccggacggacatatcaaaattgtggtacctccggctaaagggtatggcgatacgggtctgccgccggctatcccgggcggtgcaacactgatattcgatattcaggttaaagggcgtattacaggagggaaaggatga

SEQ ID NO: 80135 - DNA, 720 bp, Citrobacter koseri
atgaaaacaggtgtggcgtggcgggatgttgtggctgaaatgctgggaagcggctggctgctgatatgtggctgtggtacggcggtgctggcagccggttttccggtgcttggcgtcggatttatgggaattgcactggccttcggggcggcaatggtgacggccgggctcgccacggggcggcggccgctggcgtttttcacgccggtgctggccaccggaatgctggtcagtggcgacctttccttgtccggctgggtggtttgcgtgctggcacaggtggccggtagccttgccggggccgctttgctctggctgatggtacgtgatattcccacgttcgatgtgcatatggggttttccagtaacggttacggcccgctttccccgggtgggttttccctggcgagtgtggctctggcggaagcactgatggccggattttccgtgctgatggtcctgcggaccggtagcacgggcaacgccgtgatggtggcaggaggctgtattgccctgactgtcctggtgacagtcactcttgataatgccgccgtcagccctgcacgcagcacggccgtcgccgtttttgccggcggtgagtggctgtcgcagctctggcttttctgggtggctccgctggcgggagcggtggcgggaggaggtgtgtaccgcctgcttcgggctccctgtgttacccggcccggagccggaaaacaatga

SEQ ID NO: 80136 - DNA, 1713 bp, Citrobacter koseri
atgggatgtgttctcagggtattaacctggcgccggatgatatttaccggcatggtgttgtgtgtattgtttttatatctgccctggggatatatcttccgtacaggcgcggttattccggagtttgccggctgggcgctgatgggcatcctgtttcttctcatggcgtgcagttcgcgcgtggcgcttcattttccgccgctgatgctggcgggggtgttgctgctggcgttaccggtattctggatgcccgcacatgctgaacactggagtgccgtctgccgtgtgctggcgatgctcggcggcagtgttctgctggcccgtgctgctgcggtctccctgaccgggacccgggcagcgtatctgggctggatggtggtgcttgtcgctctggtctgctctctggctgtcttccttcaggtttttttaccacagggttatgcccactggttacagcttccgacagacggccgaccctccggcgcgttccgccaggtgaatgtgatggcaagcttccttgccacggcgctgtccgtgttgctctggttcagtctgagccacggcgggcgtcgtgagctgtttctgctttttgtcctgatgtttgccctgatgctctgccagagcacgaccggtttcctgggggccgggcttgtgttcattctgatgacggtgtgtgctgcgccgcggctgaggcttcgtctggtgtgggcagcgctggcgctggcggcaggcatactggccggctggctgacgctgaagtaccacggtcacgggctggtctcccacgaactgtcacgccaggtccggatgtggacctgggaagcgacggtggcgctcatccgccagcatccgctgaccggggtcggctacgggatgtttgaaggcagcttcccgtccgggctggcgcttgccggcctgaccgggagctggactgtcggcaatatcatgccacatccccacaacgaggtgctttactgggtgtccgaaggagggctgcctgcgacgctcgggatactgctgctggcggcctggggtgtgcgtctctttattcgcctgtgggcgaatgcctcacagcgtggtggtctggggcaggggggaactgacgcgctggcgtggggcctgtgcctggtgcccgtactgctgcacacgcagactgagtacccgtggtacgaatctcccctgcattatctgctggtcattctgtttgccggtatggcattaagccgtctgtctgacggtaaggtgatgtcgctggctgacggtcgggcgcttgtattccggggcttttctgcactggccggggtggggattgttgtgtggtccctgaccggcacctgggttgccgtcggaattgaccacgcccgccagaccatggcccgggatgtcagcacgctggccgacgccacacgctataacccgtggtttatgcctgacgctgcaggatttgccatgatgctgcacagcctgcagaccttcaacagcacccatgacctgacgctgcttcctccggctgaagatttcctgcgggattacctcattcgccatccggatccgaacgtttacagcatgtacatcactgccctgcatttccagggaaaaaccgtggaggcggagcgcgtctatgaggaaggacaaaaacgggtgccatgggacagccgttttacaccggatgcgccggtgaaagacacggacagcagcgctacggcgcactga

SEQ ID NO: 80137 - DNA, 825 bp, Citrobacter koseri
atgctgacctctgttcttacaggacagcttccggtccatcccctgtgcgaacacattaagggtcacggtggcggccgacaaagcgccctgcacgtccatcaccaccttatcactcacagcaccccctttgtttttcgcactgacatcaaaggttattacgccgccattaataagcagcgcctgtatgaacaacttacctgccacgtcaccagccccgtcctgcttaatctcctctggcagttcctgcactacagcgtcgaggacggtggcaactttcacaccccccgcaggggcataagtcggggtgccgcgctgagcccgttactggccgcctttcatctttatgcgcttgacggtcagttcgcacttaacacccgcgtgcgctacgcacgctacatggatgacttcatcatccttgccccgacccgctggactctgcgccgtgcggtcaggaacctgaaacattttctgtataatttcggttttacgctccacccggacaaaacacagctcgggaaaaccaagcggggttttgactggatggggctctggtttaagcagcacgggatacactccattgcaccccgtgccgtgagtaaacaccgtctacagtgtcgccggctttatgagcaaatccgtcacctgaacaaagaccttcaggctgcaaggatggcgatgtaccgtagacggtggcagagggctctgtttccgtcctctgcacgcgcaacgattcagatggcagtgaaagtgtatgtgactgttgttgacaaactttccccgtcgtatacggcactcggatcaggtgatttgtccgcaagcgagtaa

SEQ ID NO: 80138 - DNA, 780 bp, Citrobacter koseri
atgacagtgcagggtaagcaatgccccttaactgtcacgaagacgggcgatatcggcttcacatacacatatactcaggacgacgccgatgccggtgcgctaggcgatatggcggtggactcgccggaggcttcggtgaccgtatccacatctaatggttgtcggatacacggcgtcgcgtacgacgtccagtccaggacggggcttatcaaggtttccagcaacacagctgcactgccaaccaaaaacggcggattcatcccattcgtcgcacagctggcgaacattacattcagtaacggcaccgatacgaccacggcggtaaacgaagccggtgatctcgccacggttaccacacaggccccgccggcggacctgacgttcggcgggacaggcgcagacaccaagttgggcgggatgaatgtagccggaatatcagggatgaccggagggtatctacagtataaagaaaaatacaccgacgtaggggcccgagacgaatacagtttgcgaaacggcctcctcgacgaaaaaggaccccctaaccaccccgcagaccccggcacttcattagggcgatcagtacgcacgttcgttccgggagtcagtggtctcaggactccggatccggcattcgaggcgacatccgctacattcacttttacgtccatggtcggtacgacggtttactcgcttgcggacaaatcacctgatccgagtgccgtatacgacggggaaagtttgtcaacaacagtcacatacactttcactgccatctga

SEQ ID NO: 80139 - DNA, 1224 bp, Citrobacter koseri
gtgggtaatttttatgtaaagaatttcatgtttgagaacggtgagaggtattgtttgttatttgatagggcgactaacataccgagatattacgaaaacatgtatataacagtagaggtgagaaaccgaactcactcagtaaagacgatggaagcagtaatcaggaccttactgttattgaatgattatttaaatctgaagaatatagacataatagaaaggataatggaattagaattcctgactattcaagagatagatgaattggtctactatttaggtttaaaccatactacaaaaaaagttgtaaaaattacacatggaagtagacaaccaataagtgtaaaaactaagtataataggataaattggataagcaggtatttcacatggctttctaactatctcttatatgataagaaagtggaaataaaaaaacaaaatgtattcataagaatgctggagagcaaaaaaccgaaactttgttatgatgatgactattatacatcggagccaaaatctcttgatgatcaccaaaagaggcaacttttctctgcaataaaagcaagttcacctaaaaatccgttttcagagagtgttcgcataagaaatgaattaatagtaatcatgctttatatgctaggggtgcgagcaggtgagttattgaatattcgtttgcgagatatagatcttgaaaacagggtaatcaaaataattcgccgtcctgatgatttaacagataacaggatcaagcagccgcttgttaaaactttgaatagaaacatttacatgtcggagtggctggaaagtaagatctattattatatacaaggtgaacgacaaaataacataaagaagcacaaacatgattttctgttcattacccagggtagttcgctgaatagaggtttaccgttgacaatggcggcgtatgagaaattattcgagcgaataaaagagattgatagcttaccaaagaatttttcaggacataagctgaggcacacttggaactatgaattttctaaagagataaggaatgcggctatagaaaatggaaacataaatgaagagttaattcgatcttatattatgggatgggttcccaatacaaacatatcgaaagtgtacaatcaaagattcacaaaagagatctgtagccaaatccagaaagctatgcaaaacaagatgtttaaaatatttgaggtgatagaagatgattaa

SEQ ID NO: 80140 - DNA, 831 bp, Citrobacter koseri
atgtctattgtaatgaaatccagaatgacagcggcagcgctggcggtatgttcggtaatgggaatgggatacagcgcagccgctctggctgacggtgattctgttgacttcaccaccaccattaacgtcagctccatcaacaaatgtgaggccacggtgaccgcgggcgataccggcagcaactgggcactgacctggacgctggatagtgccagtggcccgtcctctatcgattatggcagtgcagctacggacccgctgcaggttaaagtgaccatcaatgatgatgctgcgaatgactgccacctgaacggcatgaaaattgcggcggatatggggagttctgtttctgttgccggtgattctgcggccttcaaacagcctgtatcgaacggtttctggcgttatatgccggtcgtggcagacgctaaactgtacaccgacaccgcctggaccacagcggtggacggcgatgtttctgtgaagggcgctgatgcagaggattatacggttcaggctacagctcaacatactgcgcaggaacagattacgccggctgcgggctggaactggggcagcaatgaggcagtcgtgctttctaatggctacctgaacaacggcggctatgctcctctgacggcaaacggtgccccggctccggtcacgtttaccctggggacgccagctcagaacgttgacagcgccattattggcgtgagtgccattatcgcctcagacccggaagatgcagccggcacgacggatgttaacgccgtggtggacaacgaaacggtcaacatgccgttcactatcaacgtgacctggctgtaa

SEQ ID NO: 80141 - DNA, 300 bp, Citrobacter koseri
atgtccgctatgaaccggagagcaggtaaccaattgaaaagtatattatttttaagcaaaaaaatactttccattaacgcatacccccaagaaaatatcaacacctatcggacattaatgtccgactatataaataggaatccagttttttgggaagttatgttgtttccacgtctccataaacctattttcacctataaaatcttgagttacataaaaaacagcatagaaaaaagaataattagcatcattagtgtatccctgcgtatcagacactacctcttcgatgttcttgtttaa

SEQ ID NO: 80142 - DNA, 294 bp, Citrobacter koseri
atgaagttaatttctttgaccactgcctttctggcaatctgtatgatgcccgtttccgtttcggcaactgactggagctatgaaggcgacacctctcccgcgcactggggtgaaatcaataaagcatacaaactgtgccagaccgggatgagccagtcccctgttgatattctcaccacgaatgaaatccagctcccgccgcttaacgaatggaagggacttcccctgattatgcgcctgattaactcttgtgcaatcatggggtacacatcgtcccggaggaattcgttatga

SEQ ID NO: 80143 - DNA, 423 bp, Citrobacter koseri
atggcaggtctgacaccaaagcaagaggctttctgtcaggcatacatcgaaacgggtaatgcttctgaggcttatcggacggcgtatgctgctgacaggatgaagccggaagcagtgcacgtaaacgccagcaaacttctggataacgctaaggtagcactaagggtaaaagaacttcagggagagataaagcagcgccataacgtaactgttgattccctattagctgagctagaagaggccaggcagaaagccttaaacgcagaaacgccacaatcttcagctgctgtagcggcaacgatgggtaaggccaagctggttggactggataaacagattatcgatcacacctcatccgacggaaccatgtcgccgaagccgaccatcatccagctactacccgttgagccaaagcatgaatga

SEQ ID NO: 80144 - DNA, 198 bp, Citrobacter koseri
atggcatcttacgttgtgtcattttctgtatttacagatataggtaaaccgctgggtatttctcatataggtattgagagtgaagaaagcacggccaacgattttctcaatcaagtagaattcgaagcgctttctcaaagcaaagctagaaatgagtatgctcacgcagtggtaattacatccatattcaagttatag

SEQ ID NO: 80145 - DNA, 1266 bp, Citrobacter koseri
atgccatctcaaattcaggtaaacaccaaagtaaacagccagtccattcgtcgggagacatataacgggagagagcatgtggtgatcccaagttacacgcttcccgccaacgtgattatgaataaagagttctacccggaagcggagatcaccgcaaattaccagagcatggaagggactatagccccgcttggacaccctatggtggacggacaatttgtctcggcattttccccagatggattatgtacatcgtttattggggcatggaacaggaacgtgacgcttaagggtaatcgcgtttattcagagaagtgggtagatgtcgaacgcgcaatggagaacccaggcggtcggcgcctgatggatcgcgttattgcccttgagagcggagaatcaaccgaccctatctggtcgagtgttgctgtctaccgcgagcagattcccgccccagaagaactcaaaaggcaaggtgctgattgggttgtcaaaatacacgcaatcgatcatgacgccatcctgcttgacgaaccccctgccgcaggcccagagaaaggggtggggctcatggtcaacgctgaccatgctattccccttcagccaaactcaggcgctttgataggagaatcctaccgtgagcgggaacagcggcttgatcgcgcagtgaaggcaaagttcgcaccagatgaaaaccagtatgcgtgggttgctgatttcactgattctcaggttgttatcgtgagaagcggtggagatacacaaatatatggctattccacagagggtggaaagatcgccatcgacgataccggaaccgaagtcgcccgacaggaatcatgggttgccatcgtcgccaacaaattcaaatcatttttcacaccgcaggacaaccctgcaccaaaccacaaaacggagggcgacatgcctttaaccactgaagagaaacaagagctgatcagcgaaatcggtaaaggtctggccgccaacttcgccgaagccctgaatccgattaaggacgcgatcgtcggcctacaggccaaccaggacaagctcactgaaacgctgactgctaactctcgtgccgaagagaaaaccaagcgtgaagcagtggcaaaagttcacggcgagattgtcgctaatgcgctgtcaggtgaagcgctggacgcgatgtttaaaacaatcggtgaatccgcgccgcttggcaccaactctgcacaacagcagaaagaaaccggtgcgccgaaccctgacgaatatttcaaataa

SEQ ID NO: 80146 - DNA, 207 bp, Citrobacter koseri
atgaaccaggaagatattaatcagccactgccatattcgcagttttctgagatttcatcgttgagcgtcaccaatgagatcagtctggcgatatccagcactaccgaactggttaaagactcttcaagcgtggaacgactgattctcctaaagcatcttcgcgcgctttgcgatctgcaactcaataaattatcagggctggaatag

SEQ ID NO: 80147 - DNA, 2979 bp, Citrobacter koseri
atggaaaatgtaggcggaatttattacgagattcaggcaaaaacaggcgatctccttaaagccgacaaagaagtcgtaaagtttacagagaaggtggaagaatccttcaacaaagccgactccgcagtttctgatttctccgaaacagccaagcgaacttctgccgctttaaaaatgccagaggtcaataaactttccgcgcaattggcgcagttatccgggaagattggtgccgcctccgatgctgcaaatgatggtgctgtagccaatactaagttttcaggggcgctcagcacggttgcgggtaaacttggtgccgggtatgtgacaaacgtaggttcagcaacctcatccttaatcaagcacgccaaagcggctctcgatgcaacatcggctcaggtggacaatgccagagcggcacagcaggaagccactgcactacagggcgcggcgtcagcgctggccttaaaggcggcagaggaaaaaacgcttgctgaatctgcggctaaaacagcggcggcagaattcaccgcagcggaggctatttttgagcgtaaaacagcagatatagcttctcttgaggcattgcttactcggcaaaaagagtctctgaggcaggcagaagcgaaccttacagtaacaaactcggaaaaagctgtagcagcggcagtaaaagcaaggagcgccgttgatgccacctcggcaaaaatacagaagcaatccaatcaggcagtaaaggaagtcgtggcggcggaggataaagccaaagcagcaaaagaagcagtaaccgcagcaaaccagaaactgaccgccgccattaagatagaggccgccgcgctggccaccgtggcaaaagcgaatgatgctgcaactatagctgccgaacgccacacgctggcaacaaaggcacaggccgttgcggtatccggtgccaggtcagcacttaacctgttgggtggcccaagtgggatactattgcttgcggcagccggggtttattctctttatcaggcgatgagcgacaatcaggatattgagcaatttaaacgcgatatcgatgatgctgccaataaactacagtatttaactgagactcaggcaaaagcagcagcagcgaaaacagtcattgccattaaggccgatactaaagatcttgataaaacaagtgaaaagatatctgtcgtaaatgctcagatcagatatatggaagagaatccgttcgagtggatggaagcaaatccatttggcaattatgacaaaaatcttgagtccctgagaagtaagctggtattgcttgaaggtgagcatgaaaaactaaatgacacaataaaaagaaacaactctgtacttgacgcattctcgcagcaggctgaaagggcgggagatgtgtcttctgaagcagctacagccaacgagatttacgacaacagcgtcaagggcctcactacctccaatagcctgttagaaaaagccattaacgggagtctgtcagccgctgaggaatgggccgctacaagccagttagaaaaagcgctgtctgatgcgggtgtttccgcagaagaggcggcagtacaggttgcaaaactgcatgatgagtttgaacgaaagcgcagtctgacgtttgagcagatgcttaaacagactgagcagaatgttaatgcgctcaaaatcgagatgcaggaaggggcagaggcggctgcggtttatcgcgctcagctacaggctggcgaaatggggatgactgatcagggggagatcgacaaactgatagctgctactcgagagcaggtgaggttacaaaaacagctttcagattcgaagaaaggagggcgttcttcatcaaacacaaaagcgaatgccgataccgcaacacaggcccttacccgccagcaagcagctcttgaccgcctgaacactgggtatgccgatggctcgctagaattagcgaaatacgatgcagttgtagctcttggcaataaagcatcaaccgagcagatcgccaaagcggaacagcaagccgaatccatttggaaaatacagcaggcaaccaaagcggcggcagaagaggaaaggaagcgcacacaggcaggacaaaactttaccgggttgcagggtcaggtttctccagtcgccgcagtggataacacctacgcacagcagatggcccagctagatgaatacgttcaactttacccgcaaaagattgcagaggctgaagctgtccgcgcaggaattgaagatcagtatcaccagaaacgcatggccgcaatgtgggaggaatggcagcagcagagcgagatcaacaacatgcttggctctgcaatcgactccttgcaggggggggcaaccagcgcgattacggggctaattaacggcacgcaaagcctgcaagaatccttcgccaacatcggcacgacaatcctcaacagcgttgtcggtagtctggtacagatgggtatcgagtgggtcaagagccagttaatgggtcaggccgctgctgctgcgtcgctggcatcgacaatggctcaggctaccgccgctgcatctgcatgggcgccagcagcgatgagcgcttctatcgcaacatacggtagtgctgctgccgtgggacaggctgcatacgcagaatcgctattagcggcgaagggaatggctcttgctggcggtcgtcgctacggcggtacggtatctgccggtaacgcctatcgtgtcaacgaggatggacgctctgaaatcttccagaccgcaggtgggcagcaggcattcatcccgaaccagtcagggaagatcattcctgctgataaggccggaggtggtgggtcgtttaatcctgtaatgaacctgacgataaatactacgggaggaattggtgatgatgatatcgcaagactgcgaaaggcatggaacaacgacatgctgaaaatgatggtggaccaaagtacgagaccgggcgggctattacagggcaggaaaaaataa

SEQ ID NO: 80148 - DNA, 1146 bp, Citrobacter koseri
atgtccgcaggaacattaaccctgacgaataactctgctactgtaactggcagcggcactgctttttcaactgaactagcagcaggtgattttatcgttgtcaccgtcggcggggttccttatacgctgcctatcaagacagtaaacagcaatacatctctgacgctggtcagcaactacaccgggccgacgcaatcaggcgccgcctggtttgctgttccccgtgtggcgctgaatatggttaccgccgcgctggtggcccagagcgctgaagccctgcgtgggctgaactacgacaagcagaactggcagcaggtattcagtgtgaacggaaatatcaccgttacgctgcctgacggttcgcaattctcagggccttcgtggctgtatatggtcaatactgtagcaacgaaaaccaatggtgctgtgcccattaatcagggaggcaccggcgcaaccgatgccgaaggtgcccgaacaggtcttgggctggggaccagtgctacaaaaaatacagggacgtcggggaatgtcgtccctcttcttgatgcagacggcgttacatttgataaaagactatccatcggcggtggaaattactcatctcaactgagattgatttcaaacagtgacggctacggacagatggaaatttattccctcggaggcactgtacgctgtcgtctggcatacatcaacagtaacgatttgtactattacaagtatgtcgggggagcatattcttttggcgttatgtttccgcaatccgggggaactctggcgttaacaggaacttctgatattcatttcaaagacgatgtaaaagacatggacccggtagtctctctggataatatcaacaggatgagacccgtcagttttgtttttaaagcagacaaaaacagaaatgtacgtcgtggggttatcgctcaggaaattatggagatcgacccgcagtatgttcatctgaatattgacagaaatccagatacgcaggaagacactgagcgctacagtcttgataataacgctcttcttcttgatgcactgcttgctatacaagccctttcgaaaaaggttgaggcaatggagttggttttgaaaaaagacatttcaacgaaggacataacgcaatcttgttcctga

SEQ ID NO: 80149 - DNA, 966 bp, Citrobacter koseri
atgtctaaaaaaagagtttatgttgccggacatcgcggtatggtgggatcggcaatttgccgcgttctggaagggcgagatgacgttgaactggtcgtcagagctcatgctgaacttgatttaacctctcaggaagaggttaagaaattttttgctgcagaacaaatcgatcaggtttatctggcggctgctaaggtgggaggcatacatgccaataacacctatcccgctgaatttatctaccagaatcttatgatcgaatgcaatattatccattctgctcatgagtctgggatccaaaagcttcttttcctcggatccagttgcatctatccgaagctggcggaacaaccgatgaaggaaacagcgctgcttaccggcacgctggagcctaccaatgagccgtatgccatcgccaaaatcgccggtatcaagctatgcgaatcctataatcgccagtatggacgtgactatcgcagcgtgatgccgacgaatctgtatggtattaatgataattttcatcctgagaattcacatgttatcccagcgctgatgaggcgcttccatgaagctagggttgaaaatcagtctgaggtggttgtctggggcacgggaacgccgaagcgcgagtttttatatgtagatgatatggctgaagcttctgttcacgtaatggaactggatgagaaaatctatcaggaaaatactcaatccatggtttcgcatattaacgtcggcactggtgaagactgtactatccgtgaaatggctgaaacgatggcgaccgtagtcggatatacgggaaaaatcgtttttgacgcatcaaagccggatggaacacccagaaaattaatggacgttaaccgcctcaggaacttaggctggcagtatcggtataatctgcaggatggtctgcagcttacttataactggtatttgtctaatctgaatacgactagggggtga

SEQ ID NO: 80150 - DNA, 252 bp, Citrobacter koseri
atggatacatcaggtttcgatattcagtttgataatcatattcctgaaaatggttaccgtattgaaggttatttatgtaatgctaacaatgcaaaagaatgtcaggcaataatggtacgttctgaaccatttcatcaaattgattattctgcaatgggaaattactggacattaggttttggctctgtcctgctgctctggcttttttctgtaggtgtgggacaggtaataaagatggttcgtactgcttga

SEQ ID NO: 80151 - DNA, 234 bp, Citrobacter koseri; identical to SEQ ID NO: 10869

SEQ ID NO: 80152 - DNA, 3744 bp, Citrobacter koseri
atgagtaaattcctggaccggtttcgctacttcaaacagaagggcgaaacctttgccgatgggcacggccagcttctcgaaacaaaccgggactgggaggatggataccgccaacgttggcagcatgacaaagtcgtgcgttcaacccacggggtaaactgtaccggctcttgcagctggaaaatttatgtgaaaaacggtctggtcacctgggaaacccagcagacagactacccgcgcacccgcccggatatgccgaaccatgaacctcgcggctgcccgcgcggcgcgagctactcctggtatctctacagcgcaaaccgcctgaaatatccgctgatgcgtaagcgcctgatgaaaatgtggcgtgatgcgaaaaaactgcacagcgatccggtagaagcctgggcttccatcatcgaagacgccgataaagcaaaaagcttcaaacaagcgcgtggtcgtggtggcttcgttcgttcttcctggcaggaagtgaacgaactgattgcggcatccaacgtttataccatcaaaaattacggtcccgatcgcgtggcgggcttctcgccgattccggcaatgtcgatggtctcttacgcatccggcgcgcgttacctgtccctaatcggcgggacttgcctgagcttctacgactggtactgcgacctgccgcctgcgtctccgcagacctggggcgagcagacggacgtaccggaatccgctgactggtacaactccagctacatcatcgcctggggctctaacgttccgcagacccgtaccccggatgcccacttctttactgaagtgcgttacaaaggcaccaaaacggttgccgttacgcctgactacgctgaaatcgccaagctgtgcgacctgtggctggcaccgaagcaggggactgacgccgcgatggcgctggcgatgggccacgttatgctgcgtgaattccaccttgataacccgagccagtatttcaccgattacgtccgtcgctataccgacatgccgatgctggtgatgcttgaagaacgcgacggttactatgccgctggccgtatgctgcgcgccgccgatcttattgacgcgctgggtcaggaaaacaacccggaatggaaaaccgttgccatcaacacccgcggcgatatggttgcgccgaacggttctattggcttccgttggggtgagaaaggcaaatggaacctcgaacagcgtgacggtacgtcaggcgaagaaaccgaactgcaactcagcctgctgggtagccaggacgatatcgcagaagtgggcttcccgtactttggcggtgaaggcactgaacacttcaacaaagtcgagctgcaaaacgttctgttgcacaagctgccggtgaaacgcctgcaactggcagacggaaccaccgcgctggtaactaccgtttacgatctgacgatggcgaactatggcctggaacgcggtctgaacgacgaaaactgcgcaaccagctacgacgacattaaagcctatactccggcgtgggcagagcagataaccggcgtaccgcgtgcgcaaatcacccgtatcgcccgtgaatttgcggataacgccgataagacgcatggtcgttcaatgatcatcgttggcgccggtctgaaccactggtatcacctcgatatgaactatcgtgggcttatcaacatgctggtgttctgcggctgtatcggtcagagcggcggcggctgggcgcactatgtcggccaggaaaaactgcgtccgcagactggctggcagccgctggcgtttgctcttgactggcagcgtccggcgcgtcacatgaacagcacctcctatttctataaccactccagccagtggcgctacgagacggttaccgcgcaggaactgctgtcgccaatggcggataaatcccgctacagcggtcatctgatcgacttcaacgtgcgtgctgaacgcatgggctggctgccgtctgcgccgcagttgggcaccaacccgctgtacatcgcgcgtgaagcggaaaaagccgggatgacggcggtggattacaccgttaaatcgctgaaagaaggctcgattcgttttgcggcggagcagccggaaaacgggaaaaaccacccgcgtaacctgtttatctggcgctcgaacctgctgggttcatccggtaaagggcatgagtacatgctgaagtacctgctgggtacggaaaacggtattcagggcaaagatctgggtatgcagggtggcgtgaagccggaagaagtggaatggcaggataacggtcttgacggcaagctggacctggtggtgacgctggacttccgtctgtcgagcacctgcctgtactccgacatcgtgctgccgaccgccacctggtatgaaaaagacgacatgaatacctcggatatgcatccgtttattcacccgttgtctgccgccgttgacccggcctgggaatcgaaaagcgactgggaaatctataaaggcatcgcgaagaaattctctgaagtctgcgtgggacaccttggcaaagaaaccgatgtggtgacgctgccgattcagcacgactccgctgccgaactggcgcagccgctggacgtgaaagactggaaaaaaggcgaatgcgacctgatcccaggtaaaaccgcgccgcacatcattccggtggaacgcgactacccggcgacgtatgagcgctttacctctatcggcccgctgatggagaaaatcggcaacggtggcaaaggtatcgcctggaacactcagagcgaaatggatttgctgcgcaagctcaattacaccaaagctgaaggcccggcaaaaggccagccgatgctgaatactgcgattgatgccgccgagatgatcctcacgctggcgccggaaactaacggccacgtagcggtgaaagcctgggcggcgctgagtgagttcaccggtcgcgaccatacgcatctggcgaccaataaagaagaagagaaaattcgcttccgcgatattcaggcgcagccgcgtaagattatctccagcccgacctggtctggcctggaagatgaacacgtctcttacaacgccggttataccaacgttcacgagctgattccgtggcgtacgctgtctggccgccagtccctgtatcaggatcatcagtggatgcgtgactttggcgaaagcctgctggtttaccgtccgccgatcgacacgcgttcagtgaaagcggtgatgggtgagaaatctaacggcaacccggaaaaagcgctcaacttcctgacgccgcaccagaagtggggtatccactccacctacagcgacaacctgctgatgctgacgctgtcgcgcggtgggccgattgtctggatgagcgaaaccgatgctaaagatctgggtattgaagataacgactggatcgaggtctttaacagcaacggtgcgctgacggcacgcgcggtggtaagccagcgtgttccggccgggatgaccatgatgtaccacgcgcaggaacgtatcgttaacctgccgggttcagaaattacccagcagcgcggcggtattcacaactctgtaacccgtatcacgccgaagccgacccacatgatcggcggctatgcgcagctggcctacggctttaactattacggtacggtcggttcaaaccgcgatgagtttgttgtggtgcgtaagatgaagaacattaactggttggatggcgaaggcaatgaccaggtacaggagagcgtaaaatga

SEQ ID NO: 80153 - DNA, 201 bp, Citrobacter koseri
atgacattaaaaaaacatctgctgggatggcttgccgccgcgttgctcgttaccggacaggctcaggcggccccgttgatccttgcaaccaaaggttttaccgaacaacacatcctttccgccatgaccgtgcagtacctgcaaaaaaaagggttttcaggttcagccgcgcaccaacattgcggcggtgatttcacgtaa

SEQ ID NO: 80154 - DNA, 777 bp, Citrobacter koseri
ttgccgcaagcgatcgcgcgacgcagtttggtgatggctgtttcactactgcgcgaatccgtgacggtaaaatttgcctccatgcccgcacaccttcgccgtttgcaggatgcctgcgaaaaactgctgcttcccttcagtcaatggacggagctgcaacacgaaatgacggcgatggcagcaggccagaacagtggcgtactgaaagttatcctgagtcgtggcagcggcggcaggggctacagcccgtcaaactgccgtgaggccacgcgaattttatccgtttctccttatcccacccattatgaacgctggcgtacggaaggtattacgctggcgctaagccccgtaaggctggggcgtaaccctatgcttgcgggtataaaacaccttaaccggctggaacaggtactgatccggtctcatcttgagcagacaaacgccgatgaagcgctggttcttgacagcgagggatgggttacggaatgctgtgcggctaatttgttctggcgtaaagagaatgtggtgtacacgccgcgcctggatcaggcgggggtaaacggcattatgcgacaattttgtttacagtcgctggcacaatcgcctttccaggttgtcgaagtgtatgccagggaggacgcgcttatgcaggccgatgagatggttatctgcaatgcgttgatgcccgtgattcccgtgcgcgcctgtggcgataaactgatgtttgcacgttcattgttcgattttttagccccactttgtgagcacccgaattag

SEQ ID NO: 80155 - DNA, 432 bp, Citrobacter koseri
atgatgaggtcgatcaatcgctccttggatggtaaacttcagagctttccgaatctactgatttatataatgttaaagttattcgctaagtacacatcgattggcgttatcaatacgctcatacattgggttgtgtttgctgtttgcgtttatggactgcacacaaaccaggctctggctaacttttctggcttcgtgatagccgtgtcattcagcttttttgctaacgccagatttacgtttaaagcatcaacaacaaccatacgatacatgctgtatgttggctttatgggaacattgagcgcagctgttggctgggcagctgataagtcagggctcgcccctatcatcacgttaattttgttttccgccatcagcctggtgtgcggtttcatctattcaaaattcattgtctttagggatgtgaaatga

SEQ ID NO: 80156 - DNA, 1434 bp, Citrobacter koseri
atggcaagagttctgcataattacagagatatgttttttctgacttttataattgccttgccatttatcattgcagacgttccatacattgatgatctggcacgcatggctgtagggtatggctggaatcaggatggaagggtttttgccactctggtaatgaaatttttatcacttggttatccattaatggatatttcaccaattcctacattattggccgttttttcattgttgttatcaggttacatcatatctgatgctatgaacatagaagggagatacagtaaggcaattatagcaatatcaatgatatctggtcctttcatcgtgcagaacctatcttatcaatgggactcttttccgatggcgctatcaatgctttttgtaattgccccgatagttttcattgaaaatcgtgtaaaatacatagctagtgcatcagtagctcttacgctttccatgtatttatatcaggcaacaatttttgcatttccatccatagctgcaatttacatatggaaatcattaggcgttaagaatagaaaagaaattacagaattacttatcacttttttgcttgccgccataggatttgttcttttatacaaaatatcaacattattcatcaatcttgaatttaaacaatcaagagccgacttaattatattctcaagtcaaccaatagaaaacttagtaaaaaacataagtgggcttatatccgtatacaccccttatttttcctctattgtcggcaaggctattattactgcttacattttttccacaatcactttgttgatttcctctgttaaaaacaaaagactatatgctttggctggagtattattcccacctctgattgtggtaatgacttcacttgtgagtttgctgatagttaacgcaccaattgcccccagagtgtttcccgcgctaccattatcaatcttaatgattgctattatttctaaaaaatcaaaattatcattcatagcggttagtgccttggtagcaattaccacggtcgtgcagttatatgcttatgtgaatgccttaaaatctgaatttgcactacagagatctattgttttccagatcgctgcaaagaccgatctacacaacaaaagaatagttgtaaatggttctgctcctatttcaaatggggttgtgatcacattaaaacatctgccttacctcaaaggttccattccaatatatataaataatggttgggtttggggaaggcagttgttggaaaatgaaggggttattcttaaagaacaattcctttattcgcctgactttgacaagcaacgtaatatagccataaagggattatgtgacatccctgtcacaaaccaaaatatccattacaatgtcagaagtaatgagtctctggtaataattgattttaagaaaaaacagtgtaattaa

SEQ ID NO: 80157 - DNA, 1044 bp, Citrobacter koseri
atgccttcttcactgactggtatgaaactcaatgacgcctacgcattaacagcgtttaaatatataattaactcatcgtcatataaaattaattttgggaatggcgattcctcgcccatgtccgtgtataacaacacggtaattttctctacagcatcacctgaagttgtttatccgcagctgtcaacaagttacgggtcaaatactagggcattggctcatgctggttctttcgtggcgtctggcgtgatgacgtcttcaacatcctcctcttcagttgatcgcgcccgcttgtttatgcagacatcatctcaaaaaactttagatgcttctttaaaagcaaaagcaacgcttgtggcggaggtacgaaaagatattatttctacctccacaacagttacaggcactaccgctatttctgcgggaactgatgaaggcggaagcactgaagatcgtccatttgaattcacaacattctacgatagtgtaacacctgcaaattcatataaatcagtcaggctgggaggcgcagcattaagctcggttaatggtgtgcaacttgaactgaaaatcatgcaagactcgactgggacattaacttacaatcaggatgggagggtttcactgggtactgtgccgctcaggtttactcaagtttgcgctcagaacggaaccattcagacatcggacagaaccaacaaaatgtacattcaggagattcctgatgacgttttggatgcgtgggatagtgtaccggtccgtatgtacaaaatgaaagatgcagtcgcagaaaaaggggatgccgcccgctggcacttcggcaagattgcacaagatatcgaggaggcgtttaaggctgccggattagatccatttgcctatggtgtgctctgctatgatgagtgggatgatattaaggatgctgatggaaatgttattgcccaggccggaagccggtacagcgtccgctacgacgaggccgcgcaacttgacgcagcagtgattcaaagaaagctaagcacgcaaagtgtacaggcgcaataa

SEQ ID NO: 80158 - DNA, 2751 bp, Citrobacter koseri
atggctaattcatatctgaatattcctgttcccaccccaacacagaaccacgtaccgagcattgatattcgtgatcatgtttttggtggcgcaaaaattgacgagtttgttacctctactgatcaatattatgtagatcgcttcgggaacaagcacaaaaccattacagggatgaatgacgaatttggtgaacttattaatcagtatgaaatggagttcattgaaacaattaattccgttggctgggtacagatgggtaactatgcttcaggtatggtcatctcatcacgaaaccagatcgtgttttacaacggctactggtatgcatggcgcggcgacttgccccacgaaacatcaggcgcaacccctgatgatgatggtgggatttggtcggaggctaatcctgatggtatgtgggttaatgtcatcggcattgaaaacaccgcatccgttgaaaaagccactggcctgaagattttctcaaaagttggaaatgtcgttgttggggacagcattacaagcacaggaaaccgcttcgctgttgtttatggcaacaaactgcgaatgctcacgaaccttcccgccagcggaactgttgagagcattgatgcttccgcaaatagcatcactatcggcgggaaaaagcactggatgctggagtattacggtgatgctgtaaatctctcagaaccggtggttgttggctccggtgaaacaatggtggtaagcggttccccggacatgcacggtgcgtccgtcaccggcacgggaacggttgttggtgttgttggtaatggcactgacatgggcgtgtttgatgttaaagccaatgttgttaaagcatctgagcgcgacacggcattcctgaccgcagacattatcgttgatccaatgctaagcactgctggcgctgtcgctacgctttcagatgcgcttgccgccgctgctgcgctggtaagtggtggaagaacggcagacattaatgtgcttttgcgtgcaggtcggcatgaaatatctccgattactatttctgatgagcacattcctgggttcggtaacctgtctgttactgttgatgacacgacgattgttatcaacgataacacgattgttcttggacagaacagtgaaggccgtcttatcttcaaaaactacggtcgggaaaagccggttatcacaccagtgatgaattacgtatcatcgtccggtgggcagccatataaaacccatcatcagcgcgttgcgaacgtgagcggcgagccacatcttgaagcatacgacgtctacatgaatcccgttaaagttagcgataactataacgagaagacagggaagttaccgcggaatgtgaataggcgtatcacgcaggttgttgacaatacatttacgctcaaacttcaggcaaatgatgctataggtatgacttcagaggagttgagtagtgtggcgctcagaattaatcacaactacagttcgtcatggaataatatcatcacattaacctctgatgggtcgattatttacacggcgcaaggaccatggaacacccttcctgaagatcattactttgatggattctattacgcaacaggcttttcagctccatattggctaagaaatgccacttatttgctaagcgaagacacatattgctgcaacagctcgcattggtacattccaagcaaattaaatggtatctactaccctgatgcattgtacggattctatattaccgtcagtacttcgagcgttacattttctggtattgactgtgcattttttgacataccaaaaacatcattggaagcaatctggtctgaacgatttcagaacgccggagccattgatatatcaaactcatcagcatgcatagtggagaagttcaaggccaggaacattactggaatgttcatgaaaaccagtaaaaattcgtcatacattaatgattttgagttggaaaatattgggtgtagtgggtttatgattgccaatgtgtcgcataactctaatatggttatttcgaattttaagatcgataatcttgggaaatacagcgtggcggcaataggggtatatactgtcggatataacgtcactgttgaaaatggcctgattcagaatatcgggttcgctggcatttctgctgattcatcatggcaagatagcgggaatgtaggaaatcttgtatcagggctttttagtaatgtacgagtaataaatgtagggaagagaggaggtaaaacatcagacattcatcttgcatcagattttggcgctataaatatcaatgcaaaacaacttgctatagattaccatttcacgagaatttacgtgaatgatgtttctggagccgtgaatgtcaggtcgctatttcttgacgatggtgtcaatgggttcagaataacagattcatttgttggcgctgtagatggtcaatatgcacttgattcccgccaggttttagatggaacatttaacaatatgtttgtgaacttgattattcttggaaatgtcaggcttcactccctgacaaatactagcctgcttactggaattgttgctggagaggtaaatgcgttagatacgaacggaactatagcatttaaaccaagcgcatccccttttaggtttgagagaaggggggatttcgttacagcaataccgcttagcataaacaccagtgccaatattactgattatttatctcagtttgtggttggtaactcactcttaactgcgacaacttattaa

SEQ ID NO: 80159 - DNA, 2943 bp, Citrobacter koseri
atggcaggtgagaagagcgccggtagcatcgtttatgaaatcagcgccgacgttgagccgctgctgcagggcgggaaacaggccattgatgctctggataaactgggtgctgcagcccagcaatccggcaaaggaatggataacctcgaccagagtacctcccaaaccggatccgcatttactgaactggctggttatgccaactccatggataaccagttgcgcaagctgaacaccaatgtgagcgggattgcgcgtgctatggaagatgctcgcagtggtaccggaggtgctaacagcgagtttaatcgcgctgaatcaattatcgaggcgctgggaaatcagttggctgttctggatgaagcgcaagagaatggtgcgcggagtgccgctgtgctggcggcacaacttcgcgcagggtcaaaagctaccgacgaagagaagcagaagattgggcagttgactggccaacttttcgatatgaagactgctgctaatacctctatgggcagcaataaaggctggaaagccagcatgcagcaggctggttatcaggttcaggacttcattattcaggtccagggcggacagtccgcgcttgttgcattcgctcaacagggatctcagcttgctggtgcatttggtccaagtggagcggtgtttggtgctgttattgcactgagctctgtacttgctggcgtactgatcacttcgctaaatggtggcaagaacgccatggatgcgctgaaagatgccgccgaagcaatggacaaagtgatcaccgtttcccaaaacggtgtggccgcgctgtctgataagtacgccaatcttgcacgtgtaaatgctgaggccgcgacgatccttcgcaatcaggcaatgattgagtacaacgctgccatagcgaagatcccaaaatccatcaacgatgcgtccaactctatcgttggctttaccgacaagttgaaaacttcattcatcggcggtattgcgtcgattgatgagttcaacaaaaacctttctaccgtcggcgtaacagctgatacctactcggcagccatggagcaggcaaggaatgccggggctaagttcacagtaaatgctaacgccatacagaacacagtaaccacgcttgctgataaattcggtatatctgaacagaaagcgtttgagcttagtaaacaactttctgatgtggctaataatccatctcctcaggcgcttcagaaacttgttcttgagctgcaaaacactgaaagctcgactaagtccgggacggaagctgttattgcgttcttgaagccattaactgagttggttgcggttgccggtcaggcagcaatcaacacggcaagcatgagtaaggagatcgataacctcaccgctgggcagaagaacctcataaagcagtcagagcgtaatcttgccctgtcaaagctacagggagaggcgcgtgcgcgattgcaggcgcaatacgctgccgaagatgccgggttcgcgaaggatgatccgcataccaagcggatgcaggatgacgctgccgctacgtataaaaatacgcaggcgcagaaagatctccagtctcagcataagaaaggcgcatcacaggccgaatctattgcgcaaaaactggcaaacctgaaacagcaatcagatctcgctgccgattcaactaataagctgagtcgcgagcaggcgattctgaacgcgcaacagtcactcggaaaaggtgctacgaaagagcaaatcgcgctggccggtcagtacgcagcaaccaaatgggacacagctaatgctatcaaggcgcaagcaactgctgagaagttactgccggaagcgcgagaaaattccagttacaagcaggatgttgaagatctgaatactgctctgtctgcgaagaaaatcagtcaggaacagtacaatgaaacatcagaacggctggaggccacccaccaggccaatcttgcaaaaattcgtgcgcagcaagcggtgactccacagcaggaagcagtaggaggaattgatcctgtccagcaactggcaaatgagaatgctcgcaagcttgcgctgattcaggcgttcgagcagcaagggcttatagcccatgaaaatgctcttatgctaagaaatcaggctgatatgcaatatgagcagcagcgtgtagctgctcaatgggcgctgtttactcaacagaacattggatatcaggcgcttggtgcgaccgtcgacgcctttggcgcgcaggcatcaaatgcgttaacggggattatcaccggaagcatgtctgcgtctgatgcgttgagatcaattggcaatactattctcaacgacgtgattaacacatttgttcagatggggatccagcaggcgaaatcagccattatgggtgccgcagctcagaacacagctatcgcatccacgacggctgcgcaaactgccagtctggcaacaacaacagcagccagtacggcgtccgccgcaacaacaacagcggcctggactccggcggctctcgtcgcatctatcgggtctttcggtggtgctgttgcgattggtctcggtgctctggttgccgcgctggcggttggcaaaggcctggcggggaaacgtaagaacggcggaccagtatctgctggctcgatgtaccaggtaggcgagggtggcatgcctgaaatctaccgggccagcaccggtaagcagtacatgatccccggtgataacgggaaagtcatcagcaataaggatatgacgtcgggagtcggttccggcggcgttgtggttaatgtgaataactacacgtcagcagatgtgcagacgcaaagcagaaacgaaaacggaactcagtatgttgatgtgttcattcaggatatggaaacaggcgggccgatgtcttctgcaatgcaaagcacatttggcttatcgcgacaggcaaacggagatctgtaa

SEQ ID NO: 80160 - DNA, 672 bp, Citrobacter koseri
atgaccgctttaaccgatattggcgaactctctatcagcgacagccgagaaggcgggaaagattacctgctacggccttcattcgaggccatgaccaggatcggcactccggaagaaattgtacagacgtacgccaccatacacggcagtgacattgctcagttgattgaggtgtgcgctggcacgctggggcgctttcctgactggctatctccatcattcaaccgcgccgctgagaagctgttatcaacgtgcatgctggtgctgcaatcgtgctgcgatgacgacctgacgccaatgataggcgagtggaaggggtggcggcactgcgtcgtataccggccgggcagattgccaaagaacgacattatcgtgctggcgcagcacctcatgcagcacggcatcgtcggaaaagccagggttcgccagttgcagcgccatgaaacaggcgagcgcacaaaagagtttaaagcattcgactacatcagcgcagctcgcagccacttcggcatgaatcgcgccgaagcctcgcagttaacgatgaccgaatttcagatgctgttggcggcaaaatacccggaccagaaaggcttcactcgcgatgaatacgacagcatcgctgacgaatacctggctaaacaggccgcacgcagggcaagagctaagaaataa

SEQ ID NO: 80161 - DNA, 744 bp, Citrobacter koseri
atggataattgccagaactcgaacgagcgcctgttcggcggtgcggtcgtgctggaagtcgccgatggctgcccggacgtcaaaccactcgaagctgagtggatggcactggccgctggtacgtcgaagggcttcgacttcaacccgaactcggttacctctgatgctgatgacggcggcggctatgtcgagaccatcatcaccaacagtgacttcaccctgagctttgaaggtgaagtgcgcaaaaaggacaaactggatcagtacggtgtcggtaagtttatcaagtatttcgctgacgaactgaaggccaagcgccagcctggtatctgggtgcgcatggattatggcccggttgaattcatcggctacatgaacatcacggcgctgagctctgatggtggcaccaacgacatcgtaacgttctccactgagttcaaagtcggcgatgcgagcaccatcgaagttaacgaattggctgctgtggctgtaactggcgtgacagtaacaccggcaaccagtaccggcgcggcaggtggtaccagcaccttcaccgtgaatatcgcgccaaccggcgcaaccaacaaagacttcactgtcgcatcaaccgatccaaccaaagccacggctactgtttccgggaacaccgtcacagtgaaccgcgaagcgaccggcagcgcgcagatcatcatcaacaccgaagacggcaactttgtggccgtgcatacggttaccgttacctaa

SEQ ID NO: 80162 - DNA, 384 bp, Citrobacter koseri
atgacgcctatgatgcacgagcgggtgcgtaacatgttcgtcgacgccgggctaacgaccggcttcacggtccagcagttgatgtacgacgacccgaaggacttggctaaagccataatcgtcttcagaccaaacggcggctcgaatatccgtactgacctcggctctgagtatcacgtcctggtcgatgtcgtaggcgcgaaagataagcgcaaagacgctctcaatgctgtgctgcgcatcgtcgattacgtccaggccaaccccatggctgacgagtgcgtcggctacatccagaacatgggcgcaatccccgcgccggtgctcacagaagaagggcgaatagtcttccgactccagttcgcctgcacttacggcgaatag

SEQ ID NO: 80163 - DNA, 465 bp, Citrobacter koseri
atgggcatcaaagtgaagggcgtcagccaggcgaagaagcatctgaacgatgtcatcaacgacgtgaaggggcgcaaggtaattcgcgcactacagtcggcgatgatgcttatcggtacccgggcggcctattacaccccgatcgacagctcaacgctgattaacagccagtttcgggaaatcgatgctggcggcgtgctcatcaccgggagagtcggttactcggccaactatgccgcgtacgtgcatgaagcgtcaggcaaactgaaaggtcagccgcgcgcgcacttcggtataaccagcaaccgatctgagttcggtccgcagaaaccgaaagagttcggcggcggcaccggaaagggcaactactgggatccgcatggtgagccgcaattcctgaccaaaggcgcgaatgacgagcgcgataacgttgatgcggtgatgcgcaaggagctttcgctatga

SEQ ID NO: 80164 - DNA, 357 bp, Citrobacter koseri
atgtcgtctactgcttcatggtcatacaacaagccgtgcacgatatggcgtaagggagcgggcggtaatgacgagtggggcgatcctgtcgaaccatatgaaaagcctgaaaccatcatgtgcgactacatcggtggcctgtcagcaaagctcggctcaatcggtaaagaggttgtcgtaaaaaacaccttctttactgcgtttgcgctggctgatgagggcgattacatcctgattggtgttagcgctgagccagacccggtggtggctggtgctgatgaggttcgccacgttacccgctggaacgatactctcgacggcttggaagatgactgggcgataattacgggagtgtag

SEQ ID NO: 80165 - DNA, 174 bp, Citrobacter koseri
atgtcgtggatttcagtgcagcaacggctgccgcggacgtttacccgggtgtgggtgatgaccgacgccgggctggagactaccggctacgtgaaatcggacggcgagtggtttatcaactgcccgcgcatccgggcgactggcgcgaaggtgctgcgctggaaggagggctga

SEQ ID NO: 80166 - DNA, 381 bp, Citrobacter koseri
atggctgacccaatcacagcggcagacgtgcaggcgttcctcggtgaattgggttactccatcccgggcgcgctgctggatccgattctctgcgtggtgaacaaaattatcccgtgcctagatggtgcgggatatgacgaatgcaccgcgaagctgatcctgatgtacgccgccgcgcttatggctacgtcttccggcgctcgccgcatcaaatcacagggcgctccgtctggcgcgtcccgttcgtttgaatatggcgatgacagcatcacatggctgcgcgactctctggcccggctcgatactagcggctgcaccggtgagttgccgatcagcgccggtaacagcgtgggcctgttcatggtggtcggaggctgctga

SEQ ID NO: 80167 - DNA, 183 bp, Citrobacter koseri
atgagcggcgtttatttcgaatcaaagcgacttggcgatatctcatgcacgcacgttaagatcggcggcgtcgaagcgatgatgaagcaggtaggtgatcgcaaagtcatcaagtcacaaggtcgcggcaatgtccgccaagtaaaagctatcgtcagagcgttacacaaaaccatccaataa

SEQ ID NO: 80168 - DNA, 273 bp, Citrobacter koseri
atggcaaaaccagaagagccgtatcgtaagttgattgtagagagcttttacccagccagcatgtcaggcaagaaggggaaagttcatatcaggccgattccaggacaatgggctagcatctcacttgctgttgaatgttctaaaaagttgtcagatgtgaaggtttacccaattggcagccaatttgaaattaccgccaaacttaccgatagggaagatggtggcgagtacatttacagctcattccgatgggaatttaaacacatcaaatag

SEQ ID NO: 80169 - DNA, 516 bp, Citrobacter koseri
atggcactcaccgacaaacaagaaatgttctgtcgcgagtacctcatcgatttaaacgccacgcaagcggctattcgggcggggtacagcgtaaagacagctaaccgcactgcgtccgaaaacctgtcaaaacctgacatccagtccagaattgccgaactgaaagcgcaacgcaatgatctggttggcataaatgcgacatatgtcctgaatcgtctcgttgagattgaccagatggacgtgctcgacatcctgacctcaaccggagagcttaaaccggtgtctcagtggccgaaggtatggaggacaacgctatccgggctggatgtcgtcgagatgtcagccgagggaaataccgccgcactcctcaagaagattaagtggcctgataaggttaagaacctcgagctgattggtaagcacattgacgtccaggcattccgtgagcaggtgaaaactgagcatgtcgttgaatcaatttctgacctgatggattcactgtctcagggggcgtaa

SEQ ID NO: 80170 - DNA, 261 bp, Citrobacter koseri
atggaaaattcgagcgacttgaatgcaattttgaaccaattgctaaacgacgataaagctttgcgtttattgctacttgctttgctgcgcgagaaaagcgttgcaacacttaatatgttcgtaacggaaactgagattcgtacaaatcttggtgtaaataatgcccagaactcagaatctcgagcagccatacaaaaggcaggcgatacagccaaaggaattttgcagacaataattgcagaaaaaagtgcaagcttataa

SEQ ID NO: 80171 - DNA, 528 bp, Citrobacter koseri
atgaaagaagcagtgttagtccaggagttcgacttctctaagatggtgatggctatccaagggagggcgttcacgaccagtcagaagatcgctgattacttcggaaaacgacatgataacgtgttgagaaaaattaggcaggtgaagtcagaatgtcctccagaatttgccgccctcaattttgaggaggctgatttcattgataaaaatggcgaagcgcagccaatgttcaagctgacaaaagatggttacatgttggtagtgatgggcttcactggcgcagcggccacgctaataaaagtgcgatacattcaggcgtttaactggatggcggatcagttgactcgctggcatgagatgggtgagcaggctcagcaccgccatgcgttaaaggtcgccaagtcagaagtgaaggcccgcatcggtagcaagatgatgaatgcacgcaagcgcgaaaagaaactgcttgcgctggaattcgatcagatcctatcgctgacacaaccaaaactgattttcaccgagtga

SEQ ID NO: 80172 - DNA, 477 bp, Citrobacter koseri
atgattacctctttgcttaaacgctactgcttgcagttagcaattgtgtcgctcgttgctgtgttggcattttttgtgaaccactaccgcgacaacgccatcacctataaagaccagcgcgataaagccactgagcagctcggcctggcgaacgccaccatcaaagacatgcagacccgccagcgtgatgttgctgcgctggatgccaaatacacgaaggacttagctgatgctcaagctgaaaacgatgctcttaagcgcaagcttgataatggcggtcgggtgctcgtcaaaggccgatgttcagtgcctacctcaaccaaaaccaccggcacccccggcatgggcaatgatgccaccgtcgaactctctgacgttgctggacgaaacgttctcggtatcagatccggcatcaagcaagaccaaacagccctgagagcacttcaggagtacatcaacacgcagtgcctgaaatga

SEQ ID NO: 80173 - DNA, 306 bp, Citrobacter koseri
atgtggagtaatgaggaaaaaatatatcttaaacagaactatcacaaatttgatatttcgcatttatcaaccagactcggaaaaacacctgctgcaataagacaaaaggcatatgtacttaatttaacaaataaacatgagcgtcggggaaatgaacatcatttaactaaataccctgatgaagacgttaagttaatgaagttgctaagactggaggggatgagggtaaaagagatcgcaaataaatttgaggttactcagagcatggctacacaattaattaaccttcgcagagtggcggattaa

SEQ ID NO: 80174 - DNA, 531 bp, Citrobacter koseri
atgacaatcgacaaacaggcgctgcgccaattagcagagaaagctatctcggcagagggtgtgacttggtggagcgagcaccaactatcacacgaggatggtctcgccctgcatgatacagacgcaaaattcatcgccgctgccacccctgctagcgtgctggcgctgctggatgagctggaagcgctacagtctttccgtaccgcattcaatgagtggcacgataaaacagaatgggtgcagggtgataagcgatttgacgtcattaagccgtggggtaagcaccgcgccgacgttctgaagtcctatatcgatcatctggaatcaagtctgaaaagccgtttattaacaaacgcagatcgagacattgcagcattgcgtcagcgcatagcagaccagcaaggaatcatcctgtcagcacgtcaatttatcagtgaatacgcagcgagtggtgatgctggtgctgatgagttcgtgaaggtaatcgaccgcgccgctggcatcggtaaggggaataaatatgtggagtaa

SEQ ID NO: 80175 - DNA, 516 bp, Citrobacter koseri
atgagcaatcgtatccgcgaggctgaaatattccgcgcaagaactggtgaatatccgattgatatgtacatcaactggattcgtcgaggtgctcttaacttctgtgctgaatatcaacgtgagtacgtttgggggatagacgagcagcaagcatttctgcgcgtcctggtatctggttttccgatcggaagtgttgcgctggcaaaagcacccgactgggatgtctgtgacggcccttacatcgaggttgttgacgggaagcaacggctgacaacgctgaaaatgtttatcgacaatgaaattccgatggtgatcaacggcgaggaaatctattggtttgagttcaccagagctgagcagttgtctttcggtcgtccgactctgagcgcggtaattctcgatgacgctacagtgcgtgaccgtatcgcatactttgttgctgtgaacttcacaggcgttcctcagagcgaagaacaccgcctacaggttctgaaattacaggagcgtgcagcatga

SEQ ID NO: 80176 - DNA, 567 bp, Citrobacter koseri
atgaaatcaacagtggaaacaaaaatcattgagttagtgaagtcagggcatgagctggcgaaagaactgcattgtgctgagtctgccgcgctggtgagcgatctggcaacgcagcttgaagtgcagtttgcccgtagcaatgtgctggctgcaaagctgagcatgattaacggcctcatggaggctgctgaacaggccaacaaacttgcgcaggaagcaacggaaaagctggtacaggagcgtgatgcgctggctgcggagaatgtggggctgaagagcatacaggagtgggcagttgcaggcgtatttaaatcaggagctaaggagttcgagtcaaccaaagcagcaggatttgacactgatgactgcctgcatgatgcggtgcttgtgatgctttctgagttgaaaaccccgacaaccaacgctttcctggatgaagtgcgggcgcagggtgtggagatgctaaacactcaattcaagaagtgtactggaatgctgtatgcagatagcgtcgtatatactgccgaacacttcgccgcccagctttgcaagggggacgcgcaatga

SEQ ID NO: 80177 - DNA, 900 bp, Citrobacter koseri
atgagtaacgtatctaatttagccgaagccagagaggccagaaggctccagcaaccgcgtcaaaacagcggtaaggggtttgccttgctgcaccgtaaaattatggatgtgccgttttacaaggacgctgaagcggctcatctatgggttcacctgctcctgcgtgctaatcacgaacagacactggtatcgactgatgtcggcgatgtgatctgtgaacgcggagagttcatcaccgggcgtaacacactggcaatggaaacgggattgaccgctgatcgcgttaaatcactgctccgtaaattccagaacctgggcatgatcaccaccaaatcgaacaaccgttttactgttctaaaagtggtcaaatatgacgattatcagtcaaatttttgtccagccgatgtccagccagtgtccatcgcaaaaccagtaataccaatgtctgtagatgtggtgtgtccagccgatgtccagccagtgtccacagataacaatataaataataaattactacctaacggtagtaattatgtcgcaaatgacctgcaaaactctgaagacaaaaaacctcgtttgtcatgcgatgaagtatggcaatgcctgaaagacgaacttcctgaagccagaggctggcgctgcctgacagatgagcgccgtaatctgatccgcacattctggggtaaggcaaacaaaatagcccgtaacctggacggtaagccaatggacatggatggctttcgtgattatctccgctacatcgcccagaactgccgctggatgctggaagaccgacctgatcagaaatcaggaaagacctggcgccgcatgaaattcgataagttcctgactgaaaaactctacatcgaagtacgtgagggggatcgtgatgaccgctga

SEQ ID NO: 80178 - DNA, 144 bp, Citrobacter koseri
atgaaaaagctcagtcctgaccaggacaaactacacaaacacatactgcgtgatcgctatctttccagcttccaacagcctggtcgatttcgggctgagttagagaaatggaaaaaactgctgaaggggaaagatcatgagtaa

SEQ ID NO: 80179 - DNA, 903 bp, Citrobacter koseri
atggtgataaccttgacaaacttagatggcgaaattgaaggttttattacgtttaagatcgatgagcttaaaaacaatcatttcccaaactctgatattattgtctattacggtggcataactgaatgggcaaaaaatatttaccaacccgttcttgaagaaattgggaaagaggctctaaagaaaaacaaaaaatctcttgtgattatcctttcaactactggcggatcagtggaatctgtagaaaaaatggttgaaattacaaggcatttttatgaagaagtaagttttatcattcctgattatgcaatgtcagcaggcacaatctggtgcatgtccggcgataagatatacatggattatgcctcatcgctcggcccaatcgacccacaagtacaatcctctgaaggaaaatgggttccagcgcttggatatctggataaagttgaggagatcattaataaatctcgtattggggctgtcacccaggcagaattgatgatgctcaacagcttggatttagctcaattgcgacgctatgagcaagccagagaattatcgaaagatttattaaagaaatggctggttgaatataagttccgcaattggaatttgcgtgagacgacgcaaaacgaagtaacgctcgaagataagattgcccgcgcagaagacatagcaatagctttaagcgataaccgccgctggcactctcatggcaggtttatcggcgttgataccttgagaaaagatctcaatcttcagattgaggattatactgataatgaacgattaagcgaagacatcagagaagtagataaaatgttaactgagtttaggttcagggttcagaaggagatagtcgtaatatcatcttatcctgatgacactttctctggtgagtga

SEQ ID NO: 80180 - DNA, 171 bp, Citrobacter koseri
atgacgacacgcacactggttgagcaagttgtagcattagctgctaacgtacaatcacaacatcagcagtcaatgattaatgacctaaaaaacaatgggttgctaaatccacctaaatttgatttagcctatggtcctatctcattttcaacagtcgaaaacaaacagtaa

SEQ ID NO: 80181 - DNA, 210 bp, Citrobacter koseri
atgagtgatttggagtttggcttaaagatatacgtcttatggtttgtcgggatgtttctgctcggcatagcaatcaactcgctgacgaaaaaagaacatcgccagccactttcaaaactagccattgaccatgttcgcatgtcttccgcaataaccattgtgggcctgattgtgtgcggtatgggctggttcttattcaaggtggtgtga

SEQ ID NO: 80182 - DNA, 159 bp, Citrobacter koseri
atgacagtcacccacaacggcaagcagtacaccgccaaaaagctcaacgataacgagtggcaactgacctccgtcgataaaccccgcgagaaaatcacaatgaaccgccagcagatgaagctggcaggtctcctgggacaggttgaggtgaaggtatga

SEQ ID NO: 80183 - DNA, 396 bp, Citrobacter koseri
atgcaaccttatgaacgattaaccgctgatcgcctggcaagtttgccagaaggatcccgcctaaaactcggcggacagattatcaaactgaccgggcgtggctcattcaccaacagcgccggacacaccgagaatatgattgagtacgtcgattctcgcggcgtacctggtagcttttctgaaagtattttcctggaatctgctactgagcatctcaattctgtgatgtgcgataactgcggcgccaggcggcatccaaaagactgtgtagttcgttctgtatcaacatacatgtcaactcgccagtctcacttttgtgaagacaaaggatgcgctgaacgctacttcctgaaacacccaacccaccataaaacaacgcggagaactcaatggtaa

SEQ ID NO: 80184 - DNA, 156 bp, Citrobacter koseri
atggtaattcagcaaaacggattgctgatggttgccctgctctgcctgctgtatgacttgcagccggcagacctcgaatctctggcacaccagatcgcagaatttgacgcagttaacgaccaccttacggagatgaagcatgttgcgagtaattga

SEQ ID NO: 80185 - DNA, 657 bp, Citrobacter koseri
atgttgcgagtaattgacacagaaaccaccagtctggaaggcagcgtactggagattgccagcgtggatatcgtcgacggtgttatctgcaaccctatgagcgattttgtgaagcctacagaggcgatcagcttcgaggcgatggctatccaccacatcactgaagatatggttgccgacgctccgctgattagtgaggttatccatcgttacctgggtgcacaggcttacgttgcgcacaacgcaaaattcgacaaatcgaaattgcctcaaatcgatgcgccgtggatctgcacggcaaaactggcgcgtgtccttctccctgaccatccaagccacagcaaccagtatttacgttacagcctggggctgaagcctgaactgcctgaaggtttgtatgcgcaccgtgcgctgtatgactgctatgtcaccgctgagcttctcctgtatatgggccgtctggcgaagtggacgtttggcgaaatgcgggccatctcaaacagcccgtcgctgatcaaggcaattcgcttcggcaaacacaagggactgacattcgaagagatctccagaatcgaccctggttatctccgctggctgtcaagcaacagcgacgacgaagacattctcttcaccatcaaacactggctaaaggggtga

SEQ ID NO: 80186 - DNA, 666 bp, Citrobacter koseri
atggcggtgatgacactcatccttgccgactccgggtatggcaagacgtacagcatccgcaacgttaacccggaaaacgccattcttgcacgctgtattcgtaaagcccttccctttcgcaatactggctggaaactccacggcaaacgcctgccagataactccattcagcgcggtaacgtggtggatatccgtaatggccgccatctcctggatgtcattcgtaacgcagctcaaagcagccgaaagatgctgatcatcgatgattttcaggctgtcatgcagcacgaaaacatggaccgggcttacgagactggctacaccaagttcaccgaaatggcagagcatgcctggcgcatcatcgaagctgctacccagctaccggacgacttccgcgtctacttcctcgctcacaccgaagagagcgaaggaaaaatcaggatgaaaaccgtcggaaagatgcttaacgaaaagcttacacccgaaggctacttccctatcgttctgcgcatcatcaagcgcgatggcaaacaccttttcctgctgaagggcgacgataacgacaccgtgaaatgtccacctgacctgttcgggccggaagtgactgacatggataacgacctggcggcattcgacaacgcaatttctgaattcactgacttataa

SEQ ID NO: 80187 - DNA, 669 bp, Citrobacter koseri
atgaaccaaccaatcagttttacctggaatcaacaatcggcagaagcagcactcaaagcaggttcttccgctggcatttccgaaactggtgcttacgagggaaacattacctcggcagtgtatgagttcggcaaggatggatcacagtcgcagacgctggttctttcactcgacgctgacggacagaaagcgaacttcctgcgcattaacttcctcggtcgcgacggcagccagacgttcggcatgggcctgatcgccgccatcatgtgggtcgcgcaggttaaagatgctcaggcacaacagcgccagggacaaagcgggccggaatggtgcctcccggcactggaaggtaagcgtgtcggtttgttcctgcaaaagctccttactaccaagcaggatggcagtgacggctacaaattcgaagtacgccatgttttccagccgggttctcgcctgacctacaaagagttcaccgaaaaaacacccgcagaagtgatcgccacacttgaacgcaccatgaaggacaaagatgaccgcaagcctcacgattcttcacgcggcggttggggcggaaatcagcaggacccaaacgctgttcctgactcccgattacagcaggccatgcgccagcaatcagcacctcaattcgacgacgatatcccgttctag

SEQ ID NO: 80188 - DNA, 885 bp, Citrobacter koseri
atgaaatacggaagcgtgtgcagcggcatagaggccgcaataccggttgaagagcctgccctgcgcaactggcagcgcccgttccttaaatgggctggcggcaaatattctctgctgcctgaactggatcgcctgatccccgcagggaaacgccttattgagccttttgtgggtggcggatcggtatttctcaactccgaaaaacacgaatctttcctgcttgctgacgtcaatgcagatctgattaacctctatcagatgcttgaagttgaccacatccgggttttgtctcatgcgcgcgtactgtttcagcactctaacagcgaagaggcctacaagcagttacgagaggacttcaacgcccagcgcatgagtgcgcctgagcgtgccgctgctttcctttttctcaaccggcactgctttaacggcctgatccgctacaaccgtgatggtttctttaacgttggctggggtaagtacgaagcgccctatttccctggttcagagataaaagcattcaaacagaaggcgcataaatgtgtgttcatgaatgccggatatcgcaggactttggcactgtccggtgaaggcgatgtcgtttactgcgatccgccgtatgagccgatgcccggcaccgcaggtttcacaaattacgccgcaggcggtttctcatgggctgatcagatttcacttgcggaaagttgtgtggcagcacacctgcgaggcgcgaaggtgctaatcagcaattcaacagcacctcgcgtccttgagctttacgagcgccacggtttcaccattcaccatgtatctgcccgtcgcgccatatccagcaagggcagcaccagagaaatagcgcaggatatcgtcgccgcactgggagtttaa

SEQ ID NO: 80189 - DNA, 1245 bp, Citrobacter koseri
atgagtgaagcagcaatgattattgtcccaacggatatcagcaccatggttcgtgaggttgaggttgcctatagccgatatctcactgaatttcgcattccatccgatcacaaaatcgttgtgaattattcggcaggaaaagacagcaccactactctggcgattgctcatgcactgtttggtgaccgcgtacaaggtgtgatggctgataccgataacgagcacgaactgacagttgaatacgccagaaccatccatgaacagatcggctgtaaaccagtgcggttcgcaaaacggatctacacagaggacgactttgctaagcgccgcgcatacttgaaaaagaactggcctaaacgtcaggtcatccgcatgggggcataccgtggaatagtaatgccttcattggcgcgatccgatatcaaattcggccatgcgtggctgcgcactgctgaacggtggaggattgaatttgagactcctctagatgccgcgctatccgtaatgcatccatctggaaacagctttctggacatggctctactccacgggaaattcccgatgcttcgcgacaggttttgtactgatgaactgaaaattcaggcagcatatgaccagttcatgcagccaatgttggacgacggcgatgttgttgttcagtggtctggtgtaagggctgatgaatcatcaaagcgcgcaggatatgagcgtttcgcccgcgatatgagggatgaagattatttatataacttcctgccaattcaccaatggaatgccaccgacgtttttgcgcttcacaaatacatgggcatcaagccgaacccgctttatacacagggtgccgcacgtgttggctgcatgaactgcgtgctctgcaccaaagaagaaatagcagagacagcagcccgctggcctgagcacatcgaaaagcacaaggaatgggaactaaaagttcgccttacctcccgctgggtgcactggatgagtgttggtgaaataagccaacgctggatgaaatcattcgatcttcctcttggccgttcggtacaactatacggtctgacaccagatatccagcatatcgactggtcagggttctatggaccgcgtgcaaacctgaatgcaccaggtgtagatgacgttgttgagtgggcaaaaacaggacgggggggcaaagtttacgacttggtaaaagccagtctcgacacagcagtttgctcttcccgttacggtttatgtgaataa

SEQ ID NO: 80190 - DNA, 219 bp, Citrobacter koseri
atggccgacattatcgacaccgcagcagagattgaagagcttcagcgtaacgctgccctttccgctcacagagtaaaccgcaacgccgtatcagctgagcattgcgcggaatgcggcgaggatatcccggatccgcggcgtgctgccgttcccggctgccagacgtgcgcggagtgccaatcagttatcgaactgaagaataagcagaggggaatgtga

SEQ ID NO: 80191 - DNA, 381 bp, Citrobacter koseri
atgtgtgatatgccagcagtctttgggcaggagcagcgaaaggcccgcaaagagcataagtgctgcgagtgtggagtcacagttaaaccaggcgagtattacacctattcgcacggcgtatgggatggaagcggacaaagcttcaaacaatgtctcgactgtgctgaggtatcaagcgccgcggctgcatctgttgatgacccggaagatggccctgcatttaccggtttgcgcgaatggttcatgggttattcatgtcgcgaatttaacggtgatgaactggttaaaagattcgcctctgacctgaatgtagacgaaaacaaaatccgcaaagttttgcgaatggggccagccaatgttcaggataatccatcccggtag

SEQ ID NO: 80192 - DNA, 243 bp, Citrobacter koseri
atgggaatgatgacattcgtcgttaagtttgaagatggtaaggaaccacctgtgggcgctggaatggaagtagcaggaggccagatcgttgccgcttcgtggttcgactaccgggatgatttcttcacaggtgagcaggtagatgtaatcgctaaggcgcttgaagcattaaatgaccaaggtgaaattagcgacgaagactcctcatcattgttggaaaagatcgaccttctcaccctgtag

SEQ ID NO: 80193 - DNA, 534 bp, Citrobacter koseri
atgatcaccgggaaaaccgtgggaggcatgcagctttatccgcgtcgtaactgcctggatcgggaaacagcgctccgaatgtggacggagaacgtcacctggttctccaatgaagaaggtaaaaaaggccgtattcaggccggtcagttcgctgacctcattgtgccggacaaagacttttttgcctgcgccgaggatgagatctccttcctgtcttcagaattaacgatggtgggcggaaaaatcgtctggggggcgggtcctttcgaatccctggatgacaatcctgtcccacccgcgatgccggactggtcgccaacgcgcaccttcaaaggctacgccgcatggggagagccagaaggcgcggggaaaaactcgcttgccgtacgacaaatggcgatggcctcctgcggttgctctcacggctgcggcctgcacgggcacgatcatgctggcgcatggacatccagcctgccggtatcggatctgaaagggttctttggcgcgcttggctgctcctgctgggctgtctga

SEQ ID NO: 80194 - DNA, 2424 bp, Citrobacter koseri
atgattcgcggttccgctaaaaaaggaattattgtgttttgtctgacggcaatcgctttcagtatacgggcggaaataatgccgacctctactggaacgatggagttggcgagagcggtatttgatactgatgcattagaatctaatggtctcgatcctgtgattgctgattattattccttagcgtcccggttcactcctggtgtccataatgtgaccgttattattaatggcaagaaacacagtgtcatgtcggttaagtttaatgaggaagggcagccctgtattgataaagcatttctggaaagcgcaggactcatcacgaaaataaaaagagaaacctgcccgctgatccatcaatactggtctacggcaaccgttagcgctacgcctgaaacagaagaaatgtcgctggttgttccgcaggaagcgattgatccagataataaccgacaggtcgcggacgttcgcggtggtcatgccgcaatgctgaattactccatgtttggcacgcattataaatatgacggcgataattcagaccgctttcagtcaacgtttgaacttggttttaatgcgggtgactggattgtgcgcagcacgcaattcgtcagcgacggcagcgaccaggaattagagaccgactcgtattatacctacgcgcaacgcactttcgccgactatggcgtgatggtgcagggcgggcaaatcaacattgccaacagccgctttagtattccatcggtctacggtgtgcaagtcatgccggataataccctgctgccgaacgaggggagcggcatcgaggcgacggggatcgccagatattctcaggcgcgcgtggatattcgccagggcgggcagatcatctattcaacgcttgttcccgctggcccctttaccttaaccgatgtacccattgctaacctcaacaccgacctgaatgtcacggtgacggagaccgatggaagcgaaagccattttaccgtatcggcgagcacgtttcgtagcaaccatgtcggcagggcgccgggcttttctctggccgtggggcgtgcggaagatatggacacgaattttgagcagccctggattgtgtcggcgtctgatggctggtcagtgaataatcgtatgaatctcatggccggaatggtgatggcggataaccactattacggtttctctgccaatgtggataccgttcccgtacagaatttatatgcctcgctcgggtttcttgggtcgatcgataaccgtagccagactgatgggcacaaaaccacgctggatcttgggtattccttgccctgggggatggggatttcgctgggcggcagctacggcacggcggactatcgcgaaatgcaggaactgtatagcgacgacgatgattactccccaacgaaatacgatacgaacgtcgcggtcagttggtcggatacgcttctggggcgtttttcactcggctactaccgtaatgaggcctgggacagcgactataatagccgccgcattatctcttcctggtcgcaaacctataaatatttcagcgtcagcgtgaactgggaatcggatatcagtcgtggggatgagagcgatcacgatatgttctacgtgaacgtttctgttccgttaggccgtaccggtgtttcaacgaactcgtggtatcgcgagagtgaaggaagaagctcttatggcacgcgggcgatggggtcgctgaatgacgacaaccaatacacggtcggcgtgtctcgcgatcaggacgaaagtgttaccgactgggatagctcgcttaacagcaatcttcactataccacgctgtccgtggcggctggcggcgataacgacagcaatacgaactactctgccgcattgagtggcggcattgtggcgcatgacgatggcgtgaccttctcaccgtatccggtcgcggacacgtatgccattacccaactggacaagcctgttgccggtatcgaaatcgtgacgtcgcgcgggcccgtctggaccgataaatggggtcaggccgttgtcccgtcattgacgccgttccatgaaagtacgctggaactcaatacccaaagtcttccgggcaatcttgacgtcaataatggccggacggcgattaaagcgtcgcacggggcggtcgcgaaatggcaattcaccacgctgagtcagcggcgcgtgctgctctctgtcatgcgtgcagacggtactccgttgccgaaaggcgtctccattgtcaacgacgccggggaatacatcacttccgcgccagaggacggtttgatcttcctgaatgatatctcagcaagccatcagctgtatgcgaaggtggacggtggacgatgcaaactgaactacaccctgccggaagccgatccgcagaaattctacgaggagataaaagggaaatgtctctaa

SEQ ID NO: 80195 - DNA, 576 bp, Citrobacter koseri
atgaatgttttttttaaaaaaagcctgatggtgtctgtgctggcgctgacggcttcttccgttatggcggcaccgagcgttgatattaaagtatcagggaaaattgttcctgcttcctgtattccgtcattcccaagcggcggcggtatcgctgattttggcaccatcaaagtggcgtcattaaattcaactgcgccaaccgcactgcctgacattaaaaccgtgccagtcgccattacctgtgaagaagatacgcgtgtcggcgtttcttttactgatatgcatagcgcttctgtaccgaccaccggttatgccattaatttcgcatcgactgatttcatttcttctgctaattatctttttggcctggggctgtacggtagccagaaaattggggcatatgcgctgggtattcagattgattcaggaacgctgactaacggcaatggcgataacctgattgcctatttctcagcaaatgacggcactacctggggaacaaaagcaggcaacagctatatgcagattataaataataacagcgaggtttacagctttggtaaaagcatcggctga

SEQ ID NO: 80196 - DNA, 375 bp, Citrobacter koseri
atgtcagatttggcaatgaaggttttgcagtggcagacgaaaggcgacgttggtattagcagcgccacgatggcatccattgctttaggtttggacgagccattctacggcagttatttcggagcaccgcacgatccatccgacatgttgcgttgcatgaaattgctggaagccattccagagattcgcgaacacttccctactattgctgagagagtgccgaccttcaaaggaattattgagaaatgggatgagttggttgaagtgatgagccgtgagtgcgttggtgataactggcgagcgcctgacgcatacaagatgattaaggaattacgaggagacgagattaatcaccgaatcttcacgtttaaatga

SEQ ID NO: 80197 - DNA, 231 bp, Citrobacter koseri; identical to SEQ ID NO: 77458

SEQ ID NO: 80198 - DNA, 1080 bp, Citrobacter koseri
  misc_feature (1061)..(1070): n is a, c, g, or t
atgggacttccaagacaaaaactcaccttcgagcgcattcgaaaatttgctttatctgaaggaaaaacccaggcatttctttgggatgcggacgtaacttccctggcatgtcgggcaactcgcggaacaaaagcttttgtgttccaaagcgtatatgcgggaaaaacccttcgcatgaccattggcaacattaacgattggaggattgatgatgccagggccgaagccaggcggctgcaaacattaatcgatactggaatagatccgcgtatagctaaggcagaaaaaattgctgaagcggaatcacagcaggctgaatctcgtaaaacgaaggtaaccttcacaagcgcttgggaagattaccttgaagaattgagaaccggaatcagcgcaaaaactaaacgcccatattctactcgatacattgccgatcacattaacttgtccagccgtggaggggtaagtaaaaaaagaggccggggcccaacctcggctggaccattggctagcttactcgacctaccgttatcggaactaacaccagagaacattgccgcatggctaagtacagagagacaaaatcggcctaccgtcactgctcatgcctaccggctgttgcgtgcatttatcaaatgggctaattaccagaaaaaatatcagggaataatccatggcgatattgcacaagatcataacgtgagaaaagtggttccagtatcagcgagtaaagcgggagattgcttacaaaaagaacagttaaaaatctggttcagtgccgtacgtagcctcaataatcccattgcatcggcctatctccaagtacttttgctcaccggtgcacggcgtgaagaaattgcgtcacttcggtggtctgacgtagatttcaaatggtcaagcatgaggattaaagacaagatcgaaggcgaacgtatcatccctctcactccttatgtttctgagctgttaagtgcgctagcgcaattcccaaattctgacgtaaataaggagggttgggttttcagaagtaacagcaaaagtggcaaaattattgaaccgcgttnnnnnnnnnnctcttgctga

SEQ ID NO: 80199 - DNA, 534 bp, Citrobacter koseri
atggctggcgtcgtggagcacattgacggcaacgatcaggtcgtaacccgcctccgggtgggcggtgaaatccagcggctggttgatgtcgaacaaggcataagacacccgcgattcatcatggaaacgggctctggcgtcattgaggaactgcgcggagacgtccgtgaagtggtacgactgtcgcgtgttccgcgtggccttcagcaccggcgcggtagtggctgcggttccggcgccaacctccagaatccgttctgcgccgcacaaggcggcaatctgcgcggtatagcgattcagacaggcgctggcggggttgtcgcgatacagcgcgtcagtcacgcgatgctgctcgttgaacagcaattccagcggagaacactgcccggagaagagggcgtcgtgccgggcgatgcaggtttccagatactgcgccagcgcctggctccattggcttggcgggcacgcttcctgaggctcaggaatctcgctgagcggaacgcggcagcgccagctttcaccctcgcggattaa

SEQ ID NO: 80200 - DNA, 609 bp, Citrobacter koseri
atggcaatcgtcgatttcgctgaccaccagctcaaaaagaggccactggtcggcaggcaaaacgcgatagctcagttcatgccgccgtttttccagcgcgatgcgctgttcttccggggaaagcgcgcgcagatcgtcgcgctggatgtgatactccggcgttgtcgccaggactcgctgctgcccgtcggcatcaaccaccatgcgcaacatgtcgtggcgtgcgataagctggttccatgcgttctccagtatggcgagatcgaactcatcgtggcgtttatcccactcaaacaggacgtgacaggcgacgccgccatagccaatgaggtgggttcgccccagccagtaggcgtgctgaatgggcgtcaaagggaagggcgcataacgctcgtcggcgtcgtgctgcaacacttccggctgcgaagcggcaggcgtcgtctctggcttagaacagataagctgcgtgagtccatgaggagacagatcctgccacgcccgttccgcattgatgcgtacgcccaggtagtgctgaatatcgctactgagttcaaggaagagcagcgagtccatgccgagttgcaacagatcctggtttggacgcagtga

SEQ ID NO: 80201 - DNA, 306 bp, Citrobacter koseri
atgggcgctctgacccggcgcgccgagggtggcggcagcggaagagtagagaataagatagcgtccgtcgtggttgcgcagggtttgcaacagctggcttgccgcctgcgcttttaccgcgaaaacggtggccagctggtggtcgtcaagctccagcaagggcgcgtcagccaatacgccagcggcatgaatcgctccggcaatgccgccgttggccgccagatcgtcaagaaccgtggccagttgcccggcatcgcccacatcacaacggcagacgcgcgtctgcccgccctccgcatcgcgtag

SEQ ID NO: 80202 - DNA, 159 bp, Citrobacter koseri
atggcgggtggcgtgaatcacgttcgccgccacaatgagatcgtaagactgtggctggaaaccctgagactgcgcctctttttcgagatccagctcgctatacttcacaaaatcatagtcggcgaatttctgctgggcgcggcgggtgaacagcgctga

SEQ ID NO: 80203 - DNA, 327 bp, Citrobacter koseri
atgatcggtaatgcaaaaagcctcgccttgaggaacaacgtatgccgccagcgttttttctttttcgccgatcgccagaacggttgcttgtttcacccccgccagctggctgagcgcgctttcgatttcgcccagctcgatgcgatatcctccgactttgacctgcttgtcgcgacgaccgaggaactcgattgtgccatctggccagtagcagccgagatcgccggtgcgataccagcgctcgtccgggagcgtcaaaaattgctgctcgctacgcaggggatcgttgaaatagccttccgcgaccccgatgccgccaatccataa

SEQ ID NO: 80204 - DNA, 354 bp, Citrobacter koseri
gtgggcggggacgtcgtgaatttcgcaggcgttagaccagatagacgcctcggtggcgccgcccatcgcgataaattgtccttgtggccggaaggcccgataacgggcggggaggtcaagcccgatccagtcgccggaaagcatcactgcgcgcaggttttccggcgtggcgtcggcgaaaccttcacaccaggtcagcagcatatcgaacagcgccgggacgctgttccagagcgtgacctgatggcgctggatcagctcacaccatgcgtgaggatcgcgccgttgattttccatcaccatcaccagcgcgccgcccgcgcgcagtacgccaaaaatgtcgtaaaccgataa

SEQ ID NO: 80205 - DNA, 150 bp, Citrobacter koseri
atgctcccagtcctccgtaaacgtgagctggtttttacgcgccaggttgctgacggtatcgccgtcgcaggcggtatccagcagaagaatattggtgaagtcggcaagcatcgcgccaaccgccgggtgcagcggctggcggtcgaataa

SEQ ID NO: 80206 - DNA, 558 bp, Citrobacter koseri
atggctcgtatcgcttgtcttggatggggttccttaatttgggagccaagaggtttacctgttcaggggaaatggtctgaggatggcccacttatatccgttgaattcgccagacagtcgctagatggacggattacgcttgtgctagtcgaaactgatcgattagtgccttccctgtgggcgataatggaatcagtggatcttacctctagtattgaggctttgcgttgccgtgaaggtatcccaataaaaaatattgaaaagcatgtttgcaggtggtctgctggtcagccttctccaaaactgatcccaggattgtctgaatgggctgataccaataacgtggaccatgtggtatggaccggtctccctccaaaattcaacggtaaagaaatccttccgacagccgaaaaaattgtgaagtatttagaacaactatctggagaacaaagagatagggcggagcaatacattcgtcgtgcaccgcgtcagatcgacaccatgtatcggcgtattattgaatcatcgctccagtggcattcaacgggcggtgaatag

SEQ ID NO: 80207 - DNA, 810 bp, Citrobacter koseri
atgctacccgaccatttaaaaggtttacatttaaggtcagcaggtttgataaccgttgaaggccggaccataaatgtttgggagttctcgcccccaactgatccggcgattcttgacagttgggcactgcattttcgtcggcaatactgtacagaccaggagcttcctgagctcttgtgcgggacaggaatgacgatagaacagtatctaaatgcacatattttccccgacaaagtcaaggctcccgggccatcaattcgttctggtgatttcgctgaatttctcatttccgactacttggagttcacgctcaatctgtgggtgccccgaggaaaatacgctgacaaagccagcaacaatgagtccgtcaaaggcgttgatatactaggcttccatcagttggatattgctactcccaatcgaggggatgccctttatgcctttgaagttaaagcgtctctttcaggtggtatatatggtggccagctccaaaatgctgttgacgatggttctaacgatcaacacataaggcaagctttcacgttaaacgccactaaacgtaggtaccttcgtgaaggaaagacactggaagtgagccgaattgcacggtttcagaatcctgcagataacccttatacatattactcaggtgcggttgctgttctttgcaacacagctttcaatgaagaagagcttgccaagacactggccaacacgcactcaaatgaggcagcactttatctgatggttgtgagagccgatcttcagatgaaactggttcatgaactttacgagagggcctgcaaatga

SEQ ID NO: 80208 - DNA, 3141 bp, Citrobacter koseri
atgaaggctggattcaatagcaaacgcctctttggcataacacgctcgaaaggtaagatgtacgagtttggtctggatgagtctctgcatctcagaatgcctgaaggttcagatcctctgcagctgtttattatgaccgtagcaaccttgggcgacgttaccggggtgctggctgagctgtcactgccattagtttctcttccccctgagccgcaagcggagctgaatttctgcgccagcttttttgacgcagttctggattcaggatttgcacaaggcctcgaaagcacaacattactattagcctctgccgcctattatgtggctcgacgcccgggaagtagcttagtccttgcccgtcgaattgaacctaaagaagaagacaacaatgttgagcatttgcttcaatggttgctcaaagcggactggaggacttactggcttttagacgacaaacgttatggaccgctgctaacatcgttttcgcgtgctgttgctaaccattttgccgaaggtacccagctacaagagattgatgtactgatgaaactcctcaggaatgaggcttataaaatgggcactcccgaggaagtgctttatgcagatgtcgccatatcgatttgtcgtatgaggcttgcagcatctgcttgggtaaccctctcccaatattcaggtttatcagtggatcattggcggccggtcattcagagggaacgctttcctaaagaactctggccttctcagattcttttaggggaaagagggatattcagaggtgactcgggcttgattcagatgcctacaagtgccgggaaaactaggtcgattgagttagttctgcgcagtgcattcatgtctgggcgcacgaagcttgcggttgtggttgcaccctttcgggcactctgccatgaaattgccttatcacttcggcaagatttggccggcgatgacattaaagtcaatgaactgacggatgccttgcagattgacttcgttgaacaaattgctgaccttctgggaagtgccccgccctcaacatcgaacgtattagtcctcacacccgaaaagtttctctatgtgctgcgtcagtcctctcaggctttgaaacacattggtcttgtcgtttacgacgaggggcaccagtttgatactggcgtgagaggtataacctatgaattgttgctcaccgaaatcaagggattgctgcctgatacagcgcagactctacttatttcagctgtgatgcaaaatccacaggccattgctagctggctgatgggtgaggataaggcacaggttattgacggcgcaacgctattacctacgagccggtctgttgcctttgcaagctggacagagtcgcttggacagttaatgtttcatgaaaatggatatgacaaagaggactactttgttccgagaataatcgaagcggcacagctatcgggaattaaagcagacagctcgatatttccgacccggacgaaatcgagcgacgtatcgctctatttgggtctacgcgttattagtaagggatccgtagctattttctgtgggacaaagttgattgcaaatggtatagcaaaaagggctgtccagattgcggatgcaggatataacacgttatggccttcaacctacgctaatcctgaagaagtcatggcactgaaaactattattgagggtaatttcggtagcaattcctttcttttaaaagctgcaaagctgggtatatacacgcatcacagtaatacacctcagggtatacgcttagcactagaacatggtatgcagaaaggactgattaactttattgcatgcacatctacgcttgctcaaggtgtaaacttgcctattcgctatcttatcgtgcagggagtatatcagggggtaggacgtgtcaaagttcgcgacttccagaatcttattgggcgtgccggtcgtgcagggatgcatactgagggggttgtaatcttcgctgatgcaacagtttgggacagaaggaaaaattggcaggaaggatggaaatttcaaagcgctgtggagcttctctctcctgaccgcgctgaaggcgttaccagttcactccttttattgttaaaaccttttgcactcccccgtaaccaagaattgccctttgctgggggcgatttgctggattttatggataaggaggttgagtgggaaggctgggctaatctggtggcggattcagaccctcgcctcagtaagtcgaaaaaagatgctctagtaaaagcgctgttgagctccttggcagaacggaaaaagatgacgcatacacttgaaagctatctaatggcaaactgtgctgcgatggatgcaaccgcctttgaacagagggccggggaacttgcacgcgagacattggcgtactcgcttgcctctgccgaagaggctgagaaacttgaagaatacttcagattggttgccagacgtattgagtcggttgagagctcacccttaaagcaggcattcttcggcaagacattgctgggcgcaaagcagactaaatttattgaagtatggtcaggcgaacatagagcaatgctgctagcgctggattcctctaatggatggctcaatgccgtctggccactactgaccgagctctgcgacaatcgttttttccgtagcgtcgagcctgcaggtgcagggttcgagatcgccctttcgtggatgtgcggaatgagttacggagaaatcttcaagaaagcatcccagatgcaggttaaaaagaaagccggtaagcgtaaacaaaaagtgagtgacgacgatattcttaagttcttggagagcacactggcatttgattgttcgctcattctggcagctcttgcacaattcctttttagtccagaggaaataatcggagagcaaggggcatcgctcgctcattttcagaagagcctaaaaaatggtctccctgacgcgctatccatgagtatatttgaggcgggatttgctgaccgttttatttctcaagctattcgcgacgctctcctccaggatggatatggaggcagctcatttgatgaggctaggcaaaatcatttaagcgttattgagcaagttgtcaaaggaacccctgcttatttcaattacgttttaagctcatactga

SEQ ID NO: 80209 - DNA, 2709 bp, Citrobacter koseri
atgtacactaatgtaggaagctattggtataaatttgattttcatacacacactcctgcctcatcagattacaaagcgccagcagaaacagcaaaagagtggctcattgccctgatggaaagagaggttgactgcgttgcagtaactgaccatgttagtggggcatggattgatatcttgaagcaagagctaaaagcgcttgaaacatcctatcaagaatatcgcccattaattttattcccaggatgtgaaataaccgtaagcaccgggcaatctagggttcatatattatcaatttttgacccctcttgtggcacagctaaaattaatggtgtgcttggcatgtgtgggattacggaaggacatggagatgcagagtcaacatgcgctaccgaatctgttgataaagtaattgagctgataagcaaggaaaatggaattgctattcctgcgcatattgatggtcctaaagggctattaaagggaataaaaaacaacaactcagaaataagtacatgggcaaaaaaaattgttgcagcagaatttgtcgatttaaacttccttgatagcgtagatgtagaactacaaaagacatttcaagatataggtagagttaaaggttctgatgctcatgaaaagtctagactaggagctaatacctcttggatcaagatgggaaaaccaacaattgatggtttaaggcttgcattatacgataataaattctgcgtaagtaacgaaattgacgatcctaattctctaccaaacctgtcaattaacaacctaacaattaaaaaaatgacccactgtggaattatcccaggaaaacctgttgagataaaactgcaccctctcttcaatgctataattggtggacgtggcgctggtaaatcaacatttgttgaatcactacgaattgcgatgggtagatctgaagagttggtcggcttacaatctataaaaagagatctagattcttttattgatggagttactagagatgataccgaagtcagcgtaggaataaagaggcgtgatgatttatttaatgttatatggacaaaaaataatgacattgaaataaagaaatttgaaaatgaagagtggcaagatgctccgggcaaaccagaggaaagattcaacataagcatttatagccaaaagcaaatcaatgccttagcatctaatcctgaaagtttactaaacatagttgatcgaacaccacaagtagatatttccagctggaaacagaaattagcttcccaacaagttacatcaattaatttagcaaaaagcattagaaaaattgagctgagcgctcttgaaaaaacctctattcaagcacaaattgatgacttaaactctgatatatccagctttgaaaagggtggacataaagatgtttttaataactatcaaacgctatcaaaaaaacaaacaaaaatagaagatagtttccaaatagaaagtttgagcaatgcattacaatcaattattgattttaacacagtccctcttgatttatctaatttaggacatgagttagaaaatgaaaatgaagtaagtgaaattcataaaaatttcactgctgaaattgataaagtcatatctgatatcaaatcatcaaaagcaaagattgacaacattgtacagcaaaccgtacaagcactcgataactctgaatggaaaaaaaatagtaaaaaaatcattgatcggtataaggaagttgttcaaacttacgaaagcaaagggcatgaactgaaccctcaagaatatgaacaatggatcgaaaaaagaaataacacacaaaaacagttagatgaaatcgtagaagaagaaaataaacttgattcttacaaaacagattttaatcgttcgatttccttgagttacatcttacgtagacgcctacaaaaaaaacgagagaaattcatccgttcagtaattgggaataataaatatgttaaaatgtcaatcattccatttggagataaaaataatattgaaaatgatttccgttctattctaggttatagcaatgggttcaattcatccatttatcaagatgatcgtgaagatagtttactttataaagtaataaatgatggtggagatttaagaaaaacgataaaatatatctcagaaataaaggatactatattcaaaattgcagcaagtgaagatgtaactatacatagagtcgatggcagatttaaaacatcgttatgtgaaaaaataaagtcgcagccagaaatattagaaagaataattaattggcttccacaagaccgtttactggtagaatatgcaagagatgttgaaaaagggaagttcgcctcaattgacagaggttctgcgggacagaaagccgctgcaattctcgcattcctgttaagtcatggagataatccaatagtagtcgatcaaccagaagatgatttagataatgctctaatcaataagttaatagtatctcaaatacatagcaataaaagaagaagacaaattataatcattacccacaacccaaacatagttgtaaatggagatgctgagtacataaatgttatgcattttaacggcggtcaggtgcaattactatctgcaggtggtttatgtgacactgatgtcagacttaatgtttgtgagataatggaaggtggtaaagaggccttcaacttaagatataatcgcttacttaaaatgtaa

SEQ ID NO: 80210 - DNA, 156 bp, Citrobacter koseri
atgtctcaatggctggaaaaccgtgtctatctgtctattggaatttgccagcgacagcgcatttgttgcgtttttccgtcaacacacgggattaacgccaacgcgttatccacagaaagttttggacggaatgagtggataactcagttacaatag

SEQ ID NO: 80211 - DNA, 195 bp, Citrobacter koseri
gtgctgtgcggcatctccaccaatatcggcgtagaatccaccgcgcgtaacgcctgggagctgggttttggtctggtgatcgccgaagatgcctgtagcgccgccagcacggaacagcatcaaagcagcatgacacatatttttccgcgtatcgccagagtgcgcagcgtggaggagatccttaacgcgttatga

SEQ ID NO: 80212 - DNA, 1080 bp, Citrobacter koseri
atgaataaaaataagataactcacttagaagggcttcgcggtttgtgctgttttattgtggtgcttgaccattgcgtaaacgctttcttcccagaattaagatttactggagtctctaacttacaagatattattgcatggtctccgctaaacttaatatatagtggaataccctccgtatatattttcttcattcttagtggttttgtattatcacataagtacaatcaaaaaaaagacaataacatattagtatcagcagcaataaaaagatacccgagattaataatccctgtattcttttccatgataataatgtttatatttacatgggcatcaaatgagttatttatgacaaaacatatcttaagcattgaggatgttttcatacagtcatttatatatgcgccattcggtgggggaaaactttccaatggggtattatggacaatagtgtttgaaatttatggatcatttcttgttttttctgctctagctattttcggttgctacagatataaatatttcatatacgcaatattgttctttcttacttttaattctaactattgtctatttatattcggaatggcattaaattcaatgtataatgaagggatttcattcaagttaaataataaattagcatcatacgtagtacttgtagtatccattactttgatggcattccctttcacgagacaaggtgttgagattggtggtatttataagaatttaatgtttttagattctccatatgaaaatcgtattattttatcaaaaattggtgctatgatgttattctggagcatgtttaatcttaaagttctcgttcgcttttttgacacatccatactccaaacaatgggcatgttgtcgttttcagtgtatatacttcatatgcctacattacaatttattcgcaaccttaatattaacacgagtagtaatatagaaaaattatacatcatgtcttttttagttttatctataacaattgtgctttcgtttttatttgaaaaattcgttgacagagcatctgttaaatacacaaatgcttttgcacgcaaggttttataa

SEQ ID NO: 80213 - DNA, 1161 bp, Citrobacter koseri
atgatttataacaccggcacaatcgccattaacggaaatgccgccatcggcacaggcacgaactggaccgcgccagccagccagattcgcgtgggtcagactatcattgtgctgtctaaccctgtccagatgttccagattacgacaatcaatagcgccacttccctgacggttacgccagctgcgtcaccggcactcagtgggcagaaatacggtattctggtatcagacaatctgtctgttgacgggctggcgcagagtatttcccaactgattaacgaatatgatgtgaatatcagcgcatgggaggcttttgctttaacgagtgctaaccagacgatcaatgtcaccataaacggcacacctgtttctattcctgccctgggtaaacttgtacagaaaggggtaaacggtgcagttcctgttaaccaggggggcactggttcaacttctgcatccggcgctcgcaccagtctggggcttggtgacgttgcagtcatggattacgacactcatgtcagaggtgggattgccaataagtcattagaaaacgaagggaattttaattctgcgccacagggttggtctcggtttacgtcgccaaatggtgccccggcttcttccccggaaggagcaacgtgggggaaccttttcacaatctgctctaacgggttacaggcgggtaatgcaagtacatcttttggtggctggtactggaaacaactgtattacagcaacaacaatgtaatatttcatcgcactaaagtgagcgagagctcatggggtatttggtatcagttaacccagtcatcagtttccgatgaggctttaaaaaacaaaggagaaacgctcgacccggaagaagcgctcagtaatgtgaatgctatggatttcctgcatttcacttataaatttgacgagaaaaacacaccacgcagaggtgtcatctctcagcaaatcatggggattgatccacaatatgttaagaaagtcggggagtattaccatcttgacgagacaccaatgcttcttgacgggctggcagcaataaaagcattgcggaagcgggacgaagataacaagttacgcattcaggagcttgaaagaggtattgaagaattaaagagagttgtccgtgagcttgcagatagtgcttcttaa

SEQ ID NO: 80214 - DNA, 954 bp, Citrobacter koseri
atgccggaaggtattctgattgattataatgatggtcgtcccgtcatggaaataactgcggggcttcgcgcccccagtttttgcacttcgttttcaggcgagtcgccgcaaacgtcgcaaacaaatcaatattatgaagttaacacaccgttgatacctgattctcaggtcatcgtggtgccaacaaatccgatttatatttatgactttgcatattacgccattgcaacgatggggagtgttacaagaaatggaaattcaggtatcaggatctctatagaggtaattaatgatagctggatgatcccaaactggtctggttacgttatggaaatattgccagcacagacatataaagaggggctgtttgtatcaagctcgactgattttactgctatatcaaatagctcaaaattaatgacatgtgcatatacagggcgcattacagtaaatggcagcgcacctcttccggtcagcggcattccttttgggaaatgggataacccgaatgtgtcggtggggtttgatggcaccaacatcattgtccgcgacatttcctacaccgggcgggacgacgttgccggaacggcgacgattgatctggtgatattcaatcagacagcaccggttggcggcgatggtatcaccatgaccaacgctgcgggtcaggtgacgttctccactctgaaacggccttttgtatacgaccggcaaatccagatcaccgacgccttccagaatattggcggcgggtactgccagatagtttataccggggctcaggttcggatgaatggtggttacgcaaacctcagaaccaaaggggtggttatgtcaagcggcagcgtcaggtctgcgtacaacagagtcgtgggaaattacaacaccagcctgaacatgacaaagaacagaaacatcaccatgccgattcttattctcccgagcatgtactga

SEQ ID NO: 80215 - DNA, 3132 bp, Citrobacter koseri
atggcccagcagattagcgatctggtcattaacctggacgttgacagcgccaccttcagcgaacaggtagcccgcatcaaggggcagctaaccggaatggctgatgattcagacaaggcccagacacgaatgcagcgtgcctccgaacggcaggcagcagcattaaaaagtgtgggtgatgcaggtgtggcagccgccgcggaaatgaaagctcgtcattctgaggctacggaagggctgactaaagactgggaacgcgtgtctaaatctgttgatgaaacacaccggcgggtgaccgagttcaaccagcggctgcgtgagaatgacgggcaggcggcagcacttgcccggcgccaggatgagcttgcggcatcattttttcgccagatagacggcgttcgtcagctcaatggtgaaacgcagtctcttgcgaacgtgcaggcgcgctttcgtgctgcaagggcacagggcaacattacccagcaggattacctcgcccttatttctcgcaccacggcccggcaaaaagagctacagatcgtggaggaaaaatcggctgccgcgcgtactcgattcctcaaccagttaaagcaacaggtcgtagagcaaaaactctccggtaccgagctgctgcgcatgaaagcagcgcaggtcggtgccagtgatgcagctgaggtttatatccgtaaacttgaggctgctaaagtagccacgcgcgggcttggtctgcaaagcgcagcagcccgtcgtgaacttggcgtgctgatgggcgaagttctgcgaggtaactttggtgccctgcgtgggtccggtatcacgctggctaaccgggccggatggatcgaccagttgatgacgctgcgcggactggggatcgtgggtgttgtcgggggaattgctgcggcagtggctggtctgggtaaggcctggtacgacggcagtaaagagtccgaggaatttaacaggcaactgatccttaccgggaaccacgcagggaaaacgtcagggcagctacaggcgctggcgcgctcgctggccggtaatggcatcacacagcatgctgctgcaggcgtgctggcgcaggtcgttggaagcggtgcgtttagcggtaatgatgtcagcatggtcagcaatgttgccgccaggctgcagcaggccaccgggcaggccgtcgacgaaaccatcaaccagtttaaacgcctgaaagatgatccggttaacgcggtcgcgacgctcaacgattccctgcattttctgacggccacccagtatgaacagattgcctctgctcaggcgctgggggattcgcagaaagccgccgagctggccatgcgtgcatattctgacgccgttatacagcgtgccggggcggttgaggataatcttggctcccttgaaaaagcctggaactgggtgaaaaatgccgcctcaggcgcgtgggatgcgatgctcggcgtggggcgaaatcctgacgccgcgatgaaacgacaggattcttttgctgagtggcaggcagctgagaaagaataccgcgcgctgtccggcaatctcagggtcgacccggattatgctggtaacaacgttctgcagaaagctgatgcggaaaggctgagaaacgcacgccagcaggtggagctgaaaaaacaggcttacgatctcgccgatcagcaatacgcccaggaaggactggcagccgcgcgtgaaaaaatgcggacggaccagcagactcaggctatccgcagccagcagcagtttaaccagcttgtggaatccggggcgacggcggctgaaaaacgtgctcttgcggagaaaaagctcaatcagcttattgtgaagaaccgccaggacgcgaaagacggtatcgccacgctgtggactgaaaaggacatagccgcagcacgcgccggtattgaaaagcaatggaaagatcccaaaacaccgaaaggcaaaagctattcaacgcctgccggggacaaagctgaagaaaaggcgcaggccgaacttctcacgcttcaggcccagcttaaaacgctcgagcagcataccagcgtaaacgacgtcatcagtaaacagcggcaggatctctggcagactgaaaatcagttcaccgtgctgcaggaggccgccggtcgccgccagattacggcgcaggaaaaatccctgctggcgcataaggaagaaacgctcgagtacaagcggcaactggccgacctgggggataaggttgccagccagcaaaagctcaaccaactggccgatcaggccgtgaagtttgagcagcagcaaaaagccgcgagggcgggtttgcgggctcagtctgagggggtatctacccgggaggccgggcgacaaaccaccctgcaacgtctcagcgagagctattcgtacaatcctcaggcgcagcaaaaagttcttgaagagcaaagggcgacattcgaggctgaagatgccttgcgtgcaaactggctggctggtgcgaaacagggctgggctgaatatcaggattcagcgacaaacgtcttcagctcggttcagcagatttcgcagacaacgttcagcggactggcgggccagcttaccagcctggtgacaaccggcaaagccagctttaaggacttcaccagctcgattctgaaaatgattgtgtccgttatcaatcagttgctggtggcttatgccatacagagcgctatggggtgggtgagcggcggagcgaagacccaggcgacggggcagtccttttcggtaccgtcgttccggccttcagggtatgacgtcggcggctttaccggtcatggtggcaagtatgagcctgccggcattgtgcatcgtggtgaattcgtcttcaccaaggagtctaccagccgcattggtgtcgccaacctttatcgtcttatgcgtgggtatgccacaggcgggctcgttggttccggtaatgtgccggttcctgttccgggtggcatcagcgtttatgccccggtcagtatcagccagcagaacgctggtggagaggtcagtcaggccagtaccgccggaacggcacgccagcttcagggaattatccagcaggccatcactgatcgcctgaaaaaggaggtgagtccgggtggattactttactccagggggtaa

SEQ ID NO: 80216 - DNA, 429 bp, Citrobacter koseri
atgttcctcaaaaaagaaccgtttaactaccagggtgaatccaccacgcttaatgagctgtctgcgcttcagcgtattgaataccttgaatttatggctgcggaagaaaaggcactcagcgttgaaagcgacaacatcagcgatcaggaaatgacagcccgtctggttggctcaaacattcgctgcggtgcgcgggtgatagctctttccctgtggcataacgatcccacggggccgacagaagaagcactttaccagcaggttcttaaaggctggccgccggaggcgattggtaaagcggaaatgcaggttaaactgctttccggcatgcttgttccggtttcggatgaggacgatgatgcttctgttaccgctgatgccgaaagcgctgagcctgttactgcggaaaagcccttgccagcgagctga

SEQ ID NO: 80217 - DNA, 744 bp, Citrobacter koseri
atgcctactccaaacccgctggctcccgtgaaaggtgccggtaccacactctggctttataccggctcaggcaacggatttgcaaatccactctcggatatcgactggagccgactggcgaaaataaaagatctgacaccgggcgaaatgaccgccgaatcgtatgatgacacttaccttgatgacaaagacgcagactggaacgcgaccgctcagggggcaaaatctgcaggtgatacttccttcacgcttgcctggaaaccgggagaagagggacagaaagatcttgtcacctggtttaacgatggttcagtacggtattacaaaatcaaatatccgaacggtacggtcgacgttttccgcggctggtgcagcagcctgggtaaagccattccggctaaagaagtcattacccgtacagcgaaaattaccaacactggcaagccggagctggctgaagaaagtggcagcccgaatattgccgttactggcgttacgctggataaatccacggtaagtgttgccgtcggagctaccacaacgctcaacgtatcggttaatccggccagtgcgtcggatgcgtccttccgggttgcaacctctgacagtgctaaagcgactgtttccgtcagcgacaacacgatcaccgtaacgggagttgcggccggttcagcagacatcatcgccatgaccagtgacggtaattttgttgcggtctgcaaagccaccgttacagcttcctga

SEQ ID NO: 80218 - DNA, 402 bp, Citrobacter koseri
atgaacatacacagcgcaattcgtgcagccattctggcaaaactgaaagccgatatcaccgacaccgtcacctggtttgacgggcgccctgtttttcttgaagagcaggatctccctgccgtggctgtttacctttctgacgcggagtacaccggcgattcgcttgatgaagattcgtggcaggcggttgttcacatcgaggtatttcttaaagcctccagccccgacagcgcgcttgattcctggatggaagagaaagtgtatccggcaatggccttcatcccgggtctggccgaactggtcgagacgttcaccccgcagggttatgactaccagcgggatgatgaaatggccacgtggggttcagtcgatttcacgtacttaatcacctactcaatttaa

SEQ ID NO: 80219 - DNA, 579 bp, Citrobacter koseri
atgtctgtgaaaggactggaaagggctattcagaacctgaacagcctcagccggttaatcgttcctgaggcaaccgcaaaagcacttaaccgtgtggccagcagaacgataagccaggggagcaaagctgtagcgaaagaagcaaaagttgatgataaccggaaaaaggggcttccggttcgtctggtccggcagcgttcccgtctacgcaaggcccgccacgatcgtccggtcgcgtcgataaaaatcaaccgcggtaatcttcccgcgataaagctcggcacggcgcgtgtccggctctcgcgtaaaaaaggggccagaaacggagcgggcagcgtccttaaaatcgggccctatacctttcgtaacgcgtttattcaacagcttgcgaacggacgctggcaggtcatgcggcgcgtaggtcaggcccgttatccgattgatgtggtcaaagttcctcttgagacaccgctcaccgtggcattcacctctatttcaaaacgccttattgaaagcgatatgcccaaagaactttccgcagccctgaaaaaccaactgaggatccacctgaagcgatga

SEQ ID NO: 80220 - DNA, 243 bp, Citrobacter koseri
atggatgcggcgacaattcgcacaatgggaaagacagcgatcatcaatggcagcagctatgacgttgttcccgccgagcagctcgaggaaatggggccgttgtcgggaacaggtacttcgctggtggttttctctgagctttaccagccacgccgaaacgacagtgtcgactacgacggtaagatcctgaccgttacccgctttgacacgttcaatggaaaaccccgcattcatctcgaatga

SEQ ID NO: 80221 - DNA, 525 bp, Citrobacter koseri
atgactgagaaaattattgccgatgtactcgatactgctctggcccgacattacgagcaatttggcgatgcagaacgtgaaaagcaggcggtagtctttatggatggtcgctgggtgtccatccgcggggattttacccctgatgaaattcgtgaagttgtggaatacatcgagcgcgtcagactctcgaagaaattactcgagtctttccagaatacttcgccatttgttattaagaatggtgaggtgttcatcaacgaagcttttattcagccagcaagcggcagtgcatcagtgtctcctggagaggatcgaggcgagaagacaatccgcgataaagtgcgcgatatcgttgccccctacatgactggcgaagcaactgaattcaccgatgatctggtggatgaagtgatgaacctgtttgataagccagagaccagacggtttattgatagttgtatcacggagtcaatcaggctgaactgccggccgggtggactcatctggcagacgttacgcagatag

SEQ ID NO: 80222 - DNA, 174 bp, Citrobacter koseri
atgcaattaggcaaaaagtcaaagtcagggctgagagcatttctccgcaatgacggaatcatagttgccgataaaaaaggaaacgcccgcatcgttatcggagatcttagcgaagataaaaagattttgcgcagcggcaatccatcgacttttaaccaattaggccgcgcctaa

SEQ ID NO: 80223 - DNA, 237 bp, Citrobacter koseri
atgaaatctgtcattttaattcttaaagataaaaaacctgaaattatcaaagtaggtgatggacttaactctataccctggatgctttctgatgatactaaggttgaattggagattattacagctaaagtttcatctcttactggcgaatcatctttctacttggtggcaactgatattgaagacctggattcaaggcaaatcagacaggctgtagaatttttaaacattaactaa

SEQ ID NO: 80224 - DNA, 1191 bp, Citrobacter koseri
atggcgctaaccgatgttaaagtgaaaaccgcgaagcccaaagaaaagccctataagctggctgatggcggtggtatgtatctgctgattaacgctaatggttcaaaatactggcgaatgaagtaccgcttcgccggtaaagaaaagatgctttctattggcgtataccccgatgtttcactggccgatgcgcgtgaaaaacgcagcgaagccagaaaaattctcgccgctggaatagatccaggagaagcaaagaaagaggaaaaaatcgctcagaaaatgagcctgaaaaacactttcgaagctgtcgcccgtgagtggcaccagtcaaaagccgatcgatggtcattgcgctatcgagatgaaattattgatacttttgagaaagatattttcccctatattggcaagcgtcctattgccgaaatcaaaccaatggagttgttggaagcactacgaaaaatggagaaacgcggagcgctggagaaaatgcgaaaagttcgccaacgttgcggtgaggtcttccgttatgcaatagtcactggtagagctgaatataatcccgcccccgatcttgccagcgctttagctactcccaaaaaggctcatttccccttccttgcctccagtgaacttccgtatttcctcaaagacttagctggttatactggcagtatcataaccaaaacggcaacgcagattattatgttaacaggagtacgcacacaggaactacgttttgcccgatgggaagatatcgactttgaaaagaaattatgggagatccctgctgaagtgatgaagatgaagcggcctcatattgtccccttatcagagcaggttattgtgttatttaaactacttgaaccaatctcaaagcatcatcctctcgtctttatcggcagaaacgatccacgtaaacctatcagtaaagaaagtgtgaaccaagtcattgaattactaggttacaaaggtcgactcacagggcatggctttcgccacatgatgagtaccattttacatgagcagggatttaactcagcatggattgaaactcagcttgcgcatgttgataagaatgcaattcgcgggacatataaccatgcacagtatctggatgggcgtagggaaatgatgcagtggtatgcggattatattgataagctggaaggtacaaatatcgcagcataa

SEQ ID NO: 80225 - DNA, 681 bp, Citrobacter koseri
atgaaaagcacagcattaattttaactgtcttcattctctcggcttgttcttactcggctcaaaaagataatcaactgacctttgaggatacatcgaaatttatggatgcaattgtcagggttgatattcaacaaggaaatgaaattatatcaggttcgggcacttggttaaatgataaatacataatcacagcctcacatctgtggagtagcgtaaagccaggatataaattaactgtgcactatcaatctcgtgattatacggcaaaaatatatgccattgaaaaaccgaacattacagacctagccgtcctggtaatcgagccggaaacaaaaataaaatctcctgacagatggcaagtaaaactgtgtgactcaatgctctcccccgcagaacctgtttgggtagcctctggaatgtataataacatctccggttcttatgcctcccctgattctatctttatgtacaaagggctaactgggtctaatggtcttactgggttttacagggaaggtgtcagtggaagttcagtttttatacgtaacgaaaattgcatggcaggtatagtcagcatgaaacataaatcatctgatttgatttcagaagtatataaaacagacattgtcaccgtagatatgatcaaaaaatttctaaatgacaacaggatttttatttga

SEQ ID NO: 80226 - DNA, 2346 bp, Citrobacter koseri
atgtggaaggtttcgttaactatattgagtgctacattgtcaacgggggtttttgcaggtgatgaccattctattgaaatgactggtattcaaagcattcctgagagttactttggtgcagggaattctatagatattgtggtaaaagactttggtgaattaggaagcaaggatactcatctaaatattgcaggggatgggtatgtgacctacgaaccttcgtcatatagcgatgatagtccttataaaggtattacagaacataccaatgttcaattttcaggaggaacattcaatttctctgaatttaacaatacctatataacggttacaggaacaacagacaatggtgtagaacataacacttacttaaataacagcgttattaatggtagtttgctttacgttcaaagcggcgatggtgtacaaaacactaccgtaaaaggtgggtctcaagttgtagtttcaaacaggttttttaattggggcggaacgcagtatatttaccctaataatccaagcataaagaatacaacctactttgatacgtcgagtgagttgttagaggctggttcaagcaaggatgggtattctgcaacctcctatgattctatgttccatgatgcttcatcccagcgcgttatggttaatggcgttagcgaacgctcgtcattctataatacctctaagcaattagttgaagctggaggttatgtcaaagagttgtcattgcatgaccaagcgtcatcctttgcttcagctggttcaattgtacaaggaacaacatccgtaaacgatgaagcatcattcacactggaattaaaaaatggtttaaattctgctgcagataaaatatcgcttaacgataaaaatagccgcttcataatttattcaaatgacagcgttgacggtaatgaagcgtctatcaatgagctctataacgcgggcgcggtgatatttacctctaaaaataatgatgcgttttcaacgctaattgtgaatggtgattatacggggtcaaatggttctttggtcatgaatggtcgcctgaatggagatgacgattcagttaccgataaattgcttgttaaaggtaataccgctggtcaaacatccgtggcggtgaacaacatcggtggacatggtgataaaactattaacggcatagaacttattgaagttgacggtcagtctgatggtatttttgaaaaaaaaggccgtattacggccggggcatatgactatgacctgattaaaaaagggaataactggtatctaagtagtaataccaccccggatccaactccggatccaactccggacccaactccggacccaactccggacccaactccagagcataaagtcagaccagaagccgcaagttacattgggaacctggcagccgccaatactctgtttaacacgcgtctgcacgaccgcttgggtgaaacccaatatatcgacgcgctgaccggcgagaaaaaagtcacgagcctgtggttacgtcaggtcggtgggcataacaactggcgtgatagtagtggtcaactgaaaacacaaagcaatagctatgtggctcagttgggtggcgatgtggctcagtggtcaacggatagtttaaaccgcggccatctggggctaatgacaggttatgccaacagccacagtcaaacccattcttcagtcaccggttatgattctaaaggttctatcagtggctacagcgctggggtttacggaacatggtttgctaatgatgccgataagagcgggttatatgtagatagctggctgcaatatagttggtttaataaccatgttaatggtgtgggattggccagcgagtcctataaatccaaagggctgacagcgtcactagaaacgggctacaccctgaaaatgggagaatttacgggcagcaaaggaacgcttaacgaatggtttattcagccacaggcacaggcgacgtggatgggcgtagaggcagataaacatcgcgaagataatggtacgcgagtgagcagcgagggtgatggcaatgtacagacccgtttaggtatgcgcgcttatctgaagagtcatcatgccatggacgaaggcaaaggtcgcaccttcgagccgtttatcgaagctaactggttgcataacacccgtagctacagcgctaagatggatgatgtccgtatcaaccaggctggagcacgtaatatcggtgaagtgaaagtgggtgtagaagggcaaatcaatccacgcctgaacctgtggggcaacgtgggaacgcaggtcggtgataaaggttataacgacagcacggcgatgattggcgtgaagtataacttctga

SEQ ID NO: 80227 - DNA, 537 bp, Citrobacter koseri
atgaatcagggattactttcaatatcttcttcaaccagttggcctgaaaatgatttctattttcggtcaggggtttcttccttttatgccagattaaaacctcgaaaagaaaccaggaaatattattttttgaatctgaacggaagtcatctcaggaaattcttacaggatttccctgagatcaacagtgattccattgtcattatttccactccccgcctgatgcctcttgctaatttttggctaatggagagttcacgggtttgcgctgtattcgaatcatacgtatccatagatacaatagtttctgtcctgaacggtgttggatattcaggtaaattcaccagaataattccctggatgcggtgtaacctttcagcagtggatgttcttctactaaagcattatctcgaatcagggaatatgagttatatgcatagccagcataatcgagcctattccaccattcagtcatggaagacaaagcttgcaaagaaattcaatgtcagaaagctcgaatatctgttgctgaactga

SEQ ID NO: 80228 - DNA, 7047 bp, Citrobacter koseri
atgaaaaaactataccgtgagcgcatcccgctccatgtcaggctgtttgcctggctcaatatcggcgtccagactacgtttcccctggctgctgcatttacccccgcgatggccggtgccggaggcgacgggagatttctgcagagtcagacgcagaatgtgcagcagacacaggtatacgcgctcggaaaaggggaaagcattgtctctgttgctaaaaaatacaatatgtcagtggaagatctgctcagactgaaccagttccggaccttcgcacggggatttgatcacctgcaaccaggcgatgagcttgatgtaccgctggcccctctgccggaggtgcactgggatgatgccccggctgcatccgtttccggctataacagtgaagatatgcaggcgcagaaagtagccggatatgcttcgcaggccgggggaatcctcgccagcggtacaaagggtgaggcggcggcttcaatggcccgcggtatggccaccggtgctgccagcagtgaaatccagcaatggctgagccgcttcggaactgcccgcgtacagctggatgcggataaaaacttctctctcaaaaactcgcagcttgacctgcttgtccctttgtacgaacaaaaggacagtcttgtctttacccaggggagtatccaccggaccgatgaccgcacccagtctaatctcgggtttggttaccgctggttcgccggtgactggatgctgggcgccaacacctttcttgattacgacctgtcccgcgatcatgcccgcctggggctgggcggagagtactggcgagatttcctgaagatgggcgtcaacacgtaccatcgtcttactaactggaaaaactcaccggatcttgaggactatgaagaacgtccggccaacgggtgggatgtcagagcacagtactggctaccggcactgccgcagctcggcggaaagctgacgtatgagcagtactatggcgatgaggtggctctgtttggcagggataaccgccagcgaaatccgcacgccattactgccggcgtgaattacaccccgattcctttactgacgttcactgctgagcaacgccaggggaaagcgggtgaaaatgacacccgattcggtgttgagatgaactaccagttgggtatgccgtggcagcaccagattaatccggacgcggtggctgccatgcgcagcctggccggtagccgttatgacctggtcgatcgcaacaacaatatcgtgctggagtatcgcaagaaagaggttatccgtctgaatacggcagatctggtgacaggctatgccggtgagcagaagtctctgggggtatccgtcaacagcaagtacgggctggagcgtattgactggtcggcttccccactcatcgctgcaggaggaaaaatcgtgcagaacggagaggactggacggtggtgatgccggcttatcgctctggtgtggaggcttctaacagttacaccgtcagcggcgttgccgttgataaaaaagggaacgtttccggccgggctgaaacgcaggtcacagttactcaggcggcgattgataaaacgaccagttcgctctcacctccgaacgcaaccctgccggctgacggtgtttctcagcaggaatttgtcctgaaggtgaatgataaagaagggcagcctgtagatattgctgaaaatgaaatcagtgttgagaaagcttcgaggcttcgcgggagcagcaacgccaccgtgtcgtcgtttacccgacgtgcggccggagaatatgtgatgacagttacctccgggacaatgcctgaagcattcacggttacaccatcagcccgtaatacgaaatttgcgtctgcagatgtccagttgacagcagacaatgccactgcaatggtaagcgaactggatgtggttgaagacaatgcccttgctgatggtaagtcacaaaacagattccgggtgactgttgtcgatgcacaaagtaatcctgtccccggtcagtcagtcagctttcaggcagataacagcgccagtgttgcagagtcagccatcacagaagcagatggtacggtcattgttccggttacctcaccacttgccggtgatacaactgttacagccagtattaacaataagggaagtaagacactgaagctttctttccgtcctgatcagaatacggcgcggattgagcaaaaggatttaagcgttcttcctgaggtctccctggctgatggaaaaacagaaaaaaccgtctcagcccgggtgactgatgcaaagggtaatgctgtaccggacatcctggtgggattcagtgcagataatggcgcagcgctcactgaggagaaagtcaaaacggatagccggggtatggtcaccaccacgatgaccagtactgttgcaggtattgcgcacgtggctgccagcgtgaacagccagtcagtctcaaaggagactacctttaccggcaataatgcgacggccattgtgacctctgttgatacaactgctgcgtccggtgtggctgacggtgtaactgctgtgacattcagggcactcattaaggaccagaatgggaactcactttccggtattcctgttgactggaaatccagtaaggacagcagcattgtcgtctttaatgatgcgcaaaccatcacgtcagaagaagggattgctgaagtgcgggttaccagtacgcgggcgtacagtgacgtggtggtcacggcgtccactaatgcatcgtcaaagactgcttctccgtttaccttcgtggctgacaagcagaaccccgtcatcaaggcattcaacactaacaagcagacgctgacggccaatggtaaagattcagcagaactgacagtcagcattactgacaccaatggtaatccgctttctggtgtggaagtggcgctcactaacagcaatcacgccggaattacaccttcccacccggtgacggatgcagatggcatggtctctgctgccctgacaacgattcatgcaggtgagatgaccgtatccgcatcccttggtaaagggggtacgaaatcgcttgtccttacggccatatctgatgaacagactgcgaatgtcagcgtgacggcaggtaccacttccgcgaccgcaggacaggcgcaacccgttattctgacggccactgtggttgacgggaataataatccggtctctggcaccagtgtggcgtggcagaccagccacaacttactgagtgaaacagtgagtcagacgaatgcagaaggcaaggccacggtacagcttaccggaacagaggcggtcatcaccacggtcactgccgtactgtataacagtaaaaaaggttcggctcaggtgacttttggtccgggagagccagaaaatgaccacagccagctttcggtgtcccctcagtccattacagctgacggtcaatctaaatcactggcgtctcttatccttcgcgataaatggaataaccctgtacctgggaaaacaatcgactggagcgcagatacaacatcgggtattcactttactccagtgggaaagggagatggggtttatcaggcttcagtcaccggaacagctgagggtgtgtggaccctgacggcggaaagtggaacggttaatctgcagacacctctggcgctgctggcaagccaggactctgcgcagattgacagtgtgactgtatccggcccggatacagccagagctgacgggcaggaaaccgtgacgattcgggcacaggttaaggatgggaatggcaatacaaaacttaaaggggttgcagtgggctggagtaccactctcggaacgctttcctcaagtctgagtaagacagatgaaaacggcgtggctgaaatgacgctgagtagtcgtgcagctggcagcgcccgggtttcggccatgctgggtggtggcgcgccgattcaggcaaataaagccgtcaccttcaccgctggcgatatcagtgcggataaatcctcactcagtatctctccgtccagcatcattgcagcaaaagaaagtgccacgctcagcgtcacagcccgtgatgtagaagggaacctgcttccgggtctgaaagataagataaatgccggtttcacgcctgacctgaatatgaccgtatccgctttcagcgaggtatcaccgggcatctacgcggcaagtgtatcgggtaaaaaagcaggtatatcccaggtaagtgctgacgtcagcggtatccgcatcaatcataccgcctcaataacgcttgaggctgataatgatactgccagagtcaaaggtagtatcaccgtcacaccggcttctgccaccgtaggcgatgttgtcacgtatgcagccgtgctgaccgatattaacgaaaatgctctgggagcagggctccctgtcacctggagcgcaaatgagagcagcacactcagcgcacagatgacccgtacggatgattccggcactgcacatgtcacgctgagtcggaagctcgcagggactgccaaagtggaggttattctcccttcaggtaccacgtctgcgcctgacgtgatattcagtgccggtgatgtggatgaaagccgctcagaattaacgctggtaccttcagtgattgtggccggaaaagagacagccatactgacactgacgttgcgtgacagtaatggcaacctgcttacagggaagagcgtcagtggccacagtgataataacgatgtgaccattggtgaaagccaggtaaacagcgatgcgcctggccactataaaatgaaggtgagcagcgacaaggcgggcacagccacgctgactgttaacgtgggtgacaaggcgctgaatcagagccggatactgacggtgaaaggcgatacagacagctggaaactgtctgcggttacgccggacaaaaccagcctgactgccggtgacgccagcggagtgacctacagtgctgcagtcacagacgctaaggggaacccgctgaataatgtggtggtttcctggcagcttcgtggtgaggcggaaagctatgcgccaacgtcgcgtactaatgaaaaaggtattgcgaccaccacggtgaaaagccataccgcagggcttcttcagatgactgcgtatcttgatgcggataaccatatccaggccaataacgtcaccgttgtcgccggggatataaaaaacgccacctttagtgcagacaaaaccagtattggctctgacggtaaggatactgtcacattcacaaccagcctggaagatacctggggtaacccggtcacaggaaaaacggttttgatcgaaggcgctgactcgttgtcgggctttgcgctcagtgaggtgcaggaccagcagaatggacgctatgtggcaaccggcactgccacaaccaaaggacaggtcacactcagtgcacgtgtggacggtacaaaagtgggggattccgctactgtcacagtcggagccattacaccagatttacgatttgataatgccgttcaacccgtgacatggacaagaaactttaccgcatcacaggcggtacggggcatgcctgaaggtgtggaacaaatgtggtcaagttcagacaccagtgtggcgacggttgatgcgaacggaaaagtgacactccttaaatccggcagtgccagaatttctgtttacacccccgggaatgagcaatatgaccaggcgatggcgtcatacacaatgaatgtgtctaaagcaaaccctgggttaaaagccggaacaggtgaccctataactgcagtatgggctgatggtaaggagcgaaatattactgccacctatacgaacagcgatgtgcaggacgggctgaagcctacgtattcggccagaagtgaatcggttgttactgtggataacaccgggaagttaactgcggtgaaaccgggagccacaactgtcaccgtcagtaccccggaaacagatcagttccttgctgcctcagcggatgttgcttatgtactgaacaaagcgactgctgatgtgagtttcgatacatccgtggtgaaaaccacggatgaagatgccttcacgctgcaggagccggtcaccatgctgacgtcgcaagccagtattaaatggacgtcgagtaatacaaacgtaataaatgtatccggttcaggtgctgttcagggaaatgtgggtaagggacaaacccggctgacgcttacggtacttgctaatgactattacaatgccagttccgggtattacgatgtgatggtgtatacaaagccatctgttaatctcggcgaagtttcttacataagcaaaggaagtaaaggcagctccggcacatggacaccagtatttactgatgactctctttctgttacctggagtgcggatgtttctgatgagttcagtaaacctgagagcgtgactgtctatcttctggacagtaatgacaatattctagccagcaaggaagaactatcaccatcggggagtaaaactactacggttaacccaaattcttcgttatgggataaaacggtacatgtggcattggtcgctaaaggctacggcaacctcgaaacaaataagtcatcctccaccattagtgtaaagaaccttgagccaagaaagatatggacgacgcttaccgtccgatcgcacgttgaaaccagaaccagcagcggaactgataattattgccaggaaagtcttttggggaaatatcactggaacaatgcagttattacaggagatagtattagttttggaggcaagactttaattaccccaatgttggttaaagccaaagtcagtgccactcaaaatggttcaagttcagcaacaggttatttccctgatgcctataactcggtaagcaccagtcaaaacgtaaaatttggttctgtaacaatagcaagtgaatgttggaacaatcatattggaggatatcgggttggtatattcgttaactataatggaaatgagtatctctactgggcatccgattcacatggctggggcggtaatggagacgggatgtacgtggacagagttgatagtttttga

SEQ ID NO: 80229 - DNA, 1530 bp, Citrobacter koseri
atgatgcaactgagtaacagaataatggctgccagcatctttcttcctgttgttttgttgactctgatgtcagcaggaatagcatttcgtcagctaaaaagtgagatgaacataacagcggatatactaatgacacaagttgatcacgtaacatcaattgctcgtaatacaacccgtctcaccgcagggatggctgacaagccttgtgagggtatccgggataaaatgactgaagccggcgcgctgacaccgtatatccgcagcaccggacttattcgggataatagtctaatctgttcgtcggtcacaggggccaggaaacagaatgtatcagagatatttggagcacgtgtttttgtatccacagatgacctgcggatattaacaaccaccggcaccactaatattcctgaccatatagcaataatttatttctataaacttggcaacggtttgaccgcattcagtgtggtggatgcacgctatttcactgacctgatgaattcactgaataaaaaaaataattcgtcgctgcagttaaaatttacagatggcccggtaatttccagtgagaaaaaaattaacttacgcccccccgctctcagaactgatatttattcagatttcagtcaggcacatcttgaagtactcactcccctgtggtcaatttggcattatatattacgtaatatgctcctcctcgccccactttctcttttgttgactcttgttttactatatctgcggaaatacttgcaatcagggagaatatctcttgcgaatgaaattattcaggggatgactaatggtgagtttttcgtgcactaccagcccatctgcgaaacgacaacaggccgctgcattggcgcggaagctctgatgcgctggcaacgagctgacgggaagaccatacctccggcaatattcatccgtgccgcagaagaggagggtattatcattagccttacacgacaccttttctgcctgatagctaatgataccaagaactggcatgtgttacagccctttcatctgagtgtaaatattgcggctgatcatattaagcataaaacattcatggcagactgtctgcggttacgtaattccttggaacaatcattttgcctggttctggaaataacagaacatagtttggttgaggacacttactccgcctctgagaaactgaataatctcagaaaaaaaggatgtcaggtggctgtagatgattttggaactggttacagctctctgggactgctccagagtttgcaagtggattacctgaaaattgataaaagcttcattgatattttggaatcagctgatacagacacaccagtactggacactattatagccctcagtaaacgacttgacctcaaaaccattgcggagggcgtcagtacaccacatcaggttaactggctgacagaaaagggggtgacttacattcagggtttttcttatgcccatccaatgacagcgaacgatttctgccaatggtataaaaggcatcaaaaatggtga

SEQ ID NO: 80230 - DNA, 237 bp, Citrobacter koseri
atgactgatagtctgtctgatttaaatgatattaacttgcttcgttccctgtctcaaaattttgagacagatgttcttgaagatatggtggggaatctcttagttgttctggatgaaagacgagtggaagaagcattactgaatcaggaaccagaattgaaaaatactaaattggaatacatgcgaaaaaaattgcttgaaaatggaatggaacctatagaatttatttttttctga

SEQ ID NO: 80231 - DNA, 660 bp, Citrobacter koseri
atggagtattatggtattgttttgattaagtttgttatcgggtttgttgtagtaatctctcacctaaacttttctggtaaaacacaactatcacaaatgacaccggttgacttcatcgggaactttgtacttggtggggttattgggggcgtgatctatagtgatgctataccgatgcatcaatacattattgtgttattgattggcgttggtttgatttcaattctcaattgggtaagtaagcacgtctggtttttcagaacatttaccatcggtgaacccattccaattatcaaaaacggcaagtttcttatggagaatatacttcgcagaaaaaacaaaattgacattatcaatgttgcatcacaacttcactcacagggtatacattctttccaggaaatacattatgcccagattgaacccagtggctctctttctgtcgtgtgtgagggagggaaaatgccatcaataattctgatgaaagatggaagaccccgcatttcagagctaaatggtatcgaaaaagatgaagagtggctcgataggatgcttaacaaggcaaggattgaacgagatcaggtatttatcgctgaattctgggacggaaagctaacatttatcctgaaaaatggtaatgtaaaacgtaatctaaactaa

SEQ ID NO: 80232 - DNA, 192 bp, Citrobacter koseri
atgagtataggcctcttcctttttcatgctgtcgttgatttcctgagtcttagccgcagcatcagtcgtcaactcgtttgcttcggtgatagcttggttcttaatctgttccgccttctccacaacctgatcgcttttttgttcagcatcagctttcacttcatctcctttaactttggcctgttcagctag

SEQ ID NO: 80233 - DNA, 417 bp, Citrobacter koseri
gtgggctgggcaatgtcattctcgccggacagcaagctgaccatcaaagcgctggaaatggcgtgggaagctcgcggtaaaccagccggggtgatgttccatagtgaccagggtagccactatacaagcaggcagttccggcagttactgtggcgttgccggatcaggcagagtatgagccgacgtggaaactgttgggacaacagcccgatggaacgcttcttccgtagtctgaaaaacgagtgggtgccagtgacaggttatataaactttagcgaagctgctcatgcgatcacagactatatcgtcgggtattacagcttgctaaggccgcatggctttaacggtggattacccccaaacgaatcggaaaaccgatactggaaaaactgtaaagcggtggccagttttagttga

SEQ ID NO: 80234 - DNA, 207 bp, Citrobacter koseri
atgaccacacccaccagccttcttactgacaagtttgtcgatatggcattcatcacacacctcaccggtttaacagacaaatggttctacaagctcattcagctcggtaagttcccaaaacccattaagctgggcagaagttctcgctggcttcagagtgaagtggaaacttggctacagcaacgtattgctgagtcacggggttga

SEQ ID NO: 80235 - DNA, 588 bp, Citrobacter koseri
atggtttatcaaatcaacgagaattatacccttaacgatgaattatttcatgatctgacggttcatatggaacgtatgcgcgaccgttactctgacatcattcctttacgtatggatttcgcttataagacgaccagtcgccgttatgctgatcgttatcgggatcgctgggatatggacatgtaccggctggcagaaagagttatgagtgcgggtgttgttattggttatgtgtgggtgatggagttcacttatcggcatggtctgcactttcacgccatgttttatcttgatggacaacgtaagcggaactgttactgctctgcgcgggtgattgctgaagagtggcgaagcattacggatggcgaggggatatttgagaactgccagaagaaggtttaccacaaagttaacggtgccagatgcctgcatcactcagactgtgaaggctatcaggacctggcgtttattctcagctatctggctaagcaagagcaaaaagaagactgtgaagaccctgtattctggctgagtgagataaagtttagaggacgaggaggaaggccccgaatcagaagtattggttaa

SEQ ID NO: 80236 - DNA, 999 bp, Citrobacter koseri
atgacgatatgggatgatttccgggtgtttgagttgcgcagggaggatcggttttatgaaaaaaccgaacatacatggggtgacatcagcaggaaatatctgttcaccgctttcaggaataacaagccaccttacggtatgtatgatctgctggataagttgtaccgtatccagtacaccagcggggaacgagacttccggcgtcccaacatgaataacaaaaatcagaaaatcatccttagcgaaaggatcccttctgaaaacaaaaaagaactaatacgagcaattactgaaaaagaagatactcagacttacctcagcaatcattatctttcaatggtgaaacaatatcgccagattgaaatgattacatttgctttttatcttcccgataattataacaagattatccgtgcagagaacacattcaccaggtctctgatggaactcagacaacgctttacctctttaaaaaaacaaataatgtcagacccgttatataaatcagttcggggttattcacgactaatcctgatgactgttgggcatcagccattttatcttgttaacttctttttcatcaaacatcctgacgcctatgccagtgcctatatttcgtcagatatttataataaatgggcaaacacagggggaccggaacggcaggaatatcccatggttatttgttacaagttttcagatgatcaacgattaaaaaatagacgtaacgatccgttacgcttccataatgccacacaggtagtggatgttgggcaagaaattaaaatttttgatttaatcaatgatgaacacagaaatactatctgtcataaccgaaaaggatacctcacttttttccgtcttcagtcccaaatatataatagcattcctggagtgagatccagaaccagttccaataatttcacttacctcaacacagaagaacgtaagaaaaggaaaaataaaaaagcaaaaatccagatacgcaagtccgtataa

SEQ ID NO: 80237 - DNA, 171 bp, Citrobacter koseri
atggacgagaagttactctatgctcacatcctgaatctgtccgctccgtggcaggttaaatccctttctcttgatgaaaacactggctctgtcaccgttgttgtcgggatcgccaaaaatacacagttaatctgcccgacttgcgggcgatcgtgccctccgtcaccgtaa

SEQ ID NO: 80238 - DNA, 978 bp, Citrobacter koseri
atgtgcccgaaccatggatgccagacgttacccgttccgtgggcaggtcccggcagccggtacaccttgttgttcgaatcattcgttctttcttggctgaaaatcagcacgattgatgcggtgagaaagcagcttaaacttagcaggaatgcggttgacggcattatggcccgggcggttaaacgtggtcttgcccggataaaaagacctctatcagcccggcatatgaatgttgacgaagttgcattcaaaaaaggacaccgatatatcaccgtgatatccgaccgcgaggggcgcgcacttgcgttaacagatgatcggggaacagaaagcctcgctagctatcttcgcactctcaccaacagccaactggaggccatcaaaacgttctcaatggatatgaatgccggatatatcagagcggcacggatccatcttccgggagcagtaggaaaaattgcttttgaccgcttccatgtggcaaaacagctgggtgaaatcgtcgataagacacggcagaacgaacatcctagacttccagtagatagccgtcaccaggcaaaaggaacccggttcctgtggcaatacagcgaaaaatggatgacagagctccggcaggaaaaactggcttggttgagagaacagatgcaactgactagccagtgctgggcactgaaagagcttgcgaaagatatctggaaccggccatggagtgacaaatgccgtgcagactggcagcagtggatagcattagcgagaagttgcgatgtgccggtaatgagaaatatggcaggaacaatcacgaaaaggctatacggaatacttaacgcaatgcggtacagcgtctcgaatggtaatgccgaagcgctgaacagcaaaataaggcttttgaggataaaggccagaggctatcgaaaccgggagcgatttaaactgggggtaatgttccattatggtcggctcaatatgagctactga

SEQ ID NO: 80239 - DNA, 294 bp, Citrobacter koseri
atgagtaccatttatgtggttgttttgacttatataaaaccactcgaagaagttgactctcaaatacctgaacatgttgaatggcttaaacaaggctactccgatggtgtattttttgcttcaggaagaagaattcctcgtaatggcggtgtcatacttgcaaaaagtgacagccttgaagctctgaaagttcgccttagccatgatccatttcaaaaaatggaaattgctaaagctgaaataatcccctttgaagccactatgaaagctcagttgctggaaagtattttctga

SEQ ID NO: 80240 - DNA, 492 bp, Citrobacter koseri
atgaaactatccctgacggcagaagccgatgctatcaatgtactggccctcaacatgggtcgtatcatcgtggatatcgatggcattgaactggacgacattattaacgcgatctgcgacaacggatattcacttcgtattgctgatacccccggaaagcgggttgttgaagatccattactacccgccgcccaccttaccggtatccattgcagtaccgcgcatatcaccgaagccgacaacaccctgctgtacaaacagtcgcatcagcatgaagactttagcgagtcagaatggatccatttttcgggcaccggctatctgctccgtctgagcgcgtggtcatttccggtgttgcggctaaaacgactcggtttgtcgaaagcctgtcgtcgtctggtggtagcacttatgcgtcgttactccgtcagcattattcatcttgatgcctgtggcgaagtgctgccaggttttcccacatttgactggtaa

SEQ ID NO: 80241 - DNA, 333 bp, Citrobacter koseri
atggcggcgcaggcgccttatccggcctacggtatggtgctgtcggtaggcctgataagcgcagcgccatcaggcaaaggtgccggatggcggcacagtgccttatccggcctacggtatggtgctgccggtaggcctgataagcgtagcgccatcaggcagaagtgccggatggcggcacaggtgccttatccggcctacgggtatggtgctgtcggtaggcctgataagcgtagcgccatcaggcagaagcgccggatgaacgcattacggtgccgggtaggtataaacctgatgcaccgcttcgatctccgccagcacctcttcgcttaa

SEQ ID NO: 80242 - DNA, 1935 bp, Citrobacter koseri
atgtcacagacagttatcacgctggcgtttgagacgtggaaagccagccaggccgtgacgggtgaacccgtactgctggatgagtttgtttttgcgaatgtaccagggcttgatcctgccctgccgattgaccgtagcgagacattgccgcctgtggcgcagattgttcaccgacaggctgtaagccgtaaaggtgttgtgagtgaaaatgcggtggtgcattccgttgttttgggtgcagatgttggtgatttctcgtttaactggattggactcattaacaaagctagtggcacgctggctatgatcgtacatgccccggaacagcaaaagctgaaaacagcggaaggacagcagggcaacgtgctgacgcgctcattcctaatggaatacaacggcgcacaggctgagacagggattaatacgcctgcggaaacctggcagattgatttcactgcccgcatggcggggattgatgagcgtcagcgcctggaaaatattgatctttacggtgcggctgcgttcttcggtgacggttatctggtagcgaaaaccggcaatcagttttttgtcaccaaaggcaccggttatgttgccggattacgcgcatcactggccgaaaatcagaatattactgtgacaactaagccagtaaaaatctggcttgatgtgtgctggactgggacgctgacaagcgcatggggagttcagagcaagattacggtagctgcaaatctggctgattatgtacagaatggcgtacagcattacgtatttgcagtggcttctattgatgcgaatggcgttattacagatttgcgaccaaaaggtaccctgggggaacaacaggcaaatagtgattttgtccgtaaagacaagaatctttctgatattaacgataaggcaaagtctttatcaaatatcggtggagtcccgaaaacaacaaaaattaatggctattcgttatctggtgatattgatttatcgtttaatgatgttggtgcaattcccgtcgaagttcacggcattattcgtaatagccagacaatggcatcagcaaataagccaggatggtggcaggttgcggttccgaatccttcaacggtttctgattttccgaaatatccgaatggaacctacttatacggctatggttatttgtttgttgaaaagacaggtaattcatggattcagcactattacagtcatcatggcgtaaatgcgaaacgtcaggaatggaatgttgagccaaccactgatgttttgtgggttattgattacaatacagcaaataaaccgactcccgacgatatcggcgctttacctatttcaggcggtcaacttactggcggtctgtcgcttcatcgcggaatccttttctttcctgagtcagcttataaaaataaagccgagggattaacgggaacgtatgcgaccgatactctggattatcgctgggaactgtatgcgcgtagtaaggcaaacagcagtattcgctctaatatcttcactgttgatatttccgatatttcgaaaggttctactgcttccggtggtggttcgaataatacaacaacaattacaattcatggccgtattgtcacgccctttgcgattcaaccgggggactggtcaaactttgatatgcgttaccaggcaaaaggaaattacacgccagcaggtcaggcttatacaaaagcggaaagcgatggcaggtattacacaaaatcgcagtctgatgcacgctatttgcaggggattcgcgtaagtgcaacgcaagtcagggaattccgtgacggcggcggatactcatcgaatgacgcggcatttgcaaccgcaatcgctatggtgggtggaagttcaaacgttggttctctgcttgtcaggtatctccagcggaatattaacggcacctgggtaaatgtagctacgtaa

SEQ ID NO: 80243 - DNA, 297 bp, Citrobacter koseri
atgcaggagtatgaaaaggggttcattgcactggtaattatgggggcggtgattgcactgggtaagttgctcaatagtgacgagccgatcacttttcgccttgttgccgggcgcgttattgtcggcagcgggttgacgttgatcgccggggtggcgttgtattttgtcccggatatccatcctctggcaattgccggttttggttctgctttgggtattctcggccagaacgtggttgaggcatggctgcgcaagcgtggtttttcagggatttttgataaaggggcaggaagatga

SEQ ID NO: 80244 - DNA, 222 bp, Citrobacter koseri
atgcgtcctaacattacaatcgccattacaacgccttaccttccaattgatgagtattgccggatcaccggaacacctatgggtaccgcccgagatatggttcgtgatggtcgtttgcctatccgtggtaaaggtgacaagccaaaagcccgcgtagaaatcaacatggctgcgctgaccgttcaggcattaagtgaatgcaatatttcgcttaacgcgtaa

SEQ ID NO: 80245 - DNA, 591 bp, Citrobacter koseri
atgacccaactaagacgaaaagcgactctaccaacaaacagcgctgaagttctggatcgtgtgtgcgatgcgtacggattcactacttccctgcaattagctgaatatcttgaaatggcatctagcagcatgtcagcccgcagaacgcgcggaatcttccctgctgatattgtagtgaaatgcgctctggaaacaggcgcgaacctagaatggttagcaactggggaaggaaaaaggtttgacagtgacgaattagatattctgaagataaaacgcaaaaagctagttgacgggcaaatgtatgatgcaggtacagccatgtttgacaaagtcttttttagagcaggtattcccctccccaatgacccaatttgcttacaggatgaatacgcgcagtacattattgaccgtgatttttctgaagtttatgacggggaatggctggtaaatatcgaaggaaagatcagcgtacgtagcctggtacgcatccctataaagaaagttcgcgtaagtggcattggcatggcatttgattgcgccctggaagatatcgacgtgatcggtcgcattgttctgaaaatcactaactga

SEQ ID NO: 80246 - DNA, 1062 bp, Citrobacter koseri
atgtctatacgaaaacaacccgatggaaaatggttgctggatttttaccctgaaggtaagccaaaaggaaagccaagcaaacgcatccgaaggacgttccccactaaaggtgaggcattagcctaccaaaaccacataatggaaaacgtccacgttaaaccttggctagatgggaaagaggatcgccgtaaactacgtgaccttgtgcaactgtggtacgacgaacacggtataacgttaaaagatggagagaagcgtaaaggcgctatggaatatgcctgtgaaagtatgggcgaaccctcagcgcatgagttcacagccgttatgttctcaacttaccggaaaaaacggctatccggtgaactggccagaactacgcgcgttaagcaagtatcaccccgtacgatgaaccttgaacttgcatatttccgtgcagtgttcaatgaactaaaacgactgggacactggaaattcgacaacccactttcctcgatccgcccgtttaaagaggaagaggcagaactaatttacctagaagaaccagagattgaaaaacttctgggagaatgtatgaacagccggaacaaatccactttctgggtagcgtgtatttgccttcttacgggtgctcgatgggacgaagctgaatccctgacaacgaagcagattaaaaatctgaaaatcagctacttcaacaccaaaggcaaaaggaatcgtaccgtcccaatcagccaggagttttacgaccaactacccaaaccagaaaaaccggggcgcttcttttcttcgtgttattcagcgttccgtaaagcggtcgaacgtagcggcattgagttaccagacggccagttgtcacatgttcttcggcacacttttgcatcgcactttatgatgaacggcggaaacattctggtactgcaacgtatcctcggacacacagatattaagatgacaatgcgttacgcacacttctcccctaatcatttacatgaagcgatcagcttaaaccccttgggtaaagctgtcccctttctgtcccctcagaactcaaataaccaataa

SEQ ID NO: 80247 - DNA, 303 bp, Citrobacter koseri
atgtactcacccaacggcaaaaaggacggtattcagatcatccctctgtcagaggtggctgcaaaggacgaatttctgaacatcaagaacgtgagccgcgatgacatgatggcagcgcaccgtgtaccgccgcagatgatggggattatgcctagcaacgttggagggtttggggatgtggagaaagcgagtaacgtatttgtccgaaatgagctagttcctttacaagagcaaattaaggagttaaataaatggtgtaatgaagaagtaatcaatttcagaagatatgaattagtgccatag

SEQ ID NO: 80248 - DNA, 516 bp, Citrobacter koseri
atgacattccttttaaggaagttttcctaccccaagtgggagaaaaacaaaggtctatcttctgatgacttttctgcagattcaataacaggttgtacacgcacaactgccaataagctttccgtttggcgatccgatacaacggattttaaatctgattatgtggaaaagttaattgtggccttggctacgaccatgccatctccagccacaattgaccttgtttggttgagagaagagtggttttctgataaaggaattcttttagaagataatcctggtgatacaaaatatgagagtgttaacaatcttcataaggatatagcaaatttaaatcataagctgttagccatggtgggatcacatatgcttgaacaactggaaggagcagataactatctcagagttaataagagagatctgattaaccttgttgttaagtggatgagggcggaaggtgagttcacaatagatgatttagaagaaaaatggcaagagcagttaaaaaagttatag

SEQ ID NO: 80249 - DNA, 648 bp, Citrobacter koseri
atggcaggttatagtgattatataattagtatggctgctaaagttatcagcaacgctgtacctattaatgattttaattatgtaatcaatcgctttgttaacgataatcttgatgattttaagacatctcgtttccatatctacgattcgagttcaagtaacataatttctgaatcgagtaatgttggaacttctaattcgcaaagtagcgaaatggctttcgaaatagaagtgcagaaaagtattaaaaacaccctgtcatatcttaaatctgaaaactatgttgaaggtgaggttactaagacgcaaatttatctggaagcattggctgagagaaatagactgttgtttttagaggtttttcagcgagtatgggtttcagtatattattcgccggaacatcttcgtaattatttatgtatagcagcatcaatggactatgaattgatgaaggaccgtgcggatgttcttattttaggatgctcgggacacgaagatgttttagttcaagaggctgctatcagagctttcgagtcttgggggaatccagctcatgtactacatttgagtgcgatgagaaagtttgaagaaacatggatagaaaactataaacaaagcactataaggtttttggagagcctgagatga

SEQ ID NO: 80250 - DNA, 696 bp, Citrobacter koseri
atgaatcaggttcatgaatcacatcaaatcaacctcttcacaatcaatgaagatatatcgccaagccctgctataattttccccctactacaggaattaagcaggtttagcctcatccctacatttgggcaggaagttaatgctttatctggtgaaatgaaacagatattgatcatgacaaacccggaacaaacttatcgtatcgaatttgcaagtcatgcaatcgttattaatggcatggcaacaaatcatgatgaatttgttgagaaatctgtgagcgttatcagcgaaatattaaaaatttatcctaacaaaaaatttaatagaatcgcattgttaaatgctcaggtctttactgactccttggaaaaatatcaagggttatataatcagttgttcacatataatgatgtagctccatttgaatgggataatagaattgcactgcgaaaagctattgaatttaatgatgaagcaataaacagcattaattctataagccgaaaagagattgcagtgttcaatcataatgctggcaagccttttgatgcgataatgtttgaggtcgactctaatactttgcccacaaatgctagttatagatttgatttcaatgacgcaattcaagtgttgcgtaatcttaatgaaaacaacagaaactcattgagcattctgcgtcgttacattgaattatag

SEQ ID NO: 80251 - DNA, 672 bp, Citrobacter koseri
atgaatacacagagactctcattaatattctgtatatccatattgttcatttctaaattatgcttcgcagattattgtcaagataaatacaatagccaaatctctgcggccaatgctgaactgggtactttagcaaaagaaaatgctgcattggatgaacaaatcacaaaagggatggaagactccatacaagtaatgaaagatatggcgaatgccagtaaagccaatccaatcgatgtgaaattgataggtgatttaggagccaagggtgagtcgctgaacaataaaatagacgagaataaaaaaaagggatttgctaatcttgatagaatgaaagtattgaaggccaccatcccggctaaacttcaaggggaacttcgcggctgtgttgaagccaccgcaccagcaaatactctagtcaatttttcaattcaaggtttagcgttactatctacaggaggcctttctgcaacgctcccacctcaagcattatatgttgacatggcggcagtattgaatggatacccaactggaggtgactcctctgtgataaatcaatcaagagaagccgcactaaaagctctgccatttgggctaggttccgaagacaacgacttaggaaaaacgtttagagatccaggcagaatagttaggtgtatattcggttgctga

SEQ ID NO: 80252 - DNA, 2412 bp, Citrobacter koseri
gtgaagttgaccagcttcgaaatggcggcgaccggcggctcgaatgaggccgccgcagtctttccatggaatacccccaaaaaagcggttaacccatatctggacccggcggaagtagcgccggagtctgcgctttcaaacctgatcgctctttacgctgcggataacgagcaggagcagctgcgccgtgaggctctgagcgatgaggtctgggaacgctatttcttcaatgaatcccgcgatcctgcccagcgtgagatggagcaggaccggctgattagtagtgccaaaatggcgcgcgagcagcagcgttttaatcccgatttggtcattctggctgacgttaacgccatgccgtcccatatcagcaagcctctgctggagcggattcaatatttccatagtctgggcagagcaaaagcctattcccgctacctgcgcgaaacaatcaggccgtgtcttgagcggctagagcgcgtgcgtgacagtcaggtgtctgcctcttttcggttcatggcgagccatgacggactggaggggctgctggtactgactgaaatgaatcaggatcaggtcaaacgccttgccacgctggttgcggcacatatgagtatgtgtcttgaagcggcccgcggtgatctgtttgtcagcgacgatgttaaaccagaagaaatccgccgggcatgggaaagggttgctgcagaggccatgcgccttgaggtcatcccgcccgcgtttgagaagttacgccgcaaaaagcgccgccgcaagccggtgccttatgaactgatcccaccatcgctggcgcgtatgctgtgcgcggactggtggtatcgcaaactgtggcagatgcgctgcgagtggcgggaggagcagctgcgcgccgtctgcctggtcaacaaaaaagcgtccccgtatgtcagctatgaagccgtgatccacaaacgcgagcagcgccgcaaatcgctggagttcttccgctcgcatgagctggtcaacgaagacggcgacacgctggacatggaagacgtggtgaacgccagcaacagcaacccggcacaccgccgcaatgaaatgatggcttgtgttaagggactggagctgatcgcggaaatgcgcggagactgtgcggtgttctatactatcacctgcccgtcacgcttccacgcaaccctcaacaacggcaggccaaatccgaagtggaccagcgccaccgtccgtcagagcagtgactatctggttgatacgttcgccgctttccgcaaggccatgcacaaggccgggttgcgctggtatggcgtccgtgttgcagagccgcaccatgacggcaccgtgcactggcatcttctgtgcttcatgcgcaaaaaagaccgccgttccatcaccgcactgctgcgtaagtttgccatccgtgaagaccgcgaggagctgggcaccaatacagggccgcgcttcaagtcagagcttatcaacccgcgcaagggcacgccgaccagctatatcgctaaatacatcagcaaaaacatcgacgggcgcgggctgactaaagaaatcagcaaagaaacaggcagatcactgcgtgacagcgccgagcatgtcagcgcctgggcgtcactgcaccgtgtccagcaatttcgcttctttggtattccggggcgtcaggcataccgcgagctgtgcttgctggctggtcaggcggcgagagtgcagggcgaacgcaaagcgggtgcgccggtactggataatccgcgtctggatgcggtactggcggcggctgatgcgggctgctttgccacctacatcatgaagcagggcggtgtgctggttccccgcaaacatcaccttgtccgcacggcatatgagcttaacgacgagccgagcgcctacggcgatcacggtatccgtatctatggcatctggtccccgattgcggagggcaagatttgcacgcacgcggtgaagtggaaaaaggttcgtaaggccgttgacgttcaggaggcggcagccgaccagggcgcttgcgccccttggactcggactcgtggcaataactgtccccttgttgaaaatttgaaccaaccagggggggatttaccaaaatccagtgggccggagtcgctgccggatcttcataatctgagcgcgaaggaacgccgggagctgacggcacggctgaggctggtaaagccgaagcggcggaaagggtataaacaagaaattaccgatcagcagcgccagcagctcgaagctgaactaaggtccagagggtttgatacgagtgaaacagacgtggatctgcttttggtggtggcagcattccttctggggccgggctgcgtgttttctatcgcaaccagcgtttgcaggaggatgataagtggaagcagtggtatcattttgaataagaagtga

SEQ ID NO: 80253 - DNA, 519 bp, Citrobacter koseri
atgccttcggggcgagtgcgtttccggctgcgagcgtcggtgccccgaacatccgggacagaacttattggatggcccacacccacagcgaatgcctggaagcatcccagcaacgcgggccgtcagggaggattgaacttgcagacagcggctcagctttcgggctggacaactccgagcgtcagcgacagcaggcgtggagggcgagggattaccgagggcatgtccggcagcagccttgcgcaacaggtaaaaatggctggctggcccacgccaacagccagcgaccacaaggggggatatcctggggggaggattcgcaacgggaaaatatcaacagatcgtctggatgtggtggcacagattgcaggcccggtccggttaacggcttctggaaagatgctgactggctcaaatgcacagatggaaaatggaggccagttaaatccggccttgagcctttggttaatggggctgcctccagagtgggacgaattcgaacctacggaaacgccttaa

SEQ ID NO: 80254 - DNA, 306 bp, Citrobacter koseri
atgtcagacccgatgatttacgaggatttgctcaggtccatttctttgcaggggttggcgtttggtcatatggcctgcgccgtgtgggctgggaagacagcagagaagtctggaccggttcctgcccatgccagcctttcagcgcggcaggcaaaggaaaagggtttgctgacgagcggcacttatggcccgccatgcattagctggtcgggcagcgtcgccctgtcgttgtctttggcgaacaatctgcaagtgctgacgcaaatgactggatcgaccttgtacagactgacgtggaagccctag

SEQ ID NO: 80255 - DNA, 858 bp, Citrobacter koseri
atgagcactatcctgaaatgggcgggaaataaaaccgccatcatgccggaactgattaagcaccttcctgctggtccgcgactggttgaacctttcgcgggttcatgcgctgtaatgatggcgacagactatcctcattatcttgtcgcagatattaacgctgaccttattaatttttataagaaagcggccaatcattctgaggaattaatacaggttgcaagggtgtttttcagcgaagataacagtgcagaaaaatatcatgaaaatcgcctgcgttttaacgaagatacatccctgaccgcgctagagcgcgccgcattattcctgtatttaaatcgccattgttatcgtgggttgtgtcgttataaccaaagcggcatatttaatgttccctacggtaattataaaaatccatatttccctcacgcagaaatcctcacctttgcagaaaaggcaatgcgtgccaccttcatctgcgccagttatgacgaaacgctggcaatgctgcaggcgggtgatgtcgtctactgcgatccgccttatgacggtacttttagcggttatcacaccgccggctttacagaggacgatcagtatcatctggcgtccattcttgaacgccggtcatcagaaggtcatccggttattgtgtccaacagcgacacgtccctgactcgttcgctttatcgtaatttctcccactatcggctgacgacaaagcgcagcatgagcgtggctgccggtgatggtaagtccgccgtggaaatcatcgctacttctaaacctcattactggattggttttgaccctgctggcggtcctgattgctgcgttaagtatgaggtgcgggcgtga

SEQ ID NO: 80256 - DNA, 174 bp, Citrobacter koseri
atgacccgtaaactttcaatgcgcccttcgatcaatctcgtgatctcggaaccgtacattactgtcgaagagttctgccgtcgcacaggttacaaggacggcactgttcgacagatgtaccgcgagaatcgtttgcccatcaggaagaaagaaggcttaaacggacttatctaa

SEQ ID NO: 80257 - DNA, 606 bp, Citrobacter koseri
ttggaaggatcaacgaaagattttacgattcgtaaagcaccaactttacctgaaggtggtagagaacccattgaacgcatcgtccaggcatatggcttttcgtcccgacaggcgctatgccgacatctaaatgtctctcagagcacgatggctaaccgtataatgcgcggaaactttcctgctgattgggtgctggtttgcgcgatggaaactggcacctctcttgagtggctgacctatggccgcggtgattcgaacatcacaaatcaggagcagccatcagccaaaattgaactcaaaaaaatcacaaatgggaatttctcattatctgattgggttgaatatgacgctcagctcttaccaagtgatgttaatgcaccactattagtacatttcgagaaacagaattacctagtagatatgatcgccacagagatcaccgacgggctgtggctcattgagattgataagctcattagcgttaaagagctgtaccgttttccaggagggcgcatccgcgtagagaatggaaaagcctcatttgaatgcaaggcagatgacatcagagttttagggaaagtcgttgcacgcactgagtatctataa

SEQ ID NO: 80258 - DNA, 1017 bp, Citrobacter koseri
atggcgataagtaaattacccaacggtaaatggcaagctcaggttttcccaaacggccgtaacggcaaaagaatacgtcaccagtttgcaactaagggtgaagcacaatcctatgagaagtttgtaaaagagcaggctcaggaaaagccttggctgggagagaaagcagataagcggcgagtaatcgaactggttgaattgtggttcaacacgcatggcattacgttggcggatggtgagaagcggcgaaccacaatgacgtttgcctgcgagtcgatgggaaacccactcgcaaccgagtttaacgctaagatttttgcatcttatcgcgagcagcgattaaatggaaagataacccgctccactcgagtgaagacggttacgcctcgcacagtaaatttagaactggcgtatttcagggcgatgtttaatgaactgcgccggttggacgaatggaccgctccaaatccgttagagaatatgcgcgagtttaaaatcagtgagccggagatggcgtatcttaccattgaggaaattaaaaccctcctcgccgaatgtgagaaaagccgttccaaaaacctggctaccattgtgaaaatctgcttggcaactggcgcacggtggagcgaggcagaaggcttgaaaggaaaccaaatccgcgccggccagatcatcttcgtaaaaaccaaaggcaagaaaaatcgcgcggttccgataactgaaaaattacaggttgagctaccatcaagcaggaaggcgcagttgctttttaaaccatgttattcagcttttagaaaagctatgcaacgtgctggcattgagacaccagctggacagcttacgcatgttttgcgtcataccttcgcgtctcatttcatgatgaacggcggtaatatactagtgcttcaacgtatacttggccacacagacatcaaagtgacaatgcggtatgcccactttacaccagaacatttatcagacgctatgttgcttaaccctcttgataggctgggttaa

SEQ ID NO: 80259 - DNA, 1563 bp, Citrobacter koseri
atgaagtatagagaaagtcagactgacttaagtttaaggaaatggttttcaaattccctagagcacgcacttttaagaaaagtggctctcgagcaaggaaggctacgctccttatcttcatttgaaattaaaatagattatccattgctagcgatagcgggaagaaatggctctggaaaatcgaccttattagctatgattgcttgtgcttatcacagcgctgaagataagcatattatgtctggaaagagaaaaccttattatacttttgcagattttttcattcagcattctgacgaagtgcctcaagaaggaatagcaataggatattatattgcccacaacaactggaaaccgtctaagacagtccccacaggaaaagggattggcaggcaactacgatttaaaaagaaaggaggcaaatggaataattacgacaagagagtggaacgtcaagtaatcttccttggaattgagcgaatagttccccacagtgaaaaaagtcaatccaagagttatgctaaattatttatatttaatggccatgagttaggatgtgaaaacgaaataaaagaaaacgtaggttatatacttaacaaaaaatatgatgattttaaatttgtttcacactcaagatataggttaccaattgtcacacatgaaggtaaaacaatatctgggttcaacatgggagctggagagaatgcactcttcgaaatattctctatattatattcagcagagcttggggcattaataattgtcgatgagatcgagctgggccttcatgcggaagcacaggttaagcttattgaaagattaaaatcggcgtctcataaaagaaaactacaaattatatttactactcactcagatataatttttggatgtattccagatgatgccagggtctacattgaaagtataaactctaaaactataattaatactgaaatatcccctgaatatgcctttggaaaattaagctcggaaaactctcaagaactcgatgtattggttgaggatgtagttgcagcaaagcttttatcaagcgttcttccaagtaatatccgctcaagattgcaaattgaagtaattggctcagctagctcattatcacgtcaaatggctgctattttccaaaggggaaagaaaaataaggtaataacaatttttgatggtgaccagaaaagattatataaagacaacctaaaatgcgctcactctatgctagaaaagaaccacgaagagttcacgcagtggttctcagagaatataaactacatgcccggcgatgagtggcctgaaaaatggattataagtaaaaatttagaatatgtagataatctttcaatactggtaaacggggaacctgacgttactacagctgcactaaatcgtggtacaggctcagaaaaacataaagaattttacgaagctgcgctattacttggtgttaatgaatctgaaatgctggatagatgttgcataaacctagcgatgatgtgtcccgacactgtaagttatcttgtcgatttcataaaaaataaattatctgaataa

SEQ ID NO: 80260 - DNA, 282 bp, Citrobacter koseri
atggctatttatcgaaataggaaatggctcgctgccgttggtcagattgagcgttgcgttctatgtggggcgtgggggacgcaagtagcgcaccgcaatgaaggtaaggggatggggcttaaggttgatgattgtgcaactgctgcgatctgcgtgacctgtcattcagagattgataacgggaaaaacctctctcgtgatgagcgtcggcagttaatggatcgcgctatcgtgcttactgtcattgagatagtccgccgtgggctggtggtgccagtatga

SEQ ID NO: 80261 - DNA, 1065 bp, Citrobacter koseri
ttgaacgcagttgacctctttagtggtggtggtgggttaaccatggggctaaaaatggctggattcagtgttaaagctgctgtagaactggatacccatgcagctgcaactttccaagctaatcatcacgatacaaaattatttgtacaagacatacgctttgttaaaggtggtgacatacttgatcttgttcctggtaagcacttagatctgttgtctgcatgtccgccatgtcagggatttaccagtcttacagcaaagtacaaaagagaagatcctcgtaatcttttaatcaatgaaatgttgaggctggttgaagaaacaggtccgtcagcaatcatgatggaaaatgtgcccggattggcttctcggggtaaccatttgctttcacccgtgatagagagattgaaagagcttgggtactacgttaactatggggttttacaggtagcagattttggtgttcctcaattcagaaaaaggttcgtattactggctggtaaaggctttagcattcctttgccagaaggaacacattcgaaagatgggcaaggaaagcctaagtggaggaccgttaaggacgctattggggggatgcctaagcctttgacgctttcccaagccaaaaagcaagggcgatttcctttgtcaagttggcatatagttagggacatttctgatttgaatattcagcgtttacaggccgccattcctggcatgtcttgggattgtattccggaggaccttcgcccagattgccataagggagattacaaaggtttcagtaatgtttatgggcgtatggcttgggatgatgtttcgccaacaatcacgggaggttgtactactctcagtcgtggacgttatggtcatccagaagaaatgaggacgatctctgttcgtgaagcagcaatgctgcaaaccttccctgacgactatatttttgatacagcattgatggaaaaagtatgtgtcattataggaaatgctctcccatgtaaatttgcagaatatttagccacgcattgcaaaaaattcataactgaggcaaagctgaaagaatga

SEQ ID NO: 80262 - DNA, 2109 bp, Citrobacter koseri
atggcacgtcagtatgaaatgcagatatcaaggatgacagtagataagctaggcgtaaaactctatgacagagcttatgccgtaatagctgaactagtgtcaaatagttatgatgctgatgctacaaaggtcataattaaagctccaatggggcaatatcttgcaattaagcaagatggcattgttaaatctaaatctgtgacaatagaagtagaagataatggtgtcgggatggctccagatgaattgcaaaatttctacttggttgttggtaaagaaagaagaaaggatccaaaacgtggtgaaacatcgagagtttttaatcgaaaagtcatggggcgtaaaggtgttggtaaattagcaccttttggagtttgcaaaaaagtagaaattataagtgctggtggggaaaaaattgcacgtaatgggattcaaggctatgaggtggctcatattctcttagataaagaaaaaataatggatgacactgaggtgtcatataaccctgagactggagctttagatggtacattgagtgacaaaacatatactaagattattttaagtgattttgagtatcgtaaaataagtgaaataaaggaactttcacgtcaattatctcaacgttttggtgtcaaaagtggaaattggaatgtacgattaattgatacaactaagactatttctaatccagattatgaagtcgaggttggtgagttcagtgttcctgtgatgcctaactcgaaaatagaatttagttctctatcgggaagtcttgctactgattcttgtgcggatttagctgactatgtggcaactaatcctgatggaactcgttgtactgtggttgccgctggatttgaacatgagggaaaggcgtatccaatcttaggatggattgcgtatgctaaggaaccatacaaagatgagttaatggctggagtgagaatttattgccgtggcaagtttgccgctcaaacaacagtctttaatcgaaaagctggttttacaggtgagcattcgattcgttcatatttagtaggagagttgcacgcagactggctagatgaaaaagaagacctgatccaaacggatcggcgagatattttatggtcagatgacttaggtactcaatttcaggattggggacaagcagttatcttacaggtcggtaagataactcgcgatcctttgcggactgatatgatgaagcaattttttgaattagcaaatgtagaagataaggtaaaaaatgcttatccaggtgctaatcagacagatatgcggcagcaagcgaaaaaaatagcaaagttattgggtaaatctctgcgtggagatgaactttatgatccagaagctttagaaaatctagttcagttaagtattatgttggcaccattacaatctttagatgagaaattagttgaagcatcaagcaaagatggtactcctctaaatgtattaaacgatattttagcgactgcgcaattggcagaaacagttagtttcggccaaaaagtaaagaaaagactacagattatcgagaggcttgaatccttaaaggatgcaaccaatacaccagaagatgaacttcaagacctcatttccgcagctccttggcttgttaatcctcaatgggttccagtcactgctaacagggctttaactacgttaaaaaaagaatttcagaagttttataaagctaaaacaggggatgatataaatttggtggattttgacaataaatctaaaaggcctgattttgtattattcagccaagatggtaagttacaagtaattgaaataaaaaaaccgcatcatcatattaaaaatgaagaaatggaccggattataaattactttgaggcttttgaggcatttttatctgatcctagacattctgattttaaatctatagcttcagattttcacgtcactcttgtgagcgatggcgagaacttgagtggtgcacgtcgggtggcatataatacttacattcaggaacaacgcttgactcctgttgattgggctggttttctgttgagaacaactaaaactcatcaagagtttcttgatgaagccgaacaattaaaggcaagaaacaattag

SEQ ID NO: 80263 - DNA, 213 bp, Citrobacter koseri
gtgattacttatctttttttcggtttccttattgtttgcactctgttttgcatggtgatgttatggcgggtggtcaaggtggcagagtggcgactcaaggctctggagatgagtgctgatgattatcgggcactacctgaatttcataagatgttgtggatgatttggatatggaggctggaacgcttcccgagacgtaataagcgggtatga

SEQ ID NO: 80264 - DNA, 417 bp, Citrobacter koseri
atgacaactaacaaccaccccgcgcacggcccgctctcaaattaccgcctgcaccgcattcgtgaaatcttgggcaaagcagcagcacaaagcgacggcggtaacatcggttacgcaatgtctgacgctgtgaaagcgattgatgaattgctggaagggaggaaggcggagccggttgcttttatcggtgaaagaatgctggaagacgtgaccgatggtgcaagaagttgcggacgaatttggtctgatggtacagacgaaatcagcggagagcgcaggattccgctctacacagccccgccagcgcaggtggtgccagatgaattgcctgaggattgcggattcaaagacagttatatcgatggctggaacgcctgccgcgccgccatacttcagggggataaaaacaatgggtaa

SEQ ID NO: 80265 - DNA, 318 bp, Citrobacter koseri
atgaccactattaccaataacagaatgaacacagaagaagtaaaagaacgtatcgcagaaggtaacgaagatgcctatgacttgctttctgacaaggttcctacggcatatcgccgctttcaccgtctggaggctgcacttgcaaaacttcttgaagaagtacgcgaaagttatccggatgcaaggtattacacaactggcggcgatgggttcgcgctattgttgggggagtcacatagcggaagaggtgaaacaccaaataatgaattaatggcactatcggcggcaaagttgaccgttcagggcggggactggtaa

SEQ ID NO: 80266 - DNA, 759 bp, Citrobacter koseri
atgatccactatcatggcgggcctattactcccgacacttgcgctctgaaagcgtggaaaggacgtcacgcattcattagttttgccaactcagggcaattagcattagccagtgaggtaactcagtcgttcgctctggataacggtgctttttccctgaaagacaaggaaggtaaatcccaccgtaactggcacgattactacgcgtttgttggtcgttggatgaatcacccacggttcgcattttccgtgataccggacgttatcggcggtagtagcgaggaaaatgacgcattaatcaccgagtggccgtacggtaacattattggcgctccagtgtggcacatgaacgaaccggatgagcgttttatccgtctgtgtaacgagttcccgcgcgtctgtataggcagtatgggcgaatacgacagcaggcgccctcgccgttgtgtggcgcgattgcgagacctgattcgacacgttgtcgatgaaaacggatacccagtctgcaagttgcacggcctccgcatgttgaacgccgatatttttcgtcatatcccgctctcgtcagcggatagcacaaacgtcgcacggaatatcggtatcgataaatcatggcaaaaatcagcgtatgcgccagcaagtaaagagacacgcgccgcagtgctggtagaacgtattgaatcatttaactctgcaagttcgttacagtacgacgcagagcgcgaccgttttacgccgcagttggcatttgagatttga

SEQ ID NO: 80267 - DNA, 234 bp, Citrobacter koseri
atgaaagcacttgataaagcaataagcattgcagggggcgcaacccgtttagcagaaaagctcgatgtatcttcaatgacggtcagccattggcgtcaccgtgataatggggtcgtaccggctaaccgtgtcattcctattttcaatgctacaggtgtaactccacatgagttacgccctgatttgtacctcaaccccacggatggattaccggcgcaggaagcgaggacgtaa

SEQ ID NO: 80268 - DNA, 297 bp, Citrobacter koseri
gtgagcgcacaatcagtcaacaactggtttgtcagaggggcgataggaaaaagctcagcaataaaacttgccgatgcgttgggtgtaagtcttgagtgggttctaggtcaggacgtggatgctaaggacggtttgagacacgacgaacggagactattggaactctataatcaactaccaaacgaagaagagcagcagaacatgttgcggatcgtgtctctgcgtctgaaggaactcgacgagctgtacgccaagtacatggggcggcggattaagggtgacggagaatcgcaataa

SEQ ID NO: 80269 - DNA, 684 bp, Citrobacter koseri
atgactgagcgcggaatgatttttaatgatgaaatggtacgggcgctgctggatggccggaagacgcagacgcggagaattatgaaaaaccagccagcgggcgattacccagacacgccagcactggttagaaatgttggtcctggttttcagtggtacggaagttatggtgaaagcagcattttcaattgcccatttggtgccgttggcgatcgcatctgggtgcgagagacgttccaggggccgcttgtttctgaggagttattcgaagaatacctggcccattctgaaaagttcgaaacgccgcaatactgcgaatatgccgccgatggtggcgccaagcctgaatactgtgatcttaacgataatctccgtcatggctggcgcccatccatacacatgccgcgctgggccagccgcataaccctggaaatcaccagcgtacgcgtggagcggctgaacgatatcagccaggaagatgcacaggctgaagggattattgatggtggctgcctcaattgcggcgagccggagccatgcggctgtgttaatccacaaccagacgcaactgatgccttcgcctacctctggcagtcaatctatgggcaagaaaattgggatgctaacccctgggtgtgggtaatcgaattcagacggatcgacgggggtgaccatgcgtattga

SEQ ID NO: 80270 - DNA, 297 bp, Citrobacter koseri
atggcgcgaacggtcaaaccgcctctccccaccgtggcgggaaaaaaatctctatctgattgccggatggcggctacgccttatccggcctacacgattacagaacaacttgtaggcccggtaagcgacagcgccaccgggcaattggccgtaatccggccgacacaatcacagaacaactctgtaggcccggtaagcggcagcgccaccgggcgattggccgtaatccagccgacacaatcacagaacaaccctgtaggcccggtaagcggcagcaccaccgggcaattgccgtaa

SEQ ID NO: 80271 - DNA, 1068 bp, Citrobacter koseri
atgacagctcaatcctggcgcgcattacgcaccaaaaaatatcaattctctttacgcctttttctgtttctcaatgcggtgtccgggctgtttacgcttgtctttcctctttatgaggtcagggctgtctcagtcccggcaatactgctctttgttgcaagtacgttaattctgatatggcacggaaaatatacgcataaaaagattaatatcccctttatttctgttatatcaggcatattgtgggcctggcatatcacactgaaatataatgctatgaaccatagcgattatacttttctactcatcgcccttctctgcgtgttatttattggctccatcgcctttgctaataatatcattgcgtttacgttccattcattgccttccgttctggcctgcctgtggcttaatggcagcgaacacggcatacggattatttatctcatggcgctcccgatggcgggcattgccatccagcatgttattcaaaaacgctatgacgatttcgctcaacaactgatgtacaaactgctggaagagagagaaacgctgaacgggctgagtatgctcgatcctttgactggcctgtataatcgccgcggcctgcaaaataagctgaatacgctccttgctctggaaacgcacgaagaacactacgtattgctgctggatatcgatcacttcaaagcttataacgatcactatgggcacatgatgggcgaccaggctctcattcgcgtttcagccgcgattcgtgacgctgtccgttcccgggatattgtcacccgttttggcggcgaagagtttatggtcctgctgaccgcgaccgatccacaggaggcgcgcacgaccgccgaacgtattcgccagaaggtctacgatctcaaaatcccacatatgtttaatgtcagcgtggcgaccaatgtcaccatcagcgttggcatcgcgccgctactgggtcaggacatggaggctgcaatcgtcaaggcggataaagcgctgtatgaagccaaaaacctggggcgcaacaacattcttgcgagtgacgaactgcgtacggtctga

SEQ ID NO: 80272 - DNA, 969 bp, Citrobacter koseri
atggaagttattaatatttggagatcctttcttaaacattttaaacagaaaaaattagactctgcggtggttgtctacggcatgatcgcaatctatttaattccctataagtttcctttaaaaagttacctggttgcatttctttttatatctattctgatattctcttgtactcaagaaaatcgagtcagggaatatattagtttctttatacgtacagacaataactatttattgactcggtttgctggtattctatcgctaactgcatggtcaatttttttgcttttgttgttgtctgctaatgtgtttgttaacaccataacgtattggttagcaattttattttcagtctctatcctcattagtagcattttgactgttttagatcttgccagaaataatacagcaaaaacccttaaggtaatcggcctggctgttaccgcattttcaggtatttttgcttttactagtagttactctgccagcattttctggcaaattagtaatctggcgctatcctcttctccgtggttagaatattgttggaaagccaccgcatttcttatgtttttcttgtggttatcacaacctatttgctatgggctatttttgcgttacggtgataaagcaaaagggtatcgaatctttacattaacgggtgcctttatcatgtcaatatttttgtttctgcttgttcctatgctgatcggtgatgccgcttattttgtgctaaaaaagaccatcaactatgaatggcgtgatgaagcaaaatgtggtgagctaaaaattaagaataaaaacgaaaagtattttggttttaatactaataaatatactgtcttttattcagataaaaatgaaaaatgggggttctatgagcttacctgcaaaaaagggagtgacaggagagattcttatattgtagaacctttgccggaatataatataccctcgtggttaaggtag

SEQ ID NO: 80273 - DNA, 2424 bp, Citrobacter koseri
atggctgacctgaacctgagtaccctgacggaagcagacatcatcaccaaacgcgttatgcccgccatccttgatgctggctggaacgacacaacgcaaatcagacaagaggtcaaactccgggacggtaaggtcattgtgcgcggcaaagtcgcggcgcgcagaacggtgaaatctgccgatatcgtgctgtatcacaaattaaacatgccactggcggtgatcgaagccaaagccaataaacatgaaatcggcaaaggcatgcagcaggcactgggttatgcccacctgctggacgttccctttgcgtttgcttctaacggcgatggctttatcttccacgataaaacggcaatcggcgcgattgagcgagaaattaccctcgacgaattcccaacgcctgacgaattgtggcaaaaatactgcgtctggaaaggttacaccgaaactcagcttccggttattacccaggactactacgatgacggcagtggcaaagcgccgcgctactatcagctacaggccatcaataaaacgattgaagcggtctctgccgggcagaaccgcgttctgctggtgatggcgaccggaacggggaaaacctacaccgccttccagattatctggcgcttatggaaagcgaaaagtaagaagcggatcctgtttctcgccgatcgcaacattctggttgatcagaccaaaaacaacgacttcctgccgtttggcacggcgatgactaaggtcaccgggcgcaccatcgacccggcatttgaaatccatctcgcgctgtaccaggccatcaccggcccggaagaagatcaaaaagcctttaaacaggtggccccggatttcttcgacctgattgtgatcgacgaatgccatcgcggcagcgcctcggaagacagcgcgtggcgcgaaatcctcgactatttcagcgccgccacgcagattggcctaaccgccacgccgaaagagactcatgaagtctccagcaccgattacttcggcgacccggtgtatatctactcgctcaaagaaggcatcgaggacggcttccttgccccttataaagtggtgcgcgtcgatatcgacgtcgatctccagggctggcgcccgaccaaaggccaggcggataaaaacggcgagctgattgacgaccgcatctacaaccagaaagattttgatcgcacgatggtgattgatgagcgcaccgaactggtggccaaaaccattaccgattacctcaaacgcaccaacccgatggataaaaccatcatcttttgtaacgacatcgatcacgcggagcgaatgcgccgcgcgctggtcaatctcaacccggaacaggtgaaaaagaacgacaagtacgtgatgaaaatcaccggcgatgacgacatcggcaaagcccaactggataactttattaaccccaaaaaagcctatccggttatagccaccacctccgaactgatgaccaccggcgtggatgccaaaacctgcaaactggtggtgctggaccaaaacattcagtcgatgactaaattcaagcagatcatcggtcgcggcacccgcatcgatgaacgctacggcaagctatggttcaccatcctcgacttcaaaaaggccaccgaactgttcgccgacgaacgcttcgacggcatcccggaaaaggtgatggataccacgccggaagatatcgccgacccggagtctgattttgaagagcagttcgacgagcacgaggaagaagccgaagacgacatcatcggtgccaatgaagatcccgcgccgtataccgtcaccggttcagatgatgtcggcccgctgccggaagacgacgagaacaaagtgcggaagttccacgtcaacggcgtggccgtcggcgtgatcgcccagcgcgtgcagtattacgatgccgacggcaagctggtcaccgaatcctttaaagactacacccgcaaaacgctgctcaaagagtacgcctcgctggatgatttcacccgcaaatggctggacgctgagcgcaaagaggccatcatcaaggaactggaacaacaaggcatcatctgggaagtgctggcggaagaggtcggtaaagacctcgacccgttcgacatgctgtgccacgtggtgtatggtcagccgccgttaacccgcaaagagcgggcggagaacgtgcgtaagcgcaactatttcaccaaatactccgacgccgcgcaggcggtgctgaatacgctgctggataaatacgccgacgcgggcgtgcaggagatagagagtattcaggtgctgaagctcaagccgttcgacagcatgggtacgctgccggagatcattaaaagcggattcggcgaccgtaacgggtataatcaggccatcagcgagctggagagcgaaatctaccacttaccgccccgctccgcgtaa

SEQ ID NO: 80274 - DNA, 1470 bp, Citrobacter koseri
atgtcaatcagctcggttatcaaatcattacaggacattatgcgcaaagacgccggcgtggacggcgatgcgcagcgcctcggccagctctcctggctgctgtttctgaaaatctttgacgcccaggaagaggcgctggaactggagcaggataactatcagtacccgatcccacagcgctacctgtggcgcacctgggcggcgaacgccgagggcattaccggcgattccctgctggaattcgtcaacgacgacctgttcccgacactgaaaaacctcaccgcccccatcgataaaaatccgcgcggctttgtggtcagacaggcgttcagcgatgcctataactacatgaaaaacggcaccctgctgcgtcaggtgatcaacaaactcaacgaaatcgacttcaccagcgccagcgaacgtcacctgttcggcgacatttacgaacagatcctcaaagatctgcaatcggcgggcaatgccggtgagttttataccccgcgcgccgtcacccgctttatggtcgatcgcgttgatccgaagctcggcgagtcaattatggacccggcctgcggcaccggcggcttcctcgcctgcgcgttcgatcacgtaaaaaacaactacgtgaagagcgtagccgatcaccagacgctgcaacagcagatccacggcgtggagaaaaagcagctcccgcacctgctggcgaccaccaatatgctgctgcacggcatcgaagtgccagtgaaaattcgtcacgacaacaccctcaacaagccactgtcgtcgtgggatgaacagctggatgtgattgtcaccaacccgccgttcggcggcaccgaagaagacggcattgagaagaacttcccggcagagatgcagacccgcgaaacggcggatctgttcctgcaattgatcgttgaagtgctggcgaaaaacggccgcgcagcggtggtgctgccggacggtacgctgtttggcgaaggcgtgaaaaccaagatcaaaaagctgctcaccgaggagtgcaacctgcacaccatcgtacgcctgccgaacggcgtgtttaacccgtacaccgggatcaaaaccaacctgctgttctttaccaaaggccagccgaccaaagacatctggttctacgagcatccgtacccggcgggcgtgaagaactacagcaaaaccaagccgatgaagtttgaagaattccaggccgagatcgactggtggggcaacgaggccgacggcttcgccagccgcgtcgaaaacgagcaggcgtggaaggtcagcatcgatgaggtgattgcccgcaactttaacctcgatatcaagaacccccaccaggcggaaaccgtcagtcacgatccggatgaactgctggcgcagtacgccaagcagcaggaagcgattcagaccctacgccaccagctgcgcgatatcctcggcgcggcgctctccggcaaggaggccaactga

SEQ ID NO: 80275 - DNA, 1677 bp, Citrobacter koseri
atggcggtggaaaaactgattgtcgaccatatcgatacctggaccacggcgctgcaaacccgctccacggccgggcgcggcagttcgggtaagattgacctgtacggcatcaagaagctgcgcgagctgattctggagctggcggtgcgcggcaagctggtgccgcaggatccgaacgatgagccagcgtcggtgctgctggagcgtattgcgacggaaaaagccgagctggtgaagctggggaaaattaagaaacccaagccgctgccggagattagcgaggaggagaaaccgtttgagctaccggtggggtgggaatgggtgcggctgggaaccttatttaactcaatccagagtggaggaactccaagcaaaatcaaccctgcattttggggaggggatataccttgggccagcgtaaaagacctaggctcttcgcaatatatttcgaaaacccaagactatattacagaggcaggtttgttatctggtagtaaattagctgattctggagatgtattaatttgcactcgtatgggattaggaaagattgctattgcttcttgcccaatagcatttaaccaagatttaaaatcggtaaagctcacaagtaatattattcctgattttttctttaatacctattccactgtaaaaataaaaggtacaggcacaacagtagaaggaatcaagcaagaacaattggtgaattacatcacgggattccctccatttaatgaacaaaataaaattgttgttaaagttaaggagttgatgtccctctgtgaccaactggaacagcactccctgaccagtctggacgctcatcaacagctggttgaaaccctgctaaccacactcaccgacagccagaacgccgatgaactggccgaaaactgggcgcgtatcagcgagcatttcgacacgttttttaccaccgaagccagcattgacgccttaaaacagaccattctgcaactggcagtgatgggcaaaataacaactccgaaaatatctccctctacaaagaacaaaaatacaaccgcacaaaacaactctatcttcagtgacctaatgcaatatattccagcacattggaatctttgtaccttggatcagatatcagcagctatcatagattgtccacattcgacacctaaatggacagaacaaggttttatttgtgtaagaacaaaccaatttaaaccaggatatctagatttaaataattcaagatacgtcagcgaacaaacttatattgaacgaacccaacgtttagaaccatcgtatggtgacatactttatagcagggaaggtggaatattaggggtcgcatgccgagttcccgaaaaaattaagatttgtttagggcaaaggatgatgttgattagacctaaggagaatatttcttctgagtatcttgagattgtattaaacagccctttaattacgtctttggctcaaaaaatgactactggcggagctgctccaagaattaatgtttcaactgtaaaaggatatcccattccttaccctccacttgaagagcagaatcagataattgaaaagatcaatgaactgaatggagtttgtgaacaattaagatcacacattcaatccgcccaacaaacccagctccacctggccgacgccctcaccgaggccgccataaattaa

SEQ ID NO: 80276 - DNA, 345 bp, Citrobacter koseri
atgactaccccgcattctattgcagaattcaccgatccagaagtctccccggcaaataatcgtctgggcaccgtcacttatgcgagtcgttatccggattacacgcatgttccggcaattattatgaaaggccagtggctggaaaccgccggtttcgccaccggctgcaaattcgatgtcagagtgatgcccagttgcattgtattaacggcaaagctaccggagccggaagaaccggcgttattacagtcgctgcgtcgggtgtgcaagctgtccgcgcgtaagcaacagcaggtgcaggagtttatcgacgtaatttcggcgaagcctgccaggcagaaatag

SEQ ID NO: 80277 - DNA, 1734 bp, Citrobacter koseri
atggcaaatccaataaccaaactaaaaaaaataaatgttgtaaaatttcgcggactaaaaaatataaatatagaatttggttcgcgcctaactgttatttgtggtaaaaacggcacttctaaatcaacaattcttggtattatcgcccaaatttttagttttacaaaagatctgtctaagaaccccgaggttgatttaacacaatataagacattaactaatggcaccttcaagtcagctttcagtgaacattttagactttcagaacaatttgatactgccggttcaatggaagtcaggattagtgtttatgatggcgcatctaacaaacatcttgaaaagctaacattgggtctatacagctccagtgacagggataaatcaaggccaatagtcaggggtaatgactccataccggggaaaaaccaaagtagaaacgtcacccatccagttatttttctaagcttagccagacttctccctattactctccggactgattactcaacaagagatgttcagtatatcaatgaaaactcagatgatataaaaataatgagtaatcaactcttacttaagaataatgggtgttcagtaacagccacgaaagggacgatcgattcaatggtcgtacatggcgataattatgaccaccaatcagtttctgttggtgaggataatgtagggcaattaattcaagcaatattttcatttaaaaggctaaaagaactttatgccgattatcatggaggtattttattaattgatgaagcggacgcaggtcttttccctgctgctcagttagaattaattaacatcctagctaaagcagctaaaaaatatgacttgcaaataatcatgacttctcactcaccattaataattgaagatattttcaatcgttccaaacaagatgccaacggatttaaaacaatatacctaacagatacttatggtgatattaaaacaaaagataatctatcatgggctgatatcaatgctgatttgcatgttgaaactgtaaaaataaatgatgagattagccttccaaaagccaacgtatattttgaagataaagaaggtttcgattttttcaaacaattgataattgatagaagaataaacagaatattgaacccattaggaaatataaatattagctgtactgctatcctagatttaatggctagaaaaatccctgagtttactattaaaagcctagtggtcttagacggtgatgtcgctctcgataacagtgataatgcaaaaaaagcaaaaaaagagagaagcttatgcttgcttccaagcattcttcccccagatcaaatgatttttgaattcttatataacttacctccagatgatacatattggaacaataaaaatagatttacaaaagcagtatttatgaaaataacaaaagacataattacaacgctaaaaataggtaaccatcctattgatttacaaaattctatagagaattataaaaaatcaaacaaaaaccatggcggagtggttagaaaactatttaaagattttgcccatacacctgagttcctagcacaagtaaaggggcgtgttaaagataatccctatcgatattgggtcgagaaacaccccgtggaatccgatagtttcaagcatgaattaatcaaaaatcttaaaattattatgacaaatggacatggcgttgactctgctactatcacttcgtatctgtctggcaactga

SEQ ID NO: 80278 - DNA, 882 bp, Citrobacter koseri
atgcgttttaacaccccacttcgttatcctggcggcaaaggcaagctttcaaatttcatgcttcggattattgaagataataagctttcgcctatacattatgcagagccatatgctggaggggctggtttagcgctgaagcttttacatttaaatgtagctgaaaaaatcattcttaatgatattaatatctctgtttatgctttttggcacagtgtattaaataatgcagatcatctatgtgctttaattgaagaaactgaagtcacaatagatgagtggttcaaacagaaagaaataattaataatccaaaagaccatgatatgctaacaattggtttttctaccttttttcttaatagaacaaaccgttctggaatattaaaaggcggtgtgattggtggtaaaaatcaagaagggcaatggaaacttgatgctcgctataacaagagtgatttaatttctcgtattcagaaaatatcaaaaaaccgtgaaagaatagatttgtataacatggatgcaattgatttcataaaaaagatagttgttcaattacctaagaaatcattaacatatttagacccgccatattacataaaaggtaagggattatatatcaatcattatgaacatagtgaccatgttaatgttgcaaaagtagtgcagaatgatattaaaacaccatggattgtttcttacgataacactccagagatccaaggtatgtataaggcatcatcattagtgtatggaataaactacagtgctcaagatcgatataagggctcagaagtgatgttcttcagtaaacgattgaaggtctttaaaaccgatgatccaactaaggtaaaagcacctaccattaaaaatgctatgagctag

SEQ ID NO: 80279 - DNA, 2670 bp, Citrobacter koseri
atgagtcagtctgatacaacggtttctacccgattctcccttctgccgggaagcattacccgtttcttcttattactgatcattgtgttacttgtaacgatgggcgtgatggtgcaaagcgcggtcaacgcctggctgaaagacaagagctatcagattgtcgatatcacccatgctattcataagcgcgtagacacctggcgctacgtgacctggcaaatctatgacaacattgccgcaacggctagcccatccacgagcgagggcttgcaggaaacgcgtctgaaacaagacgtctactaccttgaaaaaccgcgccgtaagaccgaagcgcttatttttggctcgcatgacagctcaacgctggaaatgacccagcggatttccacctatcttgatacgctgtggggcgcggagaacgtgccctggtcgatgtattatctgaacgggcaggacaacagcctgattctcatctccaccctgccgctcaaggatctctcctccggctttaaagagtctgcgattggcaatattgtcgattcccgtcgggcggagatgctgcaacaggcgaatgcgctggatgaacgcgaaagcttctcttcgttacgtcgtctggcgtggcaaaacggccattactttacgctgcgcaccacttttaatcagccggggcatctggcaacggttgtggcgttcgatttgccgatcaacgacctgatcccgccgggaatgccgctggacagcttccgtctggaacccgactcctcaaccacgacggtacgtaatacggagaaagagtctccagacagcgtcagcatcagcttcaacagcgccaaaattgagatttcttccgcactgaactcaaccgatatgcggctggtctggcaggttcctttcggcacgctattgcttgatacgctgcaaaatatcctgctgccgttactgttgaatatcggcttgcttgcgctggcgctgtttggctacaccaccttccgccaccagcctggccgttcaacggaagtggcgacaagcaataccgcaaataatgaactgcgtattctgcgcgcgattaatgaagagatcgtctccctgctgccgctggggctgctggtgcatgaccaggaggccaatcgcaccgtcatcagcaataaaatcgccgaccatttgctgccgcatttaaatctgcaaaacatcaccagcatggcggagcagcatcagggcatcattcaggcgacgatcaataacgagctgtatgaaattcgcctgttccgcagccaggtcgcccctcgcacgcagatctttattattcgcgatcaggaccgggaagtgctggtgaacaaaaagctcaggcaggcgcagcgtctgtatgagaaaaaccagcagggccgcgccgcgtttatgcaaaatattggcaatgccctgaaagaacccgtgcggatactggcgatcaacgccgctgccgcagacacgccggaaagccagaagctggcgaaccaggcggatgttctggtgcgtatgatagatgaaattcagttggcgaatattctggagaatgatacctggaaaagcgagccgacgctgttctccattcaggatctgattgacgaagtggtgccggacgttctgcctgcgattaagcgtaagggtctgcaactgctgatcaaaaaccaccttagcgccaacgatgaacgccgtggcgaccgtgacgccctgcgccgcattctgctgttgctgatccagtacgcggtcacgaccacgcagattgggaaaatcacgctggaagtcgatcaggatgagtcggctgaagaacgcctgaccttccgcattctggataccggtgaaggcgtgacgctcaatgagatcgacaatctccatttcccgtatatcaatgaaacgcaaagcgaccgctacgggaaagcgaatccgttaaccttctggttgtgcgatcagctggcgcgtaagctcggcgggcatctgaatattaaagcacgcgatgcgctggggacgcgctataccgtacatgttaaaatgactccgcatgaccaacatgtaaatgatgaagagcgcttgctggatgacgtttgcgtgatggttgacgtcacctctaatgatgtgcgcaatattgtgttgcgtcagctggaaaactggggagccacctgcatcacgccggatgatcggcaaataagtcaagaatatgatctctttttaactgataatccgtctaatcttactgcctccggcttgcttttaagcgatgatgagtcaggcgtgcggaaaatgggtcctggccaactgcgcgtcaactttaatatgagcaacgctatgcaggaagctgtactacaactgatagaagagcaactggcgcaggaagagattccagagtcgcccctcggcggagatgaaaacgccgaacttcatgccagcggttattacgcgctctttgtagacacagtaccggatgatgttaagaggttgtatactgaggcagcgaccagtgacttcgctgcgctggcgcagacagcccaccgcctgaaaggcgtgtttgctatgcttaatctggtacccggcaagcagttatgtgaaacgctggaacatcttattcgtgagaaagatgctccaggtatagaaaaatacatcagcgacattgacagctacgtcaagagcttgctgtag

SEQ ID NO: 80280 - DNA, 315 bp, Citrobacter koseri
atgaacaatatgaacgtaattattgccgatgaccatccgattgtactgttcggtattcgcaaatcacttgaacaaatcgagtgggtgaatgttgtcggcgagtttgaagattccacagcactgatcaacaacctgcctaaattagatgcgcatgtgttgattaccgacctctccatgccgggagataaatacggtgacgggattaccctcatcaaatacattaaacgtcatttcccgagcctgtcgatcatcgttctgacgatgaacaacaacccggcaattctgagcgcggtgctggatctcgaccgacattga

SEQ ID NO: 80281 - DNA, 1269 bp, Citrobacter koseri
atgtcccttaacgactcaaaaatccgcaacttaaaaccatccgcaaaacccttcaaagtttctgattctaacggtctgtaccttcttatcaaaccaggcggctcacgtcactggtatcttaaatatcgtataaacggcaaagaatcccgcattgcactgggtgcctatcctgccgtctccctgtctgatgcccgccagcagcgcgaaggtatccgtaagatgctggcgctgaacatcaacccggcacagcagagggcttctgaacgcagagcctgcacaccagagaaggtgtttaaaacagtggcgctggcatggcataaaaacaataaaaagtggtcgcagaacaccgctgaccgtctgcttgccagcatgaacaaccatatctttcctgtaattggtcatctgtccgtcacggagcttaaaccccatcatttcattgacctgctgaaaggtattgaggaaaagggcctgctggaagtcgcgtcccgcacgcggcagcacctcagtaacatcatgcgccatgcggtccatcagggatttatcgacaccaacccggcagcaaatcttgatggcgtgacggctccccccatgagacaccactatcccgccctgccgctggagcggctgcctgaattgattgaacacattgaagcatatcatcagggccgtgaactgacccggcttgctgtcctgctgacgctgcatctgttcattcgctccagtgagctgcgctttgcacgctggtcagaaattgatttcataaacagaatttggacgatacccgccacacgcgaagccattgtgggtgtgcgttattcagggcgcggtgcaaaaatgcgcactgctcatatcgtgcccctctcacagcaggctatagctattctgaaacggattaaggaaatatccggggcttacgaactggtcttccccggcgaccataacccgtacaggccgatgtgcgaaaacgcggttaataaagcactgcgccttatgggattcgacacgaaacaggacatctgcggacatggctttcgggcaatggcatgcagtgccctgatggagtctggcttatggtcgcaagatgcagtggaacgccagatgagtcaccaggagcgcaacaccgtgcgtctggcttacattcataaggctgagcatctggaagcccgcaaggcgatgatgcagtggtggtcagattatatcgatacatgccgggtcgcatacgtaccaccttttaacacagggcgggataaaaacaacgaagctgcatga

SEQ ID NO: 80282 - DNA, 723 bp, Citrobacter koseri
atgattgcactcttacttctcttctccgtcgctctcggtgccggagtactcagcggtgtcgtcggcactggctcgtcgttaatcatgctgcccgtcctcgtagccacgtacgggccacggattgctgtgcctgttatggcgatcgcctcccttttcggcaacatcggacgggtgattgtctggtggcatgagattcgttggcgaccggtgtttgcctattcgttggcgggagttcctgcggctgttctcggggcgcacacgttacttacgatttctcctggcacagtggaggtattcctggcagctttcttccttgcgatgatcccgctgcgccgtctcatcagacgatcgaacctccacttgaatctctggcacatgagtttggccggggcgattgtcgggtttatgaccggattcgtgctgtccaccgggccgctcagcgtgccggtatttaccgggtacggaatgagtggaggcgtatttttgggatcagaggcggcaagcgcaatcctgctctacgctggcaagctagctacgttcggtatatcgggcgcactcgcgcagcctgtcctcacacatggacttgccatcggcatcgcattgttcgtcggttcgatgattgcgaaacgtctcgtccagaaactccagacgcatacgttcgagcttctcattgatgccgttctcgtcgctggggcagtggggatgatccttgctctcaaatga

SEQ ID NO: 80283 - DNA, 897 bp, Citrobacter koseri
atgaacactgaaatcaatacagttgttgctgttttaggtccaggtgccatcggcacaacagtcgcggcggcgttacacgaagtcggccgcacaccattgctgtgtggacgtactccccgcgatcgcctgaccttgcaagatggcaaccgctttatcaccgtacccggtccggtacagacgaatccggcacaaatcactcgcacggttgatcttatctttctggcagtcaagtccacacaaatcgacgcggcagcagaatggctcagggcgttgactggcccggagacggttatatgcgtgctccagaatggggtcgaacagttggacaggctcgctacgtactctctgcccggacagatcgttcccgctgtcgtgtggttccctgcgcaagcgcagtccgatggctcggtacgcttgcgtggtgaggcgcgcctcagcgtgccagacgcaccagcttcccgtgtagtggccgcagcgctgcaaggcacgtggtgctccgtagatctggccgcgaatttcagctccctggcctggcgcaagctgatgcagaatgcggtggctggactcatggcactcacgcaccgccgctcaggcatgtttggccgtgctgatatcgccaggcttacgctggcttatctgcaggaatgcctggccgtggcacgtgcagagggcgctgaactcggagacgaagtgccgcaggagatcctcgataagttccgggcggctcctgcagacatgagcacctccatcctcacggatcgagaagctggccgaccgcttgaatgggatatccgcaacggcgtcattgcgcgtcgcggccgggttcacagcattccaacgccgatcagcgacatcctggtaccgcttcttgcggctgcgagcgatggccctggttga

SEQ ID NO: 80284 - DNA, 456 bp, Citrobacter koseri
atggttatcactcccgccgtccgcaaacgaaagaccgcatcagcggcaaccgtcgcagatggaccagcaccaaatgcaaatacctggcgtgcgttctggattaaatcgaccgcctcatcaagggcggagatttcgatagcaccgctgagcgcagtcagtgcgtctacaccagcacgaattgatgtttccagcactgatgccagcgtcgcatccgctgtgagaacttcaggcggggcaaagaattgggcagtgccacgagcccgggcaatctctatcttaagttcagtgaacccggtgaacccgatcgctcgtgcagcgcgtattactgtcggcggtgatacaccagcacgggtggcaacctgtgctgccgtgcttgtaccgacaaataaaggatcgacaagcaggagatcgacaactttagcctcacttgcagcgaggtcgccgcttcgggcgtga

SEQ ID NO: 80285 - DNA, 858 bp, Citrobacter koseri
atgcagctcagcacggttgcgatgattcttactgctgcggtagctcatgcagtatggaatatagcctcaaaatacaagcgggaagatacacttgtgttcgtctgggcgtacagctgtgcctcagcattgctgtacgccccgttcagcctcattctgatagttcagggacaacaggagctcgactggcgactcgcagtcggcgcaattatctcatctgcacttcatatcgcttattctttaatcctgcaggctggctacgagcgcgccgaactgggtgttgtttatccgattgcccggggaagtggaccggttctgacgatactgtttgcaacccttctcatgggagaacggctttcaccaggcgctttactcggcgcttttatcgttatcgctggtattttcgttgtcactggcaatccgttcaggagcggaagcagaccactacagggaatactttggggagccgcgacaggcaccgccatcgctggctatacactctgggacggttattcggtaatctctctgcacctggatccagtgcgctactacgccagcacactcctgctacagagtgtgattcttacccctggtgcgatgcggcgacgaaatcgcattccaactgctgtacgtgtggatatcatcccaatccttatcattgctgtatgctctccccttgcctacatccttgtactgacagccatgcagagcatgccactggcactcgtcgctcctctcagggaaacatccattattgtcggctcccttctttcgtactggctgtttcgtgaaaatcatctggcacgccggattgccggtgcagtggtggtgctgaccggcatcgcaataattagcctttga

SEQ ID NO: 80286 - DNA, 2775 bp, Citrobacter koseri
atgctcaaaacagaagatctcaacactatgatatcaattgatgagattcactttgctgactggcaaatctggccacagctaaggattctgttacatcggggtaagccagtaagaatttctgccagagcttttgatgttctggttgttctggtgagtgccagaggtaaagccgtaagtaaagaatctttacttacgcaagtgtggggaaatgaaatcgtcgaagaaaataatcttcaggcacaaatttcagctatacgccgcatactgggacatgaccgccatctactggttactgaatttggttgtggttatcgctttaatatcaacaaatcgccaactgaaccgctctctaaatcaaaaatacctgagcccgctattaccccttttctagcgtcgattctggggcgtgataaagctgtgcaggaattatgcgccttattggatcaataccgtctggtgacgattacaggctcagggggcgtgggtaagactcgtctggcatgggaagtcgtcagtcttacacacacgcattttcctgatggaatatgtgtggctgaactggctcatatcaccgaagcatccagcttgctatccgttatttcacaagcgctccatcttccattagctgccattcataatgatgccgattcacggcaacagcttgcacggcgtcgatgtttactgctgattgataactgtgaacatgtaattaatgaacttgaaccagtgattacgttgctcctgcacctggctccccatatcaaactgttgttgaccagccaggtagcgttgcaggttgccggcgagcaacaatatctactaccaccattacaagttcctgagagcgaagaggctgatacccacgagttactgaatttttccagtgtccgcctctttatcgaacgcgggcaggcaaatcgacatgattaccatccatcagccagcgaactgtctttgattggcgagttatgccgtcatcttgacggtttgccgttggcgattgaacttgcggcctcccgtctgccagtcatgagtgtcaaagagatctatagccgactggaagaccgtttccagctattgagcaatacgcacagatctctggagcccagacatcagaaaatactgaccgcgctggagtggacttatcagttgctcaacacacgtgaacaacgattattttgctctctggggatctataccgatatgttcagtgtgaaatcagtaagcgaccttctgctgattaaagacaagcatcgctggcaggttgttgacgatctgcaaagattactggctttatccctgattcaggtcagtactcaggtaccagagacccgtttccgcctgctggaaaccatgcgccagttcgcatgcgataaactcaggcaacagggtgaatatactgttcttgaggcccgttttgccggttattataaagttctggtagaagaggcccaaggtgattggtttatgctgccaacgggacagtggcgtgaacgatacagccatatgcttaatgatttgcgaagtgttttacagcaaacattaactgagggggcggatccctctactgggcttgagatcttacagactatgaccccgttttggattgaatattcactttacgatgaatgtcaacgccatatctctcctctgctttatgaaaatacttcgcaggtcgtattaacgctgcgccagagaatgaatctcagtgctgtagcaggtaaagcatcaacctgggcgaagggtcccacgcctgaaacacattcagcctggaaaaccgcgctggcacttgcagaaaagctcgacgacaaagaaatacgtttacaggctcattacggattatggttatattatctgcgtactggcgagctggataaatcgcttgaacatgcgcaatctatgtgcgagctcgcacggtccatgagtgacgaggaggcgctggcgaccgggctgcgtattctcggtgtatccctgcattttttggggcgtcatgacgtcgggcgtgattatctccagcaatctcttgactggtatgaacatggcgaattaagtcactctttccgttttggtcttgatcaagagaccgccggtcaggcctttctgtctcgtttactctggttaaagggtgagtataaggccgcgaaacagatggcatggcgcggtgttaaaaaagccgctcgtttgcagcatgtttgttctctttgctgtgcactggcagaaggcgcttgtatgacagcggcactgggtcgtaatccacgttgggttataaaggccgcaaactggcttattcatctggcagaaaggcatgatttgtatttctggaagacatacggcgagctgtttcttgtttgggccaaacagttcagccataccgatgttagtcaaaccacactgtttagctctttgcgggcgatgggattagactggcaatattcccccttgttgtcagaaattgataccgggttatcgctgagaaccgcccgccaggatcatgaaaactggtgcacgcctgagctgatgcgtctttctgccactcaattacctcctcaggagcaacgcctgctgttggagcaggccctggacaaagcgcgccagcaacaggctcatggctgggccctccgtattgcttattcattggcgacattgaaggctgaagccggggaaaaattggctgctaaacaattgatacaggacgctttacatgatgttgatgactcagacaatgcgacggatgtaagaaatgctatggcgctatgtgcccgaataggggcctga

SEQ ID NO: 80287 - DNA, 1188 bp, Citrobacter koseri
atgcgttcggacaatcacgagctttcttctaccaggattcttatgctggggattatttgttgtattgttgtggctaatatttattttaatcaatctgtcctgaatttaattgccggatcatttcccaatgaatggggagctgtttctttgatccccatggtcacccaggtaggctatgcggtaggcttattctttctgatccccctgggcgattatattgaacgtcagcggcttatcctgcgtcaagcgcaggtgcttttcctggcaatgatcggcatgatgttatccccaacggcgacagtgttggtgttcttctccttccttaccgggatggctgcaacagtagctcaacagatagtgccgcttgccgcctcgctctcaagaaattctgcacgaggtaaaaccgttggtacggtgatgagcggtgtcctggcaggtatccttgctggccgggctatcggaggccttattggtcagtatttcggctggcgtggcgtctttttatccggcgcgatcatgacattgctggctatatttttcatcttacgcattttgcctactcagtcgttgtcaacgccaaagtttaactatctggcggtattacgttcattaggactgctgtggaaaaacgagccgcaggtgcgtggtgcaactcttacacaagcaatgctgtttgcctccttcagcgtgctgtggaccgtgctccctttttggttagctcatcgctacgattacggtgcaggaataaccggcgccctagctgctttggggttaatcggtattctgtgtgcgcctctggcgggaagtttcagcgatcgtcagggaccattccgaatggttgtttttggtgtgatactcatgctgctagcctggactgttttttggagatggaacagtattgtgggtatggtggtgggcattctactactggatgcgggtgagcaatgtgtactgatagctaatcagcacacgatttattctttgcgtccggatgccagaaaccgtcttaatacattatttatgtgcgttatgtttattggcggagcatgtggctcactgactgccacctggttatgggagacaactcatagctgggcgctgatttcttcagcagggggcggactcgtgatcatggggatgttgatagccgtaaaacgtaaatattcaggcccctattcgggcacatag

SEQ ID NO: 80288 - DNA, 807 bp, Citrobacter koseri
atggatttaaaactgactggaaaagtggctctggtaactggagcccataccggaattggtttcagcatttgtgaagaattggccgtgaatggtgtgcatttagtcatggtggccagacgagaacctgagctgattcttgctgcgaaaaaaatttcagagaaatacggtgtttcggtgctgcctattgccggggatgtgactgatcccaaactaccttctttagtggttgaacaagcggaaaaagtttttcagcgtattgatttactggtgaacaatgccggaagagcccatgcgggcacgctgttaaccacttcggaagaagactggcagataatgactgagaccaaattctccgccatgcgacgtttttgtaaggtaatcatccccgggatgcagagacgaaactgggggcgtattgtcaatatctcatccattggcggtatctaccctaatccgcaacttaccgtctcacacgcactgagcgccgctatcaacaacctgacccgtagtttagcacttagcgtggctccggatggcattctggtcaatgcgatcggagtgggtgctgtcgcgacggataactgggcgcagaacatgctaccgaatgttcgcaatcgtcgtcctgaactggctgacagaacagacgaagaggtaatggcattactgggtaaagagaaaacgcctgtgggccgctttggacttcctgaagatattgctgcaattgctacgttcctactttctgggaggaatcagtttgttactggacagacaattgaagcatcaggcggagcagacagatttatgtaa

SEQ ID NO: 80289 - DNA, 690 bp, Citrobacter koseri
atgtcatcaataaatcgtttatgtcttcttgacaaaaaagcgtttattgaaggacataattttattgttagcactactggcaaatatatcattcccacagagagagtgattgacactctattgattggatatgaatatgttctagtacaaaaattactttcccaatctcttaaaataccattacctgtaacaggagctattgattttaatcatggcataacagttaccttacaaggagaaccatttcaactattcgataaaatgacatgggaagaaagaataacacaaaaaattatgcaactccctaaaaacatttcaccatatgtacataaagagatattctcaaagaggataaataattacctggggaaagagtatttcccggctcatattttacctcgggatgcctggtttgttattcgacatgctgaacttgataaagtcattgacatcataaccaatagcagaatgcccccattatctgcaacgcgaatatcaacaccactatctcgttttttctggctggcctgtaaaaacaatgaagtcatccgtccattaattagtaaaccgtacaaactactatctattttcgaacaatgggcatctgacgaaggcattaccgacaggctcagtggtgatacgttaaaaactgcactcgtacgcggttcccccacatcaatgtctgattga

SEQ ID NO: 80290 - DNA, 864 bp, Citrobacter koseri
atgaaatcgttactttctctactgggccgctatttgctgacgctcagcgctgtggcggttgctacgcttttggcttttattctctggaaacattatgtgcaaaccccctggacccgcgatggtcgggttcgtgcggatgtggtccagattgcgccggatgtctctggaccggttctgaatgtggccgtccgcgataatcagtgggttaatcggggcgatgtgctctattccattgacccgcactggttgaggttggcagtggtcagcgcccaggctgatgttgaggcgaaacgtcatgaaatgctgatgcgccaggatgcggcgaggcgacgctctcagattaaaggggtgatttccagcgaggatttacaacaaacagccagcgcagccagcgtcgctgcggctaattaccacggtgcactggctgcgctggaccttgcagagcttaacttatcgcatgctattgttcggtcaccggttacgggctatgtcacacatttgcggcttcgccctggtgactatgccacagcgggagaaactaaagtttccatcattgatgccaatagtttttgggtggttggctattttgaagagactaagttgcaacatatccgcacgggaaatactgcacacattacgctgatgggatttaagccggtgatcacgggtcatgttgagagtatcggacgcggaatagatgataacaatgacgagaccggggggcttggcctgcctaatgtcgagccaacctttagctgggtgcggctcgcgcagcgtatcccggttcggattcatattgacagattgccggagggagttgaattggtggctggactgtctgcgagtatatccatcacaccataa

SEQ ID NO: 80291 - DNA, 216 bp, Citrobacter koseri
atgatcaatgatttcaatattgagggcgtttttgtacccggtctactgttaatttccctcgtcgcgctcacctgtacgctattactcgtgcagcttttctcgctaagcaagggttaccgtcgcttgccgtttcgcccgatgatcgatttttccatctttattattactttttacctgttgttgcagggactgaccgaactggggtttttaaaatga

SEQ ID NO: 80292 - DNA, 2055 bp, Citrobacter koseri
gtgataatttccggcatgaaaaaaattatcacgagttactttcattttttacacaccatatgccatcgtcttcacggtatggcttctccttcactactgaatgatgcgaacgctttgctctattcggcaaagagttttgccgctgcgatgctcgcatactacattgcattatcaattggcctggagcggccttcctgggcaattatcactgtatatattgtttcccaaacctccgtcggagcgtcgctgagcagaagtctgtatcgtctggtgggaacggtaatcggcgcgggcatgacggtattaattgtacccacgttcgtaaattcccccgtattttgcagcgtgatactgacaggctggattacattctgcctctatttatccttgctggaacgcacgccccgggcctatggttttgtccttgctggttacactgcgagtctgattggcttccctgctgtatccgatcctggcgcgatttttgaaatcgctatcactcgtgtacaggaaatcatgatcggtatcttctgcgcggcacttattcatcgctatgtattgcccgcgcgcatctcaggccagttcaacagtaaattatcgcagacgctgctcgcggcgcgacagcgtatcgcagagactttagcaggcaaacccgacgctgtttccgggccgctgcatatggcactggcattacagtttctgcagggtatcagccatcatatcccttatgattttgcgttctctgtaccggtccggcaagcgagaaaaaggcttcatgatcggcttgcgagattagtcattgttaactgtgagttacgcgaccgtttagcgctgatagcgaagatacctttcgatgtgcaaattttaatggatgatgttgaggtctggctggcctgcaaagatgaaggaaaatttaaaagcgagggggaagcgctcaaaaaacgcagtgaaaaattactgcagcgctatgtcgtacatgagttgacgtttgtagaagcactgcatgtaagttttatgcgctacctgacagaggccattgtcctcgtgcagcagtgctatcgtctttcggatgccattcatcacgcgaatcagatgcctgcgcactcagaaatgaataccgtgaaagggtatgtattccaccgcgatcctcttactgctgcccgcaccgcattgggcgctttcaccatcattttgagcggctgcatggtgtggattttctcggcatggcctgatggcggtacggcagtatctatccttggcgtttgttgcacactgtttggcagcttcgatacgcctgccccgcatattgtgaaatacatcattggttccctctggggagttgtgataagcctgatttacagcttcgttctcctaccgcaagtcagtgattttatcgtgctggtagtggttctagctccggtatatctgcttgccggatcgctccaggcaaggccgcccaccacgtttatggcgatggggatcacactgacgctgcctattttgtgcgagctgggtgctcattacagcggggattttgccgtggcggtgaatacctctatcgcattattttctgcaactggctttgcggtattcagcatgggctttctgcagactgtgcaggcagatgcggcaataaatcgcctgcttaaattatgccagcgcgatattaaccgcagcgtgaaaggtgtgttgaatactgatgaaactctctggatcaacctgatgatcgatcgggctgcgttgatactgccacgtttgccgcgcagcggacagtcatcagaacaggcattgaatcatcttttgcacaccctgcgtataggcctgtgtgtaatgcgattacgccgatgggatgcgcatgcagacaaagaaataaaagaggttctcaattgtcttacacactcgacggatattaacaccttacttgaacggattgtcagcctgactgagcgtagcctgtccgtagcagatgaactatcgcggcatcatgttaatcaactggttgatctgtactgcgcattaagcactcaggaaatggagcctgttgatgatcaatga

SEQ ID NO: 80293 - DNA, 807 bp, Citrobacter koseri
atgttacctccactcgccaatacgctgttcgatccggataccacctcctgccccgcagtcgcgcgtcatttggattttgtcgattacgcggccgaagtgcctgtgcatacgcaccgcaaagggcaattgattattgccctctatggggctgtcatttgtcgcgccgaaaatgatatctggatcgtgccgcctgattgtgccgtctggatccccgggggagtgccgcacagcgcaaaagctacctggaatgcgcatctcaactatctttttatcgagcctggagccgccgcgctgccggagcgatgctgcactctggccatttctggtctgatcaaagaactagttgcccgtttaacccgcgagggcgtcggatacccaccagaaagccatctagccagactgaccagagtaacacttgatgaattagccaccatgcctcagcagaaactgagcctccctgtgtcgtcgcatcctaaaatccgcgccatggccgatgcgctggtcagtcaacctgatgaccgaagcacattcaaagcatgggcaaaaagactggcgcttagcgagcgttctctcgcgcgtttaatgctgcgcgaaaccgggttgacgttcggacgctggcgtcagcaactgcaactgataattgctcttcgggaactggctagcggcgtttcggttcagaatgttgcagcaaatctcgggtatgattcggttaatgcatttatcaccatgttcaaaaaaaccatgggcagtacacccgcgcactattttgccgaacgcaaaacaagctcacacttatccgatatttag

SEQ ID NO: 80294 - DNA, 588 bp, Citrobacter koseri
atgatcccatcaattaattacgccatcatgatcgatgcactgcatgcactaaaacaaggcaatattcgccactgcgaagctctgggttttactttcgacgaaataaatgctctcgatcagttatctcttgatgaactgtttactgtcagccggacggtggcacccttcatttcgattactgtcagccatgatgttctgtctcatttactgacacaggcacgccaggaatatcggcgacaacagcagattaaacgcgctatccgcctaggtggttctatcgctttgctcaaccgctattttggcttgacgtcaaatgaggtcagccttcgccgacggttactgggtatcagcgtgccatatgggcgcacacctgagccagatgaagagacggatactgagatctggcggcaatggcaacgatgccgggtggacaatctggaatcgcccgacgcgctgatagcaatgatgaaggtgactgaatccctgctgccaaaaaccgaaggactgtcactcaccacggtctggaagcgtattacgctgtgcgaacaggaggtcgtcgctaacaggagggtgccccatgccggatga

SEQ ID NO: 80295 - DNA, 276 bp, Citrobacter koseri
gtgctcagatccttattcaccttatgcacactctcaggcgtgatattactgtccggctgcaaggaaactaaatccgaagcctggtataagcagcatcctgacgaaacttatgcggtttatacgcaatgcctgaaggatggcgaggcaagcgataactgcgaatttgctcaacgggctgccattatgttcgctcaaattggcaaacccggaataaaagaaaaatttgagacactctttcagcaggaagccgaaaagagaaaatccatcacacagtaa

SEQ ID NO: 80296 - DNA, 150 bp, Citrobacter koseri
atggtttttaaccagcaacgctgcaaggcgcagactgaggcggaacgcagcacagcgagtaccgaacagtctccgacttgcagtggaataaaaaatcgtccggcctggcagtatcgccgccaggccggtgaggccatcacgatggcctga

SEQ ID NO: 80297 - DNA, 360 bp, Citrobacter koseri
atgtacatagcgatagatggtgatgatgtggggagaaaaataacctcatcatacttatccaactcagaagagaggttgatatacataagcaacaaattaaatgacaccacaaaaaaaatatctaaaatgctcttatccaatggatttgagataattttccaagccgcagatggtgttacagcgaaaacagacaacgaggtcaatcttaactttgtttttgataagataaaatcctattcctttgacgaaattacattttcagctggtgtgggagcgaatctaagagaagcctatgttgcactgttaaattctaaaagcaacggtaagaatatgatttctatttacaaagacatattataa

SEQ ID NO: 80298 - DNA, 186 bp, Citrobacter koseri
atgataatggatgctaatgatgatattgataacaacttgaacaggcttaagtcagaagacagaactgtcttaaagatccaaaatgaaagtattgtgacaaacaaagagattagtgataccgtttttaacaaccaatcaaatcttattattctaaacatttcgcaccattataatatgtctttgtaa

SEQ ID NO: 80299 - DNA, 1770 bp, Citrobacter koseri
atggaggacgggcaactccatcaagtgatgacgggatgcgggtatcgctatacgcgtgcccgcaatctccctgaaaaatcgattctgcacagcagggagcgaggtgcaggatattacacgaaagaatacgcgactgatgccggtaattttaatgttgcattggtgattcatcccgaccctttcacagaactgccgacagcattcattattgagcaacctgaacagttcaaaagttgccttatgccccatgtcgccctagaagggttcctttgctatgttgagcagatggaagcagactgggattccaacgatctggaagcgacatataaagaagttgatgcacagatacaccagaccctcattaattcggtatccgctgctacgcaaggggtaaatgataagagagaactggaaggggagtttgccgcatactggcgtcccagcgagacactctttcttctgtcaaacgcaagtcgggggaccacacttaaaacctctttggcaaaattacttaagtctgatggaactaccagacaggagtacataacggttgaggaatcatccccggaggactcggaagccgttatgaccaagtggctcaaacaaaggtatttccccagaacttcgttaaaagaaatacccatcagcacgcattacatttctgtaaatcccagccgtcttgccgggatgaaatggccaccagcttcattccgggacttactggaatggcttgaaaaatcagaccacaatgccagagatagagtcattgaaaacatcaaagccgaagggaagaaaaggtacatttttctctttgatgttttaaaccaggacatcttagctatctatgttgagttcaatacgctgtctgttgatttcagaaggtaccggaagtcagccaaaaactcaacggtcaagcttgcggcgatgttgggtggcaaaagtgtttgcacggaatatcaaaggctgggtgtcattcgtgctgacattgcgacgctccttagccggaatacacgacggaagggggcagtaagtctttcaacaaagcgtatagcgttgataggttgtggaacaattggagggtatctggccgaattattactacgcaacggagccggatgtggtaagggttatctgcatctttatgatgatgatatctacaaacccagtaattttggccgtcataccctatcgtcacatgatttcgggtggcctaaatccctttcacttgcggcaaagctccaggagtctgtgcatttacagacaaaggttgttggatttatggaacaattccgtatcagcgcagatgaaatgcagaagtacgacatcattattgatgcgacaggacgcccacctgtgtcaaaacgcatcgctgcggtggttagacagattccactggagcaaagaccatttattattcacgcgttcaatgatggcaacggccgggcatcaaaagtctttattgatgatggccgaagttgttacgggtgtatggtttctaaccctgccaaataccataaaggaaccgattcaaggtttaatgatcttgatatatcaagcgaaaaaaataaaagttgtggcagcacttacaccctttatgatgcagcagttagtagcataacgtcatctctggcccagatggccgtgttaagtactctagaaccagagttaaagtggacttacaatgaacatatccttgagggggggcgttcgctcaggcctcaatttttgccacatcagcctaattgccctgtgtgtaatgaacataaatga

SEQ ID NO: 80300 - DNA, 1299 bp, Citrobacter koseri
atgccttgggattttaacaattactatagtcacaatatggatggcttaatcagtaagctcaaattgagcaagactgaatccgataaactcaaagcacttcgtcagatcgtacgtgaaaggacgagagatgtatttcaggaagctcgccaagtcgcaattgacgtgagaaggcaagcgctgacacttgaaagtgtcagattaaaacttgagaaaacaaacgttcgctacctctcccccgaagaacgtgctgatctagcgcgacttatttttgaaatggaagatgaagcacgcgatgacttcatcaaattccagcctcgtttctggactcaaggaagttttcagtacgatacgttaaacaggccttttcatccggggcaggaaatggatattgatgatggcacctacatgcccatgacggtgtttgaatctgaaccgagcattggacacactctgctccttcttctcgtggatacatcactgaaatcactagaagctgaaaacgatggctgggtatttgaagaaaagaatacctgcggacgcatcaaaatctatcgggagaaaacacacattgatgtaccgatgtatgcgatccctaaagaacaattccagaaaaaacaaacagcagcagattccgcacacctcataaagtcagattcggtgtttgaatcttttgcattgaaccgggggggacgcgaggcttatgccgttgagtccgacaaagtgaacctggcacttcgcgaagggatcagaagatggtcagtcagcgaccccaaaattgttgaagactggttcaacgaaagctgtaaacgtatcggcgggcatctgcgttcagtttgccggtttatgaaggcttggcgggatgcacaatgggaagttgggggcccttcatcaatcagtctgatgactgcggtcgtcaacatcctcgatagagaatctcataatggctccgacctcaccgggacgatgaaacttattgccaggttgctgcctgaggaattcaatcgcggtgtggaaagtcccgacgatactgacgaaaaaccattgttccctgcggaaagtaaccataacgtgcaccatagagctatcgttgaaactatggaaggtctgtacggtattttacttgccgctgagcaatcagtaagtcgggaagaagcgttacgtaaaatcaacgaagcatttggtaaacgtgtgactaatgctctattaatcacgtcaagtgctgcagctccggcatttctcaatgcaccatccaaagagccatcatctaaaccaatcaacaaaacgatggtaagtggctga

SEQ ID NO: 80301 - DNA, 1086 bp, Citrobacter koseri
atggggttttcaatgtctgaattgcatgtagtcaatgaccatggagtacggctactctgcctaaatggtggtggtgccagagggatgtttacaatcagtgtgcttgctgagattgagaggatacttgcctctaggcatcctgaccaagaaatcagaattggcgattactttgacctcatcgctggaacatcgataggtgggatcttggctctcggccttgctaaaggcaagagtgctcgcgagttggaatgtgttttcttagataaagcgaatgatatttttccaccaagatggtggctattcaatctccttaaatcacttgtttctcccatttatagtagtaaaccacttcgacaaacaattgaaacgatgatcggtggtgagactacctttaatgacctagtccggagagtaatggtcccggcagtcaatctttcaacaggaaaacctcagttcttcaagacaccacataacccagattttacccgcgacggtgcacttaaattgattgatgccgcactcgcaacctccgctgcaccgacgttctttgcaccacaccattgtgaagaccttggttcttattttgctgatggaggtctggtcgccaacaaccccagttatatcggatttttggaagttttcagggacatgaagtctgattttcctgatgttgctcataaagacatacacatacttaatatcggtactaccggggaagagtattcacttagcccaaggctgctgagcaaaaaatggtggaatggctactgccgactttggggcgtaggtaaaaaactggtccttacaaccatgacggctaaccaacatctccataaaaatatgctcctgcgcgagcttacgctccatggtgcctccgataactacacctgtctggatgaagtgatccctaatgaagcagccagcgacatcactctggataatgccacgaagagttccattgaaaatctgagtgcaaggggaagacaactcgctactgtgcagttcgctcagaaccagaagcttaagagctttttcactacacctgcaaaaccctttaagcgcgcaatcgcgcaggagaaactctga

SEQ ID NO: 80302 - DNA, 1746 bp, Citrobacter koseri
gtggcaggtagcatcatcaacctttttatgtggggatatcaggacagctacagaattcacatccagattctggcacgtaatgtactgaaaaaattgggtgcaccggctgatgcagaagtgctacttgttggtgctcgccgccctggcagtaaaaatgcgaatccgatatgcgttgagccagaagatggtaagtggcatctatctttgtttgaaggattgctggattcagttgaatcgatttacaagaatcatcggttacagagtatgatttttggtgatgggccaagcatgcgcgacaagccagagtggatacgtcgcgactcagtgcgaacatcggttagtaaggcactcgaagcttttgataccgagcataaagtaacgtcattttgcggagagtctaggcgaatagacgactattatgtcaccccagtcatacagattccaaacgacactttcgagaaatttcctcctttgctctccaagtctgttgacgaaagccaacaaggacatggatttcgcagtctgatacatgcagcgatgtatgcggttcttcgtgaggctaccgaggaattgcataaccctgatccaggacgatttatccatggcagtatgagagatgccgaggaaataatacggattgctgcaaaggactttctgcacaccgcaggcctctcgatcgaacgaagatacattcatactgatcttttcgatgctttgaaccttgtctcctctcttatgtacgagggggcgaaaggcataggtcagctcattctcgtcgatccagataacgaggcggttgagttcctggcgaagtttgttgagccagttccctttcgtgagccacgatgggttcggaaagtcttgcagatggcggcatcaggtgtcggcattatcgcaaatagtcagtacatctatggacttgggagactgaaggagtcgcacgatcccagggcacaagatgcgttcacggtagattttatagatcattatcactggcagttgtactgcggtaaccaagcactgcttctcagtcaatatgctgtgcccaaacttccacaggagccttttgacaaagctgccttcctggcaaattacgcgagactatttccgttgtcttcacaagatagtggattgcacttgtggaaccttctgatgacccaaaccagtcagggtcatgggagcatgattgtcgttgcggaagatgcggcctgtgaggcgaatcgactttgcaagcaaggtactagaatcgtgccaactaggctcactgaatcactccttcgaagtgtcagcggtattgatggcacaatactgcttgatcctgctggtctttgccatgctatcgggattattctcgacggtgaagcgaccgatgagtgtacgccatcaaggggatctcggtataattccggagtgcgttacgtacaaacgagcggaactcgaaggcttgcgatcgtcgtgtcggatgatcgaacagtcgatatcattcctcaaatcaagcgactgtgcagtcgttcaaaaatagaacaatgtgtcgtaacactggaggcggcaacgctcgacaactatcatgattctcggaattggttaaacgaccatcgcttctatatcaacgctgagcaatgcgctcgaattaatgccgtactcgacaaactagatgccgttccaaaagaagtaggtcttatctattttgaaactgagagatttgaagttgacccagagatggacgaaagctatctcatagactga

SEQ ID NO: 80303 - DNA, 894 bp, Citrobacter koseri
atgggaatacctgaatcacagctcgatacatggtcccaccaaggatctattacacagtctgcctcgacttatagcattataaagaatgcattagagagcgcaaacactgagtatcatggaaagaattttaaagtattccttcagggctcctatggaaacgatactaacatttatgctgaaagtgacgttgatgtagtcatatgtcttgatgatgtctactacagtgacctaacacagttatcgccagaagacaaagaggcgtatgaccgtgcatttgttcctgcaacctactcgtatactcaatttaagcaagatgtgcttgaggctcttacagagcgcttcgggtctgatgttaaggtcggagataaggccatagttgtagcggcaaatggaagtaggcgcaaagctgacgttatcgcatcaatgcagtttcgtcgttattggaaattcaaggggcattacgactcacaatacgatgagggcatctgtttctttaatggcgctggtgaacggattgccaattaccccaagcagcattcagaaaatctcaccttaaaacatcaggccagtaataaatggctaaagcccatggttcgcgtactgaagaaccttcgaagtaaactcattgctgacggaaaattgaagtcaggacttgcaccttcctattaccttgaaggtctactctacaacgtgccaaatgaaaagtttggcaccagttatgctgattgttttgtcaatgccatgaattggattcagacagaagcagataaagacaagctgctatgcgccaatgaacagtattacttgctttgggaggggacacatacctcatgggagaaagccgatgcggaagcgtttatcgacgctgcaataaaaatgtggaatgaatggtga

SEQ ID NO: 80304 - DNA, 963 bp, Citrobacter koseri
atgacttactctgtttcgccgtcatcactgctcaccgagtacggcaacgacaacatatgccgtgttcttgcacttgatggtggcggtgcaaagggcttttatacgctgggtgtcctcaaggaaattgaggctatgcttgggtgcccattatataagaggtttgatcttgtatttggcactagcaccggtgcgattattgccgcgctcatcgctctaggatacgaagtagatcaaatacacgcactgtacaccgaacatgtaccacgagttatgtccagccggtcggctgcggcaagaacaatggcgctccaggatttggctaaggaagtttttcaagataagacattcgaagatgttctgatgggtattggcatcgtcgcaactcgatggatgaccgaaagaccaatgatcttcaaaggtaatgttgtgcaggcccatggtcgcaagggaaccttcagtccaggattcggggtcagcatcgctgatgcagtgcaagcgtcttgctcggcttatccgttcttcgaaaggaaagtgattgttaccgcagcaggagataaggttgagttgatcgatggaggttactgcgcaaacaaccctaccttgtttgcaatcgccgacgccactgtcgctctgaaaaaagatcacaaggatatccgggttataaatgtcggtgttggtatctatccagaacctaaaccaggtctccttatgcggattgctaagaaatggctcgcagtccagctgcttcaaaaaactttagagatcaatacacaatcgatggatcaactacgcgacattctattcaaagatattccgacgattcggatcagcgacacattcgaacggcctgagatggcgacagatttacttgagtacaatttagataaactgaatacccttcgacaacgtggtagggagtcttttggagctcgtgaggcacaattaagagagtttctgatatga

SEQ ID NO: 80305 - DNA, 129 bp, Citrobacter koseri
atgctaatctcacagacgaagagacttctgctgtcccccccccctcccctgcaaaaaaacctgacattttcttttaggaccaacaatgggaccaaattgaaaattgaactgaatattaaaagctattaa

SEQ ID NO: 80306 - DNA, 330 bp, Citrobacter koseri
atgcaaatcatatcatcaaaccctacacgggcggctcagcccagcctgtcatccgttgaaatctggcagcggccgctaactcatctgttatcgcagcactatggcctgacgttgaatgacacaccgttcattaatgacaacgcaatccgggaacatatagatgccggagtatcgctcagcgatgcggtgaactttctggtagaaaaatacgggcttatccgtatcgaccgaaagggattttcgtggcaagaacaaactccgtatatttccgtagtggatattctgcgagcaaggcgctctaccggattgctaaaagctaacgtgaaataa

SEQ ID NO: 80307 - DNA, 366 bp, Citrobacter koseri
atgaacaatcactcagattccggttccaaaccggagaatcccgcctgccagcagtggggactaaagcgcacgatcacaccctgttttggcgctcgtctggttcaggaaggcaacaggctgcactatctcgctgaccgtgccgatattgccggtcaattcacggaagcccaggcccgacagcttgaccaagcatttccgctcatgatgaagcaacttgagctgatgctgaccagtggagagctcaaccctagccacccgaactgcgtcacgctttaccacaacgggctcacctgcgaagccgacacgctcggctcctgtggcaatgtctacactgctatctatcctgtgcagactgagccgcagtaa

SEQ ID NO: 80308 - DNA, 222 bp, Citrobacter koseri
atgaaaataatcagtaaacgccaggcgatggcgatataccgcaagcatccggagtcatgtctgcttcgcttctgtaccgggaaatacaggtggtctggaagcatctgccactacgctggtcgggaggtacacaacatcaacggtgttctggccgtcttcgctgaacgtcatcaggaccgcaatggtccctatgtcattcttcgtagcatcactatcaattaa

SEQ ID NO: 80309 - DNA, 480 bp, Citrobacter koseri
atggaacaacagttaccgctgtttgcgcgtgaattggccccttctgaccagcagacggtcagggaagcattaaccctgctggaatgccagttacgcgaacccggcgcatcattcacctccagccataccgtccggaactggcttcgcctgcaactcgccacgctggaccgggaagccttcatcgtgtttttcctcgataaccagcattgcctgatcgcccacgacacgctgtttctgggaacaatcaacggtatcaccgtgcatccgcgtgaggtcgttaaggccggtctgaaacacaatgccgctgcggccgttctggctcataaccacccgtcaacccatgccgaacccagcaaggccgacagactgattacagaacgcctgaaacaggcgctggagctggttgatatccgcctgctggatcacctggtgatcggcggcatggatattgtctcgtttgctgaacgtggctggttatag

SEQ ID NO: 80310 - DNA, 444 bp, Citrobacter koseri
atggatacacaaaaccttcagttcgctgagcaggcagcaattacggcctcaacggtccctgatgaattacgcatcagcttctggccgcggcactttggttcaatcccgcaatggataacccttgagccccgtatctttgccgggatggaccgcctctgtgccgattaccacggcggtatctggcgcttttcgacgctcagcaacggcggcgcttttatggctcctgagtccgagaacgatgagacgtggacattgttcaacagcatgaacggcaacggtgcagagcttaccagtgaagcggcagggattgtcgtctgtctgatagcatacagccaccatgcctgtcgtaccgaatgtgacgcgatgactgagcactattatcgcttacgtgatttcgcgctgagtcatcctgaatgtagcgccatcatgcacatcattgactga

SEQ ID NO: 80311 - DNA, 837 bp, Citrobacter koseri
atgcgattaaccagccgctttggccgtataaaccagatacgtcgtgaccggcctctgacccatgaagagctgatgagtcatgtacccagcgtgttcgggagcgacaagcatgaatcacgctcagaccgttacacctacatacccactatcaccatcctcgaaagcctgcagcgtgaaggctttgagccgttctttgcctgccagacgaaggttcgtgaccagagcaaacgggagcacaccaaacacatgctgcgcctgcgtcgtaccgggcaactgaccggtcatcaggtgccggaaatcattttgctcaacagccatgacggctcatcgagctaccagatgttacccgggctgtttcgtggcgtctgtaccaacggcctggtctgcggtcagtcattcggagaagtgcgggtgccgcataaaggtaatgtcgtcgagaaggtgattgagggggcttacgaagtactcggcgtgtttgaccgggtggatgagaaacgcgatgcgatgcagtcactggttctgcctgcacccgcccgccacgcgctggcgaatgctgcactgaagtatcgatttggtgaggactaccagccggtcacggtatcgcagttactgaccgcgcgtcgccgggaggactacagcgacgacctatggaccgtctaccagcgagtgcaggagaacctgatgaaaggtggtctatctgggcgaaccgcgcaggggaaaagcagccgcacccgtgccgttaccggtattgatggcgatgtgaagctcaatcgcgctctgtgggttatggcagaaaacatgctcgattttttcgggcgttcaacaccttcagcttaa

SEQ ID NO: 80312 - DNA, 942 bp, Citrobacter koseri
atgtctgtgactttacgtaaattaaaacaagcaatattaatctccacgctttgccttattaccactcaggtctgcgcagcaggcgttgccagaactgcagcagacgcaatgacctgccagcctgatgcggggggtaatgaaaacggatacgggacatgcccttttctgggcaacgtttacgatgctgacccgtctttcaaaaaagacattgatgacgccatgaattcagcaggacttaggggattactgggacaagatggtttaatgaacggcccggacaaggggttggtccctgtggacgttggtggagagaagtggttgcagggctctgtctgtgagcggggtaactgtggtgaccattatctgaagattctgtatatcccctcagaacatgttgttgcgggtttttattacaacggaggcgaggaaaaaatgtttggcgatgtcggaagcgcagaacaaagagtcctgcgcagtgacgtacaggaagcagtcccacagcaacaggctccgtcgatggcaacagcggcatcccctgatggtgcaccggctaacactatctggaccttcactggcgatgacggaaagtcgctgtggcatgtctgtggcggccagaacagcagttgtaccattatcgccaacaccaaatattacgttgccgttctgaacagaaaatccgcgcacagctgcgcctttggtgatttttacgtggctgacagggacgcagcgtcatggcaccagtatgacactggcacctgtagcccggatgcatggatacgcaaaggctccatcaataacggacaatatctgtcggttgatatcggcgtaaacaaccagcttgtacagcagtaccccattggctactggtcaatgcgaaaagagttctccggcaagcgacgcccttcctgggataaagtaaaagccaaaaatcagcagcactga

SEQ ID NO: 80313 - DNA, 408 bp, Citrobacter koseri
atgaaagcattcatattgcctttcattatttcaggtcttttattgagcttacccgtcaatgcagcagttaaattaccccagcaagtgattgatgttgaaagtggcagtgaacaaatttgcggaagcgatgatgtaaaaaatggggtgtgtaaactcactggcgtatctgatgatggtcactatgcgttgttaagcagtccaggtggcatggcctgttatgaccccaatctgatcgtagttaatctgaccaccagcaagggaaagatgatggactataaccgccatgcgacgtgtagcggtgaggccaccgctaagtttgttcgctcaccggcgaatgggcaacttaccgttgttatctacgatcccaccatcaaaaagaatgtcgggcttaatactatcgacttttaa

SEQ ID NO: 80314 - DNA, 216 bp, Citrobacter koseri
atgggattctggaatgcagccgggaaactggctaaagaggttgcgaaagacgctctcgacagtgcgcgggaggtgaaagcggctcatgaccgactggagacaaagagcagcgcggagttgaaaagaattgtcactgaaaacggcattttcagcagcgcaaccgagacggaaaggcgtatggcgcgaaaactcctgcgtgaccggggcgagctttaa

SEQ ID NO: 80315 - DNA, 147 bp, Citrobacter koseri
atgaaaatcaggagcatcacgacccgtaaccccacttccggtaaacgctgcccggactgtggctcgcacgacaccatcccctggtccgatggctggatgtgtcgcgactgcgggtgtgagtggggcaaggataacggctatctgtag

SEQ ID NO: 80316 - DNA, 714 bp, Citrobacter koseri
atgtctcaggctgggcgtcgttatgaccggctgtctgtccggctgtcgctaattatcagccgtctgctcgcaggtgaaacgctgaatgtgcgcaagctggcggcggagtttggtgtctcagagcgcaccctgcaccgtgattttcgggagcggctgatttacctcgatctcgaataccggggcggctactgtcgcctgctgaccggggggcgtcatgaactcagggaagaggcggcaatgcagtttgcccgtcagtccgggattggcgcactgtttcctgatatggatattcatctggtcagttcacttctgagcggtcagggggcatcgccgtgctttatctggcatcaggatatgccagtcccaccttcccgtccggggatcttcacacggctggtcagggcagtatcagaacaacggagggtaactctgctggccgacgggtgccgctgtggcagccttgccccctaccggttgattttcagcgccggtgagtggtttctggcgggtgaacatatagggcagataactgtttttgcactgagcaccgttcactccgttacgtttcacccggaaacgttcaaaccagacgggtatttcaccagcatgctgtcccgcccgaattttcttcaggcgttgcctcatttccggttcatcggagaagtgatatccacttttcggactgaaccacatcaaccagcaacaggaggataa

SEQ ID NO: 80317 - DNA, 876 bp, Citrobacter koseri
atgcaaaaatctgatggcctccaggcttttgaacaaccgctggcgtcgcttccgctcacgcttcgccagcttattcttgaacgtatccagaatctgaccaattacgagccagtgattggcattatgggtaaaactggtgccggtaagagcagcctctgcaatggactattccagggagaagtaacaccagtctgtaatgttgagccctgtacccgcgatgtacttcgcttccggcttagcaatggttcccacagtctgatgatggttgatttacccggggtgggtgaaagcgagcaacgcgataatgaatacactgcattgtaccgccgcatcctgcccgaactggatttggtactgtgggttatcaaagccgatgaccgtgcgctgtcggttgatgagcacttttatcgaaaggtcatgctgacatatcagcacagggtattgtttgttgtgaatcaggccgacaaggccgaaccctgtcacgaatggaacatcgtagataacataccttctctggaccagcagttaacaattgaagctaagcgtaatgctgtccagcggttattttttccacatcatcctgtctgcatagtgtcggccagaaccggatgggggatggtagcgatggtggaaaccatgatgcatagcctgcctgaccgggccaccagccccttggcaacccaactgcacgggaggctctgcaccgaaccggtaaaaaagcaggcacgcgaacgttttgggaatgctgtgggtgaggtatttgatacagtagagtcaccatcgttcctgcccgcgccactgaaaacggtgattcgtaccgtacgtgatgccgtcgtgtcagtcgcccgcaccgtctgggactggattttcttctga

SEQ ID NO: 80318 - DNA, 1752 bp, Citrobacter koseri
atgtatttaggtagactaaagatttcgcggtttcggtcttgtgatgatgtgaccgtcagtctccgcccagatttaactgtattggttggtgaaaataatggtggaaaatccaatgtcgtagacgcaatcagattgcttactttgccgttgagtggacgccgcgaacgatatccagaagatgaggatatacgacgctattcgacagtcccaagttttcaaatcgaaggggctttccaaggcctaagcgatactctcaaaggtctattgatatcagcagttcccgatcctaccaagagcgaggctaccttcggctatcgatatgaatcgcgttctgaacatgctccccgtggtaagactaccgtgtgggctggacgctttgacactaatggaccagagcttggttcttctgagttgatcagacacgtttatctccctcctttaagggacgcacatcaggtgctgggtactagcagcggcactagagtgatggcattgctgcgtaatttcttgccaaaagagcgggagcaggatttcctcgctggtgtcaggcgtgcggataatcggcctgagatcttaactacaatcaatacggatatcagtgctgctctcggactactcactaatggagtacgtccgcagatagcggcattggattttggtagcgaaaccttactcgatgtagctcgtgatttgagatttcgtatggccgatacaggtttgatacccgaagatattcggtcttctggtctggggtattcaaatttactctatatggccactgtagttgtagagctgactaaggccaaagaggcagacctcacgattttccttgttgaagaacctgaagcgcatttgcatccgcaattacaggtacttgtgcttgagttcctcttggatcaagcgcgccaatcagcatcacgtatcattgagccaggaaagcctgaaggccgcatccaaattgttgtgacaacccattcccccaacctgacagcatgggtttctccacgtcacctagtggtcatgcgttcgcggcatcgtgaacaagatggaatagccatctcagaatcagtgagtgtgcccattgccgaaatagggctaaagccaaagacattagataaaattagccgatatcttgacgtgactcgttccgctttgctgtttggtaacagagctatcttggtggaagggatcgcggaagcactattgttgcccgtgctagcacaaaagcttgtgctagccgatgatttagatgggtggcttaggttcaagggggctgtaattgtgcctatcgaaggtgtggacttccgtccatatgtagaggtactgctacggccatatggtgatgcacgtattgctgatcggctgatagtgatcactgatgcggacccaaccgtgttgggaaataggaaagttgatctggaaaatctggctgcaacgcatggagctccagatgctctgagcgtgctaaccaatcagcatacattggagcacgaaatttttggcgctggaaatgaaagtttccttaaaagcgtgtttcttcgtttgcatcgtaattcacgtagagactgggaagcgcagatagagggcattccagaacaagatcgtcccaatgcatttcttaaattaattggggcgaaaaaaactcgtaaaggcgatttggcacaagctatagcttcgcgcattgaggcgggtgaaccatttgttgttccgccttatctcattgacgcaattcgtggagcttcacgtatatga

SEQ ID NO: 80319 - DNA, 1776 bp, Citrobacter koseri
atgactggcatccacaatctaaccccagagcaagagacatttgcttctcacattggcggagcctttgttaatgcttgtcctggagccggaaaaacgcgcactatcattgctcggctagcgaggatcgccgctaagttgccttctcgtcagggcatagcgatactttcattcacaaactccgctgtagacgaattccgcgaacgatgcctggctactgggctcgatacgcttttgaagtatcctagtttcatgggaacacttgatgctttcgtcaggtatttcgttgtactgccaagttacgcggtatcgagccaaactcggccgattatcctagatagttgggatacgcttggtgtagaaattcgtttattaggtcaatttgcctttcgaggtgaaccggtaagcctagatttgtttgatccagaaaccaatattattgatcctgataggattggacatgcaggtttgcaaaatcatgtacgtcaacatcagattcgatatcaacaagcagcagcaaatcggcgacgatctttgttacgagctggctatatgagtgcaggggacgcacgtgctcaaacattgcggttgattagagataatgtaattggtgagtcacttgctcgcgcattggcggcacgttttcaagaagttatggttgatgaagggcaagattgcaatccactcgatctgcaaatactgacatggctcagagcacatggggtaaatgttacgttcgtttgtgatcctgaccaagcaatctacgaatttcgtaatggtaatcctcaaggaatacagacatttaaggatacatatcctattgagtcgcataagggcttgacggggaattttcgtagtagtcccgcaatttgccagttagcagccactctaaggcgagaaggtcaggttgatcgctcgcttggtgaaagtgcgaatgttgactatccaattttacttcttacctatggtggccggggcccaacggaaattattggtcaggcattccttggacggattacggaactgggactggagtcaaccaaggcgattattttggctcactctggcaaagttgcgttgcgggccgctggcgtcacctccagcaattcaaccggaaactcgcgaattgagtcgctggctcgtaaagtgtcagagttctggtcgcctgccgcaaccccaagaacgaaggagaatgtagtccagtcagtcgaaatattattactggatttaatgggtatgcgtcaaccagatgagcatctgattaaagccatcgaacgtcttggtatggaccgacgtgcccatcggagatgcgccctaagttttctcattaaccttccaaaaacgtgcagagattctgatgaagagcggcttgcctggatagcctgtgttcatgcggaaatggagaagctgcatctgccactccctgctggcgtaagcatacgtcgtttcttccgacagcctccgaatgcgcaatggtcaaagcatcttcaagtgcccgctgctctcggtttcgcatgtggcaacatacatgaagtgaaaggtcgtgagtatgatgcagtatgcgtcgtagtcccgccgaatcgagcccctgaaaacagaattgaagcactcttcgagtcatgggaagcgcgagtagatgctgaggcaaagcgcgtactctacgttggcctcacccgtgctcgtaattttgttgctcttgcgatacctaacgcctttgcagggcgctgcgttgatctgctggccacaggccaagtgccctacacaagagtggatttgtga

SEQ ID NO: 80320 - DNA, 1878 bp, Citrobacter koseri
atgtggcatgataacgagacaactgtcgattatttgaattttggtgttgttgctgatgcatgtgcaagcctgctgaagcaggctaatggggaacctatttctataggggtctcaggtggctggggagcaggtaaatcttctctggtgaaaatgattgcatcacgcctggaaagctcttcagttgaagagttgttggtggaagagacaaatcaagaaaagcattcctttgttgtactcactttcaatccatggctctaccaagattttgagtccgctaggagtgcattgctacaaattgtgggggacgagattgttcgtcttacagatgaaaataaaactatcactgacaaagtatctgaactgtggcgaaggataaatcttctcagagtcgctcaattaagtggcgaagccgcattgactttaaccactggtattcctattggctctcttggaaaaacggtttgtaaattggcaggttggttttcgtcggatgataaggctaacaacgaatcatctgacaccgacacccttgagctaagttccagtggtcttctaaaaccgagtgagccattctcgatgcccgcccatattcaggcattcagggatactttagaaggtatacttgaagagctgaaaattacgctagtaatatttgtggatgatttagacagatgcttgccacaaacagcaatttcaacacttgaatcaattcgtttgttgctatttattcgccgtagcgctttcgtcattgccgcagataacgatttcataaaagctgcggtgaaggttcacttcgatggtgcgggaattacgggagatgttgcaactaactacttcgataaattaatacaggttccactccatgtccctcgccttggtttgaatgaggcgaaagcgtatctggtccttctactgcttgaacgagagactagcgtaggcaattttggcaaggaaaggttcaatcatgcgcttagcgttatccctgagaaactgcgtaatagctggaaaggcgaaacgatcaatcaagagtttttgtatgaactggtagagcatattgatgcactcaaaagtttaatggatttagctcagggacttgctgcacttcttcatagttctttagcagtcaacgccaatccccgattaatgaaaagatttttgaataccgtttatttacgtgatgctctttctgcgccgcagggaataactttagatatagccgcactggcaaaatggcatctccttgaaaggtgtgacgaaagccttgctgaggagcttgctagtcgtgtgcattcggataatgacggtagggtacaagttttggcggacgctgaagccgctgcagcgggtcagagtagcttacctgagcctttcaagaatacgccatttactcagcaatggctccaacttctgccagctttgggaaccgaggatctacgcccgcttctccacctcagtcgtgactctggaactcgcgactttggtgatgacaatatgactcctgattctagaaaattgagagatgcactgaaagttgccactaatggtcatgaatccttagttgaacttatgaggaaaataggaccttcacagactgagttggcgatgacaaaggcctggcaaagtaacagtgcttcacgtacctggaagagttacaaggatattgtaatgctgattgagtgctgcaaggtttacaaggaaattggaaataaagcggtcagcctgttggatcaggctcctctaaaacttattggcccgggtttaatcccaactcttggtgctcagccatgggcgcagcaacttttggaacgatggaaagatcttaacgaattaccaaagacaactaagaaggcaattgtggaccttgggagggggcgctaa

SEQ ID NO: 80321 - DNA, 810 bp, Citrobacter koseri
atgggaacatcaacctctagtgggggaggacgttcaggctcaccgtttgaccctgaatggttaaaacctgatagtggtactacaacaggtggaggagattcgcctgattcaccatcgcaggagaatgatgaaaatgtaattcctgatggtgctattgcacctgaaagacggtttggacctgctcgttcgctccttggtggatatctgcaaaatggcagccacgacaatttacgcggtgcgactaaaagcatggtctccaaaggaatggggggagcacgacgagctgccactactatgcgaggcgttgccagcggggtcggtagtcttggtgagttcctgacgtctgctagggatggaaacgaccagcgagtgattgattggcttactcacgttcgtcaagagaatctttcggcaacggatcttactcttgaaattttgaaagaagttattcctgagacaggaagcgttgatgatgaatctctccgtaatgctggcgcggaggctatggcgcaactctatgaactttatccggaagtggacatattcaatcttacggatgtgcaaataggtgaagtcatggggttgaccattgcgaatgagatttgtaatcgaatcgatctccagcttgggcagacttacgaaaaattaaaatatgatcctctattaattcaggaacggcgttctgatattcgcgagtgggtcggtgctaaggttagagtggtattggaaaagcagactacaaaaaacacagatccgaaaagcttggctcagtccattctcttctctgccttagaggtattttcagaatga

SEQ ID NO: 80322 - DNA, 1266 bp, Citrobacter koseri
atgatcaaagttatgtgtgctaaagcagaacttataccagtgtcgattcctgctgatgtgcgagtattctcctatttcaaaggcgctaagcgtgcaggtgttggtacaattgcgaatcgatggcatggcgcattaaaacggagtggattttgcccttcaatagatatttgggattttgtacaattttgcctcgcggtatgtagcgcagatctgtcaagccctagaagaacgagtgcagatggctggacccggaatattcagcttacggttggattgtgcaatacagataagtggttaccgctaaaatccgatcttgaagatatgctaaaagttctgactggtgattattggttactaaatttcaataatgcaggcatggaacctcctcaaggagatggcgcttttctaagtaatgattgcgtgtctttattatccggagggctggatagtctaataggtggaattgatttggtggcaaagggtcgaaaaccactatttgtttctcaactcgcgcataaagattctgagcgacagagggaatacgcatccatgctgatgggaaatggttcacattatcaatggagtcatggcatcagtttcaaaggatcgcgcgagccttcgacacgtggccgctcattagctttttatgcatttgcattacttgcctcaacgaaaataaatttaacaaaaccaacaatatttattcctgaaaatggggtgatctccataaatcctcctttggttccggggcgcgtatccagtttaagtactcgtacaactcatcctatgtttatcgatatgttgcaaagagttctggataatttgggcatccatgtgcagcttgagttgccgtatcgtttcaaaactaagggagaaatgatgcaggaatgccttgaccaagaccttttgcaaaaatgggctgctgattctacaagttgtggccgttttcgaacctataatcgtcagcactgtggacgttgcgttccatgcttgatccgtcgggctgcattccttgcatggaaacctgatggggatacaacgtcttaccgctttgaatctgttgttggcagtgacaagtctggtgcaccagatgaccctatggctgtagcacttgccatccttgatgtaaggaagagagggctagacagatttcttggtggttcgttggtttttgcaccgattaaagagcgacccatgtatcgtagagttttgcagcaaggtattaaagagctagaaactgtactcgttcaggataaattgctttga

SEQ ID NO: 80323 - DNA, 759 bp, Citrobacter koseri
ttgattgattttcactgtcacgttgatttgtatcccgaggctagagatgtttatgccggtgcgattaagcgtaatgttttcacgtggttagttactacgagcccaaaggcttttcaggctacaagccatattttagaaaaacatgaatctgtaatgatcagtcctggacttcatcctgaaattgtcgctgatcgtttccaggaattggaaatgcttctcgagttgattcaaaacgtggctgctgtaggtgagattggattggatggttcaaaacgatattccaccagttacgcgatgcaacgtcgagtgttttccgaggtggtcaggaagtgccacgatgctgggggacgagcaatgagcattcactcaagacaggccgttcctgatgtgctggctaccttaaaagcgttcccttctcacggaattcctattttacattggttcactggaagtgttacggaattgaggaatgcttcagcgcagggatgctggttcagtattggtccggctgctttcaactctgccgctgggaaagctcttgctactaagctccctaaagacagggttgtgccagagagcgacgggccatttgctcaatttaacaatcgcactgtgatgccatgggatttcaatattacagttcgattgctgggcgaggcgtggtcaatgcctgaaaatgatgtaaagctacaattgttaaacaatacgaaaacgttgcttgggcagatggggagcgatcgaattgctctcaacttttaa

SEQ ID NO: 80324 - DNA, 915 bp, Citrobacter koseri
atggagtctgcacgtgataaacatacccgtgagattgtagaagcagaggatctgtggttgcttgatagcgttgatactgaaggctatgtgtgctgggggtgtggtataaccatgcatcctgctgcatgggaaaaagataaaaaagtcagagcctattttaaaaagaaacgccatattcaacatcatcatgattgtgatgctgatgctgaaaccactgtcattcggcagggccagaagcagagtgttcgcaacatactggacagtgcccctggtttaatgccctcgggattaaaattgattgaacaacgtccagtggttgagtcaagtatcgcgggtggtgaaaacaactccagttcaacgcgttcagtatcctcatcatctggcggaggcagttcacccgaacgacaatcccgccgtcaagtgaatgctatccgcaatatttgtcgtgccttcatccgcttcccatatgatcgaggaatgtcgcttaacgttcccggtatcagtggtcaaatctacatgacggcgtttaaaaggctcaggaaagaagttcaaccctacccggagccgaagatcttttatgcctccctgctctggaataaattttcagaaaatgaagaaaaaattattattccactgtctggtgaatggggggaagatgagtcaggtaaacctaaacctacccgaagctaccagatccacatcgattgggctagctggtcaaaagccaagcgtaccgtggttcgtaaagagctggaggctgcccgtacagaggcaatagaagccaaaggcaaggggctgaaagataaagcttgggtattctttattggcgagcaagatactgaaaatccggagatcttctacgttagcgactatcggctcatctgcgcgattgtaggacatatcacttatccctga

SEQ ID NO: 80325 - DNA, 621 bp, Citrobacter koseri
atgaaaacatatattggatcgcatggattacacaatgcaaacaatctggataccatacttgaggtactcagctatgccaccgagcaatataccagcgttatggctgtgcgtgttgatttccattatcctccgatacttgataacggagatacagtcggctgcttcattaaccgtgaacctggagtaatatctcgctccatcaactcactaaaagagatacttaaaaatagtgagcttcgtaggagacgtaacggtgtcagagttcatcccaatactctgcgtgacgtatgggcgaaagaattcagccagtcagggaaatgtcacttccacgtttgctttatattcaacgaacaggcttacaacaagctgggagattataatatcgacaccagcttacgaatgatgatcaccagagcttggtacagtgcattaggactggaactggaagactacccaggactggttcacttccctgataactgccggtatatcttggaccgaaactcagcagattatatctatgagtacggggatctgatccatcgtctggactatctgaccaaacttgacagcaaaatttacgaagaaggtgaacgcaatttcggcggtagtcacaaataa

SEQ ID NO: 80326 - DNA, 570 bp, Citrobacter koseri
atgcgttcatttttttacaccatgtgcagtgatggacagcaagagagtatttcagatcatcactcgctcgtagagatatgccataagtttaatattccacctgaacatgttgtgatcgagcaggtagattttaaggaggttgtttcaaagcaacgtttgctcaggcaattgattaaccatgaaatgaaccggcaggacacgcttgttattccagatttaagctgtcttggcagaaccgtggaggatttacagaagattttatttttttgctttcaaaaagacatttttatctacagctatcatcctgcctcgaggatagaaccttctgcagaatgttgcgtgtcttttttgattggtcgtcaagatacgattgacatccacaatctgaaatcaaccaaaagtcgatatcggcatattaaaaagaaattagggcgaaaggaggggagcaaataccgaagtgatataacaaaacttaagtcaggcagatttactcaggatgaggctgcaaagaaattaggtatcagtttatcgactgtgaagcggcactggaataacggaattatcggttag

SEQ ID NO: 80327 - DNA, 756 bp, Citrobacter koseri
atgtctaaacgaattccgatcacaattaaaaatgaatcgtctcttggaataattaaccattattccaagctaacaaaaacccccgttgcttcagcaatatcggaggccgtggagttgacgatccctatattcgaacaatgcattcgtcatcaatggttaataaaagaactcaaaaacaacctgttaagattctctataagagaaaatattaatctgggaagaggttctcctgaaataacactggaagaacattgtttattgatttggaatacgaacatcaagaattcgctaaaagttcccgtattagatttctttcaactgaaggtcaatgatgagttcatggggaaagacgaaaagacagtaatacatgaaagacttgcttcgttaagagagtcttacaacatggaaaaagcaatctacatttacaatcaaaggagatttgacataaaaaaacaaagtatttcaggtgattcaaatattcttcttatccacaaaagcgcttatgaggaatattactttgatgttggacatgttcaactcttgcctgcatccaaattaattatatttgggataaacgaagttctgagacgaagggaaattgtactgccttgcccggttatttgctggatagatatttaccatgtcaatgagatggtacttatgctgccagtaatccgcaaaacagatgcttgcaactgtgttaatgcaccggatgacatcattataaacccatactcacaggagagcagaaactaa

SEQ ID NO: 80328 - DNA, 213 bp, Citrobacter koseri
atgaacacacctaaagttaaaattcttcgcctttctgcagttatagagaagactggtatagcgcgttccactatctacgattggatcaattcgaagtccccacgttatgacccaacctttccgaaacaacgccgtcttgggcagaaatccgtcggttgggtggagtctgagttagacgaatggcttcggcaacgaacacaagctatagagtaa

SEQ ID NO: 80329 - DNA, 888 bp, Citrobacter koseri
ttgttgaacttaaaggaatttattaccacggttgcagataaaatcaaatgcttgacgtctgaagtgcttgagacggaatggtgtgattgtgttgaggtttttgatgagaataattctcatatgatttccgtcctcaaacaaaagagagaagagttctggaactccaaaaaaataggaactatggtccgttgttatacggatgaatgtataggggatgatgagtttgaaacaattaatgggcagttaaggaggaaggacaagtacaccgaactctatgatccggtacgtgcttgttggaaggcgcttaagaatgagatcagcttacgtactatgcctcattggttcaaaaggcaatcattagatgatattttcttttctcatgcttattgcggttctttagcatatcaatgggctgtatcggttgcatcagagaatgagaatgttgccttagagtctttgattctggcgtcccaaatgctggataaatgcacaggtatgatttgggttaaaatatattgggaaaaggagaaagaattatcgcgtaagaggacgagggcaggcagtaaaggtgggaaggcaaaagctgagttcgatgtattgatccaaaaaaaattggcgaaaatgttgcgtaaagaaggatcaaagtctggatggaaaagtaaaactgcagctgttgacgaaatcattgaatctttgtggaaatatgttcaagagtcagcattcatcgttaatgacactagtaaaaagcatagagtagctacgatggatcaagaagcgttaagaaatacgattcttaaacaatggtcaactgaagtagacgtcgtcagagaagcctttgatgcaacagttacaagacaaaaaagaaagacagtagtgaaaaaggcttag

SEQ ID NO: 80330 - DNA, 1305 bp, Citrobacter koseri
gtgggctacagtgatatcactaaccagttcggtatggcgcgcgctgaatacgacatcctgaataactggacggtctacggcggcgccggggcgcaacatgcgcatgaaaccgggatttataccgcgccaaaattactggacagatcgggtgatgctgtcgtcaatgtgctgtataccaaccgtattattgacgcgttcagcagtatggcgggtattcgcggcgaatttgatacctggtcggtcagccataaggtgaacctgggctattcggcggtgatcaaacgcgataaaacggcatggcgtatgaactgggccaaccctggctccatgaccaatatctatgacaaccatgacgtgccgatgccgcagtgggatctcgccggcggcaactatcacgatccgctgacaacctcccgaaaccgtactcagggttatctcctcagcgatacgctgggattctttgatgaccaggtgctgctgaccgtcgccgcgcgtaatcagaaagtggtggtgcgtaactacagcaatgcgaccggtgaagaagacactgcttctcgctatacggaaagtcgatggatgccgacctacggtatcgtatataagccgtgggacacggtgtcactgtatgccaaccacaccgaggcattacagccgggtgaaaacattaccgatcaggagtcgccggattacggtaaaagcatcggtattctgcactctaagcaaaatgaagtgggcgtgaaaattgatttcggcaccgtcggcggtagcctggcgctgtttgagattaagaaaccgtccgtgattaagaacgagacgacgcaggaatattcgaccgatggcgagcagcgtaaccggggtgtggaagttaacctgtttggtgagccggtttacggtctgcgtctgaacagcagtgcgacctggttacagccgaaactgaccaaaacgcaggatggcgtcaaccaggggaatgatgcttccggtactccacgtttcaccgccgttctcggtgctgaatatgatatccggcaggttgatgggctgaccgctaccgcgcgactgaatcacaccggctcgcagtatgacggcgccgccaatgagaagaagctggacagttacaccacgcttaacctcggcgttcgttaccggatgcgcgtaaaccaggagcagaatgagatggtatggcgtttaggggtggataacgtcaccaacgagcaatactggtctggcgtatccgactacgatggcgtgtatgtgttccgtggcgaaccgcgtaccctgaaactgtctgttaattacgacttctga

SEQ ID NO: 80331 - DNA, 123 bp, Citrobacter koseri
atgcgttatctgattttattgccccatatccgtattgaaaatgcgaatgccgttgccgggttaacctgggggttttccggcgataagccatttcctggggtacgtgcatgcgctttcccgtaa

SEQ ID NO: 80332 - DNA, 2709 bp, Citrobacter koseri
atgaaatttatgaagcctaaatatctggcactttttgtggcagcagcgacaagtccggtttttgccgctgcgccgggtacgccgtctattaccagcggcaatgataaattcgccattgtggaagtggatcaggctgcgcaggattataacaacctggtgaaagttcataacgatggcgtggacgtcaaggtggaatggaacgtctggagcggcgatgcgccgacctccgcgaaagtgctgttggatggtaagaccgtatggtctggcgcaggtagcgctgccggttctgcgaccttcaaagtcaaaaaaggcggtcgttatcaggagcaggttgaattatgtaataccagcgggtgtacgaaaagcgccagcaagctgattattgtggcggataccgacggtagccatctgctgccgctgaataccaccatgaaggaaaacaataaaacgtttgctcagcataccgataaagtggtgggcgcgtacttcccggaatggggcgtgtatggccgtaatttcccggtggataagatcccggcggctaacctgaaccatatcctgtacggctttattcccatttgtggcggcgacggcatcaatgacagcctgaaatccatcgagggcggcaacagttttgaagcgctgaaacgcgcctgtaatggccgacaggactataccgtggcgatccacgatccgtgggcggcgctgcaaaaaccgcaggctggcgtctctaactgggatgacccgtataaaggcaacttcggtcaattgatggcgctgaaaaaagcgcacccggatctgaaaatcctgccatcggttgggggatggacgctttccgatccgtttttccagatgcatgacagcgcgattcgcgctcggtttgttgcttccgttaaggatttcctgaagacctggaaattcttcgacggcgtagatattgactgggaattcccgggcggcggcggtcagaatgaaacgctgggcaacccacagcaggataaagcgacctacacggcactgatgcacgatctgcgcaccatgctcaacgaactgtctgccgaaaccggtcggacttacgagttgacctccgctatcggttccggtcaggacaaaattgaagacgtggactacgcccaggcgcagcagtatatggatcacatcttcctgatgagctacgacttctacggcggctggagcaacaccgatctggggcaccaggcggcgctgcacggcgcagagtggaaaccggacaccaaatacaccacggaaaatggcgtcaatgcgttgctggcgcagggcgtgcagccaggcaagatcgtggtgggcgcggggatgtatggccgcggctggactggcgtgcatggctataccggcgacaatccgtttaccggtacggctaccggcccggtgaaaggcacctgggagccgggcgtggttgattatcgtcagattgttaacgaatacaaaggcaaaccaggctgggaataccgttacgacgctgcggcggaagcgccgtatattttcaataaatctaccggcgacctgattacctatgaagacgcccgctctgcggcggcgaaaggtaaatacgtcctggctaacaacctcggcggcctgttctcctggtctatcgactctgataacggcgacattctgaacgcgatgaacgaaagtttgctgggtgggggttctacgccggttgagccggttgtgaccaaccatgcgccagtcgcgaccgcagttgaccaggtcgtaaccggcccggcgacggtcacgctggacggttctgcctctaccgacccggatggcgatgcgatcacctataagtggacgcagatctccggtccgtccgtaacgctgaacaagagcaccagcgcgaaagcgagctttaacgtcgccgctgtctccagcaatcagaatctggcgttccgtctgaccgttaccgatgcgaaaggtctgagtaacgccattgacgttcaggttgtgaacaaagcgccaaaagcgaaccaggccccggttgtgaatccgctggaaacggtgtcgcttgaagcaggcgcaacctacacgctgaacgcgcaggctgccgatcctgatggcgacgcgttgacctacgcctggagcgtgccgggcgatatgaacgcgacggggacggacacctccagcgtgaccatcaccgcgccggaagtgagctctgcctcgacttacaccgtcagcgtcgtggtcagcgatggtaaaaccagcgtgcagtccaacgtgcagattaacgttacgccaaaagcggcgccggtgccgtccgacgaagggacgacaccgtctgatgaaggcaccacgccatccgatgaggggacgacgccgtctgatgaaggcgcggcaaccggcggttgcgacagcccggttgatgccaatgccagccactacgcggcatgggacgccagcaaaatctacaacaatggcgataccgtcagttttgatcacctggtgtggaaagcgaagtactggacgcagggcaatcagccaggcttcggcgtggacgcgtgggaactggtcagccaggtgaaattcaactggcgttccgatgtggtttacaacggcggtgagactaccacctatcaggggtctgtataccgcgctaaatggtggacgcagggtgataaacccggcaacagcgatgtgtgggtgaaagaaggcgccgccgcagactgtcaataa

SEQ ID NO: 80333 - DNA, 327 bp, Citrobacter koseri
atgaaacaggtactttttattcgtcccgatgcaaacgtggacgggaaaatcgagtggtgcgtctccggtagccagcaggtggcaacgctggaaagccgggatgcgctgagaacgcttgccgtaaatcccctggcgacacgcgtttgtttgctgttgcccgccagtgagatggtgttccgtcattttaccctgcccaaaaaagggttatcgacggcctccacaccgttctcatggctggcggaagagacgctgatcggcgatgtggactcgctgcactggacggtattgcggaaaataagggcgggaagtggatgccgtggccattga

SEQ ID NO: 80334 - DNA, 327 bp, Citrobacter koseri
atggtagacagcattgagcagcgcatttatgagcttgtacggccttacgctggaacgtatctgttcaatataaaacgggtgacattaacgcctgagactgatctcgatactgatttgagcattgacgaacttgaagccgaagacctgatgaatgactttttcaagaaattcaatgttgaacggggagggtttaaaatcgaaacttactttccgaaccttcctttttcgtggaatccgttcaagaaaacggaacctgtccccgtacctgatttcactattggcatgctgatcgaatcagctaaagccgggaaatggttatacgactaa

SEQ ID NO: 80335 - DNA, 465 bp, Citrobacter koseri
gtggatacggttgaggaattaaacggaacatacttctacgctggaaagtcgaatttaagtgctgccgaacttctatttatgattttttgtgagaataccgctagccaatttgggatcggcgtggctgattttggtgcggtggttgccctcgtatcgggaagaaacaatttaggtacgaggggcaaatttgccaatgcgacgaaaggaacctcttacgcttcaaaggctgctcgagcggtatttaagaaaagcaaattcccctttggtatctcgcttcctacttggttaggaggctatacaccgtggacggctcgccgtgttatggttcgtaacattgcgccgtttgttgggcgttcaattcccctgattggtcaaattatccttgcttctgatgtgtcgcaaatcacctaccgcaccatacgcgattacaacaccatagcgcgaggtaacgataagttatggtag

SEQ ID NO: 80336 - DNA, 408 bp, Citrobacter koseri
atgctcaacctcaaaacgactattgcgacagcggctatcctgctctctgtcagctcatacgccaatgctaacgacatgaaaacacttcaaaaacagttaaagccgtggcaaccaatggaaatcacgaccgaaaacaatgcgataatggtggtgcttccaggcaaagaaataacacctgactcatacaataatctaatcatgtcaggtatttgcacaccaatctggacgcatgacacaccagactcatatctcaaggaggttaaagagctcggcattgttaaccagtataagtctattggttatgtgttttcagacccactgaaaacctgtaatgaaatcggctcactcatgccaaaaccgggacaggtgttgctttcttccaaaactcgtctttacaccggtaaatag

SEQ ID NO: 80337 - DNA, 219 bp, Citrobacter koseri
atgtttcattgcccgttatgccagcacgctgcccacgcacgcacaagccgttacatgaccgatacgacaaaggagcgttatcaccagtgtcagaacgtgaattgtagcgccacgtttatcacgtttgagtcggtgcagcgttacattgttaagccgggtgaggttaatgccgtcaggccgcatccgttgccatcaggtcaacaaactatgtggatgtaa

SEQ ID NO: 80338 - DNA, 1170 bp, Citrobacter koseri
atgattacgggcatgaccattgatgccggtgccagccttgcaccggcatttatgctgacgctgaacagccaggacattaccagcaattttagtgaccggctgatttcactcaccatgacagataaccggggttttgaggctgaccagctcgacattgagctcgacgacaccgacggcaaagtcgagttacccctgcgcggggcggtgctgacgctgtggcttggctggcaggggacggcgcttctgaataagggcgatttcacggtcgatgagattgagcacaggggcgcgcctgatacgctgaccattcgcgcgcgcagcgcagactttcgcggaacgctcaattcacggcgtgaagaatcatggcacgacaccaccctcggtgagctggtcagtgccattgcaaagcgcaataaactgacggccagcgtcgcggattcgctgaaaaaaatcccggtgccacatatcgaccagtcgcaggagtctgacgcggtatttctgacccgactggctgaccgcaacggggcaacggtgtcagtgaaagcggggaaactgctgtttctgaaagccggtagtgcgatgacggccagcggcaaacccgtcccgcaaatgacgctgacccgcagcgatggtgaccgtcatcagtttgccattgccgaccgtggagcttataccggcgtaacagctaaatggttgcacacaaaagacccgaagccgcaaaagcaaaaagtgacgctgaaacgccagccaaaagagaaacacctgcgcgcactggagcacccgaaagcaaagccggtcagcaaaaagacaaaggccaaaaaagagcaggaagcccgcgagggtgagtatatggccggtgaggctgataacgtgctggcgctgacgacggtctacgcttcaaaggcgcaggcgatgcgtgccgctcaggctaagtgggataagttgcagcggggcgttgcggagttttcaattacgctggcgctcggccgggctgatttatttcctgagacacctgtgcgcgtgtcgggctttaagcgtgtcatagacgagcagtcatggttaatcagtaaggtgactcacaatctgaataatagtggcttcacgacgggcttagagcttgaggttaagctctctgacgtggagtacaaagcggaagatgatgaagggtga

SEQ ID NO: 80339 - DNA, 489 bp, Citrobacter koseri
atgatgatgcttgcgcttggaatgtttgtgtttgaacgccgcaccctgccttatcagtcgatgcagcactcgaaggattaccgctgggcgtctaatgaccgggtcggtaaaccgcctgcgtatcagtttctcggcgagggggaaacctcccgccagcttgccggtacgctttaccctgccattaccggtggtcgtatatccctgctggctgttgagctgatggccgacgagggcagagcgtggccgctgattgagggaaccggcaggattctcgggatgtatatcgtcgataaggtgtcgaccacggataccgagtttttcagtgatggtgcggccagaaagattgatttcacgctttcgttgaaacgggtcgacgaatcactgacggcgatgtttggcgacctgaataaacaggccagcgagcttctcggctctgccggtaatctggccgataagttgcagggcgcactcggagggctgaccgcatga

SEQ ID NO: 80340 - DNA, 2442 bp, Citrobacter koseri
atgagtaataacctgaggcttgaggtattgctgaaagcggtcgaccaggcgacccggccgcttaaatccatccagaccgcgagtaaaagcctgtcaggcgatattcgcgacacacaaaaggggctgcgtgacctgaatggtcaggcatcgaaaatcgacggctttcgtaaggcaagcgcgcaactggccgtaacaggtcaggcgcttgataaggcgaaacgagaagccggtgagctggccgtgcagtttaaaaacaccaccagtccgacccgcgcgcaggcgcaggcacttgaagcggcaaagcgagccgcttctgaactgcaaacgaaatacaacagcctgagaacgtcggtacagcgccagcgctcagagctgatgcaggccggtattaatacccgcaccctgtctgctgatgagcgtcggctcaaaacctccatcagcgaaacgacggcgcagcttaaccgacagcgtgaggcgctggcgcgtgtcagtgcgcagcaggcgaaattaagccgggttaaagcccgttaccagtcaggcaaagagcttgccggtaatgcggcagcggctggcgctgctggtgtcggtattgcggcagcgggaacgatggccggggttaaattactgatgcccggttatgactttgcgcagaaaaattccgagttgcaggccgtgctcggggtcgacaagcagtcgccagaaatgcaggcgctacgcaaacaggcgcgccagctcggcgacaatactgccgcctctgccgatgatgccgccagtgcgcagattattatcgcaaaaggtggtggtgacgccgccgctattcaggcgacaacaccagtcactctgaatatggcgcttgctaaccgtcgcacaatggaagaaaacgccgcgctgctgatggggatgaaatccgctttccagctctcaaatgacaaggtggcacacatcggcgacgtgttgtcgacggtgatgaacaaaacagccgcagactttgacggcctgagcgactcgctgacctacgtcgcgccggtggcgaaaaacgccggggtgagcatcgagcaggcggcggcgatggtcggtgcgctgcacgacgccaaaatcaccggctcgatggctggcaccggaagccgtgctgttctcagccgtttacaggctccgaccggcaaggcctatgccgccatcaaggagctcggcgtgagaacggcggacagcaagggtaacacccggcctattttcagcattctgaaagaaatgcaggcgagttttgagaaaaataaacttggtactggtcagcgttctgaatacatgaaagccattttcggcgaagaggcaagctcatcagcggcggtcttgatgactgccgcatcaaccggcaagctcgaccagctaaccgccacgctcaaagcctctgacggaaaaacggcggagctcgttaaggtcatgcaggataacctcggcggcgacttcaaagagttccagtcggcctatgaggcagtaggtactgacctttttgaccagcaagagggctcgctgcgcaagctcacccaaacagccacgcagtatgtattaaagctcgacggctggatccaaaaaaataagggactcgcggaaactatcggcattattgccggtggcgcactggctctgattggtatcattggcggcattggtctcgttgcgtggccggttgtcatggggattaacgccattattgccgccgctggcgtaatggggacggtctttactgttgccggtagcgccattgtgaccgcactcggcgcgattacctggccgattgtggcagtcggtgcagcgattgtggccggggcgctactcatccgtaaatactgggagcccgtcagcgcatttttctcgggggtgattgagggcattatgagcgcctttgcaccggtcggggaaatgttcgctccactggcgcccatttttgacggtctcggcgagaaactgcgtggcgtctggcaatggtttaaagacctgattgcaccggtcaaggcaacgcaggagacgcttgatagctgcaaaaatgtcggcgttatatttggtcaggcactggcctctgccttgatggctccgctaaatgtttttaacaagctgcgcagcggtgtcgactggcttctcgaaaagctcggcatcatcaacaaagagtcggacagtctcgaccagaccgcagccaaaaccaatgcagccacgcagggtaattcctacatcccggcaaccagcgcctatggtggttatcaggcttatcagccagttactgcaccggcggggcgctcttacatcgaccagagcaaaagcgaatacaacatcactttaccgggtggcgctgcgccggggcatcagcttgaccgacagctacgcgacacgctcgaacagattgagcgtgagaagcgtgcgcgccagcgcgccagtatgagccatgactga

SEQ ID NO: 80341 - DNA, 336 bp, Citrobacter koseri
atggcaaaagcaccacgtaaaaccgctgaatttgttgatacggctggcaatgcaattgacaccgtaaacccgaacgtcgtgaccctcgacaagccgattaaacgcgccggtcagacgattgaaaaagtcaccctgattgagccgaacgccggtactctgcgcggtgtcagtctggcagcggtggcgcagtccgaagtcgatgcgctgattaaaatcctgccccgcatgacctatcccgcgctcacagcgcaggaacttaccgcgatgaacctgcccgatatgctgtcgctggccgctaaggtgattggttttttgtcaccggcttcggcggaatag

SEQ ID NO: 80342 - DNA, 519 bp, Citrobacter koseri
atggcactaccccgcaaactcaaatatctgaacatgttcaacgatggcctgagctacatgggcgttgttgaatccgtgacgttaccgaagctgacccgcaagctcgaaaactatcgcggtggcggcatgaacggcgcggcggcgattgacctcggtctcgacgatgatgcgctaactgtcgagtggtctgtcggtggcctgcctgatgtggcgctgtgggcgcagtacgccgcgccgggtgctgatgctgtgccgctgcgttttgctggctcttaccagcgcgacgataccggcgaaatcgtcgcggtcgaggtggtcatgcgtggccgtcataaagaaatcgacggtggcgagaataagcagggtgaaaatacctcgaccaaactgtcgaccgtttgcacctattaccgcctgacgattgacggtagcgacgtcatcgaaatcgacaccgtcaacatggtcgagaaggtgaatggcgtcgaccgtctggaacagcaccgccgcgcaatcgggctgtaa

SEQ ID NO: 80343 - DNA, 1188 bp, Citrobacter koseri
atgggcgactatcatcacggcgtgcaggttgtcgaagttaacgacggcacccgcgtcatttccactgtcgcaaccgcaatagtcggcatggtctgcacggccagcgatgcggatgcggagacattccccctcaatgagccggtactgattaccaatgtgcagagcgccattgcaaaagccggtaaaacaggcacgcttgcggattcactgcaagccatcgccgaccagtcaaaacctgtcaccgttgtcgtgcgcgttgccgaaggtgtcgacgatgacccggaagccgctcaggcgcaggccatttctaacatcatcggcggcacggatgagaacggtaaatacaccggtatcaaggcgttgttgactgccgaagcggtcaccggcgttaagccgcgcattctcggcgtgccgggtctcgatacgcaggaggttgcaaccgcactcgcgtctgtatgtatcagtctgcgcgcgtttggttatgtcagtgcatggggctgtaagaccatttccgaggcgatggcctatcgcgagaatttcagtcagcgcgagctgatggtcatctggccggatttccttgcgtgggataccaccacgaacgccaccgcaacggcatacgccaccgcccgcgcgctcggcctgcgtgcctacatcgaccagactgtcggctggcacaaaaccctgtctaacgtcggcgtgcagggcgtcaccggtatcagcgcctcagtattctgggatttacaggcatccggcaccgatgctgacctgctcaacgaggccggggtcacgacactggtgcgcaaagatggtttccgcttctggggtaaccgtacctgctctgatgacccgctttttctgtttgagaactacacccgcaccgcgcaggtgctggccgacacgatggccgaggcgcacatgtgggcggtcgacaagcccatcactgcatcgctcatccgtgacattgtcgacggcattaacgccaaattccgcgagctgaaatctaacggctacatcgtggacggtgaatgctggttcgatgaggaatcgaacgataaggaaaccctcaaagccgggaaactgtatatcgactacgactatacgccggttccaccactggaaagcctgaccctgcgccagcgtatcacagataaatatctggtgaatctggccgaatcggtcaacagctaa

SEQ ID NO: 80344 - DNA, 537 bp, Citrobacter koseri
atgcaacaccttaagaacctgacgaaatacactcctgatgacgcatataatctgtttttgatggacgagcataatgcggaatttttcatctctgatgatgggcgtgactggtacgaatcgcaggctgactttatgccggacacactgaaagtggcatatgacgaagcggggattattcgttgtatcagcaaagacgtgtcgagcatttacccgcgtgatttcagcgtcgtagaggtcgaaattacaccagaaaatcaggatgtggacattatggggggctgggtgttcagggacggaaaaattcagccgcgcgaatattcacaggaagaattgatagcacaagcagaagcaaagaaagccgaattacttgctatggctgatgctgcaatagctccgctttcccgcgctgtgaggctgaaaatggcgacagatgaggaagccgcgacgctcgaagaatgggagcgatacagcgtcctgattaatcgggttgatacatccaccgtgccggatatcgactggccggaacagccgaaataa

SEQ ID NO: 80345 - DNA, 1944 bp, Citrobacter koseri
atgagcacaaaatacaaaacagtgattaccaccgccggggcggcaaaactggccgctgctactgtgccgggtggaaaaaaagtgaatattactgcgatggccgtgggcgatggcggcggcacgctgccggaaccgaacgccagtcagacgaaactcattaatgaggtctggcgtcatgcgctgaataaaatcagccaggacaacaagaaaaaaaattatattgtggccgagctggttatcccgccagaagagggcggtttctggatgcgcgagcttggcctgtatgatgatgccgggacactgattgccgtcgccaatatggcggagagctacaaaccgaaactggaagagggctcaggccgtgcgcagacgtgccgcatggttattattgtcagtagcattgagtcggtggaactgaccattgactcgacaacggtgatggcaacgcaggaatacgttgacgataagctcgccgagcatgagcagtcccgccgccatcctgacgccacactcaaagaaaaaggttttacccaactcagcagcgcgaccgacagctcgtctgagacgctcgcagcaacgccgaaagcagttaaggcggcttatgaccttgcgaacgctaaatacacggctgttgatgccaccacggcgaaaaaaggtattgtgcaactcagcagttcgacgaacagtgattccgaagcgcaggccgccacgccgaaagcggtaaaggcggtgaatgacaaattaactcaactggaggaagaactcggcaccgccgcgcttaaagatgccgtcacatcaacgacagataccaaagccggacgtactcccgttgttgggtggatggggttggggggcgatgctattaatgttagtgcagatagcatcaatgccctgccaatccctgcttacagctcaataaaaagatacagcccgtccgggtcttcgtttttcgcaggtatatcggctttctgttacaagaatggcgatggcagcactaattttgctgaatttatggcaccgattacagggtctacatatccctttgtccgtaacaaagacggaatgcagttaattttcacgaacaaaaacccgcctaaaccttctgatgttggtgcgctccctcttgccacatccgcgctgtctgttgaccttaacacgcttggttcaaacgccgccgcaggtgtttattaccagacgatgactgcaaacgcgacaacagcaaatcactaccccattgcagaagccggttcgttgctggttacgcccggcccctatgggtgtcagcaggaatacaccggattcgtcagcggcaggaaatttgtacgtggactggcggcacaatggaacgggactaacggcccgtggaacggatggaaagagtattttctgacggacggtggtgaagtgctcggggctgtgacagtaaaaagaaataatgccgcaattactattcagaatacgtcctctaactcttcgctttatctgctgggtgttaacgaaaaaggggagaatcttttttatgtcgggcgtggtggttcttccaatactatcgttcttagtaattataatggtaataatgcagtaaatttaaatgaagatggctcaattttaatcagcttgccagccggaaagaatgtaaaaacaaacaggcaatttgagccatcggactacggtaattttgacgcccgttatcaagcaaaagggaattacactcctgctggcgaggcttacacaaaagccgcgtctgatgcgcgttacgtacagaatatccgcgtaagtgcaacgcaagtccgttccttcagtgatggtggcgggtattcatcgaacgatgcggcatttgcaacggcgattgcgatggtcggtgggagctcgaataacggttctctgctggtcagatacgttcaaaaaaatattaacggcacctgggttaatatcacgacttaa

SEQ ID NO: 80346 - DNA, 534 bp, Citrobacter koseri
atgagtgatgcgcgcctgttacctgtagggtcatcacctcttgaggtggctgctgcccgtgcctgcgcagatattgaaaatacgcctgttccgttacgtcgcttatggagccctgacacctgccctgcaaaccttttgccgtggcttgcgtgggcgttttccgttgaccgctgggatgagaactggccggaagaaaccaagcgtgacgttattcgcagtgcgtattacatccactgccacaaagggacgataggcgcagtccggcgtgtggttgagccgctcggctacgtcatcaatgtaactgagtggtgggagaacaacgacccggcgggtacgtttcgccttgatatcggcgtactggaaagcggcatcaccgaagaaatgtatttagaaatggaacggttaattgccgatgcaaaacccgcaagtcgtcacctgattggtctgaatattattcaggatgtggcgggttatatgtacaccggcggcgtggcatatgacggcgacattattacggtttacccggatgagtga

SEQ ID NO: 80347 - DNA, 909 bp, Citrobacter koseri
atggcaaccgtcgacctgagtctgttacctgttcccgatgtggtcgaggaactggactatgaaactattcttgcggaacgtattgcgatgctgatttcgctttaccccgaagaccagcaggaggccattgcccggacgctcacacttgaatcagagccgattgttaagctgttgcaggaaaatgcctaccgtgaagttatctggcgtcagcgggtcaatgaagctgcgcgcgcagtcatgctggcttatgccataggcagtgaccttgataatatcggggcgaatttcaacgttgggcgccttgtcgtcacgcctgctgacgacaccaccattccccccacacccgccgaaatggagcttgatgctgactatcgtctgcgcatacagcaggcctttgaagggatgagcgttgcgggatccaccggagcctatgagtttcatggtcgcagtgctgacgggcgtgtcgctgacatttccgttatcagtccttcccccgcgtgcgtcaccatatcagtgctttcacgcgaggataacggtacggcatccgatgagcttctgaccatcgtgcgaaatgcacttaatggtgaggacgtgaggccagttgctgaccgtgtaacggtgcagtcggctctgattgttgattaccagatacgcgcaacgcttttcatttatccggggccggaaagtgagccgattcgcgcagcggctgaggcgaagctcaaagcctataccagtgctcaacatcggttagggcgggatattcgcctgtcagccatctatgccgcgttacatgttgagggggtgcagcgtgtcgagctggcggcgccagtggctgacattgtgcttgataaaacgcaggcctccttttgcacagactatcagatagtgattggtggctccgatgagtga

SEQ ID NO: 80348 - DNA, 348 bp, Citrobacter koseri
atgacggcgcgctatcagggtatgaaccgaaataccggcctcggcatcagcgacactgagcacatcagccagagtatgcgcgacattctgctgacgccggtcggctcgcgcgtgatgcgtcgtgaatatggctcgctcctgtcggcgctgattgatatgccgcaaaacccggcactcaggctgcaaatcatggtggcgtgctattcggcaatccagaagtgggaaccgcgcatcaggcttacatccatcagctttgagaccggcgacgctggcgagatgtatgtcgatattaccgggatgcgtaccgacaccggtgcgtcagtttcaaccactgtttcactgagttaa

SEQ ID NO: 80349 - DNA, 642 bp, Citrobacter koseri
atgaatacgttatccacaatacaggagctcgcgcgcgcgattcgcaacctcatccgctcaggtgtggtgactgaggttgataccgtgcaggggctgtgccgcgtacaaagcggcgggatccagactacatggctgaactggctgaccacccgcgccggtcgttcgcgcacatggtgggctccatcggtcggtgagcaggtgctgcttctggcaatcggtggcgagcttgataccgctttcgtgctgccggggattttctccgacgataatcccgccccgtctgcctcggcggatgcgtggcatgtggttttccctgatggcgcggttattgagtacgagcccgagaccggcgcgctgacggtcaccggcatcaaaacggccgacgtgacggcatcgggatccatcaccgcaaccgtgccgctggtaatggtgaaagcctcgaccagtgtcaccctcgataccccggaagtgatttgcacaaataagctgacgacggggacgcttgaggtgcagaagggtggcacgattaaaggcaatatcgagcattccggcgggaaattaacatctaacggtgtgcaggttgatgaccatgaccacggtaatgtgcagagcggcggaagctggacgaaggggattcaatga

SEQ ID NO: 80350 - DNA, 450 bp, Citrobacter koseri
atgagtgagttaaccgcgctacaggaacgtcttgccggtctgattgccagcctgtcaccggcggcgcgtcggcaaatggcggctgagattgcgaaaaagctgcgtaccagtcagcaacagcgcatcaggcgtcagcaggcacccgacggcaccccgtatgccgcgcgaaagcgccagccggtgcggagcaagaaaggccgcattaagcgtgaaatgttctccagactgcgcactaaccgctttatgaaagccaaaggcagcgacagtgcggcggtggtggagtttaccggcaaggtgcagcgcatggcgcgggtgcatcagtacgggctcaaagaccggccaaaccgcaacagtcgtgatgtgcagtacgaggcgcgcccgttgctcggtttcacccgcgacgatgagcagatgattgaagacgtcattatcaggcacctcggcaaataa

SEQ ID NO: 80351 - DNA, 468 bp, Citrobacter koseri
atgcagaagcacaaaagcctgcgcaaagcgctgattaacgccgtgccgcagctccgaaataaccccgatatgttgcgtctttttgccgacaacggccataccgattcccggctggcgagctcgctgtcgtttgaaaaggtgtacgtgcttaacgtggtggtgaccgacttcaccggcgacctcgatttgatattcgtgccggtgcaggcgtggctgcgtgaacatcagccggacattatgaccaccgacgacgggcgggaaaaaggattcacctggattattgatatcaacaatgacgattcgctcgatatcagtatcagcctgaggctcaccgagcgcacgctcgtcaaagaggtcgacggcgcgctgcatgtcagctatgcccctgagccgccgctgcctgagccggtgacgcgcccggtcgagctgtacgttaacggcgaactggtgagtaagtgggatgagtga

SEQ ID NO: 80352 - DNA, 159 bp, Citrobacter koseri
atgccgggaagtgacccgaaaaccaatggcgacctgagcgcggatatcagccgtcttgaaggcgcgctaaccgcctgcgcgttgcaggttaaaaccgtcaaacactgtcaggatgaactcgatgcagaagcacaaaagcctgcgcaaagcgctgattaa

SEQ ID NO: 80353 - DNA, 414 bp, Citrobacter koseri
atgaaaatcctgataacgctgcttgtactggctgtgctcgggctgctgtggttgcgccatgagaacggcaatttatcccgctcctttgagacggccaaccgcgtcgcaagcgaacaaaagacgaagattggcatgctgaaaaatcagctcactgttgccggtcagctcgcccgacgtaatgaatccgcgcaggtggcactgcgcgaacagctcgcaaaagccagcgcagaagccagccgccgtgagcagacgataacgaggttacttaatgaaaatgaagcctttcgccgctggtataacgctgctctgcctgatgtcgtgcgtcggttgcacacccgagccgcctgcgccagcgccggtgattgtggtcaacggatgcccgagggtgagcctttgcccgatgccgggaagtga

SEQ ID NO: 80354 - DNA, 498 bp, Citrobacter koseri
atgccggtcattaatactcaccagaatatcgccgcttttctggacatgctggcgtattcagaaggaacggcgacgcatccgctgacgaaaaatcgtggttacgacgtcattgtcactggccttgatggtaagccggagattttcaccgactacaccgaccatcctttcgctcatggccgacctgcaaaagtgtttaatcgccggggcgaaaaatccacggcgtcagggcgttaccagcagctttatctctactggccgcactatcagaaacagctcgcattgcctgatttcagcccgttgtcgcaggacaaactcgcgattcagttaatccgggagcgcagtgccattgaggatatcagggcggggcgtattgagcgtgcgatttcccgttgccgcaatatctgggcgtcgttaccgggtgccggttacggtcagcgtgagtacagtctcgaaaagctggtcaccgtatggcgcacggctggcggggtgatggtatga

SEQ ID NO: 80355 - DNA, 297 bp, Citrobacter koseri
atgacagaaggtgaaaaaggcgtcctttcactgtttgtgattggcgtgatgattgttgtcggaaaagtgctggcaggcggtgagcccatcaccccgcgcctgtttatcggccgcatgctgctcggcggttttgtctcaatggtggccggtgtcgttctggtgcagtttcctgatatgccactgacggcggtttgtggaattggatccatgctcggtattgccggttatcaggtggttgagattgccattcagcgccgctttaagtctcaaaagggagagagcgatgccggtcattaa

SEQ ID NO: 80356 - DNA, 204 bp, Citrobacter koseri
atgaaagtccacgcgatgcagggcgacaccctcgacgcgctttgtgcccggtattacgggcgcactgagggcgtggtcgagactgtgttgaaggctaatcccggtctgtctgagctgggcgtcattctgccgcacggcacggcgattgagctgccagacgtggcatcgtcgcccgtaactgaaactatcaacctttgggagtaa

SEQ ID NO: 80357 - DNA, 510 bp, Citrobacter koseri
atgacgacagtaatactgaatcagcccgacgagccgcaggacgtaccgggcgtggtgattcctgcaccggagacgggcgacgcagtgattaaaaacacgttctttttccctgatgtggatccgaaacgcgtacgcgagctgatgcgccttgagcagacggtttccgatgcgcgcctgcgcaatgccatcaagaccggcatggcggaaaccaatgcggaactctacgactaccggctgcgccagatttccgccgggtttaagcagctggccgatgtgcctgacgccgaggaaatcgacggcgagaatgtgcgcgttttccactacctgagcgccgtgacggcgatggcgaccgccaccctgtatgagcgctatcgcggcgttgaagctaccggcaagggtgacaaaaaagccgacagcgtcgaaaccaccattgatgacctgtggcgggatatgcgctggtcggtttcgcgcttgcaggataagccgcgctgcatcgtgggtcagctctga

SEQ ID NO: 80358 - DNA, 765 bp, Citrobacter koseri
atggcgagccccgcacagcgtcacgcaatgcgggtctcggccattcaggctgcgcagcgggaaaatgccccgctgcgtaacgcctcagcttatgagcagatgctcgtcaagctggccgcagaccgccggacgctatcacaaattcactctaaagaacgcaaagcattgaaaaagcgcgagctgttgccgttttacctgccgtgggtgactggcgtgctggaaaatggcactggcgcgcaggatgacattctgatgacggtcatgctgtggcgtctcgatgccggtgatatttccggtgcgattgaaattgcgcgttatgcgctgcgcttcggtctctctatgcctgacgggcattcacgctctgcgccgtacatgctggccgaagaggttgcgctgacagcactacgcacccgtgatgccggtcagactgtcgatgctttgctgctgcttggcgtcattgaaatgaccagtgcagcagatatgcccgatgaggttcgcgccagactgcataaggtgactggcctgacgttacgcgatgccggtcaactcagtgaggctatgactcacctgcaacgtgcgaatcagcttgaccgaaacgccggtgtgaggaaggacattgagcgacttacgcgtgagctgaatccgaaaccggtcgccacagccagaaaggccgcagcccgaccggcacggaaaaaaacacaaaaaaccaaaacagattcactggtgaagcgcgggcggggtcgcccgaagaaagtcaccggataa

SEQ ID NO: 80359 - DNA, 1149 bp, Citrobacter koseri
atgcgtaaagaaacccgctttaaatttaataagtacctgagccgaattgctgagctgaacggcatcgaagttaaagacctcagtaataaatttaacgttgagccgtccgtcacgcagacgctgtttgacaaagtccagcagtcttcctctttcctgaaacttatcaatatggtggtggtgcaggaactgacggaagagaaagtcggcatggatgttaccggcacgattgccagcactgccgataccggcaacggtgtcgagcgtaaaacggccgacttctcgaaaatggatgcataccgttatttctgtaagccggttaacttcgactatcacctgcaatataacaaactcgacctgtgggcgcgttttcaggatttccagattcgtatccgtaacgccatcatcaagcgtcaggcgctggattacatcaccatcggttttaacggtgtcacccgtgcggcaacatctgaccgtaacgctaacccgttgcttcaggatgtggcagttggctggttacagaaataccgtaacgacgccccggaacgcgttatggataaagtgaccgacgataacggcgcggttatttcggacaccatcaaagttggtaaaggtggtcattacgccaacctcgacgcgctggtcatggatgcgcatgagtcgctgattgaagaagttcatcgcgaaaaccctgagatggttgtcatctgcgggcgccgcatcctgactgacaagtattttccgctgattaacaaattccaggcgaacagcgaacagctcgccggtgagctgattatcagccagaagaccatcggccagttacaggcggtacgcgcgccattcttcccggccaacagcattttcattaccccgctggataacatttccatctatctgtatgaggatggccaccgccgccacatcatcgaaaacccgaaactggatcgcgtggaaaattacgagcaggtcaaagtcgactttgtcattgaagactacgaggctggttgtctgattgaaaacattgaaattctggagccagaagaagacgccacgccggaaacgaccagcgcagatgcatttgccgctgcaatcgtaaaagcgatgaaagagctgacaggcaataccggcgcaccggaaggcggggaggcataa

SEQ ID NO: 80360 - DNA, 858 bp, Citrobacter koseri
atggcaaaaaaagtatcaaaattctttcgtatcggcgttgagggcgatacctgtgacggtcgcgttatcagcgcgactgatattcaggaaatggccgacacgtttgacccccgcgtctatggttgccgtatcaaccttgagcacatcaaaggtctgttgcccgacagcccgtttaagcgctatggcgatgtggttgaactgaaagcggaaaaaatcgaagacgattccgagcttaacggcaagctggctttgttcgccagaatcagcccgtccgatgagctggtcgcaatgaataaggcgctccagaaggtttatacctcaatggaaattcagccgaattttgccaacagcggtaaatgctatctggttggtctggccgtcactgacgacccggcaagcctcggtactgaatatcttgagttctgccgcacggcaaaacacaacccgctcaaccgattcaaagccagcccggagaatttattctctgtcgccacccttgcggaactggaatttgaagaccagcccgaaaccctgctcgccaaactaaccgactccgttaaagccattttcagccgcaagcaacaggatgatgacgcccgctttgctgatgtgcgcgaagcggtgacggcgattgccgaacgtgtccagagtggtggtgaagataccgaagcgcgtttcggcaagctggaaagcgaaattaccgcgcttaaacagaccgtgaccgaacaggccgaggcgaccagtcagcaattcagcgcgtttaaaaccaccctggacaacaccgaaagcagtgtgcaaccacgccgcaaactgagcaccggtggcgatagtgccgactcagcgctgaccgactgctaa

SEQ ID NO: 80361 - DNA, 1770 bp, Citrobacter koseri
atgaccatcaccaccgacacatcactgttaaacgacccgcgacgacaggcggcattgctgtactggcaagggttctctgttccgcaaatctcggacatgctccagaccaaacgcgccacggttcagagctggaagcagcgtgaccagtgggaagaaacagcaccactcaatcgggtggaaagcacgcttgaagctcgactgattcagctctatgcaaaacccgaactgacggcgcatgactttaaggtcgctgattttctcgcgcgtcagatggagcgattcgcacgcattaatcgctatgagcagaccggcaacgaagcggatttaaacccgaaagtcgccaacaggaacaaaggggaaaagaggaagccgaaaaagaactatttcagcgaggaagctatcgaaaaactggaagagatttttatcgaccaggcattcgaataccagcttgaatggtggcgtgccggactggcacatcgtatcaggcacatactgaaatcccgccagattggcgcgacattctattttgcacgggaagcgctactgcatgcgctgaaaaccggccataaccagatttttctttcagcaagtaaaactcaggcttacgtattccgaaaatacatcatcgcctttgcccgactggttgacgtcgagctcaccggcgacccgattgtgctcggtaataatggcgctgaactgatgtttctcggcaccaatgccaacacagcacagagccataacggcgatttgtatgtcgatgaaattttctggatccccaacttccagaaactgaaacgagtcgccgggggcatgtcgtcacaggaacatttgcgcacgacctatttttcgaccccgtcgtcgctggcgcacggtgcctatccgttctggtctggcgagctgttcaaccgtgggcgttctgatgccagcgagcgcgtcgatattgatatcacacacgccgcgctcgcgaagggcgtagcctgcccggacggccagtggcggcagattgtcacgattgaggatgcactcgccaaaggatgcaccctgttcaacatcgatacgctgaagcgcgaaaacagcgttgatgagttccgcaatctgtttatgtgcgaatttgtcgatgataaggcgtcggtattcccgttcgaagaattgcagcgctgcatggtcgacagcctcgaatcgtgggaagactatgcgccatttgccgacaggccattcgggcatcgcccggtatgggtcggctatgacccgtcattacgtggcgacagtgccggttgtgtcgttatcgcgcctccggtggttgccggtggcaaattccgtatccttgagcgccatcagtggaaaggaatggacttcgcacaacaggccgaatccattcgcgcgctcacgcagaaatataacgttgaatacatcggcattgacgcgaccgggctcggtcagggcgtgttccagcttgtgcgctccttctaccctgcggcgcgtgaaattcgctacacacctgaaatgaaaaccgcgatggtgctgaaagcgaaagacaccatagggcgcggatgcctcgaatacgacgtcagcgcaaccgacatcacacagtcgtttatgtccatccgtaaaactatgaccagcagcgggcgcagcgccacctatgaagccagccgaaccgaggaagccagtcacgcagacctcgcatgggcgaccatgcacgtattaatcaatgaaccgctcaccgccgccagcggccaacagtcatcttccatcatggagttttattaa

SEQ ID NO: 80362 - DNA, 1035 bp, Citrobacter koseri
atgagcaaacgcaataaacgccagcgccaccagaaagccagccagcataccgccgcgccagctcagagcatggaagcattcacttttggtgaaccgacgccggtgctggatcggcgcgacattctcgactatgtggaatgcattgataacggccagtggtacgagccgccggtcagtttttccgggctggcgaaaagtctgcgcgccgcagtgcatcacagctcaccgatttacgttaagcgtaatattctcgcctcaacgtatattccacacccgttgttgtcacagcaggatttcagccgctttgtactcgactttcttgtgttcggtaatgcttttatcgagaagcgcctcagcatttcaaagcagccggtcaggcttgaaacctccccggccaaatacacccggcgcggggtggaggatgatacttactggtatattcagagttacacgcaaccgcaccagtacgcgcccggttccgtcttccatctgcttgagcccgatataaatcaggaactctacggaatgccggaatacctgagcgcactaaattcggcctggttgaatgaatccgcgacgctgtttcgccgtaagtattatcagaatggcgcacacgccggttacatcatgtatgtgaccgatgccgcgcagagcagcaccgacgtcgaagctctgcgaaaagcaatgcgtgactcgaaaggactcggcaactttaaaaacctgtttttctacgcgccgaacggcaaagccgacgggataaaaattgtgccgctcagcgaagtggcgacgaaagatgatttctttaacatcaaaaaagtcagcgcggctgacctgctcgacgcgcaccgcatcccgttccagttgatgggcggcaagcctgagaacgtcgggtcagtgggtgacgttgagaaggtggcaaaggtctttgtgcgtaacgagctgacgccactacaggagcgactcagggagctgaataactggatagggcttgaggtgattcgctttaaaaaatacacacttgagcctgacgaataa

SEQ ID NO: 80363 - DNA, 258 bp, Citrobacter koseri
atggcaggtagatgtattttttgtggtgatccggctgataagattatcggattgcgtttgcgtaggcaggctgatggcggaagtgctatttgggcccctgatactgatgcttacctttgcgacactcatgcagcgaatggttacaacgttgaaattaattttacacctcgtactgaccgtgttgtacaaacgagggtgagctctagtacgggtggtccggttattcacaaccacactattactaaaagcgtaaattaa

SEQ ID NO: 80364 - DNA, 882 bp, Citrobacter koseri
atgcttagaaaggctataacaaaaattaaaactgatggcattcacttatatcatggcgattgcttaaaccttttaaccatgatggatgatgcctctgttgatttaatagttacttcaccaccctatgcagaccaacgcaaaggtacttatggtgggatttcccctgataaatatgttgaatggtttactcctatagcagagcaaatgcttcgagtgcttaaaccatccggttcttttattttaaatataaaagaaaaagctgttaacggggagcgacatacgtatgtgctggaactcattctaagaatgcgtcaattaggatggttttggacagaagagtatatgtggcataaaaagaattccttccctgggaaatggcctaatcgtttcagggattcttgggaacgttgcttgcattttactaaaagcaagaagtttgccatgtatcaagaatctgtaatggtgccgatgggtgattggaaaaatgaacgtcttaagaaattgagttccaaagatattattcgcgatgagtcaaaagttggaagtgggtttggtaaaaacatttctaactggcaagggcgcgaaatggcgtatccaactaacgtcctacatatggcaacagaatgtagtaacagaaagcatagcgcagcttttcctgagtctctccctgcgtggtttataaaattgtttactcaacctggagatgtagtgcttgatccatttgctggctcagggactacgttacttgcttcagataaactttcaagaaattccgttggttttgagttgctagctgagcattgtttagttgcgaaggagcgtttggggcttaaagcgttgaactctaatggtgtcattgagtattgcaaagaggctgaataa

SEQ ID NO: 80365 - DNA, 2232 bp, Citrobacter koseri
atgagcagttacccttacgcatggaacgcgccccgcgaagctgtcgggcgtgaaagaccccttacccgtgacgaactgcgtcaggtgcaaggcgttttatccaaaattgaccgcctgccttactttttaagctccctgtttacctcgcgctatgaatatatcagacgcaacaaaagccctgtgcatgggctgtatttcctcaagtcgacatttctgcgccggttgtggccgcgcatcgagcgggttaatcagcgcaacgaaatgaatactgatgcgtcgctgttgtttctggcggaaagcgagaattatgcgcgcctgccggggatgaacgacaaagagctgaaaaaattcgcggcgcgtatcgcctcgcagattttcatcatgtacgaggagttaagcgacgcatgggaggaagcgcacggcggtaaagagtcacttttcaccgacgaggctcaggcgcatctgtacggttatgttgctggcgcatcccgtgcttttaacgttactccgcttttctggaaaaaataccgcaaagggcagatgacaatccgccaggcatattccggcgtggctcgtctgatggatgatgaatggtggattaaccagcttaaggcgcagcgcatgcgctggcatgaggcgttgttgattgccgcaggtgaggtgaataaagaccgttcaccctatgccagtaaacacgccgttcgtgatgtgcattcgcgccgcctggcaaatcttgaatacctgaaatcctgcgagctggaaaacaaagtcaccggcgagcgtatcgaccttatcagtaaggtcatgggaagtatttctaaccctgaaattcgccgcatggagctgatgaacaccatcgcgggaattgagcgctacgcagcagtcgagggtgatgtcgggatgtttatcacactgaccgcgccgtcgaagtatcatccgacgcgtcaggtcgggaagggtaaagaaaagaccgtacagcttaatcacggctggaatggagaggcttacaccccgaaggatgcgcagcgctacctgtgccgcatctggagcctgatgcgtactgctttcaaagataacgacttacaggtctacggtatgcgcgttgttgaaccgcaccacgacgggacgccgcactggcacatgatgctgttttgcaagcgccagcagcgcaaagaaatcaccgaaattatgcgtcgttatgctcttaaagaggatggcgacgagcgaggtgcagcccgcaaccgctttcaggccaagcacctgaacaaaggcggcgcagcagggtacatcgcgaaatacatcgcaaaaaatatcgacggttacgcgcttgatggtgagctcgataacgataccggaaagccgctcaaagataccgccgccgctgttactgcatgggcgtcaacgtggcgaatccctcagtttaagccgattggcctgccgacgatgggcgcttaccgtgagctgcgcagactgcctcgcggggtcagtattgctgacgagtttgacgagcgtgtcgaagcggcacgcgcggcggctgatggcggtgatttcgacctgtatatcgctgctcagggtggcgctaatgtcccgcgcgacggccagaccgtcagggtcgcccgtagcgtcagcgatgaggtcaacgagtacgaggaagatatagagagggtggtcggtatttatgcgcctcacctcggcgctcgtcacgttcatgttacccggtcgtcagaatggcgcatcgttccaaaggttttggccgttgagcctttgaccttaaaaagcggcatcgccgcgcctcggagtcctgtcaataactgtggaaagctcatcggctgtagcgatccagttatgacacccacaccctctgagcaagccgcagcagtgttagatctgattgagcacggggtcatcggctggaatgaaccagacgtcatgaaggtgcttaaaggcgcgttaaaagctggcgcaccccgcaaaaattgccagcaaagaagcaatgtgccgctaagaaccagcgagcaagcaccatcagccaggatggcaaaacccgaaagggatcgcatggcgaaaattcgttttgatttggctcaggaagggattagcccggaacggtgggagctcgacgcgctggcgcgtggggcaacggtgatttatggcgaaaaaaaatttcattacaaagtgagtgataatgagtggggttactcagtgtatgaagcagaatggctaatgatttaa

SEQ ID NO: 80366 - DNA, 828 bp, Citrobacter koseri
atgccggtgatgagtaaagtcgtgcattaccacgggactccggtatggggtgacgccggtaacgttcaccgcatcgcggtaaatggtgctggcgcatttgtctcgtatgcacgccatgaccagttagcagcgtctattaaatatgctctatctgttgccattgataacggtgctttttcagcatggaaacgcggccttgtcattgactggcaacaattctatcaatggcttattccccattatcaccatccgaaactgagattctttgttattcctgacgtggtcgagggtggggaggctgataacgatgcattaatcgctaatatgccgcgttgtttcagagataaagcagtccctgtttggcaccttcacgaatcattagaacgtctagttgagttgtgccgtgagtggcctcgcgtttgttttggatcttctggcgaatttgcagcaatcaggacagagcactggcaccgcaggatgcaaagtgcttttgaaaccatctacataaaacacaattttaataccagcattcatgggttacgtatgctcgatgggcgcgtgcttgggaattacccgctggcaactgctgatagcacaaatctcgcctgtaatgtgccaaagtttaatagcaaatatcccgagcttaccaaagcaattattgaagctgattactccagaaacctatccaaacgggagttaaaagcggtcgtcctgaaaggccgttgtgcaattctgaaaaactcaatcgagtctgtttttcccccttcgatttcagactggtcatcgaaaggctgtgcaccataccaaatggagctagccatagcatga

SEQ ID NO: 80367 - DNA, 279 bp, Citrobacter koseri
atgagcattcgtatcgagattggcgagcgttatgtcgtcacaagtgaccgttttcagttcattttgcaggagagaaagaccgctgaaaccgggaagaatgccggtaaagagtggctggatgttgtcggctattaccccaaattaaaccagctcgtttccggtctgattcatcacgatattttgagcggtaacgctgtctcttttgaggcgctgagctctcaggttgagcagctcggtcagcagtgcttaaaggctttcgggcaaaaggccgggaattaa

SEQ ID NO: 80368 - DNA, 225 bp, Citrobacter koseri
atgccggattatatggatcacattcaggaacggcagacggaatcactgtcccgccagattaacgccgcccgggtaaagccgtgcggcgctgctgcattggtttgtgaagaatgtgacgcaccaatccctgccgaccgccgtgcggcttatccgtcggcgactcgctgcgtctactgtcaatcagcgcttgaatcaaaggccaaacactaccgggggcaggcatga

SEQ ID NO: 80369 - DNA, 297 bp, Citrobacter koseri
atgtctttgatgcactccgtattaattaataactggctaaagattgcggttatgaaaaacggtgatttatcgcttgccgaccttaagcgcgataaagaaaccggagcgatgacagagtcaaccatcgctatttattcgagtgaattaaacctcctgacggatgtaatcaatttgcttttgaaacgcgccgtttttcataagcaaatcaccaccgttgatgagttatcgaaattaaccatcgagctgactggttattgcaccagtgagtttaaaaaactgaacagagagaggagctaa

SEQ ID NO: 80370 - DNA, 231 bp, Citrobacter koseri
atggatacgcttatgagtagacgttttggaaagtcaacaatggcggagttattgcaacaggcaataaacgaggagagagctaatgcagcaacgcgcttttcatctcaccttgacgccttaattcgtcatatcgctgatgctgggctgtcgcgtgttgaaattgttgagttgctcagtcaggaatcagtcaagtttcataatttcggcctgtctcgcggggagcctttttaa

SEQ ID NO: 80371 - DNA, 333 bp, Citrobacter koseri
atgaacagcttaattgcgttggttaaaggtacaaacgtaaatgactcttttttatgctggcaggagttgataaagcaaaataaagagcatgtgtttaatgtggatgttaattccatcatccgcgcattacacaatcagtattttatcccatcagaaatgggatatttgttttacctcgcctcaaacccaacaagccgcgtacctgctcaaggtgcggtttttctcacggctcgtggcatcgacaaaatcgtaaggcgcatttggcgtgaccagatgcggcagtgcagtgtgcaacggcgctcgggtcttttcgatgatgaaattccattctga

SEQ ID NO: 80372 - DNA, 501 bp, Citrobacter koseri
atgcctgtgatgactcttggtatcgtggagaaacagccagcaggtctgcgcggcctgattggaaagtatattgctgtgccgcgctggcaggatagctgcgatttttataatcagatgatggaacgcgagcgcctgactgtttgctttcacgctcagttaaaacagcgtcacgctacgatgcgttttgaagaaatgaacgatgttgaccgtgagcgactggtttgcgcgattgatgagttgcgcggtgcattttcaaaacgtcgtcaggttggtgccagtgaatacgcgtatatcagctttttaaccgtcagccaacgccgaactttatttatgcatgcggggttaacagaaaaagaatttaatcagccttactggcgtattaatgaggattcatgttactggcgtgatgcattatttcgtgcgctacgtgagttatttagccttttcgaatatgcgccaacaatattaacctcggtaaagcctgagcaatatctgcattaa

SEQ ID NO: 80373 - DNA, 273 bp, Citrobacter koseri
atggacgcaaataactatgtgattcagtacccgattgacgcggtacatcctgataaatttgccgaattgctcggaaagccgcgtactgcggtcgttgaaatgctcaaagctaacaagctaccggtagtcgaatttcgcgatccaactaagccgaatgctcgcgcaggtgacaaactggttttcattcctgagttcaatcgtggtgtgcgtgaggcattctacaaccgaccggtagaacagcgtgacgcgtggctgctgtggatggggctttga

SEQ ID NO: 80374 - DNA, 294 bp, Citrobacter koseri
atggagttaggccaaaaacttaaagcgctgcgtaaagcagaggggctaacacagaaaagtttctgcgaggcttgcggccttgcattaggaaccgtcaaaaactatgaagggggatataaatcacctggaatacaagtgcttatgcaggttacaaacacacctaaatttcaaaaatacaccctttggttaatgactgataagaccgccccgcaagctggtcaaatagcaccggctttcgcgcacattgggcaagaatcaacggaatcagaccactccgagaaacagactggttaa

SEQ ID NO: 80375 - DNA, 981 bp, Citrobacter koseri
atggcaattaagaagctcgatgatggtcgctatgaagtggacattagacctcgcggtcgcgatggaaaacgcatccgcaggaagtttgagagaaaggctgaggcggtagcatttgagcgatacacaatcgccaatgccagccagaaagaatgggcaggccagcgagcagaccgtcgaactttaacggaattgctggacgtctggtggaagtatcacggacaaaaccatgagcacggtacaaaagagtttaaccatctgctcaagactatcagcggcataggtgatatgccggtgagccggatcagcaaaagggctctgatggattatcgttctacgcgcctacgtgatggtatcagcgccgcgacgataaatcgtgatatgtaccgattatcgggcatgttcaccaagttaattcagttagatgaattttccgggcaacacccaattcacggactgccgccgctggcggaggccaacccggaaatgacatttctggaaaaatcagaaatcgaaaaactgttaagtgttttggttggtgatgacttactggtcgcgcttttgtgcctgagcaccggcggaagatggacggaagttgccacactgaaaccagcgcagataacaagcagcagggttacctttttgaaaaccaaaaacggcaaaaagcgaaccgtgccaatttctgaggaactggagaagaaagttaaagaggaggccagcgctaaattgttcaaagtcgactatgagaagttttgcgggattttacgcagagtgaaacctgatatcccacccaatcaggcaacccacatcctgcgccataccttcgcaagccatttcatgatgaacgggggcaatattattgcgctacagcaaattctcgggcatgcgagcattcagcagacgatgacctacgcgcaccttgcgcctgactatctacagaatgccatcacgctgaatcctcttaacggtagagtgacgttataa

SEQ ID NO: 80376 - DNA, 264 bp, Citrobacter koseri
atgaaagaccagaaaaaagactttatgagcgcgatttttgcttttacgagccgctttccagaattgcaacctcgtcagaactccccgtttcttttcgctaaaaaccaggttataacgctgtgtatccatacagataaagggagcaaaatatcgaataaaggaggtaccccctttatcctactcttcctcgttgccgccctcttcataggggccaaacggttttgccggcaatacgatataaataccttcaaaaactgcgcctga

SEQ ID NO: 80377 - DNA, 183 bp, Citrobacter koseri
atggctggtagcggcctacgccagactggaaacggtttaatcggtttggctttgccggatggcgacgctggcgcgtcttatccggcctacagaccgggtaacattttgatttgtaggccggataaggcgaagccgccatccggctatctgtcggttaatattctgaatatcatagataaataa

SEQ ID NO: 80378 - DNA, 498 bp, Citrobacter koseri
atgatagcgttcagacttagtgatgatgagttaaaacttgcagagcataacgctatatcaagtgggtttaccagcatcaatacatttgccaggcataatgtgcttaatgttgatgttcaaccatcaaatatacctgtcagcaatgaatcatcaaaggctgttaaaacctgtttataccctcatgaaatagaacttgttaaacgtaatgctgcccttcacggcatgagcatgagcagagaaattgctattcgtgtgcgtcagtctttgttaaaaaatgaagtctgtctttaccctgatgaagttaaggaacttaaaaaactatcaactgctgtagatcgtgttggtcgcaacattcattttatcataaaaggtgaaagattctgtacggttaacgatcctgatttcagaaaagacgttattgaagtgattgaactgtgtaagcaaattgattcaaaacttgaaacgttaaccaagagtgttgttaaccgatttgggtga

SEQ ID NO: 80379 - DNA, 1230 bp, Citrobacter koseri
atgggtgtgtatgtagaacaggaataccgtattaaacgcgctaaagggacagggcgtgatccgaaatctcctaagttatcaggaagacatatacatgccagtaaatcggcttttaatcataaagtcagacatggcgcagacaagaaagcatatacctggacgccaacaaaagaagtcacttttaaaatcactggttcagggaaaacagccgcaggtatcaaaaacggtattgattacattacccgtaatggtgaacttgaggcttactgttatgatggaaaaggttcagagcaaacagggaaaggagaagactttaacagggagtttacttcaactttatctaaaggaaatgattactccaggacatatcgtggagaaaacatcgatcatgtgaaaaacatggtcttttcaccaccaccagaagctggagtaagcagggaagacgctctgaaagctacggtagaatttcttaaagagacttatccaaaccatgctttcgttgccgtataccatgatgataaagaagatcatcctcatgtacatgttaatattaaacttcgtgatgaagaaacaggaagaagattaagacttactaaatctgaaaccaggaagttcagaaacggttttcatagaaaactgaaaggtatgggatatgatgttaccgctacctggaaaaaagatcccgaacgtaaacgggagattgagcgattacaggctgaaaatccgaaaagactccggaatgtttacaaggtggtggattttggggagacttcatatcagaataaggcaggggaaaaacgaacacctttcctcacttatgaaactttaaaaggtggaaaacaggttacgatttggggtaaagacctgaaaaatcatttcgagtctgaaaagctccagccaggaacgcttatcaaagtaaaaaaactggctcctacgcttgtacgtagtccaatgtttaatgatgatggaactgttgcaggctacagggaaacgcatcgcaataactggcagattgaaaatattgcccttgagcggaacagagaacgtcaggttcatgagcgtgaaaccaggcagccggaagagagcgacgttaaaaagcagctatccagaaaacatgagcaaggtcacaatatcgggtttgctcttgaacacgggtttacaaaggattcagaagaacataaaaaactaagaatacagcaagagaggaactggaaaggcctgggattttaa

SEQ ID NO: 80380 - DNA, 267 bp, Citrobacter koseri
atgactaagcatgatgctatacgcatttcgcaacttcatcaaatctttccagaggttcagttaactgaacgacagaaagatattgcagtgatgtatgtaattggttgcacagttgaggaaattgcgtcagaaaaagggatcacgaccgatggtgttatgtatcatttgaatctggtaaaaagagccgtaggtagtgcaactctggtaggagtgcgcacaactgcgtttcttaggatgatggcaatcttattaacaagggagtcataa

SEQ ID NO: 80381 - DNA, 234 bp, Citrobacter koseri; identical to SEQ ID NO: 19714

SEQ ID NO: 80382 - DNA, 177 bp, Citrobacter koseri; identical to SEQ ID NO: 12970

SEQ ID NO: 80383 - DNA, 621 bp, Citrobacter koseri
atggcgtctttattcccagccttgttgctgtgtgcggcgtcagttcatccggatacgataaatgatattgcacgggtcgagagtggcttcaatccttatgctgtggctgaaattattcctgaaagggaacgcggtagctatggcaaaagtgttatcagtcatatgcccaaaagtaaggaggaagctctaacagttatcagagaaattgaaaacagaaaaagacgttattctgtcggattgatgcagattaccagcagtaatttttctttttattccacgtccgcagaaaaactccttgatccgtgtgaaaacttgtctgttttcgaaaagattatcgtggattgttataaacgagggaggagcctggagaatgcgcttagttgttactatacaggaaattttagtaacggtaagcgaaaagaaaaagaatttaataatacaagttatgttgagcgaattggttatacagggaacgaaaaaaaatatgttgtaccaggtacaagaagcaacgggggagaacagcgaaaaaatcgttcacacaatgcgtcagttatctggcccgaaaccattctgaaatctgcttttgttgataactcacatccaacaaaagttattaattaa

SEQ ID NO: 80384 - DNA, 327 bp, Citrobacter koseri
atgtcatttaagaaatcagtatgtaatcgtatcagttcatctgtcactgctgttatgcagcgtaaaaataaggtagttatggcagtcgccggggcaacagtcgcatcaccagcctttgcggatggattttcaaaagcggaaacactgctggaaaaggtcaaaacagggcttagtggcctttcactggtcacggtgactattgcctgtctgtgggtcggctacaaggttctgtttggtggaagcacgattcgtgaatgctcacctatcatcatcggggcaattgttatcgccagtgcggctgaagttgcatcaatgatggttaactaa

SEQ ID NO: 80385 - DNA, 2748 bp, Citrobacter koseri
atgtctacactttataaagcgatgacacgccctgctatgtatgtgggtgttcctgtcgtccctcttactgtggttgcaggggcgttatttctggcgggggtttatatcagcaagctgatctggctggctattcctgtcgcagtttttattctcagaatgataactaagcaggacgaccacatttttaatctttactttcttaagctgaaaatgctcggaaactcagtgtgtaatcgtttttttggcgcacgagcgttcctctccggacaatatgaagctgttgaaattgatgagtttattaatgccatgaaactgaatgagcgaattactactggtaaatatataccctattcaagccatgttgataaaaatattgtcaaaacaaagaacggtgattatgtagcgacatggcaactgatggggattaactttgagtcaatctctgcggagatgttagaaactattgactcacaggttgccactcttgttcgttcattttccggactgcccgtttcattttataaccattcatgcagggcgagtttttatgatgcctttaccacaaaatcaggtaataaatatgctgatataatatcagattgttattatggttcgatgaagaaaaataaattcaaggggaacacactttactttacgctgatctacagaccagacgggcgtgtagaaaaactggaaaaacgcaaaaaaagtattaaagaaaagaaagatgatattaacattcatgtgaagagaatgaatgaaatgattaatacattctctggcgctcttgataaatttacctgtaaacttcttggtatgtatgaggagaacggaaaggtattttcttctcaactgtcattctataattatcttctgacagggaagttgcaaaaaatcagagtcactgattctccggtgtataacgttcttggtggagtggatgtattttttaatcatgataccggacagatatgccgcattgatggaaataaattctttcgttctattgaaattaaagatttctgtagtgagactgcatccggtgtttttgatgtgctccagtattctgatgctgactatattattacgcattcatatacatccatgagcaaatcagaagcattgagtaccattaaacgtgcagaaaaacagttaaagagtacagaagatgatgcggttactcaattgcaggaactggaaaaggcaaaaaatgatattgtgtccggtgatatatcctttggttactaccatttcacgctaatggtaatggcggacagtatcagggagcttgacgaatctgtaagtaaaattacggcagactttactgacctgggcattattccggcattgtcaaccatgtcattgccagcggcatattttgcccagcttccggcggtttttcatttaaggccgcgtttatctccggtatcgaatgtaaattttgtcgaactggcatcattccataatttctaccaggggaaacgcgataaaaactgctggacagaagcggttgctattctcaaaacaccaagcaaacaggcgtattatctgaatttacataactcagtactgtttaaagatgaaagaggtgaaaagaatcttgctaatactaaagttataggaacggcgggttcaggtaagacaatgtttctgtcatatcttgcctgttcattacagaaatacaataaccccgaaacttttgctgactctgcaaaaaataagaagttaacgtgtgtctttcttgataaggacagaggggctgaattatgtatccgaatgcttggtggggaatattacaccgtaaaaagcggtgagccgacaggatggaatccttttgctctggaggcaacaaaacgtaaccgtatttttgtcaagcaactgatggagattctgtgtaccagaaatggtgaaagattatcgacaagagaaagattgcttattagcgaaagtgttgatgctgtgatggattttcctcctggcgaaatgcgggaatatggcattaccagaatgcttgagcatcttatgcagagagatgatcgggatgagcaggagaacgggattatccttcgtttgtcccaatgggctaatggtcaggctcatggctgggtttttgataatgctaaagacacattcaatattcagcatgtcaataattttggcattgatggcaccgagtttcttgatgatccgatggtatgtgcaccaattactttctatctgctgtatcgcattacgcagcttctggacggtcggcgtcttgttatcttcctggatgagttctggaaatggctacaggatgaagcattcagcgattttgtctataacaagctgaaaacaattcgtaagctgaacgggctggttattccggcaactcagtctccggatgaaatactgaagaataagatttcacgggctgtggttgaagtatgcagcaccagtatttatctggctaaccctgatgccgattacaatgactatgtagaagggcttaagctgacaccagaagaatttaatattgttaaaaatcttgatccaatgtcgagacaattcctgattaaaaaaagcagtcttaaaaagggagatggtaaatcattttcagcacttgcgacactcgatttatcgggacttggtggatatctgaaaatattgtctgccagtgcagataatctggaaatttttgaaagtatttatcatgaaggaatggagcctgatgactgggttcctgaatatctcgaacgggcaatctga

SEQ ID NO: 80386 - DNA, 717 bp, Citrobacter koseri
atgaaacgtgtaaaaacatttatgctgatatcattattgacggcttcattttatagcagcgcaggtattccggttgctgtagatgccagtccggaatgggctgttgaagccgcaagatggacagaacgactcaaacaatggtctgaaactgcgcaacattatcagagtcagattcaggcatataaagaccagttagcaacggcaacaggtataaggaatattgcggcattcacaaatgaactaagtaatctgcaatcagaactgacaaatatttataagcaggggaacagttatatttctgattttaccagtaatcccgaaggtgcattaagcagtcaggcaaaaaatctgttcagcaagtatggagccttcgatatgtgcactacaggctatgaacgcaatgataatctctgtaaagcacggattgtgtcaaaggctgccagtattgaacagggaaatgagataaataagcagttatcaagtgcaatgtctcagattcagagtttaagtactcgaattgaggcttcaaaggatatgaaagaatcccaggatttggctaacgcattacaggcacagtcgttaaaaatgcaggcgataaaaatgcagtatgatgtctggaatagtaaaaatcaggctgacacggagatgttgaaagaacaacaaagggctgaatataagcaacaacagatgaacgcaccaatacctacgattcaatga

SEQ ID NO: 80387 - DNA, 1080 bp, Citrobacter koseri; identical to SEQ ID NO: 19713

SEQ ID NO: 80388 - DNA, 180 bp, Citrobacter koseri; identical to SEQ ID NO: 12964

SEQ ID NO: 80389 - DNA, 204 bp, Citrobacter koseri
atgcttcattattttgtcatgatactttattttgtcctaatccttcttttaggagtgtttacctgcttcgcaggaataagacttggtttagggcttgcggggaaatggagaaagggtatggatcttcgctttttgcttcttattggtgggattctttttcttcatcttggcctttatctcttaaaggtgttcgtgaacgcttaa

SEQ ID NO: 80390 - DNA, 129 bp, Citrobacter koseri
atgcgatgtgtgattcttttgtttttcctgtttcagatttccggatgtaccacaaggaatacccttccttctgatgtttccggcgaactggaacccattaaccacagccaggtaatcagttatgagtga

SEQ ID NO: 80391 - DNA, 687 bp, Citrobacter koseri
atgagtgaaaaaatcgaaaagaagattgagacagctaaatccttcgaaagacaactctatgcagaaaatgaacggtctaagaaaaatgcatggcgtgttgcagtggcagcatcattactgtccttatgtcttggggctgcaatttgcgttcttgtgccattaaaagaaaaagagcttgctattgtggctgttggcgaaaaaacaggccgtacagaactgattactcaggttaaacaggaaaagatcctgcaatctgaagcgcttgggcggtattttgtaaacacgtatattactttacgtgaaggttataattatccgtctcttcagtatgattatgagactgtacagatatatagctcgaatacagtaaaggacgattatcttcgtctgtataacagcgatatggctcctgataaaatttatcataataacggttcttacgttgcggttgaggtcatctccaatattatttctgacgcaaccgcgccagataaactggcctctgtgcgttttaaaaaaacgacgagaaacttcacgaccggacaggtttcagtttcatactggacggctcgtgtgacatatcgttttgaaccagaaaagtcggttaaaagttccagtcgtgagcttaatcctctcggttttacggtaaccagttaccagacagatcgggaagtcaggggggaatga

SEQ ID NO: 80392 - DNA, 807 bp, Citrobacter koseri
gtgagttataacggtgcgaatacgaccgttatccggtcaaagacaggatttctcacatcagttgtttttgatgaaggtgaggctgttatcagtgcaaaggctggttttcctgccggatgggaaatcacaaccgatgataatgttgtttacatcaatccgcgtcccgttgttcaggaacaggaaggcgatgaaggcgaaaaactgaaaaaggttttccagccaacagaaaaggaatgggacacgaatctttttgtcagaacaacaaagcggatttacagtcttgatctaatccttctgtcagaagaaaaacaagcgcaacctgcttatgttgtacaattccgctatccatcagaaatagcgaaaaagaatgcagaagaagtaaggctggcaaaagaaaaacaggaaaaactcagacagaagaaactgatttctgaaagttttgaaaaagccgatgcgcctaaaaactgggattatttcatgcgagtcaatgaaaaatatgacagtcgtcgtatcgcccctgattttgcttatgataatggcatatttacctttttaggttttaactcagggaaagtattcccagctccatttgctgtaagagatggtcaggaacagacacttgcttttaatgtggaaacaaaaggcaagtataaaatcatggttatccacaacgttaatgacaaatttgttttacgctatggaaacagcgttgttggtgttgtgaataaatctttcggaaaagtattaaccgaccagaggaatacatcttctcctgcggtagaacgtgttgaggtgaataatgactga

SEQ ID NO: 80393 - DNA, 1119 bp, Citrobacter koseri
atgactgatatgaaaaaaacagatgatttagttgatgatgcgaatcagtcaaagctggaaagtaaacccgttcatgatatcggtgatatcaggaacaaaaataatcgtatgcgttctggctttctgtttggtctgatggctgtattagttattggtatttttgcgctgaaaacatataaaaattattttgcagatgaccagcagaaagcatcagaattaacaggcgataccagcatttctcaggtcagtaaaatccgtactggtcttggtcagaattttgaccctgttgagaacaaagcaattatcaatccaggcgctactggttctggtaatactgtttctgacggtcataaagaagtgccacaggaggggttcaggaaatatttgtcaatacctgttgctggtcagggagggagtcagactggcgcgagtggcagcagcaggacatcgcagacatcagagccacaggaagaaaggaaagaatcaaaagaaaatgtgcctggtaaatcaggaatgaaagtgactgcgattaatctcgatcctgatctctatattgaggaaaacaggcttataccgtgtgctttaactacacgctttgtttctgatgttgcaggtcgtatcagttgtgtttttacagaagatgtatggagtgctaatcaccacacaaaattactggaacagggaactaaggcttttggtcgttaccagaccggaacgctgaatcatggacagggcagaatgttcgttatgtgggagcagttgcggacgcctgataataaacgaatcgatatggtaaatacagcagcggctggtcccctgggggaagcaggcattgatggatggatcgattctcacttctgggagcgttttggtggttctcttatgctcagtatggttcaggatgtagcggcggcggcggcggataatgcacctggtaaagatcgtaatgtggattataccgaaaactcacgacaggcaatggctgaaatggctaaagtcgcacttgagaattcgataaatattcctccaacaatgtataaaaaccaaggtgacataatcactattatggtcggggaagacattgatttttctgatatctatgagttaaaggtaaaatag

SEQ ID NO: 80394 - DNA, 1029 bp, Citrobacter koseri
atgagtggcgttattcctgtcagcattagcaataaatcgctcgatttttataaaaatcaagtattccagtcttttcttgatattgaagggctaacagaaattgctgtcaaccgtcctggtgaaatctggacggaaattaatggtgactggacattccataataatgacggtgtgacctttgatttttgtaaacggttttctcagacgctggcatcatttcggggagatgaaatcggcgataccaagccattactttcagcaacactggaatcaggagaacgtgtacaggtcgtttttcctcctgcatgtgagagaaatactatttcaatcaccatacgtaaaccatcgacacggcagataacgcataaagaatatgtggcgaacggtttttatgattatgtccagtcaggaaaaaaacacaggacatacgatgatgagcttcttgatttattcagagcgagaaatatcgctgcttttatggagcttgccgtagcagcagggaaaaccattgtatttgccggagcaacgggttccggtaaaacaacttatatgaagagtcttatcgatttcataccattgaatacacggctgattacgattgaagatgcagaggaaatcaaattttttatccataaaaattatgtgcatcttttttacccttcggaatccggcagtgattccggctctatcataacagcagcgaaattaatcaaatcctgtttgaggatgaaacctgacagaattttactggcggaaattaaaggtggcgatgcctgggattttgtgaaagttgctggttctggtcacagtggaagcatgacgtccattcacgcggcctcggcaaaagatgccatcattcagatggtgacaaaatgttatcagaatagagaatgtcagaatcttccttttgatgttcttcgtaaaatcattatggacagtattgatattgttgttcatgtaggcagggatggtgttgtcaggcatatgagcgacatctattacaaaggggctgaatgtgaaaacttttaa

SEQ ID NO: 80395 - DNA, 1818 bp, Citrobacter koseri
atgcttgttgcggcatggtttgcaggttcatttattttctttgtgctttacttcagccagataaagaatctgaaaccattgaaggctgtgttcagatccattgatgcgtacaggatggatatttttacagacagcattactttatctgttgtgactacggatatcagaattttagcctttgttgcacttggagcaggatttgtcgtgtctcttatcatccctgttgcggcgttgataaaactgaacgagaagaaagaaaatattttcggtgatgcgcgatttgcaacaattaatgatattcgtgagtctaacagtttcacgcttgacggtgacgaaaaagacgggattatcgttggtataaaagacaagaaaataatacgctatgtgggagcagcattcagtgctatgggagccggaacaagggctggtaaaggtgctggtatagtcatcactaatcttatgaagtactggtggagtgttattattctcgatccaaaaagggagtgttttaatatcaccagtcttatcaggaaggtgattttaggtcatgaggtttataaatttgatccctttagtccggtaacgcaccgctttaaccctttgtattatgtcagcatgggaacgagtgaaggttttaaccagcttgaaaatctttcgttgattatttacccctataagacagatggtgcggatgctggtagctatcttaataagacggcgggtggtgtttttaaatcttatgctgtcgctttatggtttatgattaagaatgataaggctggactaaaaacgcttgatattgagcctgtcttctcaatgtctaaaattaatcagctttttgagcgtgcagaacccgaacatcttctttcattcatgaatgatattcgttcagaattaagggggaaagacaaaacgcttgctgatattggtgtagctggccttaaggcattcattgagatggaggataaaacaaaagcacaactcaaaagcaactttcttaatggattatcaccgtttgctaaccccaatgtggcaaatgctactgatggaaatgattttgatttgcggcaggtgcggaaaaagcggatgacaatttatttctgtatttctggtgataatgccaggttggctgaaaaaataacaaatattttctttcagcttgctatacaggtgaatcttgaaaagatgccaacggatgatccggaaataaagcatgactgcctttttctactggatgaattcccgtcaattggtgctgtagattacatcaagagtaaatctggtctcattgctggttacaagctgaaattgttgattgtttaccaggtcggctctcagcttgaggaaatctacagttatgcaggcagtaaaacattactggcaagtgcaccctgcaaaattgtttattccgcttctgatgttaaagatgcgcgggagttatcagaagcgatggggacacgaacagtaactatcggttcgaaaagcaaaagtcgtagtcgtggaggaacatcgagatctgaatcagaaagccttattgagcgtccactggtaacaacaaatgaactacttacactgaaatttagtgaagaaatcctggcaatgaagggagaaaacccgattcgttgtgaaaaggcattctactatctcaatgagtatttctttggtgactttgtgaaggttgctccggaacttgcaaacattttccccaggaagaaaggaaagctggttatgcctccacagaaagtatttgaaaatgaaatcgtcgcaaaagggtatctggcagtaaaagatgttcctgatctcgataaagcggcataa

SEQ ID NO: 80396 - DNA, 420 bp, Citrobacter koseri
atgaagaagttagtgtttttattgatttccattcttgctggttgttcatcaccgccagagccaacacccgtgcagtttgaaaaggcaaatgaagtgatcaatccctcattgccatatgtccccgattttcacggtgtcataaagtcagacgttagcggtaaaggatgggtttatgagatcacttccttatccggagtacaggccagaacgccgacgttttattacgctctggctcatgcggacaggattgtagtgacaacacatgatgctgggctgtggtttcgaatcagagatctgttgaagatggaaggggcaacagcagtcgtggaatggcgaaacgagaaaagttttttacctgaacagggaaaaatagttttcattaaagcacaaaacgaggtgaaaaatgactggaaaaaatag

SEQ ID NO: 80397 - DNA, 306 bp, Citrobacter koseri
atgactggaaaaaatagagtggttttaccagccttgctggcgttaggattaatatcaacaaatgctaatgcatctgacccttgcgcttcggtactttgcttatatggaaaagcagtcgggcaaggtggagggagtgaatgcagaagtgctgaaaaggatttttttaatattctgaaaaagaaaaaaggaagcattcgctggagtaaaacttttgatgcccgtaaagcatttctgaatcagtgttcaacggctgatcctgctgctatatcaaaaatcatgagtaagttcggcaaggttaaagggtag

SEQ ID NO: 80398 - DNA, 255 bp, Citrobacter koseri
atggaaaagcaaactactgatttactgaatgtaatcaagacaggacactctggctcaatagctggtaatcctgctcatgcactggatgataagactatgaacgccatcattcataactacgtggcaacgattgtgctcggtaaagcaggtaactgcaaagaaactcctctcacaaagtattgttcgaggactatgccagagcgtatttcagttgaagaaattaatgagtttaaaatttatccagagttattctga

SEQ ID NO: 80399 - DNA, 309 bp, Citrobacter koseri; identical to SEQ ID NO: 12954

SEQ ID NO: 80400 - DNA, 495 bp, Citrobacter koseri
atgagacattttcttaaggctctttcctttgttgtttccctgttaccagctacattgtgtgcggctgaaatccaggggaaagttattcgcgttctcgatggcgacaccatagaaattaaaacactacccgcaaaaattgttgtgtatgaagttccgatccgagtccgattgataaacatcgatgcccctgaaaagaaacaaccttttggacgctggtcaactagtcagcttaaaactctggttgcaggtaaacaggtgacagtctcttattcacataaagaccgctacggacgcattatcggtcatgtgttcacgacgaacggcacggatgccagccgctttatggttcagtctggcgctgcatgggtatatgaacgttacaacgtggatgagtcattaccggctctgcaacgggaagcgcaggaacaaaaacgcggtttgtgggccgatgcaaatccggttccaccgtgggaatggcgatacaaacataactaa

SEQ ID NO: 80401 - DNA, 405 bp, Citrobacter koseri
atggctttatcacccaaagaaaagaaagagttacaacaacgcttcgaaaagcaattactacctgaccttgatatgtcatttgaactaaatggcgaagtatataaatttaattttgataaaaatgagtcaggtgactatatcgatagttttacacaagcagtatggggaggttatcaggatgccgaggaatgggaaaaatatggtaaacatcaggagacagaattacctgaatgccctgaaccagtcgagggttggtgcgactgtgataaatgtaagtcgatgatttttcataaagagaaaaatatttatgtttgcctctcctgccataaacaaacagagccatttcttccaattgactggaactcaaacgattacgattggctaccttatgaagatgaatactaa

SEQ ID NO: 80402 - DNA, 465 bp, Citrobacter koseri
atgagcgaactgactaaagaagatgaatacggcattatcagccggactatgatgaatattcgttcattgcgtgtttttgcccgtgagattgattttgagcagttgctcgaaatgcaggaaaagctcaacgttgttattgaagaacgtcgtgaagatgctgaacgtgaagcggctgaacgccaggaacttgaagccaaacgtcagcaggccattgaatacatcatatctttaggtcttgatcccgaatcactccttgctcctgtaacagctgatacagtgaaaaccaggcggaaagccaaaggcggagtaagaaaggctaaataccgctttaaggatgaaaatggcgagatcagagaatggtctggtaatggcaagcgtccgcttgctttacagaagctgcttgatgagggccatttcatggaagatttcctcattgacaaactgcaacctgggcaggttgaataa

SEQ ID NO: 80403 - DNA, 654 bp, Citrobacter koseri
atgatcaaatcaaaaaaagtagtggttatttttgttgctttgagttcattcttgctggcagggtgtgattcaccaaaagatgctaataagcaaaactttgaaaaagctattaatactcgactagagaaggaatgcattaccattagtccgctgggaatatttgatagtaagccttatccggttcaggtagctgtggctcaggctaatcgatatacatctcaggaacgggcagatgaaataaattctcgacagttttctgcgctggatgtactggttaaagccgatttattaacagtaaaagataccctggttgatgacgttattggttttactaagacgggtaaaaaagtgcctggtcgtgaatatgctctgacggatgaggggaaaaaatatctgaagtctccggaacgacctgatttttgcgtcggtcattataaggtggatgagatagttgattttaccgaacctggtgatgctatgggaatgaagatcacgcaggtgaattacacattcagtcccaccagtatcgctgaatgggcgaaacgcgatgatgttcgggctgcatttttaggacttgagtctgatttgaaagagaaacaaacaaaacgtattacactggttttgaaaaatgatggatggtctgctgaacggtag

SEQ ID NO: 80404 - DNA, 276 bp, Citrobacter koseri
atgctcttctgctgctgcattttaatgatgtcagacctgaagaaagagaagattgtcattgaagtgaagaaaactcgccgctctctaggggcaaataaaattggagaggaactgctcattgatatggcccgttaccgtgcacatccggactgtgagacgctagtatgctttgtatatgaccctgaaggttgggtgactaaccctaaaggtgtgatagacgatcttgaggggaaagataccgaaggaaagactagagtcgtgatagctcagttctga

SEQ ID NO: 80405 - DNA, 525 bp, Citrobacter koseri
atgacgaagaagaccttagctgaaagatttgaagtgcttgaacaagagtacaattctgtcatgtcgacaaaatatatgggaacaagtgcatttagtcacagaagccaggaatatattgattcggctaaaggtaataactggattgcaagagcaaaaaagttacttgaagacagttatggaaaggaatctgattactacaaagattttaatgatacacaaaggattgcttggtctagtaattatcagggattggttagacattacaaacctatttttgatgcagccagagacgatttaacttactccggcacggcatcgactatagcaacaaaacatgccgaactggatttgattataaatatactcaataaatttccagctttttgtcgtcaattaaagcaacgatacaatgacagaacgccgcttgaaattaatgacgagtatgatgtacaggatcttgttcatgctcttctgctgctgcattttaatgatgtcagacctgaagaaagagaagattgtcattga

SEQ ID NO: 80406 - DNA, 195 bp, Citrobacter koseri; identical to SEQ ID NO: 12839

SEQ ID NO: 80407 - DNA, 480 bp, Citrobacter koseri; identical to SEQ ID NO: 12838

SEQ ID NO: 80408 - DNA, 825 bp, Citrobacter koseri
ttgagtcacttacccgccaaaattttccagatttcacgtagcgacgcctggaatttaaccatctctcccgatgcagcccgtaatatgcgggatctggcggcacagattggcgcaggaatgccaaaatatctgatagcaccggaagtctcactgcttctctcctacatcgatgatctgaacatccgtatgtactttgagacgctctggaataccggagcacgactgaacgaagctctggcgctgaaacctgccgattttatactgactccgacacggcagtacccgcaacccgtggtgatcctgaaaacactcaagcaacgtctaaaagaagcagaaagaagaccaggacgcccgaccaccaggcatccaccattacatcctgatccgcgatacagaaaaccaccggagcctgctgtaaggctggttcctgttctggatgccggatacgcattgcgtatgcgggaatacctggcgacctggaaaaagcggatcaaacatcagcctgtgtgggacataacatcgagacagacaccgctgaactggataaacaccgcagtggcacgggcagagcgtgacggcgtaacattttcggttccggtcacgcctcacacgtttcgccacagttacgccatgcacctgacaatgagtggcgttcctccgcgcgttctgcaatccctgctgggacaccgttatgcaagaagcaccgagatttacacccgcgttttttcgctggacgtcctgacaggaagtggcctgtcctttacctgcgatccacggcgagcaaaacagcttctcggataccctgaacgcattaatgatgagtaa

SEQ ID NO: 80409 - DNA, 660 bp, Citrobacter koseri
atgggaaaaatcattacagttgcagggcataaaggcggcataggcaaaagcaccgtgctttgttccttatgtgtctgtgccatcaggaaagggaaaacagcctgtttcctggaaacagactcgcagggaagcatcaaggacttcattgaggaacgtaaaaccaacgagcggctgtctgaaataccgtatttcgagtgctacacagatattccggcgatggcacgaaaactggctgcccgctttgattatgtgtttgttgatacgccaggaatgaaatctccggccttcgttaaggcactgagttgtgctgacattctgttcacattcattgagccaggagcaggcatcgagatcaacacgctgggacggctggttttcgacattaaaacagcacaggccggagtcaatccgtcaatgaaagcatggattgtcctgaataagtgttcaactaatccgtcagacagtgaagcgtcagaactgcgccgacaactcaatgatgatcctgactggcttccggttccccgccagcgtatctatatgcgtactgcgcataaaaaagcctataacagtggtatgggcgtacacgaatacgatgataaacggggaaacaaagcccgtggagagattgaattactgttaaaagaaacggatgttctgtaa

SEQ ID NO: 80410 - DNA, 303 bp, Citrobacter koseri
atggcaaagctcccaaagaaaattgatcaggaaattaaaccgctggatttacgccagtttgtaagttctgctgcacaaaaaccagcatcggcatccgcagtaacgcgtataaatctgactatgacagatgatgatctggatacagcgcaggagttccagaacaagtacggtgcaagccgtgctgaagtaatcagagcagcactggcagcgttacgtctggtatcagcagaagaacgtcggaggctgtttgatgatataaggaaaaacagcccgaaagcaggaagaccaaccgtgaataaatag

SEQ ID NO: 80411 - DNA, 252 bp, Citrobacter koseri
atgctcataaagataattaaatctgtattcaatttttacatgctctgtgtgcagcctgttattggactggttcttgcgggttatggtgcatggaaattttcaggtgacagtatctcagcattactggaaccagcatcgtactttgtcattggaactgttgttttgtttgtatggtatatagcatggcaaaaagaacgttctaaagaagaagagtttaaatcaagtataaaaccagaagattttgtgaagtga

SEQ ID NO: 80412 - DNA, 216 bp, Citrobacter koseri
atggaacactgcatctttgatttaggcattataaactatcatcctgtcattacatggacagtaccagttgcatttttctttttagtattgctggctggtatagtattcaatattggcaggaaaagtaatctaatcgttttcatcctggcaatgttgctcccagtaacaacggttttcatttttatgttactgggcggtaagatcgatatgtgctga

SEQ ID NO: 80413 - DNA, 528 bp, Citrobacter koseri
atgatatttaaccgtaataaaaaacgagatgaacaacagaattcttctgttgttttgccatcaactgaaaatgtattctctgattttattaagaacaatccagctttgacaaccaatgcttttacagccattggggaggttgattgttttactaaagtacccttactctcaaataaggaatcagagtttttaggcattctttcacgtaatattatacctgattattccgtttttcccaaaatacgactcattgaatttgttcgtcctcatggtagcgaggaagctgtaaaagaattaatccgtgaagtgcagaatataacctgtgattttgtcctgaaatcatatgatgaaacagtccttgctgttatccagtttggtgaaactgcaaccgtcagacagcaaaagaaaaaactgattatccagcgtgtgtgtgctatgacagaaatttcttttttcgaatttaaaaatactgtcgatatgatggggagcgaagacttttgtcagttcctgcgggatgatgaagagtaa

SEQ ID NO: 80414 - DNA, 405 bp, Citrobacter koseri
atgaaagataacatcgtggattttcaacgtatcaggagagacctgggcgctcattcaacagatgttgcaaatgatgccgtttattctgacaaaaagaaaacatccaggttcttttatctgctgacacctgtcagataccttctggctgctttcctttatctggttgttgttattccattggggattcttgcgggatttcgtttcttgttgcagtttttaggcggtatcgcagtgatgggtttaactatcgcctggtatatgggcgcagatgtcagtggttacgttgttcttgctgcatggatcgccttaactgtttgtggttgcgcagagcagatttttgaatggtggatcgaaagccgttttgcgttccgtctttttggtatcgggagaacgccggaagaatga

SEQ ID NO: 80415 - DNA, 1008 bp, Citrobacter koseri; identical to SEQ ID NO: 19719

SEQ ID NO: 80416 - DNA, 351 bp, Citrobacter koseri
atggcatatgacgaaaatgtgaagtcgcagaaaaatcattatccggcagccgttgagcacaacgccgccatgattgaagaactacgtgcagatcctgattatgcaaatgcttatcttgctaatgccctggaagaaataaacgagcctggtggtttaggtggttttcttgttgcgctacgtcaggtaatcgaggcgcgaggggggatttccgaagctgccaggaaatctggccttgcccgtcagagtatttaccgcgcattatcccccaacggtaacccgaccatcacaacgcttgcacaacttacatcggtagccggattacagttcactctcagtaaatccagccactaa

SEQ ID NO: 80417 - DNA, 138 bp, Citrobacter koseri
atgcgtgtgttaatgctaatgtatgcatacattagcattaacatagagcagattctggcgcgttgcgcccgtagctcgctgacgctcacacgcgcagtacagcgccccgccatgctgcaatgcaccagggcggggtaa

SEQ ID NO: 80418 - DNA, 516 bp, Citrobacter koseri
atgaatatccaggaagcattaaacgtttttggattatccggcgaattaactgaaaaagatatcaaagcagcatacagaaaagccgctttaaaatatcatccagatcgtaacccgttaggggctgaactgatgaaagcggtaaatgcagcttttgatgtattgatggcaaatattgataaaataaatcagttccagagcactgatgaacatgcacgatataattacggtgatgacctggaaaaagtattaaatgttctttctggtttatctggtctggtatttgaagtgataggtaactgggtctggattagtggagaaacccttacacataaggaaactttgaaagaaatcgggtgtaaatgggcggcaaagaaaaaacaatggttttatcgtccagacgaacataaaagttactggaatcgtgaagaacacacgatagaagaaatccgcgcaaaatacggtacaaccggacagcgcagggcgacagggtggcaacgcgtggaaaccagagcgtaa

SEQ ID NO: 80419 - DNA, 543 bp, Citrobacter koseri; identical to SEQ ID NO: 12410

SEQ ID NO: 80420 - DNA, 252 bp, Citrobacter koseri; identical to SEQ ID NO: 12411

SEQ ID NO: 80421 - DNA, 228 bp, Citrobacter koseri
atgaaacccgataatacacctgaaaatgtaaaaaaattacgtttaaaagcaggattaacacagaaagaatgcagtcatatttatggtgttgggctaagaacctggcagaaaaaagaggaggttaatactcaaaacagtcaaagtctgtcactggttgagtttgagtttcttttgttacttgcaggagaacatcctgaatacgtgctctgcaaaagggagtcaaaataa

SEQ ID NO: 80422 - DNA, 300 bp, Citrobacter koseri
atgaaatgctcatctgtttttacttcaaccactaatcatgttttcacattcgaacgagtaacgctttgcactattatccttatgcataaggatacgggacaacagtatgttgtcatatttactgataacaataaaattcgtgactataaaaccggaattgttcctcagtttggcgaaattaagcagagtgatgttgatttagtccttttctacagggacgaatatgaaaaatattttgattcgttaaaagatggtgatgaatgcttgagttttaaagattttattgagtgccttcgttaa

SEQ ID NO: 80423 - DNA, 351 bp, Citrobacter koseri; identical to SEQ ID NO: 19718

SEQ ID NO: 80424 - DNA, 249 bp, Citrobacter koseri; identical to SEQ ID NO: 19717

SEQ ID NO: 80425 - DNA, 348 bp, Citrobacter koseri; identical to SEQ ID NO: 19716

SEQ ID NO: 80426 - DNA, 759 bp, Citrobacter koseri
atgaaaaagatattaattgcaggtgtgtttgcaataagcacatttacaacgctgaatagccttgcttggcatggcgtcgctactgaagctactcagtggttaaataatatacaacttgttgagcaagttaacgaacaaattaatactataaagcgaatcagtgattctatagataagcaaatacaagatatggcaagtatgcctgcacatctgattaattctggttccaataaattaaaaattctaaaaacatttcaagatcttaaagatatttatcaaaaaggacagaatattgccaattctgcaagagatcttgaaagaacgtatcgtgaaatgggaaatattgatattgctgatgcgctgaaaaacgggaattatcctcagttattcaacaaatggagcacccagaatcatgacactgttaaaggggttttagaacaaaataatttgtcaatggattggtttaacgacagacaaggcgaagttgcggattataaccgtatgctcaatacctctacaggaactgtttctgctttacaggcagcagggaagatagccaatgctcaactggatagtctcagccagttgggacaattgcagatggcgcaaaataacctgttagcctctcaggcggccattcagcaaagcgagaaagatgtggaaagggctgatactttaaaacgttctaattgggattttaaagtgcctgaaaaacaatcttctgcaactgatattcttaaaaatgccagacaaaattaa

SEQ ID NO: 80427 - DNA, 2502 bp, Citrobacter koseri
atgaagttatataaaaaacaatacaatacatcactttcttttgctgacttactgaattttggcgtgatgattactcccaacttaatgttgggtaaagatggttcactgactgccggattagtttatacctgttgggattatgaaaattctgataattctgaattaaatgacttggttaatgcacttaatgcagcctatctccggttgggtacaggtatcacattgcattttacggtaataaggagtgaaacctcagaatatccgcagccggaaaaaagtcattttacgtcattactgaataaattaattgatgaagaacgccggatcaaatgggaaagcgcaggggcgcatttttcgagtgtgctttcattttcaattacttatttacctgaaagcatgtcaaaaagtcggttaagtgatttctttgttaccgacgaatccggcactaaaaaatcaaaatcattaacagataaacacattgaatactttgaaagcgttatttcagaactcagcggacaattaagcggaacgtttactctgcaccggcttggggtacgccatgataacgctacaggtgttgtttataatgatttagtccaatatttcaatcattgtatcagtggtgataattatccggtcattcatccggataatcagtttcttgatgctgttttgtctacggatgatttttatactgagcctcgtcttaaaattggtaataaatatatcagtgtgctttgtattgatgcttatccggcaagctcagtgatggggatgctgcaatcgttatcaaatttaccttgtgagtatcgctggacgacccgcgccatatttcttgatccgatagatgcggataagcaaattgaaaaataccgtaaaagttgggggcagaaagttcgtggatttgtcgatcaacttatgggtaaacacagcgataatattaattatgatgcagccacgatgaaagaggatgcacagattgctaaaggtgaaaataactcaaatacggttcgctatctgtatcttacgcccacaatagtgattatggatgaagatattgaccgtttggatgaaacgacaaatcttatccgtaccacgattaaaaatgtcgtcaattttaatgcaagaattgagacagttaatgcaatggatgcctaccttggcagtctgccgtctcatacctatgagaatgtgagacgaccccttttacataccggaaatatgacgcatatagtgccctgttccacgttgtggacgggcgaagaaacatcaccctgcccgttctttccgccggacagtccgccgctgatgaaggtcagtacaacgggtaactccgagtttaatcttaatttgcatgaggacgatgtaggacacggcattatcggcggtaaaacaggtgcagggaaatcatcattagtcacattaatttcttctcaatatgaccggtatcctgattctcaggtatttacctttgataagggacgttctgcaaaagtgttctgcaaactatcgggaggaaagtattacgatattatgacgggcgagcattctcttaactttgcaccgctggcgcgtatagatgaaccgagtgagtttatatgggcgtttgagtggttacaggatattgccgaaattaacggcgtaaagctggattctgaaaaagttaaaaaactgaatgaagccctgaaaattgtctcaagaatggataataaggacggccagtaccgtaacattgattcactgattacaaaattgcaagaccgcgaattgaaagatttgttcagtcagtacggctccggcggggcatacggtgaagtgcttaatcagccacaagaacaaattacactcagtaactttaccgtttttgagtatggagaattactggacaggggcaataaaatcaaactgccggtacttttttatctctgccacttgattgagcgacaactcgacggaagaccgacgctggttaatattgacgaggcatggaagtttttagatgaacctgttgcgggtaaacgccttttacaatggctgcgtgaatggcgtaaaagcaatgctgccgtggttatttccacccagaacttgcacattatcgaaaaagcctttccgctggtattttcagaaatcgctatggcttgcccgacaaaactgtttcttagtaaccccgccgccgaggaagaagtttcgatcaatgcttataaaattcttggctgcaaagcagctgaaatccgcagaatccgtcatttaacgccgaagcgtgagtattttgtgaaaaaaggtgattttcgccggacattcagcctcgatatggttgagggtgacatcggacttgctaccgttgccgcaagctctaaaaaggatttaaaagagatagataaattagattttgaacattccagtgaagaagaattactgcgccagtggcttgattttaaaggtgttgatagtggctatgtgcagtatctgacagacagactgaaatcaaggggtgaaatatga

SEQ ID NO: 80428 - DNA, 360 bp, Citrobacter koseri
atgttagagaaatattactatagccagtcgagactgacccagcaactgatagtgttaggtgcattgctactggtctgtatgttgttaagcagtcatgcaatggcaggtcagacgcaaggtttaccttgggaaagtccgcttgagaaaatcaaaaacagcataaccggccccgtagcgggggcgatttcctttctcgggatttgcgttgcgggaatgatgctgatttggggcggtgaaatgtctgatttcaccaagcgtatcgtttatgtggttctggttatctctataattttaggggcaagtgtggttatcaacatgtggcagggtaacggtgcattgatccctctgtctatggtgtaa

SEQ ID NO: 80429 - DNA, 945 bp, Citrobacter koseri
atgaatacgggtgatgataaaaaaatcagtgaccttgccaaaatgctttggcgggagttcgatattattgcgccttatctcagggatgaaaccactattgaaatcatgctcaatcctgacggtaatatatgggttgaacagatcggtaagccaatgttcagtattggcgaaatgtcgttatataacgctcaatcattatttgccaccattgcacacagcatggggaaaacaatagataatcgccacccttgccttgagggaacgttgcttattaatgatgcgcgttttgaggggttctatccccccgtttcaagtgcgcccacctttgctatccgtaaaaaacctaaaaaaatattctctcttgatgattttaaattaaccgaaaatcagaaatcgacgatggttacatgggtgaaagaacgtaaaaatattttagtcgtcggcggaaccagtagcggtaaaacatctttttctaatgcctttattgacctgatggcacaatttacacctgatgatcgtatcgtcattcttgaaacgctggacgaaatccagtgccgcgcaaaaaattattcaaaactgattgaaacaatggatgtgacgatgaatcagttactgcgcggtgtgatgcgttaccgccctgaccgtattattgttggtgaagttgttgatgcagcggcgttatctatgctgaaagcatggaatacagggcatgacggagggttatgtaccattcatgccgacagtgcccttgaggggtttgaccgcctttacgatctgattgaagaaagcgggattaatatgtcagaaagggtgaaccggctgattggacgggcgattgacggtgttgttttcctgaaacgggaacaaggtgttcgggtagtcaaagaagtcgcaaatgtgacagaatttaacggcagtgaatttgtgcttgattatgttaattaa

SEQ ID NO: 80430 - DNA, 549 bp, Citrobacter koseri
ttgattgatatgccgagtgtgtctgcatgtgcgccggagatagccgcagatacgttacagaaaattattatggttgaaagtggcggtaatccttttgccgttaatgtcaataagctgtccgccggaagccagcctaaaccgaaaaacgtggctgatgccgttgcagcgacacaatactggatagcaaaaggctattctgttgatgtgggtttaatgcaggtaaatagccgcaattttaaaatgttgggtattactgatactgatttaggctctgtttttgaaccctgcaataatgtgaagtacggagcaacaattttactttctgcatggaacatgacttcatccaaagaacaccagaacgaccggctgatgaaatcattgagtatttacaatacgggtaatgacgttaacggatttaaaaatggttacgtcagtaagtatgtgggaagaaacatttccggttcactggcaaaaacggttgtcactccttataacgcagattccagtgtagggtttaatgcagactctttttacggggatgatttatga

SEQ ID NO: 80431 - DNA, 579 bp, Citrobacter koseri
atgttaaccctatactacttttcacgcagcttatgggtacggattgtgatcacaaacaatacactgaaacgtaagtttttaaatacccttctctttttcggcgttttgtccggttgcgttatgctttatcagcattatttcgttgtcaattttactaaaagtatgccgttaggagtgtacttcaaaagttatccagcatcttatacaaaaaatgatacggttttggtttgtctcgatgatgagatagcaagatggtctgttgatcatcacatcattgctgatggtttaggttgccggcattcagcaccgttactcaaaaaaatcgtagcaactgagggggacagggtaacagtgacccataaaggcattgttgttaatgatgttttagtcccgaataccgcgccaattgccaggaaaattaagcagtggaacattatcgatagggaaattctattaaaatcaacggagtatatcgttgtcgccaatcaaaataatctgtcttttgacagtcgttattttggtgtagtaacagaccggaatattaccgcaaaaatcagacctttttatttatttgactga

SEQ ID NO: 80432 - DNA, 246 bp, Citrobacter koseri
atgatccccgaaagactaaaaaccgccagaaaaaaaagacattacacacaggagctgctggccataaaagcaggcatagatgaaagcacagcgagttcacgaatcagccagtatgaaaacggctacagtgtcccctcttatcagctaatgcaaaaaatagcgtctatattacagatcccaacctgttacttttattgcgacgatgaagaattggctgattacctgattaactattatcgccggtaa

SEQ ID NO: 80433 - DNA, 1005 bp, Citrobacter koseri
atgagcatagctgattacggttcattgagtaatcaaaagcgactggaacaacgccaatttaatcaacataagatattaagttttttggcgcaggaacgcagcgttactattgacagtctgagccgtttgtttgatttttccgcaaaccaaaaaatctatttgttacttaaaaacctgataaataatgaattagttacctatttcgaggatggatttcttggcagaaccaaacggttttatcatctgacagcacaaggtcaggcttttgctgaacaagaacttggtattacaccacggttcaacggattaagtcgccgtactcatgccccgtcagccctgctgcatacactggaaatgcagaactacacggcgttgctgatgaaagcaggggcgaaagtccgctatctgcatctgccggataaaattatggattactggtacggtggcactgcggcagaagtcgaacgcacgtttaaaagccaaaaacgttaccgtgatatttttcggaactactgtctgcggatgcgccgtaatgaccccattattaataccgtgatgtatatcctgcctgattcagctatgcgggataaagcggcagccctgttttacagttttgatgaactgatgattgaaggcattctgactgatgtcagaacgtatacagggcgttttctgtttgccacccgagccgaatatgaagcctatctgacggcgtttccgcaatccggtgtcagagtcgagatgaagctgccaaatgaggtgtggcaacgctggcagcgacacgcagcacaggctcaactgacaccggaagcgtggttaaccggtattctgaacagggaagtgccagttgtgatcaatgagccgatgccgtattcaggtgacggggtgctgattaacctgactccgacaaaggatgattacaaattctggctggctaatgctgatgcctgtcataccagcctttcagcatggtgtgcagggaagcctgttcacttaaatttatag

SEQ ID NO: 80434 - DNA, 2115 bp, Citrobacter koseri
atggatcaggggctttatggattcaggcagtttggttatgtgattgataacttttcatctgtatttttgtatcatcactggttagtacttttcgtcatttgggctttctttgttttgatggtcagtatcattgtcagaagtttaaatcatgttattttcatcggaatgtctgatgatgacagagaagattcaaggaatgtagaggttaatggtaagcgtcaaaaacgtggcgtgtttgcatctatgcaatatgacaaaccttacttttcgttattgcttttaaggcaggcaggtttttttattaaaatactgctgatttttattatagcttttatgactgcattttttattgttactctgatttctgctttttttgatattgattatgtgattacaccttacaaagcacaatattatcttttaactaaaactaatatgtatgggttgtcaattattttagttggttcgcttgttggttatattgttagtgcattcttataccattcatttattaaaccgtttttcggcgagatagatttaatttttaatgaagaagcgatttcacggcgcgaatcttcaaaaatgagagatgataaactaaccgatattcgaaattttaattttaaagacagtattaattataatcctgttgattactttcatgaggctaaaagtaaaaaaggtattttcttggggatcgacgaaaacaacaagccaatattaatccctaagttaaaatgggatgaaacaaatattcaggtgattggtaaaatggggagtggtaagggggttctttctaccgttgcgcttgttcagtgtgtggagttatataacgatattaatattatttttgaccctaaaaatgatgagtgggcataccatgtatttaagcatttctttaaagatgatttactctatattgatttaaatcggggacagttgccacaggttaatccatttaaaggcgctaattctgatgaaattaacgaattgttagttgccagttttggattgggtgaaaaaggaacggatgccgatttctacaagactggtgacagaaaggtatgccgtgatttatcacagcattttacgcaaggtacagatttgcgcggactgttaagcatcgctttaaatgaaaatttccgaaaatcatatgaccggactggcgaaaacttttttaatcttcttgaagaattgggacaattagattctatcagtgctcatgatggcattgatttagtcgatatactgaataaccaaaataaaaagattatctatatcacaggttcgttgcgtgatgaggttgttgttaaggcacaaaaaatgctctttttacggatggtgcaaatccttgaaaaaagaaacagaaataaagatgttacccacgtaaatattatgcttgatgaaattaagtatcttatttccaaaagtgctcttgaagcaatggggacgctcagagataagaaggccaatattctttttacccatcaatccagaggtgatttagaggtttccaccaaagaaattgacgggcaaactgcaaggaaagtgattgaagatagtgcagggctacgctggatttaccggacagataattatgagagtgcaaaatgggcgagtgattttacagcgggtggtctggtagatgtagagcgtcgtaatctttctgttaatcagtctaatgttgaaatggcttcaaaagaagcgacaatatttaagcagaaagctaattatattgatatttcagttattcaaaatcttccgtcacgttgcgggttaatagtgggggacggacaactggctaggctggcgtacagcagtccgatccttgtcgaaaaaagtgataaatgcgttacttcatttgaaacacaagcgatttcttcccgtgagtttttagccagtatcagagaaacaaatgataaaccgaaaactgcaagcgataaaaaagtgaaaaataacagaaatacaaaacctgttgataatccgcaatccggcacgatggttaaccgtgaacgagtaaacagtgctgtagatgcggatagggtagattctgttatggctgaattaaccatgccagatgataatcacggagataattatcatgagcatagctga

SEQ ID NO: 80435 - DNA, 231 bp, Citrobacter koseri
atggaaaatgtgaacaaaccaaataattctattgaagaaaagatagaaaacttaaaaagtaaactcactgaactagacgaaaaacgagaaaagttaatcacaagaattgataaacttgagtcacagatgaacgctgaaaaagcacaaaaaattctcgatgataagagacaggagcttgagaatttactcggaaaggaaaatttagatctgctttttggcagtaaaaagtag

SEQ ID NO: 80436 - DNA, 567 bp, Citrobacter koseri
atgaagatattgatttttttagttttgataattatgtcaaacacatcattctcaaaatcactttttatcggtgattctctgacttacagtctggcatcaagtttttcaaaaatcgaacctgtagatgcgaaatttttagaaagtacaggactgaaatccgataacattcttagctggactgactacatagaaacaatgaatttaagcaactatgacagaatatatattgtgttaggtatcaatgatatgataaacgaaaatgatgaaatactttatcaagaccgtgtagatacctttataatgtcactattaaataaaaataaaaatattatctggttacttcctccggtacttaaaaacgcaaagcatgagtctatgttgctttacacaaggtcaatcatcaaagctgcatgtattgagcacagtgtagatttttttgatatgcgtgatgtactgggttataactttatgcagacagtgaatgacagaaacatcagaacagatgatggcattcacattaccccgtatggtgcagacagggtgatcactaacttgctattgaggtga

SEQ ID NO: 80437 - DNA, 453 bp, Citrobacter koseri
atgttcagattagccacaccagaggattacgaatatttaccggatatcggattatatgaactgacgtttgataaacgtccggtgcaaggcgttcgatgtgaagatccaaaacagggagccgcagattacaataatttcagaaaaaaattcaagtctgttattcacaaagaaaaacaacgccgtaaaaatttttatcagctcactgagatttcttggaatgccgtttttgattgggcgattgagcggggaacacaggaagaatgtcgtttattacaagcaatgtatcatgccgaaaataacaaaaaatatcagcaactactccttgaattaagcaaacactacgggttcatcaaagaatcaaatttactcattccattgggtttgatactttgtaaccaacggatcgcagatacagaaaaattaatcgctaacagcattaaggcaggtgtctga

SEQ ID NO: 80438 - DNA, 582 bp, Citrobacter koseri
atggaacggacaacaattaattttagaattaatgacgatggattactcgcacaatttaatcacgcaatggctaaagaacagaagaaatataaattcgccactgacggaattagaaccataaaagatttggagattattttcactgcctcaaaaattaaaaatttcagagataacgaacattacctcatagcatcattagcacaaaaacaatccccattaatactcaatacgttgaatgaactaaaagataaatttgaaaaagtttatcaggaagaaagaaacatcacagggcaaataatttttttcaaaaagatattagaacaagttgaatatcacgataaaacacaagatattgatgtattaatttcacctcatgttatgttgtttattaatattacagcattggctgacaatatcattaaacaattaagagtccagtatttgaatggttctatagatgaaaccaccttactgataaaaagaaataaaatactgaaacaatatgccgctttacgtgaaaaattgcatgaaatgaagcaggaaaggaaaaaattgtttaaaaaagtgaaagataacttataa

SEQ ID NO: 80439 - DNA, 354 bp, Citrobacter koseri
atgactatgtatcaggatctgccctctgtactgaatctgattaactgtgaatcaccatttccatgtaatcaggcttcttgtgctcagggtatcgcggacaaaaactcgtttgtcgaatttattgttacgcataaatcagcaggtaatttgcgtgaatggaatttgtcttacgttgacaggtttaatcgcttgattaaggttttttaccacgatcagatgatattacatgcacgtattaacatgaaaacaggtattgtcaatctcattgcctataccgtgtttactgataagataagttcgcttgaagcagaatatcttgtcgaacaaatacgccaacacttagatcatttctaa

SEQ ID NO: 80440 - DNA, 147 bp, Citrobacter koseri
atgaccaagtatgcgctaatcgcgctgattgccgtctgtgtgacggtgctgtgtttatcgttgatcacacgcgaccggctgtgttcggtcagtatgaaaaacggcaatacagtagttacggcgaccttagattacgaagttaagtag

SEQ ID NO: 80441 - DNA, 357 bp, Citrobacter koseri
atgaaaaagttaaataattttattcagatagaagatgtgaaaatctccataggagacatcttttgtgattcatggggatatgagcaaacaaacgtcgatttttatcaggttgtgtcattacacggtaaaaagtcagtcagcttaagaaaaattgctcaacgagtagtcaaacctacaagttggtgcagtgctgatgtcagtcccgtaaaagatgcgtttttaaatgatgaaatcattaagcgcagggtcaatgtaagaggttctgaaaactacagtatctctgttaaaacaagtgatcattcatgggcataccggacttcaccagaaagaagccaccattcatcatggggctattaa

SEQ ID NO: 80442 - DNA, 309 bp, Citrobacter koseri
atgaacaacgatgaaagctatctgcaacgcgaattgaagctgctgctgttggaaacaatctttcttgctatggttgcgacgcttttccccagactgaaaaaacgttgtcgtgtttggtttatgcgggaagcggacttcctcttagactatgcagaaaacggattgttaaacagtgaagacagaaagcagatcaattctatcagtgtgtttgccaaacggctgagtgagttttgtggttggtggtgtcaacacgtcattgactgctcgatgatcgttgagttggaatggaaacacgccggaaatagttaa

SEQ ID NO: 80443 - DNA, 150 bp, Citrobacter koseri
atggctatcactgctgaacgtaaaaaacaacttgaaaaaatagctatcaggaaaagtgttgagaaagaaaaagctattttatggactgatttagttaatgatttaattgataatttcttacttaatgaggaaaaaaaacataacagttaa

SEQ ID NO: 80444 - DNA, 663 bp, Citrobacter koseri
atgattatagtttttggatcagataaaggtggagtaggaaaaaccacaattacggcaaactcagcagtaatgttgcaacaaaaaacggcgtctgtagcattagtgcgaacagacaaaaacgaagatttgaacacatggcaaagtttacgacgagaacagcccgtccctgatatcccaattatgacttgttacggaagcaatacacataaagaaataaacaaattgcacggcgttacggatgtaatattggtagacactgccggacatgatagcgtcgagcttcgtagtgcattacttgttgcagatgtatttatagctcctgtaagcccaacatctatgttagaagttgtcacattgaataaattatcatccattgtgaacgaagctaaaaaggaaaacacaaagctaaaagcctttgctttacttaatcgctgccctacttcaccatttaataatgatgcagtaaaaatcacacaatatcttaacgatgatcccctgcttctatccccattcaaaacccgtatatcaaacttaaaggcttttgaaaaagccataaatgaggggttgggagtacatgagcttaaaggtaaaaatgtaggatcagccaaagcacaattagagcttttattcgctgaactcattgattctgttcaggatatctaa

SEQ ID NO: 80445 - DNA, 279 bp, Citrobacter koseri
atggatataaataaattaaaaaaacacgcgccaataattgaacagtcagaaagcaagacggttaatgattttatcgcccaaggggataaaaagccgacaaaaaaagcagaatctatcatggtaggttttcgtatggatgaagatactttagaacgtttagaccggctgactaacggactagggaagaaacgtattaacattttacgggcttcgctgcttgcctttgaatcactatcacctagcgataaggctaagtttttaatagagataatgaggtaa

SEQ ID NO: 80446 - DNA, 873 bp, Citrobacter koseri
gtgactagccgcaatgtttctttaactaacaactacatacaggtcaaaaacccgacacctttgtttgttaaaccaaaggataaagggacgcttccgttctgtctgaaactgatggaaaaagcccaagggttcacagatcgctttgatttcctcgttcatgttgcgttttcccgttcaatcggaaaacgtcaccgtaaaccccctgttctgcgctgccgtgtgattgatgttttattacaggcaatgtgtttccattatgacccgttagcaggggaaactggccgtgttcagcgttccgtcactaatcttgcgatagagtgcggactggcgacggaatccgataacggaaatttatccattacccgtgtaacccgtgcgctggaatcacttgataaagattttggtctgctccgttatgacagcgagtttgaccccgttatcggttgcaatgtgccgtcaaacattgagtttacaccggcactgtttgaagccctcgatatttcccccgaagcactgacggcggcacgtaacagccgtgctgagtgggaaaatcagcgacgggagaaaaaaggcttaccccgccttgatatcatggaactggccgctaatgcatttcgttatgtccgtgacggattcaggaagtatcacaaggaacggcgggaacaaggcttaaaacgtgccagagcaaagcgtgagtcagttctcagccgcaaagaaatcgaagctaaggtaaaacgcgaagtgtccttagaaatcgcggctggccgcttccctgtcgatatggacgctgcacgcagggaaatagcccgacgaacgacagaacgaactatcctgtctcggggtaattatacccgcttatcatcacctgcctga

SEQ ID NO: 80447 - DNA, 315 bp, Citrobacter koseri
atgcagttcactgtatatagtaatacagggaaaagtgccgtttatcccctgctgattgatgtaacaagcgatattatcggccagttaaaccggaggattgttatccccctgttacctgttggaatgtaccctaatggtatgcgaccggagcggctgactccgcttatcaggctggttgatgataatgagtatgtagtcatgactcatgaaatggcgagtattcctgctcgttctttgggggctgcgttctgtgatgcttcttcttatcgtaagcagatcaaggatgctcttgattttctcctcgatggtatttaa

SEQ ID NO: 80448 - DNA, 237 bp, Citrobacter koseri
atggctgtaacacaaagaccaatgcaaaccgtaaccatgacggtaaaacgaaccttactcacccgtgcgcgtgaggctggaattaatctgagtgccaccctgaccgctgccctcgatgctgaattacgtcagtacgaagcgaagaagtggcaagaggaaaacagcgaagcactggaagcccttaatcgcttccatgacgaacacggctgtttcagtgatgaatacaggacattttaa

SEQ ID NO: 80449 - DNA, 591 bp, Citrobacter koseri
atgatgctattaatttctttaattttattttatattgctatcttattaatgctaaggttagataacagggctgattctgttgatataagaatacacgaagttaaccatgccatgagtgcaaactcttattataatacaccgggtgttacatcaacttcaatgaagagaggggagttatcaaagatatactttaaagcattagtgtctcgtagtattatttttgtgatttttaatgtaattattgatttttataagttgctagttttgtttatttttaatacgttacctaagattttatttatttccttattggttagtgttgttatcgaaccgaatatattgaaagaaattaatattgataatactattcagtttataaatattttaaaaactaattttagttctattattgattttgtactctctgtattagcattatgcttgttaactatgtatatatatgactttaagcaaagtccattaagacatttgagtggctattacaatgagttgctttgtaaatattttgatgaagacccagatataaaagtagtaagcgtagtaaaaagaggaaagatcaaaaagttataa

SEQ ID NO: 80450 - DNA, 273 bp, Citrobacter koseri
atgtataacataatttatgtacacatggcatgtggtgattatatggataagaaattaataaaaacaatcagattaaatgataatgaggcattaatattaaaagaagctgcatttaatttttctaaagaaaatattttaaatgatgtgcatattatctacaaagagtctgacttaattcacttcatgattgagcatttaacatgccgcttagatattaacaataaaggtgagttaatttttattgaagaccagttggataagatagaggtatga

SEQ ID NO: 80451 - DNA, 489 bp, Citrobacter koseri
atggctagcagaggcgtaaataaagtcattcttattggtaatttagggcaagatcctgaaatccgctatatgcctaatggtggtgcggtagcgaatctatcccttgcaacgtctgaaacatggcgggacaagcaaactaacgagatgcgggaaaaaaccgaatggcatcgagtggtgattttcggcaaactagccgagattgccggagaatacctgaaaaaagggtcacaagtgtatattgagggttctttgcaaacccgtaaatggcaagatcaaagcggtcaagaccgttattcaacagagattgttgttaatattggcgggtcaatgcaaatgttaggggggcgaaatggggatgctccagcaacagatcaaagtggacagggacaagttcaagaatccccaaaattcagcggtggcggtgttcctgcgccagctaaaccgaccaatgaacccccacttgacttttcagatgatatcccgttttag

SEQ ID NO: 80452 - DNA, 1215 bp, Citrobacter koseri
atggctaacccctcacaaaataaaaagctcactaaaaaacaaaaattattaatgacgataggatttgctgctgtcctcattatttttgttgtttttatttctattatgagtttagggactaataccgatagtcaaacgcaaagttacgaagatgccaaggataaatcaggcgatcctgctgacccatcctatgaggctaatctgtatcgttcccgattcagagaaaatactgacttacaaacaccccctgcaacaccagataaagccccatcgacaaccggaacaacacaaacagccaatgtgagtcagccacaatctaatagcacacagactcaatcacaggaacgtgatcaatttgcggaaaatgttttaaggatgaagcaacaagcctatatggaggcactaaacagcaaaacaacggtgcgggttgatgcgctcactgataataacagtccggagcgcggtagttcagccccagactatgcctcaattgcagaacaactcgccgcagcctcgaaagaggaaaacggagaattgtatgccaacatgcagcaaaacaaagaaaaatttgtgaatacagaacgtacctttggctactcaactcaaacaagagaagccgcgttgtctcggactgaaatcaaggccggaatgattttaccggcggtacttgttacagaaatcaattctgatttaccaggattaattaccgcacagataaccgaagatgtgcgcgacagtttaacaggcagaaaaatactgatcccaagaggttcaaaactcatcggctcttatgattcacaagtagctatggggcaagagcgcgtgttagtcgtctggaacagagtccagttcccagacacttcaacacttgcccttggtaatatggggggaacagatggcatggggcaatccggctttaacgatgaggttaacaatcattatttacgcatctttggtaatgcaacgttacttgcgattattggtgcagggttccagctttctcaaccagacaataatagtaataacggtaacaatggtatgacggcaagagagcagatgattgctgaaataggtagacagtggtctaccgttggtacagaagtcgtgcgccgaaatctgaatattcagccaacgttacacatccgagcagggtataaatttaatgtcttggtaaataaagacatcatattgcctgaataccagccaaatcattaa

SEQ ID NO: 80453 - DNA, 450 bp, Citrobacter koseri
atgatgaaatacaaattattctttgcctttgtatgtatggtattagcagggtgtgttagtaagcctaatatctcatcatatgatggtacacagggaacaatagggaaaaacagcattcaaaaaatgttatatggcgttgatgttattttttctaaacttcattcaaaaaatactattttttatattgaggattcacattctaatatagcaactgcttttattgaaaatataaagcgaaaaggttttattgttatcgttacaaataaagaagacaaaataaactataaaaaaataaatatgggtataattgtgaagaaaataacgccggatatttattctctttcaattattacggataagtacagaattaaccaaccttatgactatcaattaaataaaattggtgaggtttccattcaaaataaaaccgaggatgttaatcatggctaa

SEQ ID NO: 80454 - DNA, 915 bp, Citrobacter koseri
atgaaaaaaacaattttatttacctcattgctgatttcaggcgttgcattagctgatcctgttgtgccttctgtcagtaatatagaaaggattaatacaggtgcaacctctcaaccaacaacgccacagcaggctatgccatcttcaatgctcttaggtggtaaagacttacctttaagccgaaaagagcaacaggcgattaaaacagcaaatcaatgggttaacgggaaacagtatatttctaatggcggtcaggaggtagtgtacacatacggagcaggtcaggcggccattattgccacaccgctaaaactcagtgtttttgagcttgaatccggcgaacgtattgttaatgaggggattcagttaggtgattctgttcgttggcacgctacccccgtaaaacaggggaatcagacgaatgttattataaaaccaactgacacaggactatcaacggatttagttgtcgtcacagaccgccgtacttatcacattaagttaatttcaaacagtaaaaactatactccattagtcaaattcaattatccagaagatgaaaaccaaaaagcgtggaatgcgtactatcaaaattcaggtacagataatagcagtatctcacttgccggaaataaaacgggacttgcccctataaattttgattataccattaaaggcgataataaaatgaaaccgttgcgggtttacgacaatggtgctcaggtgtttattcaaatggatggaaaactacaggaaactcccgcattatttgttattaatggctcaggaaaacagcaattagttaattatcgttatgtggataatacctttgttgttgaccgcttgtttaataaagctgttctgacacttgatgttggcggcgatcaggaaaaagttaccatcacaaaggggtaa

SEQ ID NO: 80455 - DNA, 645 bp, Citrobacter koseri
atgagtgatgataaattcaaaaaatcgtccggctggaacagttttttaggtaagactaaagaacaagttacgttctaccgatggacgactatcctttgcgctgtcgcggctattatctctatttctggctgtatttatttctcttctcaggtgaaatatgtgccttttgttgttgaagtcaacaaagattacgcgccgttgcaggttcatcagctagagtctttagggcaaagcaaagatgcggttactcgttcgcaactggcaacgattatcaaaaatatgcgggtagtctatgccggagataaagaagcgcaattagatgctattaaatcagtctattatttcatcaaaaccaactcgcaaccttacaaatatgttcaggagatgttctctgttgatgacccgatgaatcagaaatttttaaatcaggtggaaataaaagccattcttcctttaagtaaagatacatggagggctgaatgggtagaaaagaaagctatgcctgatggtaaaaatgttctgtcacgaaactattcagcggttattcaggttgagtatgcagatactatttctgctgaaatgattatcaataaccctatcgggttatatcttaaaaatatgcaaattacagaagaatataaatag

SEQ ID NO: 80456 - DNA, 597 bp, Citrobacter koseri
atgaatattggcggtacgctggcgacaatggccgccgcagccactgcatttaccgctgcctgttatgccggagccgcagcctttaaagcggcaggggcggccaatgcagcaggaggaggtggagccgctacaggtggactttccggcggtgatttagcgaatgcgttaagcaaaggcggcggctctggtgttgccggtgggggcggttccggcggcagtagttcactgcctaacggggggaaatccggtgctcagttagtgaaagagggaaaagtacaatcacctaataaaaatacgggtaacactgcaacgggtactgaatcaggaaaaccacaacaaagcagaacgggagcagccctgaaagctgtcgctaaatccgttggtgagggaatactcaataaagcggcaggaagcagaggctccacggcagcaaacattacccgtgcagcgttaaataatgcggcacaaagtcaccagtccacagaaagcccacgtaaacctattgccagtccgtatgcaaaaagcaccggaaataatagtagcggaaccagtaaaatgcctaacaagggaaataatgatacaggggaaaatcaatga

SEQ ID NO: 80457 - DNA, 960 bp, Citrobacter koseri
atgacggagtcaccgcaaacgcaatctgaaatctctattcaccagttggtggtcgggaaacctgcaaacgatggcaatattcctgctcagtgtgaactgctgcgctgttcgttgcaggaaggtatggatattttgctctggaggggccattttgcgcggcctgagacgttgcagctacacgacgatctgggcaggattaacttctcgtgcatcctggaaggcacatcgcgctttgcgattcagggactccggcgccgcaccgactgggagcttgcgcgcaatcgccattacattacccatacgccagactgccgtggcagcgcctcctattgtggccgattcgagagcattaccctctccttcagccctgaaaccctcgcgctgtgggtgccagatattagcgcggtcattaagaataagatcgactcccactgctgttgccagcagcagcgttgtaatgctgaaacccacttaacggctcaggccttgcgtcacgcgctgatgcgcatgcacggcggcttcagccatgaacaaaagccgtcgacgctatggttgcaggggcaaagtctggtcatgctcagtctggtgctggatgaacatcgcgaagacgccagttgcctctcctgccacttcaacccgatggaacgtcagaaactgctgcgggcgaaggatctgctgctggctgatctgacgcaagcgccgggcgtcgcggagctggccagagagtccggtctgagcgttctcaaaattaagcgaggcttccgcgttctgttcaacaacagcgtctatggcctgtttcaggctgaacgaatgcaggaagccagaagacgcctggccaacggcaatacttccgtcatgacggtggcggccgatctgggctatgccaacgccagccatttctctgccgccttccagaaacagtttggcgtaaccccttcgacctttaaacgcgtgatgtaa

SEQ ID NO: 80458 - DNA, 369 bp, Citrobacter koseri
atgaaatttcaacctgcaaaaaatatgcgggcggcgaagccatgcctatcgcccgtgactatctggcaaatgttacttagtcgtctgctggaacagcattatggcctgacgctaaacgatacacctttctgtgatgaaaccgtcatacaggaacatatcgatgccggtatcaccctggctaatgctattaactttctggtggagaagtatgagttagtccgtatcgatcgcagtggattttcctcacaggaacaagcgccatatctgaccgtgacagatatccttcatgccaggaaagcatgcggattaatgaacagttgttcttatcgggaagtaagtaatattgttcttagccgatcgcgtcagtga

SEQ ID NO: 80459 - DNA, 1752 bp, Citrobacter koseri
atgaaattcttacagaatatcccgtcttacctgtttttcaccggtaagggaggtgtaggcaaaacttcgatttcctgcgcaacggctatacgtctggctgaactgggaaagcgtgttctgcttgtcagtaccgacccggcctctaacgtcggtcaggtattcgatcagactatcggtaatactatccagcccgtaactgctgttcctggtctttcggctctggagattgacccgcaggaagccgcccagcaataccgcgccagaatcgttgaccctattaaaggtcttttgcctgatgacgttgttaacagcatcagtgaacagctttcaggagcttgtacgacagagattgctgcgttcgacgagtttactggcttactgaccgacgcttctctgctgacccgcttcgatcacatcatttttgatacagcgccgacgggccacacgattcgccttctccagcttcccggtgcctggagtagcttcattgaaagtaatccacatggtgcttcctgtcttggcccaatggccgggctggaaaagcagcgtgagcagtatgctcatgcggtagaggcgttatccgatcctgaaagtacccgcctggttctggttgcacgactgcaaaaatctacgctgcaggaagtcgcccgcacccatgaagaactcgccgcaattggcctgaaaaaccagtacctggttattaatggtgtgctgcctaaagccgaagctgaacatgacgccctggccgctacaatatggcaacgggaacaggaggcgctggcaaatcttcctgctgggttatctggcttgccgacagatacactattccttcaaccgctgaacatggttggtgtctccgcattgaaaggcctgctcaacgtacacgctgagatagcatcgcttcctgaacaaagcatacagaacaagccagagaatatgtcgctgtctgccatggttgatgatatcgcccgcagtgaacacggtttgattatgctgatgggcaaaggtggcgtaggtaaaaccacgatggctgctgctatcgccgtccgacttgcggacatgggttttgatgtgcatctcaccacctcagatccggctgcacatctcagtacaacgctcaatggcagcctcaaaaatctgcaggtcagccgaatcaaccctcacgatgaaactgaacgctatcgtcagcatgttcttgagacgaaaggcagggatctggatgaggccgggaaacggctgctcgaagaggatttacgttctccttgcacagaagagattgcggtgttccaggcgttctcacgcgtaattcgtgaagcaggcaaacggtttgtggtcatggatacggcacctaccgggcatacgctattactgcttgatgctaccggggcttatcaccgtgagattgccaggaagatgggggataaaggtcattttaccactccgatgatgcagcttcaggacccgggacgtaccaaagtcttgctggtcactctgcctgaaaccacacctgtactggaagcggcaaacctgcagtccgatcttgaacgtgcggggattcatccctggggctggattatcaataacagcctttcgattgcacagacgcaatcgccactgctttgccagcgagcccgacaagagcttcctcaaatcgaggttgtgaaaaaccagcatgcaagccgcatagcgttagtaccggtaatggcttctgaacccactggcatcgagaaactcagagagctggccgtttaa

SEQ ID NO: 80460 - DNA, 363 bp, Citrobacter koseri
atgaagacgttaacggtttttgacccggcaatgtgctgcagtaccggcgtatgtggctcagatgtcgatcaggttctggttgatttttctgctgatgtgcagtggctgaaaggacgtggtgtacaggttgaacgttacaacctggcgcagcagcccatgagctttgttcaaaatgagaaagcgaaagcattcctcgaagcatctggagcagaagggcttccgctactgctgttggacggtgaaacggtgatggcagggcgatacccaaaacgtgctgagctggctcgctggtttggtataccgctggaaaaggtgggtttagcttccatcagttgctgtggtggtaaaacttcctgttgttga

SEQ ID NO: 80461 - DNA, 567 bp, Citrobacter koseri
atgggaattcataaccataatagtgaatataaggcagcaagcatagtttggggagatattagctccgatcttggatttaatttcctattgaaaaacaaccataaaaaccttcatattaactttgcccccgtggttgcctcagcggttaactcagcggttaactcagcccaacaaacatccaacatacaaaaccttttcgcaactgacctaatcatcccaaactttgaagaactaacctgggagcaagttttagaattaagagaagataaatatattaaagcatttagaaaaaaatatttctccatcgagaagaatgacaaaaatatcgatttagaacttaattctgatttagatgaagccttatgggatttagcttcacaaataagacctaacatcacaaaatccattatggaagcagtattaagcaacctaccattcccttcaattgcaaatccatttgggatttattatggagcaagagacacattgagaaacattgaaaataaaaataaccactcctgggtgtatttcattcaatcggcaaaaaaaaccaatgtcattaaataa

SEQ ID NO: 80462 - DNA, 531 bp, Citrobacter koseri
atgactattaggaatgaagatgttcaccaatataactatatgattgaagaattaagtttgcaagataaccttgaggattggtcaaagtgttcagagctatcaatagttgataaggaatataaaaaaattatttataaactagccatcaaattatggattaagcgcaaaataggcgatggcactttgcttttacatccagacatacaagaagaattaattagaagagattttgaaccactgtctctacataaaaaaatgatctgggctagtcaactagcatcttataatggtcaggatagtcgagagtattttaaacgaataaaaagaaagataattgctaagtatggggttgtttggtgggaagatgtttataatagagtgaaacccgcatatgctacaaggcagcggctattaaaacagattgacaatataggcggtgcaacaggttattttgcctcaaaaagtagttttcttggtggtgtattaatggaaactaggatggatatattaaaaatgattccaaaagagtaa

SEQ ID NO: 80463 - DNA, 1017 bp, Citrobacter koseri
atggacttatttaccgatgtggtttcattagataaacaacacccaatatataaaattattaaagaagatgaatactgggctgagcgtgatgttttaaatgaatgggcccaagggttaaaggacagagatggtaaattcgttaaagaatttcagacgaccttcgaaccatgcctatgggaactatatatacatgcgtatatgaaagaaattgggcatatttgtgacttctcatttgatgctcctgattttgtaatagttagagagcacgagttttgcattgaagctacaattgcattacctgctataggacaaccacctgctcacagctttgataataatacaaaattgggggagtttaatgaattcaactctcaagcagcgatccgtataaccaatagtttcatggggaaagtaaataagctaagagagcgctactcaaaacttgagcaatgcaggaataaaccattcgttatagcaattgcttcattcgacagacctttctctcatttttctgctagcagaccgattcttgcagcgatgtatggcctgtatcatgatgaagaagtaacgatggcatcaaacgcagaacaggttatttcttataatgttgatactgctctaaagaatggacgtactgagattgacatgggactattttgcactcctgatttttcagatgtcagtgcagtcatttatagtagcttagcaacttggggtaaattaagagcgctggctgataacccatccgctccaactgtttttcagatattcacccctaatccagactctatttatccaaatgtccatacagcacaaaaatgtgactataaagaacaccttttggatggtttgtatgtgcttcataatccttttgcaaagaacccattaccccccgaggcgtttggacaccctagaattgctcagtgctatatgagagaagatggatatttagattttgaagcgccagatgattttttgttgcttagatacttaatttcacttaagtacaccaaatag

SEQ ID NO: 80464 - DNA, 843 bp, Citrobacter koseri
atgcaaaccacttcacccgacccgcaggtattgaccggccatagtgaacttatcccctcaaccagcatcgagcgaatagtgactggccgcgatgcggcgctggagcaaatccggcagcttatcgcgcaattgaacgcgatttctcaactcactgacagcattgggggtggtatcgcccgtgattggatgatgcgccagggatatgcgtatgactgctggctgacggaaacgccggagaaagcgatgaaagccattacccggcatctcgaccgcagtatctggcgtgacctgatgcaaaaatcgggaatgctggcgctgatggatgcccaggcacgcgaacagtggtacaacagcctggaacaggaggatattcctaccatcagcaccgacaatattcttaccacctttgaacttctgcactgtgataaacaggtcgtttttgagcgtggcgttatcaatgtgttccgggggctatcgtgggattacaaaaccaacagcccttgtaagtttggtaagaaaatcatcgttaccggtcttgtcagacataagccctggggttttgggctgaactggggcagacagcgggatcaactggtggatctggaaagaatgctgcatgtgctgaacggcaaacccattcccgataaccgtaccgatattgcctcacggttgtcagagcatatccggcaacatccccatgaccagcagtttgaggatgagatgatgtccatccgttacttccagaaaggcacctgccacatcattttcaggtgcatggaactggtggaaaagatgaacgacatcgtggcaagacattatccggggatgctggcagcgagatga

SEQ ID NO: 80465 - DNA, 645 bp, Citrobacter koseri
atgagcaaagtgatagtaaccacagtctatcagcttgatgaactgtccgatgctgccagagaaaaagcccgcgcctggtatcgtgagggcagtttcgactacgactggtttgatgcggtgtatgaggattttcagcatatttgcgacatccttggtgtgcgcctcaaaacccgtgctgtccggctctatggcggtcatacccgtcaggagccgtgcatttggttccgtggtttctggagtcagggtgacggtgcctgtttcgaggccgattatgcctggcagccgcaggcgtcacgccagatccgggactacgcaccgcaggatgccgggcttcaccgcattgccgatgcattgcaggctatccagcgtcgtaatttctggcagttgcacgccgaaatccgccatcgaggcaactattaccatgagtattgcatggtgatcgccgtcgggcgcgactgcgcaaccgggcaggcgatgaccgttgacgcagaaacatcggtcagcgaagcgctgcgcgagctggcccgctggctctaccggcggcttgaagacgagtacgcctgcttaacttcagatgacgccgtagacgaagccatcgccgccaacgaatacaccttcaccgaatcgggccaccggtttggttga

SEQ ID NO: 80466 - DNA, 522 bp, Citrobacter koseri
atgacagaactggcactgaccgaccccgacgtgttaaccggactttgctcatcccgaactgaactgtccggcggcatcgcccccggagaacagcggattatccgtcaggcgctgtccctgctggataaatgcctgagggagccgggcatatcgtttacctcttcccatgcggttagcgactggttgcgcctgcaaatgagtcacctggaacgagaggtttttatggtgatttacctcgacaatcagcaccggttgctggtgaaagaagtcatcgccctcggcacgattaacagcgttgaggtgcatccgcgcgaggtcgtcaggggcgcgttgcgtcataacgcggcggcagtgattgtggcgcacaatcacccttccggctacgccgagcccagcgtagctgatcggcatataacggaaacgctgaaaaccgcgctggagctgctggatatccgtttgctggatcacttggtggtgggcggcgcggatgtggtgtcattcgccgaacgtggctggatatag

SEQ ID NO: 80467 - DNA, 390 bp, Citrobacter koseri
atgtcacattctttactggcggcatcatctggtctgccactggcagtatcgcagacggcatcaccggtcggcatctggaaaacattactaacccggctgctggcgcagcattacggcctgacgctcagtgatacgccattcagtaacgattccgtcattcaggcgcatattgacgccggaattgcattgatcgacgcactgaactttatggtggaaaaatacgacttggtgcgcactgacagtcagggtttcagtgcgcagacgccatcgccgttcatcagccatatcgacatgctgcgtgccaggcgagccacaggactgatgacccgtcgcagctataaaactgtcaccgacatcacgcgtggcacattaagtggcccgaaacaataa

SEQ ID NO: 80468 - DNA, 3291 bp, Citrobacter koseri
atgaaacgaaacctcaataccagttacaggctggtctggaatgatgtcctcggcgcatttgtcgccgtttccgagctggcgaaagcgaaaggtaaacgaaccggcgcggtactggcggttacggtcgccgggctggctggctctgctgccgcactggcggacggcagcaatattaccgtgcccgaaggggagtccgtcactggtgtggtggtcagtaatcacgactctcatcaggtgtacggtcaggcagcaggctccattatcaacaccgggcaggaatacggagatgatgatgaaaacaatcagggtgggcagtttatccagtccggcggtgtggcaacgtcatccgtcgtcaatgccagtggccttgaggcggtactgaaaggcggtagtgccaccgataccattgttaatagcggtggtgggcaaagcgtgcatggcgaggcgacaggcactgtgctgaatggtggctcacaatgggtgcatgatggcggtgtggcaaatggcacggtcattaatgaagcaggttatcagttagttaaagcaggcgcgacagcttccggtacggtggttaacaccggatctcagggcggaccggatgctgaaaacagtgatggtcagtttgtgtccggtgatgtcaccgacaccctgattaatgccaatggtcgtcaggtcattttcgagggcggttccgctgacaccactaccgtgaaaatggggggcgaccagagtgtgcatggcgtggcaaaaaataccctgctggaaggcggcttccagtatgttcatgaaggtgctagcgccgaaggtacagtgattagccaaaacggctggcaggtggtgaagaacggagcgacggcaacggataccactatccttaatggtactggtaccgaggcggcaaacggcaacagcgcatcctcgcagagtgtgcaggctggtggctctgccctgaacaccactatcggtgatgattccccctccggcgaattgctgaccgacctgtcgtatcagatggtgaatggtggacgtgcggaaaacaccaccatcaataatggcggggtacagtcggtttttgccggtggtacagctatcggctcggtcgtgaatcgtggtggtcggctggaagtgtccatctggcaggatgaacctgttgccggaaaaacggcggtggccgggtcggcgaataacgtcacagtggaagcggatggtgtgttgtcggtggatgcgggcacttccgcgatggatgtggtcatcaaacagggcggtgcattatgggcgaccaccgattccacggttaccgggacgaacagtctgggggatttctccattgatggcaccacgcataccgccaccaatgtcctgctggaaaatggcgggaaactgtcggttctgagcaacggtattgcagagtccaccaccgtaaacaacggcggggtattggcggtggccgccggaggtactgcctcagacatcgtgatgaacgatggcggcacgctgattgcggacacgggcgcaaacatcctcggtaacaccacactgaaagacaatgccgtgctggccggggatgtcaccaataatgataccctgctgttcagtacgggttcaggtgctgaagcccgtttcagcgggacattaagcggtgaaggttcgttgctgaaagaaggtgatggtacgctgacggtcagtgacagtaccgtgacacaatcgcagttaacgctgaatggcggcacgctggcgctggaaaacagcgtggttaacagtgatgtgattgcgcagtccggcaccagcctgttgctgaccggaaacaccgtgctgaacggtgccattgacccgaccgatgtgacgctggattccggcgcgatctggaatattcccgataacgccacggtaaaatcggtactggatgacctcagtgcctcaggcaccatcaatttcacgtctgtatcgggcagctttactcccaacacgctgaccgtgaaaaacctgattgggcatggaggcggcatcaatatgtccgtgcgcctggacgatccgactttccccaccgatatgctgattattgatggcggcaccgcaaccggcaaaacctggctgaacttcacgaatgtggggaatgccgggctggggcttgccacaaccggtaacggtatcaaggtggtggatgccatcaacggagccacgactgaagcgggggcgtttgctctggggagaaaactccaggccggggcgtataactataccctgcaacatggcacggcagatgaaagctggtatctgactagcgaagcggcttatcgcgcagaaaccgctctctatgcttctttgttcgcgcagacgctggattatgaccgtgtactggcaggcagttacagccagcgcagtaataatgcacagcgcggcagtgataacgcggtctgggggcgtattcagggcggtcatctggggcatggcgatcgtaaagggttggcgcagggaaccacgccggaaagcagcggcagttacggttttttgcaactgggtggcgatctgctgcgtaccgatgtactgacggcgggtgtttacggtgcgttgggtgaatccaacaacgaagtgaaaaacgatgatcgttcccgtgcggggtctgtgcgtgaccatgcgtacagtctgggcggctacctgacggcggtggacagcggtaccggtttatgggccgatatggtggcacagggttcccgtcacagcctggaagcaacatccgcagataaccgttttcatacccgtggctggagctggctgggttcactggaaagcggtttgccgctgaatatcggcaccagcctggtgctggaaccgcaggtgcagtacgtgtaccagtccacgtcactggataatggtcatgataacggggggtacgtgaacttcggcactggcagtgcccagcatgtccgcgccgggctgcgcttaggcaaccagtcggatatggtgtttggtcagggaacgtccacactggcaggttatgaatccaccatgaagcacagcgcggcagagcttccggttaactggtgggtcacgccatcggttatccgcacctttggcagtgatggcgacctgaacatgggaactaccacagcaggcagcaacgtcacgttcagtccgtcacagaatggcaccgcgctggatgttcaggcgggcgtggaagcgcaaatccgccagaatgtcacgctcggcgtgcagggcggttatacccgcagcgtgagcggtaacagcgctggtggttataacggtcaggccactctgaaagtcgccttctga

SEQ ID NO: 80469 - DNA, 684 bp, Citrobacter koseri
atgacactggcggaacgccgacatgaccggctggcggtcaggctttcgctgatcatcagccgactgctggccggagaaacactgcatgtgggaaaactggctgctgaatttggcgtgtcggtacgtaccctgaggcgggattttcgtgaacgactgatgtatctggatctggaataccaccggggaatgtgccgcctgcgctccggtggcagcgtatcgcaacgggagctggatattctgacctttgcctggcgctccgggatgggagatgtatttccggggctggacaggaagatggtcaacacgctgctggcgtgtgatgaatcgccctgcctggtctggtcatccccctgtaccagcacggcggcaggctctctttccttctttcggctgattcaggccattacggcgcgtcagcgtgtgacgctgctggccgaggggcaacgctgcgaaaggctggctccctgtcggctggtggcgcgggatggcacctggtatctgctggcggaatatggacaacgcatggcggtgttctcgctggatgagattcatcaggtcgttccctccactgaaacctttatccgtaatgacgccattttccgtctgccggaaaacgagcgttttctcaatgcattacctcattttcatttcatccagcgttctcttgatgcgctgtctctttaa

SEQ ID NO: 80470 - DNA, 837 bp, Citrobacter koseri
atgacccgtttagcttcccgttttggtcgggcgaatgttatccgccgtgaccgtccgttaacccgtgaagagttgttttgcgtggtgcccagcgtgttcagcgaagacaagcacgcatcccgcagtgagcgttacacctgcattcccaccatcactttgctggaaaacctgcaacgtgaaggttttcagccgttctttgcctgccagacgcgcgtacgcgaccagggcaaacgtgagcataccaaacacatgctgcgcctgcgccgtgagggacaaatcacggggcatcaggtgccggaaatcattctgctcaactcacacgatggttccagctcgtaccagatgctgcctgggctgttccgtatggtgtgccagaacggacttatctgcggagagtccttcggcgaggtgcgagttccccataagggtgatgtggtggagcgggtgattgaaggcgcgtatgaggtgctggatgtatttgaccgtgttgatgaaaagcgcgaggaaatgcaggcgctgacgctgccgccaccggcacagcaggcgatggcgaaagcggcactgacgtaccgttttggcgaggaatttcagccagtcaacgaaacacagttactgaccccgcgccgcgtacaggatcagcgcaatgacctgtggactacgtaccagcggattcaggaaaacctggtgaagggcgggctgacggggcgtaatgccaccggcaaacgcgcccgtacccgtgccgtgagtggcatcgacggggacgtgaagctcaaccgtgcgctgtgggtgatggcagaaaccatgctgggtcatgtgcaggggagagcggtcatttaa

SEQ ID NO: 80471 - DNA, 867 bp, Citrobacter koseri
atgcgtaaacaagaaggtatcaacgctatcagcaaggcaatggccgcgctgcccacacaactgtctggcaccatcctaaaacacattcactcgcttaccgactatgagccggtgatcggcattatggggaaaactggagccgggaaatccagcctgtgcaatgccctgtttgccggggaagtctcgccggtcagtgatgttgcagcctgtacccgtgaaccgctgcgctttcgtttacaggctggcgaacgctttatgaccatcgtggatctgcccggtgttggtgaaagcgacagccgtgatgcggaatatgccgcgatgtatcgccagcaactgccgcgcctcgatctggtgttgtggctggtcaaggctgatgaccgggcgttggcggtagacgagcggttttaccgtcaggtgatcggcgaggatcaccagcataaggtgatgtttgttatcagtcaggccgacaaaattgaaccggtcagcggcaatgctgaaggtctgtccatgccgcagcaacagagtatccaccgtaagactgagatactgaacaccctgtttacgccagtgcacccggtttgcgcggtgtcggtacgaatgaaatgggggataactcagatggcggaacggatgatccgttgcctgcctcgtgaggccagcagcccggtcgccgcccggttacagaaccctttacgtactacacgggtaaaggaaaccgcacgtactgacttcggagaggcggtaggtgacgtgctggattccgtcgctgccatgccttttgttcctcagatagcgcgtaccgttattcgctatgtgcgtaatgctgttgtatcggtcgcccgttctgtctgggattttttcttctga

SEQ ID NO: 80472 - DNA, 2973 bp, Citrobacter koseri
atgagtacgaccgaaaaccaaattgagctggatcttattgcccggctggctgaactaaaatacacactgcgacccgacattcgtgatcgggcatcactcgaaaaaaacttcagggagaagtttgaagctctcaataaggtgcatctgaccgatagcgagtttcagcgtctgctcgatactattattacgcctgatgtgtacaatgcagctcagacgctacgcaatatcaatagcttcgagcgtgatgatggaacaccactgaactacagcttggttaacattcgcgactggtgcaagaacgactttgaggtagtgaaccaattacgcatcaacaccgataacagtcatcaacgctatgatgtgatgcttctcataaacggtgtaccggttgtgcagatcgagcttaaaacactgtccgttagcccacgccgtgctatgcagcaaatcgtggattacaaaaccgagcctggcaatggctacggtaagacgctgctgtgtttcatccagctcttcatcgtcagcaatcgtactgatacctggtacttcgctaacaataatgcacgacatttcagttttaatgccgatgagcgcttcctgccggtctaccagttcgctagtgaagataacaaaaagattacccagctagagatcttcgccgacaagttcttagccaagtgtactttagggcaaatgatcagtcgttatatggtcctggttgccagcgaacagaaactattgatgatgcgcccataccaaatttatgcggtcaaggctatcgtcgagtgcattcatcagaattgcggaaacggctacatctggcataccactggttcgggcaagacgctgacttcgttcaaagcgtccactttgctcaaggataatgctgacatcgaaaaatgcctttttgtggtggatcgtaaagatctggatcgccagacccgcgaagaatttaaccgttttcaggaaggctgtgtagaagagaacactaacactgaaacactggttcgccgacttttgtctgacgactatgccgataaggttattgtcacgactatccagaagctgggccttgccttagacggcacaaataaacgtaactacaaagaacgtctggagccgttacgagacgcccgtatcgttttcatcttcgatgaatgccaccgctcgcaatttggtgagaaccataaggctataaaagaatttttccccaatgcccagctttttggcttcacggggacgcctatcttcgagcagaatgccagctaccagcaaatcgaaggtcagcaagccagcctgcgtaccaccgacgacttattcgaacggtgtttgcaccagtacaccatcactcatgctatcgaagatcgcaacgtcttacgctttcacatagactatttcaaacccgaaggaaagaacccacctaagcccggtgaaggcatcgctaaatccaaggttatcgaaaccattctttccaagcacgattctgcgaccaacggacgcaaatttaacgctgtcctggcgacagccagcattaacgatgccatcgaatattttgagttatttgccagtattcagacaaaaaatgcagaaaaagacgctgaattccggctattaaacgtagcatgtgttttttcccccccttctgaaggtaacaaagacgttcagcagatacaggaagatctgcctcaggagaaagaagataaccagcaggacccagagggcaagaaagcggcactcacccgtatcattgctgattacaatgcccgtttcgggaccaatcaccgcataagcgaatttgactcttactatcaggacgtacaaaagcgcatcaaggatcagcagtaccccaatacagacttatctgccgcgcaaaaaattgacatcaccatcgtagtggacatgctgcttacgggatttgactccaagtatctcaatacgctgtacgtggacaaaaatctcaaacaccatggcttaattcaggcattctcacggactaatcgtgttctcaacgatacgaagccctacggcaatattctcgattttcgtcagcagcaaaagtcggtagaaggagccatcgcgctattttccggtgagaaaatcgataacccgcgtgaaatctggctggtagaccctgcacctaaagtcattgagaatctgcaaacagccacgcaaaaactggccgactttatgcaatcacagggactgactaatgcaccggaagaagtcgccaatcttaaaggcgatgttgcaagagcgcaattcgttaacctgttcaaagatgttcagagactcaaaactcagctcgatcagtataccgatctgtctgaagcgcagaagcaacagatcgagaggatcgtgccgacagatcaattgcagggatttaagggcgtgtatctggaaacggccaagcgcctgaaggaacaacaggacaaggaccagacaccaccagaagtacaacaacttgattttgaatttgtgctttttgcctctgcggttattgattacgactttatcatgggtcttattgctaatctgactcagcagaaaccaggcaagctcaccctgaatcgcgaagaactcattggcctgatccagtccgatgccaagtttatcgacgagcgtgaagatattgctgagtacatccgtggcctgccggtaaatgaagcattaaacgaaaaacagattcgaacgggttttgaacacttcaaggcagagaagaaggcgaaagaactcaatgttatcgccgcccgacacgaactcgcacctgatgccctacaaatttttgtggatgaaattctgcgtcgccgtatcttcgacggcgagcgcctttccgaattaatggctccgctgaatctgggctggaaagcacgcacgcagaaagagctggcgcttatggatgagctgacaccgttgctacacaaactggcacaagggcgtgagatcacgggactatcagcctatgaggaagggaaataa

SEQ ID NO: 80473 - DNA, 186 bp, Citrobacter koseri
atggcagccatttttactaataacatgcagtggagtagtgaaaatttgaattcgcataccatcgcgaacagcaaattcatgttcgtggaagttaatactcatgcgagaccaaaataccagcaagcacagatatgggcaccgatgctctcaactagtgacgtaatgcctcaggagcaagcggtatga

SEQ ID NO: 80474 - DNA, 1272 bp, Citrobacter koseri
atgagtggaagcaataaacatatgctggtaccacaattgcgtttcccagagtttagaaatgcagaagaatggaccacctataatttaggccaactttcaaaaattgtaacagagagagtgggaaatgatgattgtattccatatacaatcacatctggggttggccttattagccaacaggaaaaactaggtagaactattgcaggtaattctttaaaaaattacatactcctacagcataacgattttgcttacaataagagtgccacaaaagcatacccgcaaggatatattgcatgttaccagggacacgaacgagctgctgttcccaacagtattttcacttgttttcgccccaccacaaacttagtcataccagcttttttggataatctttttattgccaacttacatgggaaatggctaaagaatcgcgttgctgtgggtgcacgtgctaatggtgcattgcaagtcaataatgatgacttaatgaaagtccccgtaccattaccaattggttcgcagtcgctttccgaacaaaaaaaaatcgccgactgcctgtcttcgctggatgacctgctcacagcagaagtccagaaactggatgcattgaagaaatataaaaaaggcctgttgcagcagcttttcccccgtgaaggcgaaactgtgccacggatgcgcttccctgagtttctgagtagaggcgcgtggcttccaaaatctattggtgactcatgccagacatttagtggtggtactcccagttcaacaaataaagtctattatggtggtgaaatcccattcattagatcagctgagatcaaaaaatatgaaacggaactctatttaactaaaaaagggctggagaactcagcggcaaaaatggttaagaaaggtgatgttcttgtcgcgttatatggtgctaatagcggagaagtttcgctttcaaaaatagatggcgcaataaatcaagcgattctttgcttgaggcatgaatcaaataacgcatttttgtatcaatatttaatgcataaaaaagaatggattatcacaacctttcttcaaggaggacagggaaacctttctggagaaataatcaaatctatcaaacttttcttccctcaaccacctgagcaacaaaagattgccgactttctcttggtttttgatgaccaaattgatattcaaacaggaaaaatcgatattctaaggaaacacaaaaaaggtcttgtgcagcaacttatccccgtagttaatgaggttactgcatga

SEQ ID NO: 80475 - DNA, 1173 bp, Citrobacter koseri
atgaaatcgaagcatatttttgcggatctttcagtgttggccgaccagttgcgcgacaaactagagacgatgaaaactatcctgctctatgcctataacggtacagggaagacacgactgtcgatggcgtttaaagatgcaggtaaaaaaacaattcaccgccctttttcggttggtgatcatgtaggccagccgcctacaattaccgaaacgaccggcgataccttatatttcaacgctttcaccgaagatctgttccattggaacaacgatctggaaggtgatgaggatcgccgcttgctgctcaatagggattcgcgattttttcagggactgtttgaactggaaatggacaaccgcatacggccgttgttgcagcgttatacagacttcgactttcgaattgatacagaagaatgggcgatacgcttttcacggactgtggatggtcaaattattgataacatcaaggtttcgcgaggagaggaaaatatcttcatttggtgcttcttcttagctatcgtacaattagcgcttgatggtgctgatgcttaccagtgggtaaaatatgtctacatcgacgatcctatatcttcactggatgagcataacgccatcacagttggtagccatctggcgcaactactgaacaaggctgataacccgttgaaagtgatgatctcgtctcatcatcccttattcttcaatgtcatgcacaatgaacttgatgttcgtaaatccagaaaggtcgcagcatactttttatcaagatccagagttgatggtagttattctctggcctatacaggtgcgacaccattctttcatcatgttgcgatactgaccgagttgtataaagcggagcaatcaggcgagttatatacctaccatttcaatatgttgcgttcagttctggaaaaatcagccagcttccatggtttctcaaacttctcagcctgcattgcgcaggatgcggatgaccctgaaagaattttacattcgaggctcatcaatattctgagccatggaaactattcgcttttcgagcctcagcctatgctcgatgaaaataaaacttatttcagaaagattttgcatgatttcctgaagcgctatccatttaatcctgatttatttcctcaacagattgaggaaggtgaagaaaaactatga

SEQ ID NO: 80476 - DNA, 1608 bp, Citrobacter koseri
atgactgagtttgaaaaacaaaaactgggcaaaacgctctggaatatagccgatcaattacgcggcgctatgaatgcggatgattttcgcgattatatgctggcatttttattcctgcgatatctatcggataattacgaagccgcagctcaaaaagagctaggggtagactaccccaaacagaaagaggggcaacgtcaaccaccgctgactctgtggtatgaacaaaatgagcaggatgttcctgagtttgaaaaactaatgcgccgtaaagtgcattacgtaatcgaacctcagtatctttggacgagcattgctgagatggcacgaacccagcatgtgaaactgcttaatacattacaggcaggttttaagtacattgaggaagaatcgttcgccagtgtcttccggggtttgttctcggaaatcaatcttgcctcagaaaaacttggcaaaacatacggtgagcgaaatgaccgtctttgtaagataatcaaagagattgctgatgggttgaagcagttctccaccgacagcgacacgttgggggatgcttacgaatatctgatcggccaatttgcagcgggctcaggtaaaaaagccggggagttctacacacctcagcatatttcagacatcttatctgtcatcgttacgttggatagccaggaacctgccactggacaacgatcacacctagacagcgtgtttgattttgcctgcgggtcaggatcattgctcctgaatattcgcaaacgcatggggcagcacggtattgggaaaatatacgggcaagagaaaaatatcaccacctacaacctggcacgtatgaacatgctcctgcatggagtgaaagattcagagtttgatattttccacggtgataccctactcaacgattgggatatgctacgcgaaaccaatccgtcccgaatgcctaaattcgatgcggtggttgccaaccctccattcagctatcgctgggaacctacagaaacattagctgatgatgtgcgctttaaaaaccacggcctagcacctaaatctgctgctgacttcgcctttcttttacatggattccattttttaaaagaagatggcgtaatggcaattatcctgcctcatggtgtacttttccgaagcggtgccgaagcacgcatacgcacgaagctgctgaaggatggtcatattgatacggtaattggactgcctgcaaatctgttcttctctactggtattccggtatgtattctggtgctgaaaaaatgtaaaaaacctgacgacgtattattcatcaatgctgccgaatacttcgataagggtaaacggcagaatcagatttcgtctgatcatattaaaaaaatcattgatacttacaagttccgtaaagaagaaccacgatacgcgcgtcgcgttagcatggaagaaatcgaaaaaaatgattttaatttaaacatctcacgctatgtaagtacggctgaggctgaagaagaaatcaaactttcttcagtacatgctgagttggtttctctggataaccagataaaatcagcaactcaaaaacataacgaatttctaaaagagttaggcttacctcttttaccgtaa

SEQ ID NO: 80477 - DNA, 624 bp, Citrobacter koseri
atgaatctctacgatagcgagtatggaagtcatgttaaatcatacaaagaaagaattatcgaagttattaataaagccgttaaagaacacggacgtacactggcaatacgggtggatctgcatgacccggttattctggataatggtgataacatttcctgtatcgcgaatactgattcaggagctatatcaagatttaccaattcactgaaagccaaactggcagcagatgaacagcgcaagcgtaaagaaggtaaacgggtacaccggaatacgctccgctatgcgtgggtgagggaatttacccagaatggtaagcgtcattttcacgtatttctgtttctgaacaaggatgcttactaccacttaggggattttaatctggatgaagatacgctaagaaccatgattacatcagcatggtgtagcgcattaaacctgactcccgaagaggggcagcacttggtgcagtaccctgctaatggtaaatataccctgaaccgtgatgatattctcaatgatatttatcccggcgatttactgaaccggattgattatctcaccaaagtgaaaagcaagatctttgatgacgggaacagatcgtttgggtgtagtaataattaa

SEQ ID NO: 80478 - DNA, 1413 bp, Citrobacter koseri
atgctgtgtggtcgtcctttccctgtgcatgtgttcccgcagatcatcagaaatgcggtatatgaagtggaacagcacacgcaggctcctcaggctttgattgccgcatcggtactgggggttatttcacttgtctgccagaatcggattgatgtgtgccgactgaataatctgcgtagtccggtatcgcttttcttactgacgctggcggaatctggtgaacgcaaaagcactgtggacaaactattgatgaagccattgtatcaactggaagaagaatggtttgaaaaatatacccaggacctgattgtctggaggaatgcggaaacggtttttaatattgaaaagaaagccctgatgtcaaaattgaaatccgatattcgccgtaataaagatcactccacaacgaatgaacggctgaaagagctactggccgcgtccccgaaagcaccggtcaggttcaggcagatatacaacgatgccacacctgcggcgatgaaagactctctctgtggacgctggcggtccatcgggcttatgtctgatgaagctggcaccatttttaacggctacgcgctgaatgaactgcctttcatcaataaaatgtgggatggcgcaatgtttcccgtggaaagaaaaagcgagccagataaattaatcaaagatgccagaatgacgctggggctgatgattcagcctgatgtgtttaaaaaagggtatctggaacgaaaaggcgatgccgcgaaagggatcggattcttcgcccgatgtctgatatgtcaaccgggttcaacacagggctacagacaaattaccagtccggttgtctcaagtgagcatctgccggtatttcatcaacgactgatagacattgttaacgagagcattgccagaaatgaggaaaatgagcgtcagtgtctgcgtttctctcccgaagcagaaaaacgctggctcgaattttataacaaagtcgagtcagaaatggggctgattggcttcctgtctgattttaaggattatgcttctaaaatggcggagaatatggcgaggatcgccgcactgctgcattacttcaacggcgatgaaggagaaatatcccttactgccgtggaagccgcagtagatataatcgcctggtatgtggatgagtatgtgagaattttctctaaaccccagacgttgctgctggtaagttcagaagcagacgaactttactcgtggataaaagattattgctacaggtgtgtggtgccgtatatcaggaagacaaccatcctgcaatatggcccgaatcggttcaggaaccggagtaaagtgaatgaactgctcagtacactttattcgcaaaataaaatacgggcagagaaaagagggaaaaccattttcatacaacctgtcgatggttttatataa

SEQ ID NO: 80479 - DNA, 237 bp, Citrobacter koseri
atgagtacaacatttatcccccccaccccggaagaacgcctgaaaatcctgcgtgattacggcgagcaaggtgatcgtctggtgcgtgaacgggagcgccagcgtatcacgtccatttcccgctctaccgcgtggaaactggaacaggttggtaagtttccacagcgtaagtctatcggcctgaaatcctgcggatggctgttaagtgacctgctttgttggatcaatgatcgttaa

SEQ ID NO: 80480 - DNA, 192 bp, Citrobacter koseri
atgccacaacagatctggacacgttcagcactggcagatgtgcaacggttttaccgttttctgacggcaaaagatattgatgcagcaaagcgagccgccagagcgattcgttccgacgttaaaatccttactcatcaaccttatttcggggaccagccgaagaagtggaacctgagtaccgggaatggctga

SEQ ID NO: 80481 - DNA, 225 bp, Citrobacter koseri
atggcagagaaaaaagaaaaacaggaacgaatttccaaaccagaaagggtcgctctgtatgtcatgctgaatgaacattaccgtgacagtaatggtaatattaattactcaaaaatggcgggaatgctcacggcagatgccagccaatacggattcagccagcaattcagcgacgacactatcgctgaatggattaaacgttttgaggataagaaaaaaaattaa

SEQ ID NO: 80482 - DNA, 633 bp, Citrobacter koseri
atgaccatcagaaaaacgtgttactggcgtggcttttatacgccagtaaccatgtgcatgtccattataggtataacggcacaaccccaagtcgccctccagaagtcgggcctctatttctgcatctttctccgggtaaaactgcctgattttaaactccggcattgcctcgtgttgataataatcgactccagtttttattttccgtttccagtgctccagaagaaaattgtctccaccaatatatctgacgattcggcacggcaacgcatccagcctaatataaagcgggattttatgatcaagccagtcgttaatcaggccgtcaggatctcgttgaaatttttcagatgccagaatcagaggataaaaatcaggctcgttttccatcatgcatattcatcattttgtgtaaggcttgcctgcgataataccatgtattcaggtattcaacctctctgccaggcggaccatcagatccatacgttcgtggaaaatcgccactaccagcgcaagctccctttctcgcggcagacagaagacatagtggtgttcacaatgcacggatgcgtaacatcgaccagagttcgctcatgtccttgcaggccccatcaccagcagcaaaaccgctaa

SEQ ID NO: 80483 - DNA, 147 bp, Citrobacter koseri
atgaaaaaaacgcctgtaacaaaagcccagatctatcgcaccgttgccagctccaccgcgatagaaaccggtgcttcagtgcaaaaaattgaacagcaactcaaaaaaaatcaggcacaggcgaaagccgttggcctcgcccgttaa

SEQ ID NO: 80484 - DNA, 615 bp, Citrobacter koseri
ttggcaaaatatgagcttaattcagcagaagagcggtatcagccgggttctggggatatggtgctggctaataagctggggatcattgacgaagaggaaatggaggcgctggagtctggcctgctgctgatgctttatgaacagctatttatcgaaggccagccgccagcggcgctgtcttttgagcatatcagtggctggcatcgccaatggctggggaatgtgtacgactgggcggggagattgcgtaatgccaacttaactaaggacggtttccagtttgccgctgccgacaggattccgctgctgattgatggtttcgagaagcagtttctttcccggtctggtgagctgaaatccctggctcgttcggagctggttcgttatctggctgaatgccatgcggaatttattttgatccatccattcagagaaggtaacgggcgtctgtcgagattgctttgcgatgtgttgtcggttctggcggggaagggcttactggactacagcctgtgggatgagcacaaggcgttttacttcaaggcaatacaggcaggcgtatcagggaactacagccccatgatgcaactggtgagcgacatcttgccagattaa

SEQ ID NO: 80485 - DNA, 1242 bp, Citrobacter koseri
atggcaagacaaaccaaacctctatccgttaaagaaatcgaatctgctaaacccaaggaagcggactacgttctctatgatggcgatggccttgagctactgatcaaatccagcgggagtaaaatctggcagttccgctacattcgccctgtcaccaagaaacgtgcgaagaagagcataggcccctacccttcagttacgcttgccgatgccagaaactatagggcagagtctcgctctctcctggcgaaacaaatcgacccacaggaacatcagcaagaacaacttcgcagttcgattgaagctaaaaccaatactttccaactcgtagctgaacgttggtggaatgtgaagaaagccagtgtgaccgaggactatgccgacgatatctggcgctctcttgaaagagatgtctttcctgcaattggcgacattagcgttacagatattaaagcacacacactggttcaggccgtccaaccggttcaagccagaggagcactggaaaccgttcgtcgcctgtgccagcgcattaatgaggtcatgatctatgcccaaaacacagggctgattgatgctgttcccagcgttaatatcggtaaagccttcgagaagcctcagaaaaagaacatgcccagcattcgaccggatcagctaccacaactgatgcagacaatgcgaacagccagcattggcctttccacacgctgcctgttcatgtggcaacttcttactattacccgccctgccgaagcggctgaagctcgctgggaagaggtagatatagaagcgcgagagtggaagattccagcagcacgcatgaaaatgaaccgcgaccatactgttccattgtcagatgaagcaattgcgatactggagatgatgaagccgttaagtgaaaatcgagaatttatctttcccagccgcatcaaaccaacccagccgatgaacagtcagaccgtaaacgcttcgctaaaacgcgcaggttttggtggggtgctcgtttcacacggtctgcgatctatcgccagtacagcccttaatgaacaaggctttccgcctgatgttatcgaggcagcactagcccacgtggacaagaatgaggttcggcgtgcttataaccgcagcgattatcttgagcagcgacggccaatgatgcagtggtgggctgacttcgttatggctgctgatcgcggaagtatcatttatggcgggacaaaaggaatgcggttggtcgtgtga

SEQ ID NO: 80486 - DNA, 4611 bp, Citrobacter koseri
gtggagttttctgttttaattcgccccttcttgtcaatgggcaaaggcatctgggcccagattaaacgtccgttagcagaacggaaggctctgacgcaccctgaacaagaaaaacattcactctctagtgttatggaaaaaacgttagtgcatcttggcgtagaaccatcggcattgcagccaacctggaagcgttgggttttactgctagagagtaagattgttgccacggaaacattttcaatgcctcacgttaaggagtggcttaatgtcgctgaggttcaggaacacctcaaaaacctggcagtacaaaaattaaccggcaacataaatccctttgagagtgagcaggtattaattgaaatctacgtagctaaaacaggggaaactgaacacagggcgaaagacattatatatcaatcagttaatgccatcaccgaaggtactcttagcggtcttaaagatccggagttgggcatcttaatgagaattcattctcaaacaatgcatgaacgtttcgaagaattaaatcgacggctttttccagaacaaatgttctcggttcagcacctttgctctgttaatgaacaatggttgaaagaaacactgtcaaataaaatccgctcaaaaacaagacttgggcaagtgctatgcccgggtgactctcaggtcgtgcttgcacgcactgcgctcataaagcaattttccgacgacctatcaaccttacctgaaggcggagtaatcgtcgtaacgggagcagagggtaatggtaaatcatggctagtagcacaacactggctgtccgttcctgtaaagccactaacagcgtttattagggcggaagacatagaggaaccttgtaatgatatcgctgctgtcgtcatcaacgccctttgtcgtagttgtcagggagatctatctcttcacaccaaattctggcatgagcaattcaggacgtggtccgatagcgaaaagcgccccgcatgtggattgattgtcatacttgacggtataaatcaacgtccagcgatccgctgggcacatttcatcgacaggctgagcgaattccttcagtgtctgggtggcaaactgattgtgacgtccagaaagcattattttactcaaaatgttgaatccagactggcaatacccgttataaaaaggcctgtcccggaatggtccgcagaagaacgggactcaatactcgctttacgccatatcagcatcgcaggaagaaaactcagtgagagcgttgcaaccagcctgcttaatccacgcatgcttggaattgcattagaactgtttagtgcagaacaattgcatgatttagcagagctaagtgtatcgttgatgttgtttgagcacattaaagtcagccaacgagatagttatgaactctctgcagagctattcagtaataagctgcgttcgttcggacaggaagtgcttgaacggatcgaaagcaaagacaatgaagatattgatattttcaatgcagaacttaacggtatttttgaaggagggttgcaagccgttattgacgggcgtttttttacccccttgcctgaagacacaacacgctatcgtattcatcctgaaggacttagcctggctctggggatggctatccttgatattgtcaataaagcagccagaaatcataaagatcttgatgaggtaatggcctccgtcgtcgagcccgtcatcgcgcttgataagacgtcggataccctctttgcagctctcaccattgccagcttggaaaggcagtatcctgttgcaagcggcgttgccattctagttagttttgccggactgcaaaatcccgacgcgctgcttacccctgcatttatggctctagcgcgacgtcggcctgaaatattcatcaatgcttgtgaacatcttgcactacgtgatatcaatctcccacagcattactggattgaagatgcgctcctgcacgcctcccgacacacatcctccgcggaaaaaattctgacagcagctaataactggcttgtatggagtccaactcttacccctctatggtcagtggggggcgttcagcgtgatgctgacatacagactgaaattgaaaaacggcaaaaagaacgtgagcataaaattggcctattgtcgcctgaagaaacagaaattttcagaacattagtcttaaaagacacagatagtttatcggcactgcattcactagcaatgaagctttttgcaggaaaggctttaatgccgcatattaatgcgctagttaaatggaattttgcttctaatataaaccaggattatggcgttccctggcagacattccgcgacttgatcgcgtttaactcaattgactggcaaaacgtccgttcacacttgcgggatcaatggacgttttttgtacataacaaaagttcccgtacaggtaaatggacggctattaatcttttgatggcgacaggtaattctgacgatgcgcaactcgccgagatgcttgcacaccagttacgtgacaatagttcggacatcaaaggttggcatatcaatgaatcatggtgtgaagctgacccctgtaatccggctaatccagaatccagcaatgtcagccaaacggcagataaacacagcaaattggatgtaagcaagctcttcaattccttcggcgtcggttatcaagaaacattctttacgggggcaaccacctctcttgcccgttaccagcctcaggtagctatcgataatcacctcaaacttgctgaagatattctgtgccgaagcggcctcccactacgacagggtatttttgcactcttaccacatagggcattaataactcctgatatcgcaagaaaactcgtaaaacgagtgaccagcagcaccaaagacgaccggtcagcatggtcatctctgggcgaggaatcggaactgatgcagcagttccaattgattctggcttttcatcaattgagtgttaatgaacaaatctccgttttaaggacactccgctatggagataaacttattatgtcgctcagtgacagcttaaaaacactggactggcaggatactgaaaacaacgtacttgcggcgttagctaatggcgatacggatgagcagctaacatcgttactgtttcatcctaagactggcccgttacctgcgagcctagtaaatgcccttccgcaattgctcagtagtgcatcgaaaagcgtccgacatcttacgctgaagatgctgataaacgtgaatgacccgattgcgttacgttgcggtgccgagatcgtgatgtctgaatcaatcacaccatccgatcagtacgagcagtggcacttctcagccttgctgctcaaggcaattaatcaaaacatcatcgggtgggaagaagggagaacgcacttaacctatttccatattgctcaattggcaagcatttataacggagaaatcgctagagatgctgcgcagtattttgacgtactcttgaataatgcctttcagcagacagttgatgtggggaccctgcagcttaaactgcttctgaggtcgacagacgacagggcttatacatttcaccatcttagtgaggttgtcgttcctaagcgagaggatggtgaagacatgagatcactaatggcacttcaggagatgggtaacttcgaaaagcaacagcaacgtattcaacataattaccatgaaatcaaagacgtacttaccaaactaaatctatctaatctgactaaccattattatcctaacgacattgcagctctggtgagggctgaacctgagcgttcacttgcatgggcaaacctgttccttgataacaaaaatgtggatgttctccaccaggtcagacatataggactaacacttgcacaggccatctcggctcagcatccagaagtgtcagttcgtctttttgaacgacttgaccacattgttcctttctgtcgcgttgtgtttactgaggccgagcttgatctgtgtgctgttgcggtctggtcttcgttcgacagccctgagattgaggctttgcgctggcgtcgattagctctagcggaaaataacaatcggcttgcccatgaggtttgggcagccctgttctgtcagcagagtgaaaaattactgcaatacactcggaagtgttgtaactcatccttgcctgtgctccaagctaggggcatcatgatggcggggtatttaggtcagaatgagctttcggacggcacgctcaaagcaaacacctattcgggccttctccaaaagtccttaaaaagtgcaagtgactcctatcagcgtcatttatggacgcgtcactggttcaaaatgatgcagcaggcaccctccgcagaatctttctggtgtgcttcagttatatttttgcaagtcgtcgatgaaagattcttggcaatcgggtatgaacacactgataacagagatatttttcagcaatactggcctaccgttttgtcgaagctgaattcccgtttccagaagcctagcaacaaacgaatggagcatttgtttggaggaaaagcaccgtggccaggttttcttacatgcccaaatttaagccgtcagcatgatgagggtgacaccgtatgcgggctttaa

SEQ ID NO: 80487 - DNA, 3852 bp, Citrobacter koseri
gtggcaatctttgacattgaaaaggacgaattacttcgactttccgatactcagctagaagagctgatagctcggctagcagaagctgaagtggcaatgcacggccatagcccagcatgtgtaaattggtcaggttcaattacagcccctgacggaggaattgacatccatgttcaggttccaattgatcaactgaaggctggctttattgtaaggcctgatacggtctttcaggcaaagaaacataagatgccaaaggctgcaattgagaaggaaattaccaccggtaaagcgctttcacccatcatatctgaacaagccagaaagcaaggtagctacatcattgtcagcctgggtgatgattgctcaccgtcaggaaaggcggatcgtctcaaagcgatgagggatgcagtaaaagatgatcctaacaaaagcaatcttcatctcgatttctacgaccgttccaaactcattcaatggcttcgccaacatccatcagtcatgctgtgggtaaaagggaaacttggacaagggtattccggttggcaaccctatggagcctggagcaatccgccccaaggtgttacagacactttaatctcagccccaggtgtaaccattactttaccgtcgggaaagggacaaaaactcaaaattgatgaagcaattagcccaatgcgagcactgatccgttcgacgaataaggcagttcgtattacaggattgtctggtgttgggaagactcggatcgttcaggcactctttgatgaaactgttggaacagatgcgcttgatcggacagtagctatttatgctgatactggctctgagccagtaccgtcagctacagcaatgcttgataagctgctcgcggaatgccgacgagcaattatgatccttgataattgcccatcagaactccatgcttcgcttgccagaaaagtatcagctgcaggaaaagaagtaagactcatcacgatcgagtacgacattagggatgacaaaccacagacaactgaggtcatccacattgagacagacggtccggaggtggcagagcaacttcttatccgtcgcttcccttctattggtcagaataatgcccgtcggattgctaagttcgcagatgggaatgcaagagttgctttggctatagcggagagagtagaggaaggtgagagtttagccctactttcagatgcgcagttgtttaatcgcttgtttgaacaacgtaatcatcccgacggtcatttacgggagcaagctgagatattatcactggtgtattcgttctcggtatctagtccagatgctgctaccgatgaactagaaatattgggtgcgctctctgggtattccaaaatccagttattcaaagctattacgaagttgacggaacgtcacgttgttcagaaaagatcccactggagagctatccttccccatgccattgctaacaagttggcaacatctgcactcaatagtattccgatagatcgacttcgggcgacgtttgaagctccgggttgtgagcgtttattaatgtctttttcgcaccgtctggggttgttgcatgaccatcctgttgcgaaagaaattgtagaagcctggctccagccagaaggattgcttgggcaaattttaaagttggacgaagagtcggtgcgtatattggattatatcggtccggtcgctcctgaagctttgttaaacctgatcgaagcagaacttaccgcgcctgactttaaaggcattgaaccgacttatgatccgcggcggctagccattctcaatcttttacaatcgttggcatatgaatctaacgcctttgacagatgtgccaggcttctgatccgtatggcagactatgaagacgagagtaacaatcacgactcagctcaaggcaagatcgtgagatttttccaggcgtatttatctggcactcacgcttctttaaaccagcgaatcatgctgatgaatgaatgtttctcatcaggcgtaaccagccgcagagcgctggggttcaaaatgttatctactgctttggaaggctcacactggacaggcgttggggtgaacgagtttggtgctcgccccagagattatggttctgaaccctcctatgttgagcttgtggagtggcgtagtgcgttcattgacgttgctgtgcaactgggtacctccggcgattctgaaattgaagcctctgctcgtgtaaacctgtctgacgcatttcgaggcctttgggaccaggatgcgatgagggaaaaactcgccgatgcagctcgtaaattgcatgcttactccccttggggagatggctggaaagccatccgttcaatgatttatttcgactatacaaggcctacagatgccgaaggggttgagccgatacctgaaagccttgcagcactggagaaggagctggagcctagcgacttagtagcggaaataatgacttacgtacttagccgagggggagactattgggcgcttgatgctgatttggggcatgacgaaaccgaaaagtttagcgcagctgagaagcggcttgaaaccaaagctatcctgttaggacgagattttacggcatcaaatcataagcttgaagaattgggccaaaatttgttctctaccgattggatgccctatcgcattgcatttggaaaggggttagctgacggagaatatgatctgcaaattggctggcagcagcttgttaacctacttgatctgtatccagggattaacaaagattttgcagtctttgccggtttcatcgaacaaacagatgctgtggctccgacgttagctcaagaatttctcgaacaatgttcacaacacccagaacttcggcgggttatagttggtttgcaccctcggcgagagtttacagaaactgatttaaatcgctgtatgtcagttctggatgatcctgaaataagcccgcacatatatgggccaattttgtggcgggaccaatatgttaatttgtctgcaggtcgtgttattgaacttgctcatcgtctcctgagtaaaataaatggtgacgatgtagtgttggatgctttaagtatgaggttacctcgtcaagagaaggctgaggatacacttggtgctgacctgcggcagattggtttaagagccgcaatgattagagtccaaagagatcaccgtgactctggtgggtctacagattatcgcatggaacgtgtcgttggcgctgctctgcgatttgatggttatgagtcacaaaaacaggagtggctgaacacgattttttctgttttagatgagcattatggatattttaattcatttggaagaaccattgaaacgactgccgcattgatgccagaagcatttctcgatcatgtttttgagggtaacgaaaaacagcgacaacgacgtttattttttatcagtcacggaagcttacgtcggttgcctctttctaaaattgatgtggacgttttaattcaatggtgccgcgccagaaatgatcccaatatttggcctgctattgcaactggtgtaacactttgggtgaaggatgatgaaaagagtgtaaccaccatacaggaagcagctttagctctattagaggcctcacctgaaccaatggttgtgctggaggcctttgctgaacgcattagcccatcatcctggactggaagtttgtcaaatatcatgcaacttagagctgatgctttcagtatgttgagcaagcatgaacgtccagatattgctaaagcagccagaatagtgcatgaaaaaataattcattggatcgaacgccaaatagaacgtgagcaacgggaagatagtgaacgggaacagcggtttgaataa

SEQ ID NO: 80488 - DNA, 912 bp, Citrobacter koseri
atggaatctgcacgtgataaacgtaccggagaaaaagtcgaggcagaagatctctggctgctagatgatattgataccagtggctatgtatgctggggatgtgggattgagatgtatccttctgcttggcaaaaaggaagtaagaaaagaccttcgtttaataaaatgcctggaaaagagcacattaattgcgatgctgatgcagaaagcacagtggttaaacaggggcagaagaaaagcgtccgccgcatgttagatagcgcaccgggtttgatgcctgcaggattaaaactgattgaaaatcgacccgttgttgatcctgacactactggtagcaacaacaaatccaatccaatacgttctacaacatcggcatccagcgagggaaatgctccagcgcggcaatcccgccgcccggttaatgctattcgccagatttgtagggcatttattcgcttcccgtatgaccgtggtatgtcattaaatatccctagtattgatgccgatgcttacatgaccgcgtttaaaaaacttaaagatccggttcagccttaccctgagcaccgaattttttattcacagttgttgtggcagaaatttgaacaagacgaaaaccgaattgtcattccgctctcgggagaatgggtaaaagacgaatctggtaagtttaagccctcgcgtagctataaactacacattgagtggggagactggtcaaaagccaaaaagactatgcttttgaatgagcttgaaactgtgcaggaagaagcaaaagaagcagtaaataaaaaagctaaagagagagctcaagtcttctttatcggtgagcaaagcactgagaatccggaaatcttctacgttaatgattaccggttaatctgcgcgattatgggatatataatttacccctga

SEQ ID NO: 80489 - DNA, 867 bp, Citrobacter koseri
atggatttttttgatgatttctatctgcaagtctgtacggcttgtgaggacaaacttcttgagctggaatggaaacttgaagtcgaaaaaaaggagagctaccaggatgttctgcgtacttacaggcaaagagcctatgataaaattgaagaatttaaaattattgaattttcaaaaatacaatcacaatattttgtagatatgaataatagcgacaatatacgttactcacaagagtttataaatgttgatggcataatggttgaaaaaccttttgtttacaagaaaacatatgcagaatctcggcttgaaacccgagaaaaaatggatggtcataaactgacaggattagcaagagtatatgatgcacattatgaatatatatatctgtgtatggctttagaagatttttactgggcgcacttccaatattcattgggcaataaaaaagaaagttgtaagtttcttcttgatgcttattcttatatgaatatctgtgtttcgcaagatgataaccgagaatcaccggattttcatcgattaaggagtgactttgatacagtatgcagaagagcaaactcaagcactggagggagaaataaacttgcagaacttgaatatatgaaagatacagttattaccttccttaggagtattccttcagatgtcgactggaaaaataaacgtcaacttcttgaatatttaatgccctctctttgtaatgatgataaaaagtttaacccagataaatggataaatgatacaggcgatagagaggaaactatccgccgcagacttaataaatggtctacaggtgatctaaaagtagagtttgataaggtcctaaaaaacaatactaacaattaa

SEQ ID NO: 80490 - DNA, 240 bp, Citrobacter koseri
atgttacaaaaccacctctcctcacatacatccagttacgcaaacattcctgattcaccgaggatcttgaggctaaaagatgtcatgaaaaaaatgggtatttcacgctcaaccatatacgactggcttaatccaaaatcgccacgctacgatgaaacatttccaaaacaacgacaactgggaaggcaatccgttggctggctggagtcagaactgaacgaatgggtaatgcgacgttag

SEQ ID NO: 80491 - DNA, 885 bp, Citrobacter koseri
atgtctgattccactgaacggggcattaatgtcctgaagcaacatttatccattcttcctggacatatctccaatttggtactggagcatatacgccagagcattcattacgaacccgtgattggcatcatgggcaaaacaggtgtcggaaaatcctcgctttgcaatgccctttttgaacatcctctcagcccagtcagtcatgcagaaggctgcacacgtaaacctttgcattttaccctgaacgcgggagggcgcagcctgacgctggtcgatctgccgggcgcaggtgaatcgctgaagcatgatgagatatatcgccagatgtaccaagaacagttaccgaagctggatctcattctctgggtgatgaaagccgatgaccgggcctgtaccacagacgaagagttccaccgttttctactggattgtggtgtatcgacagacggcattgtttttgttatcaaccaggctgacaaagccgagccatcacaggaatgggatcgtgaaaaaggatctccttcagtggagcaactcatgacgctcgcagccagaagtgctgccgtttcccgccagttctttaccccttacccggtgcatgctgtttcagcaaaaaccggttacaacatgtctcgcatagtagaaacaatgatttttgccctgccaccagaggctaccagtggcgtctttcgccagatcaggaaagaacatcgcaccaaagaatcggagacgaaggcccgaaaggatttcgcggatttgttgggagaagtattgagcaggattctggaggccatacctctccccaacgtgatacgcaacggactgggagtgctcagagaagggctggagaatgcagctaccgcaatatggcactggtttttctga

SEQ ID NO: 80492 - DNA, 720 bp, Citrobacter koseri
atgaacaatacatcaactcgttatgaccggtttgccatcaggctaacacagattatcagcaggttactgtcaggagagtctcttgaccttaaaaccctggcagaagagtttggagtatctgaacgaacgctgcagcgagatttccaccagcgactactccaccttaatatcgtcagtgagaatggacgctggcggcttgacgggaaacgctttacagacagctcgttagatgttctggcatttatgcgcaacaccggtatcactcaattatttccgtcgcctgaccgcaggttgatgcattacctcacaggtgaaacatcatattccccctgcctaatctggccttcatcgcattctgactcggttgtgtcatcagaatgctttcagcggctgatacaggcggtctgtcagcaaaaccgtattcatttgctgactgacggtgattttcacacagtctttgaaccttaccgacttatccacacggaaggtaattggtatttagttgcctgtcaggccgaaataatcagggttattccagtagccagcatcaaccaggtgaaattaaccacagagagttttgtacgcagggatgacatctgccatctcactgcgggtgagcggttcatcgcatccttacctcattttccttatatccacgatgtaatgaattcggctaatcatcgttcatgtaaaaaatattattcatcaaataaacagtag

SEQ ID NO: 80493 - DNA, 471 bp, Citrobacter koseri
atgaatattgtaaaaacgaaagtatttttatatctgctcatattgttgagcagttattcgcaggcctgtcaggaaaactgggatttaaaatgcacacttgatacgggtgaggttatgaccctgagtcataaaaaggacaccgtatatatttactttgaatctcaggataagagttcagataaaggtcgcacagttatcaaactggatacaaattcaggtgaagctcaacagtccatcacagtaaacgatgttactgacagcagagtctttgtattgcgaggaacaggagaagatatagaaggtgctattgcgatcgcttatgaagagtacaaagatcagcccgacgctcatatcagtgtcatgaaccctatgggtaaagaaattgaaagccacgcttgtttgaccgatacgataaataccaggagcaacttacttcataaaggcatcgaacatgtgcccttcattcattaa

SEQ ID NO: 80494 - DNA, 720 bp, Citrobacter koseri
atgtctaaacaaaaagtacttactggattgtttatcggctgttcaatctttattctttctggctgtgatgacgtatccgcttcaaacaatcaggaaattataaaatcacaggtattatcaaatatcgattcaaccagaaccctggggaccgcattagagcatcgtcagcgatgtgaatcctttcaatgggaagatggatccgatgagcaaggacgcctaaccgtaacttatacgtgtgatatgtcggcatctgcgactaatgatatctggaaaagggaaatgactcggtttgctaatggctacgccagtttgattgaaagcgcaaagcgctctatagatcaatacaatgaggcctgtgtcgccaatggaagtgatccttattgctttaagaaagaaccagacaactcaaaattaaaagaaggtttaagcgctgctaaaaaaatgactgaaaataaaatcatcaaagttaagcaagttattatctggagcgttttgcctggtacagaaaaatccgtccgactgctctcagcaaaatattattttgattttaataatgactctcagagctgggccaaccaacaaggagatagccttctaaaagatatttacaacaacaatgagaacaataaccccattataggtttaatcggctacgaagcagctaaaatgaactgttcatatagggcagatactgctgcctgtaattatttaaaatggtag

SEQ ID NO: 80495 - DNA, 279 bp, Citrobacter koseri
atgattaggtgccacctgaacagactgatgggtgaacgcagattaaaggttgctgatgtggtacgcgataccggtcttccccgtagtactgtcacagcgctctggaaagataacgccacccggattgagctgccagtgctaagcattctctgtcattattttaattgtgatgtcagagagttactggaatttagttctgatgaaaatcacgttgaactatctcgtccaggaagggattcaaataatgtcatacctcgtgtctggtttatgcgtaaataa

SEQ ID NO: 80496 - DNA, 1413 bp, Citrobacter koseri
atgaatacgaacccgattagtgcgaatttctcgaaacttgttttaccaaaacgtttcgaggaggtaacaaataccatacaagccataacgcatgcaccgacagagttgatcgcaggaatacagttggcggtgatgtcacatgcttgccagggggtggtggagtttgaacacagtgacggaagaagaagccctgtatccctgtacagcattattctggctgaatcgggggagaggaaaacggcagtgctcaatctgttgcagaaaccaatacaagactttcagaaaaaaaagttgaaggactatgaggaggaaatgaatatttatgaagcggactcacagtcatggtgggccatcagaaagaccatacttcgtcaaatcagaaaaaaaacagacatgggtgaggacagcacatttgagcaggaacaattgcgggagcactttacccatcaacctaaaaaaccaaagcgccccaagttactctatagtgatgcgacacctgaggctattgtccagggactggttgaaagcataggtacgtcaggtttaatctccgatgagggcggtgtgatttttaatgggcgggcgatgggtaatacgcctcttttcaatcaactatgggatggtggaagtgttgatgtggagcgtaaagggcatcgcctggccattgatagtgccagacttatggcgcttataatcacccagagaaatgagttagtcctgttcaggaaaaaacatggtgcacgtgttcaggggaatggtttttttgcccgttgtctgtggtctgtaaccacatcaacgcagggtataagaactcatcaacctgatgttcaggttgataccagcgttctggataaatataacaaacgagttgaggagttacttgaacaaacgcttgctggaacaactccttatgttctgcatttttctgctgacgcggagagttgctttgcacggtatcaaaatgaaattgagcaaaggatattaaccgagaaaggaaagcatgatgcacttccgggaattttatcaaagcttcctgagaatgcggtaagactggcagcattaatgcactttttttatgagtttgagggtgatgagattaatgtagaaacgataaactatatttttctgattatggaatattattaccaacaagcagtgaatatattaactagcagcctgagttccgatgaggaggatgccaaaaggctctgggagtggttgatgacaggttctttctggaataatacctctgtcgcgaagtcacagataagacgttatgcaccctatcagttgcgtgatgtagtccgttttaacaaagcgttaaaataccttgaggagactggtctggtatctataacaaaattaaaaaatggcaacggtactgtaagccaaatggtgggtattaatcgttaa

SEQ ID NO: 80497 - DNA, 672 bp, Citrobacter koseri
atgtattgtgatataacagatttggttccgaaaactattcagtataaatatatcaaatcccatggacccctaaataaatatcagctaaaacggatagagcagacaattgataaagcactggatgaatacccaagggtgatggcaataagggtggagcttcatatgcccgtacgcaggccgctctgtgatatgctccttgccgatgattatgccagaacagatgctgctgcaatctcacggttcaatgcttcacttaatgcgaagataaagcactatgagcttaaacagaaaaacgcaggtaagcgggttcgtgaaacttcatctcgtattgtttgggcaagggagttctgtcctacaagctataaaaaacactatcatgttttacttctgctcaatcgggatgcatttaatagtcttggatcgtttgagagtgataatggaatactgcttcgtcttatccgtgaagcatggatgagcgctattaatttgatttatcctaaaaataaagagctggtacagatacctgacaatccatgctattacataagtgcaaaagacggtaagcaaagtgaagcttacagagagctgatatttcgctcaagttatcttgctaaagagaaaagtaaatgttttacagatggggaacgaagttttggttgtagtattaaatga

SEQ ID NO: 80498 - DNA, 258 bp, Citrobacter koseri
ttgattcaggagggtaatcggctgcattacctggctgacagggctgggttgacggggggctttaccccggagcaactgcagaaattggatcagactttcccgctgtttatagttcaattggaatcaatgctgcgttccggtgagctaaatccacagcagcaacatcaggtgatcattcatcttacgggtttaacctgcatagctgatactcgtggcagctgcggctacgtttacctcactgtttatccaaccgattaa

SEQ ID NO: 80499 - DNA, 321 bp, Citrobacter koseri
atgcacatttcaactgtaccggccagggtaccggtttcgtcacgtctgtctcccgtgcaggtttggcagcaactgctaacgtatctgctggagcaccattacggactgacgcttaacgacacgccattcaatgacaacacggccattgaggagcatatcgacgcaggaataacacttgccgatgcggtgaattttctagtggaacgttatgaactggtacgcatcgaccggaagggattttcatggcaggatcagacgccattcctcagcgctaccgatattctcagagcaaggcgagctacggggataatgagcacttaa

SEQ ID NO: 80500 - DNA, 1299 bp, Citrobacter koseri
atgaaaaaaatcagcttaccgaaaattggcattcgcccggttattgatggacgtcgcatgggggtacgcgagtcgctggaagaacagaccatgaatatggcgaaagccaccgctgcgcttatcaccgaaaaactccgccatgcctgcggcgcgcagattgagtgcgtgattgcggatacctgcattgccggaatggcggaatccgccgcctgtgaagagaaattcagcagccagaatgttggcgtaacaattaccgtgacgccgtgctggtgctacggcagcgaaaccatcgatatggacccaatgcgcccgaaagccatctggggcttcaacggtacggaacgtcccggcgccgtttatctggccgccgcgttggccgcgcacagccagaaaggcattccggcattctctatttatggtcatgacgtacaggatgccgacgacacctcgatccctgccgacgttgaagaaaaactgctgcgctttgcgcgcgcgggtctggcggtcgccagcatgaaaggcaaaagctatctctctgtgggtggcgtctcaatggggattgccggttccatcgtcgatcacaacttctttgagtcctggctggggatgaaagtgcaggcggtggacatgaccgagctgcgccgtcgcatcgaccagaaaatctatgacgaagccgaactggagatggcgctggcgtgggcggataaaaacttccgctatggcgaggatcagaacgcgcagcagtacaaacgtaatgaagaacaaagccgcgcggtgctgaaagagagcctgctgatggcgatgtgcattcgcgacatgatgcagggcaacaacaagctggcggaaaaagggctggtcgaagagtcgctgggttataacgctattgcggcaggcttccagggccagcgccactggaccgatcaatacccgaacggcgacaccgccgaagcgctgctgaacagctcctttgactggaacggcgtgcgcgaaccgtttgtcgtcgctaccgaaaacgacagcctcaacggcgtagcgatgctgctgggccaccaactcaccggaaccgcgcaggtctttgccgacgtgcgaacctactggtcgccggaagcggtagagcgcgtcacaggccagccgctcaccggccttgcggagcacggcatcattcacctgatcaactccggctctgcggcgctggacggctcctgcaagcagcgcgatagcgaaggcaaaccgaccatgaagccgcactgggaaatcagccaacaggaagcggacgcctgcctggccgccaccgaatga

SEQ ID NO: 80501 - DNA, 354 bp, Citrobacter koseri
atgatgaaaacaatatcagtactattaatgttactcccattaaccacaattgcggctacttcgccagaagggaaagctgaaaatccctttgttgttggcaatgaagttatttgtctgaaagaaatccagaagcagattaccccttatctcaaatcttttgaagaagaaagagatgtaaagtataagtacaatgtcaaatctggtttatcgtacaaagatactgtagggctgcggttacagatcaaccgtgtggattcggggctcaatgtacgtgtggcagatctggactactactggctacaggaacgcggcagcatgtgccagccagcgtacatggttcttaatcgattatag

SEQ ID NO: 80502 - DNA, 561 bp, Citrobacter koseri
atgtctggattgatcgttttcattatctgcatagcaatttcggtactttgttataagaaagtttcaaaccgtttcagaaataaaggtcggggaaaattccgtactttaacactttccttggtgataagttttgttgttttcatggtgtctattggaattggtgcagggattgtttcacaagataagagtactgatgtaaaggcttcaacggctgacagtacggaaaagacaaagtccaatgtttataaatgtgataagtttgatgcgataacacaaactcgacagggaacaaaatacgattcaggttattattccgataaagggatttcaatttactatactatttcagacaatgaattaatcagcagaatgccaattcctggcgaagaagatagtatatatacagctgaatttaacaagattgcagcagatgggtcaaagaagtacgggaactcatcaagtaactactttgtatcagtactgaatgataatactataaaggtaattgatgttgaatttaatcataattcaacaattacacaaatttgtttgaaacagtaa

SEQ ID NO: 80503 - DNA, 615 bp, Citrobacter koseri
atggcaggcaaaaaagagagcgttgagcagttcagcgaaagacttaaatcaatagtaccttctggttcagggcgagatttcgccaaaaaagcaggcattggctacagtactgtccacaactatctacaagctgtatcaagccctacgcttgagaatcttgtgcttctggctaaagctggtggcgtgtcggttgaatggctggctactggaaaagagttttcaaaatcggcaaacacaaaccaagccgaagaactgttgaaaattccttttattgattctaatgatttccttttactggattcaggtgttttccccgatttacaggaaaaggcagggtctcttgctgcattacgggtcagtacagatgtaatggaaccaacattcttagttggcagtattttacttgttgatcagcaacataagcaattaaaagacggtaaagtggtagtactccacaaggaaggaaactacttgtacaagcgagttcaggtagtgccagatggatacaatttaagcagtgataaccccaaatacagtgcgatgatcgtcaatcaggattcactatcctcctttgatgtgctgggggaagtactgatagtactgaatcatctgtag

SEQ ID NO: 80504 - DNA, 1515 bp, Citrobacter koseri
atgattaatactacacctatttataataagtttaagtacgtatctgctgagtgtggctcagggaaaacatataaattatgtgagaatatcaataaagtacttaacacaaaaggcagtactgaaaagttcattatcgtacaaaatacacagaaacttgcaacagatacgtctaaaaactttgatagctgcaaattgctaattagtgatttaatgcccaggagtaaaaatgtcattaatacagtgctggatttcctcaaagcaccagttgagcgggttcttatcattagtgataaaacattttttagaataccagttgaaatgttagaagattggcagatttggcttgatgatgtgactaatttccattcattcaaaaatattaatgacgataatcagagaatcaaagacattatatatcatgaactgatgcaggagcatgagattgtcgacgaggaaaaggaacgatatttaacagctaaaaagaaagcagtaaaaggggatttaatgaacaaaatcgcccaagagctttctgttatagctgagaatgatattttcatcatgaacaacgattactttgtcgatccagagaaagtgcaattgagcattcttggatggaaagatctcagtaagtatctcggattacctgttactttcatgggagcaaacttcgaaaattcattgatttataaggcaaatcaagggttgtttgaagaaatcagtctggatgatctgcaacaacgaaaagtacctttaactgaacgcctcaaagtatactatttctcagaaaatataaaattatcaaagacatggaaggaaaggaatcctggtcaactccagcgtgtttatgcttacctctctgaagtactcgaaggtcaggaatattactggacgaacaacaataccgacaagcagaagctgcacaaggcttacagaataagccctgatgcgagggggcataacgactacaaagatcgacatacatgcgtctggttagcctgtatgcgtccagacgatacagaagcgaagctgtgtgagttgctattaaagattacaggtgaagacatccatcaggcaagagagtacgaaaaccttcaccagttcgctttaagggggatatcacgtcagttcaacaatgatgcaactcagattgtctatgtgttcgataaatggcaggctgaatcattgagtacaaatattgaacatattcccggagtgctggaaaacgtagcaccgggggcatcaggaaggccaaaaggagccacaaacgttaagagactgcctgcattgagtgatacaaaatcgaagcgtttcagtcgctggaaaaaggataattcggggcttgagttagtggcattcaaagcatttcttgcaagtactgtcaacgcggatctcagtactgacgatactacggctatgtgggacagataccagaaagcagtacaaaaaagagatgcacattcagtccgaaacaccgacatgaaaagcagcagtatgtccaaaaataaccccttataa

SEQ ID NO: 80505 - DNA, 1557 bp, Citrobacter koseri
atgaaaaaaacggtgtattgttacgctcgtgttagttcgagaggtcaggctaaagatggctttgggatgtctcgccagcaaaagatgctaaatgattatgtgtctacatatgatgattctctacataaacgaggatacgagttaggagcagttaactggttgtttgcagaaggcatctcggcttatagcggtaagaacatcgaagatggttcagtgctgaaatcattcattgatgatgtcttggatcgtaagattatcaatgcggttttggtaatcgagaatcttgaccgatttagtcgagcagaaccgattaaagccgctaatctattcctcaatttgattactgccggatgtgatatccatgaagttgaaactgaaacaatacatcattccagtagtgacctcagtatcattacaggtgggttacaacgtgctcataacgagagtaaacgcaaagcccgattgagtatcaagaattgggatgaacgaatcaaaaacgcgattgatggtaaagcagtactgactcatcgagtcccatcgtggctggaagtaaaagacaatggatatgtaatcaaagaaggagagaaggaaaagtacaatcttatattccagatgtatgctgatggtttcggtccggccgcaatacgcgatgtattaaaagaaaggaatatgttaatcaatgatagtgaaccaactattgctcacttaaacaagataataaaagatgagagattgattggaaagttcaattcaactggtaggaaaaaactgagtggtcttgttatctatccagtagttgtagatttatcactattccatatcgttgaccaactacggaaacagcgtaatcccgttggtaaaatccatcgtaaggcaaataacttatttgctggattatgtatatgtatggaatgtggtagatatgttcaggttaacagtattgaacctaatggtgaatcatactttcgttgtggtggcagtctcgttaagagtgatagatgtcaggaacgtggattcaaatacaagtttttcgaaaatgcattattgcaacatatcaggaattttgatttttcgtcattgaatgcgaatgagtctgaagttcagattaaagtaaatcatctctcaatggagttgttagcacatataaaatatagagatgagatattgcaagatatcgagaaagaggatatacccgatcctattgacagacggatattgaaaaacttacagaagaaaattggagatgttgaatctgaaatatcaaatttaaaacggttgaatgtgaatgtcagtgcattcgacgagttgaaacaatattcagaggagttacgtgatccgctgaatgcagatataagactcgactttaatatcaagatcaaacgtgtaatcaaaagcattattataaagcgatatagtgatactatatttttggttattaattatattgccattaatgaaaagcaagctatcgtaattaatagcaagaatggtgaagtaatgtacatgggtgttcagaatgatgacctaaaaacagttgagcatctaattggaaactaa

SEQ ID NO: 80506 - DNA, 738 bp, Citrobacter koseri
atgaatctctcatatatgccatatgtttctcgtgcatcaactcatgccagttttgatatgcttatcattttcaaaagcaatcactgcaatataccatctgatatatcagctataaaatacaatacaaatcacccaaccgaagatgatttactctataaagatggaacgacaaccaaagccggtatatttattgaggttaatgtaactggcgaaaatgaaaagttatatataatagcttctcactggcctagtgatgcatttccaactggaaaagagaaaagagcagaagctgcaagaaaaataaaatccgtttctgatagccatattgagtcgggtaagcaattattacttataggtgattataatacgccacctcactccaccgtacttcgggaaaccatgtcagttaaacatagtaaaatagttgcaataaaaagctcctatagtctttataatgcatcatttaatttaatgaaaccccatgtttatcattcgaaagctacagcaaatgagcgtttaagctatggtacatttatatggaaaaataaccacgactcagaagatggatgtgcaatccttgatcaagtacttgtttcctcacatttcatttcggagggcccttggcatttagttgaatctaatgtaaaatacatctataattcattaacagaaaagtatatagattataagaaccaattaatagaccatttacctatctatgtttctgttgaaaagtga

SEQ ID NO: 80507 - DNA, 492 bp, Citrobacter koseri
atgaataaaagtaaagaagagcaaattaaaagtaaaataaatgaaattgttaaccatggtatcgatagcaataaaaagagtgatgagtataaagagtcaatgactcttattattaattaccttcatgattcaattcataagaaactgggggatgttaacattaaatctgaaccatctattaaaactgtagattatttcattgaaggaggagatatatcttccaagaaatacacacgcgaagttgagaataattataagcaaaccgttgtaatttataatgataaaaaatcgattcctttatttacatgggaaataactagcaatgatggtgtaagaataaacgaagataatgcttttactttctgtaccactgatgatgaaattttactttcattgcaaaggatagtgacatccaataataaattttggagtgcagtcaacacattaaaaaaacaagaagacgataataatattcttatcgcaaatgaataa

SEQ ID NO: 80508 - DNA, 846 bp, Citrobacter koseri
atgcaaaactggaaaacggagcatacaaaggacatcaagggttggtttaaagttgatacttatcgcaagtttgaagacctctcattgatacacttctaccacgagttatgggcccgaaacttgttctttaaggagtatcgtgaagagtttgagagtagagcccttatgggttacttctcaaaaatttttagtggcaatccttttttaattgaagaaggacaactaggatacatgactcctgccgacaaactttttcagcctccccatttttttctaacaactcttgatcgccttgctgaaacgagcattatcgcaatgcaacgtgaaggctttatttggcatggaggtgacaattattctataaacggagagcttcgtgaggaatcactttcagatattatgccggatcagtttacacggacagttatgttcgagattgatttggcaagtggcacagacgaagagattgcagagtctcttaaagccgtattaccgcagtggcgtaaaatcaaaggtatcgacgaaaatcctttagaatctgttcgctttgggtatggaacgatcaagaaactcatcagttatcgtgtaatacctatgctggatattctggtgtgggcaaccgttaaaaaaatccgtgtctctgacgatagattatccagattgttatatacggacgatgacgaagaaagtgaaatgagggagtccagccagataaaagatactgacaggccattggctcttaaagccagcacgattgattttatcaggcaatttcaattcttcattaataagaatagtcatctaaaagagatgaaagtatcaaatgtcctaaagcttacagactaa

SEQ ID NO: 80509 - DNA, 1752 bp, Citrobacter koseri
atgaaacttgtaagtataaaaattaaaggtaggggaattgttgggcttgaatccgacgaacttgtttttggtaaaaatattactgaattttacggacctaatgggtgtggtaaaacgccactactgcaatcaatctcttattgccttggatacccatgcaaatttagagatgatatttataaattatgcaaatctgccacccttacttttacgatagctaataatatttttaaagccactagagactttgaacataccgacttcattttgtccttagaaagcaataaagagatattgaagttttacaatgaagctgattattctaagtacattttcgaaaaactttctttaaattacccatcacttcttacaactcagaacaaacagtcttacccttacttatcaactattcttcctatattttatcttgatcaagacttaggttactcaaaattttattactcgccaagaaactttattaaagatcagttttctgaaatgctcagaatagtattctccttgccagaaaaacattcttttgatgctaaaaagaaaaatattaaccttacagaagaaattaaatatttagataattcattagcagtacaaagaagaaatattgaaatagctaaagatgcccataaagataaaaacatcgaatcaatcgatagttcgattaatggtctgaaagacgaacttactgaactgaaaaatagcaaatcattaaaaaatgattctcttgtgagcatagatgcagtcataagaaatcaaaaagaaaacctaaacgctctcaagtcagaattaaaattcatggaaagaagagagtcatcattattacaaataatgaaagaaattaacactgaaataaatactctcaacctaaatgaggaagctaaaagaatatttcgctcttttgaggaaatttgcccatccctagattgcaaaatgtttacaagaagttctgaaagctatgcaaaacatcttttatatcttaaagatcaaattaaagatattgaaagaagtttaaatttagatagtgatcggcatgacgcgattgaacaggaaataaaacacacgagtaagaccatcgaagacctgaacactatgagaaccaatattattgaagaggaagatatatcttcagtaattgacgctatttctgaaataacatcaatgttatttaagctacaacttgagaaaaatgaattaaataaaatagcgttattagaggcaaagtatgttgaaatgcttaataaacgtgaacacgctttagacgaattagatggtctcgataaaaatagacagataatccctagattggcaaaggttaagacaaccttacgagataaattcatattctggttaaaagtattgaaaacccctaacattgatttcaatattacatttgaaaatgatttcagtccaataatgggctatgaaaccttagaacaattaaaaggtagcactaaatcacgagctatactagcttatagaagtgcattaatagaaagcatgatagaattaaattgcaagtcttttatgtttgctatatttgatactccgaagcaacatgaaatacatcacgaagacatagataattttattatggctttaaagaaattatctaaaaaacataattttcagtttatcttctcgtcaacagaatacaaatataatggtgatgatgatgatatcattttaactcctgagtatccaggagagcagcatgacatgttcttaagaagatattag

SEQ ID NO: 80510 - DNA, 480 bp, Citrobacter koseri
atgaactacgatgaatttttcgacattatatctaaaaaagatattaaaattgacataaaatatatagataagcaagagagtttaggcctaaacaatgaagccctgttccaattacctttaatagctcttattatacttcttttatctaaaaatcgtgtaaaaccgcgtgctagtgaaataggaagcttagtaggtagacttttagaagacgtaatgctgggattcaagggatcatcacaattattaggctggtctgccaatcttagaatacgtacagtcaccgctttacagtttcttgagtcagtacaactcgttataattgatgaaagtaataagaaattaagcattaccaaattaggaaaaaaagttatcgacaaagcatttttatatgaaagtgatttgtcttataatcttgcattaatagaaagatcatatagaaattactgtgttgattcaaaattagacggtgagttattatga

SEQ ID NO: 80511 - DNA, 1185 bp, Citrobacter koseri
atggctgagttacatgaagttaaaccaagagagcaagcgggaagagacactttagaacgctataatgctcagatcagagcagcaagtattgcatgtttgtctatcctagagggtaaagatgtcaaacgcgttttttgcgaatttcacgatgattttgtcattgaaaaagtcattgctagtgatattcgttatacatttgtacaagtcaaaactaaggagaaactgcgagaaatttggaaactacgagacgtgtttgggattttaaaaaggaaaagtgcaaaaaatcctcagacagatgaaatgatcagagatagtttcgttgggaaactattacaacatacgattaatttcggagagtcttgtaatgaaattgttttccttacaaatacgcatgttgatgaagatatagagaacattatcgatgatatcgtttctgaaaccttttctaatacacactgcaaacttataattgactcgtttaataattgcttcatctcaatccaggaagatcacgaaaagctagatattgatgcgataaaacaaaatcttaagaaactaaaatttgaaactgatgttgaatatattaaaagcaaacatgaaacgtttgaaatacttgctaaacagaagatatttaaatttagcgaaattgaactatcacacactgaagcaaaagaaatattattttctcttttggcactagtaaactcaaaatcaagtgtaaaaattaatgattgttcaagcgaaaatataaaaaagctggctggtatagatatcgatgatctcctggatgttctcagcatctcaaaacgtgcttattatgactttttagataatggcgatgaacacgccctaaaatcagcgtcagtaattgaaagattgctgagaaaagcaggagccaacgacatggaagtagattttttcacaagatgtaaaataaaatgggatcagtggttaaggaataatagacatattatatctgagtttgattatatcacaatcgacagagaaattaatgcaaccttagataaactaacgtttatgcatggaaatttatttttatcaaacttaagagcattcattaatgaattatatgattcattacatcaaaacaatttacttcattccttagataaagaggctttaaccgggagtcttttttccagattagtagagcgttcaaaatga

SEQ ID NO: 80512 - DNA, 576 bp, Citrobacter koseri
atgatttttggttatgcgagagtctcaacgaaggatcagaatcttgagcgtcagttggcagtactggaacctgtttgcgataaaatcgttacagagaaagaatcaggcaagtccaccagcgaaagacctgaattgttgaatctgctttcacacctccgcgaaggtgacactctcgtagcccacagtatcgaccgcctggcccgcaatactcgcgatttactggaaataattgataacctggttgctcgtgggatcactgttcagttccttgctaactcaatgagctttgataactccccacaatcacgcctgatcctaaccatgatgggagccgttgcggaatttgaacgaggaatgatcgcatcacgccgcaacgaggggattgcccttgctaaagaggctaagaagtacaagggcaagcaaaagaacaaggaattacacagtaaaatcattgatatgcttcaagccgggaagaacacgccggacgagatcgcaaagttgtgcgattgtggcagagctactgtgtttcgcgtgaaaaaagaaatgattgctagtactggcagtattgggaactga

SEQ ID NO: 80513 - DNA, 1071 bp, Citrobacter koseri
gtgtttagtgcaatagacctcttctgcggtggcgggggactaacagttggattgaagcaagctggctataatgtcttggctgctgttgagcttgactctgtagcggcagagacttacaaagcaaacaatcataatacaactttgatagaaagagacatcagacatgtttctggtgcagagattttaaagtcaataggtctcaaaaagggagaactaacccttttggctggttgtcctccttgccaaagtttttcaacgttgacaagaaattactctagtgaagatagtcgtaattcattgataaaagaggttttacgtttgatctctgatatagagcctcaaatgattatgattgaaaatgtcccaggaatgatgggtaggggaaagccgttcttaaaagaattcatggacggtatagaggctcaaggttacatagcaaattttggtgttctgcaagttgccgattatggtgtaccacaggataggaaaagatttgtcttactggcaggaaaagggtttgaaataaaaatacctaaggctactcatagcttaaacgaaaatgaaaatttaaaaaagtggataactgtaaaggaagctttagctggaatggttaaaccaatatccttagatgaagcaaataagaaaggagggccaaaagcttttaactggcatgttatccgaaaacaaagtgatatcaatattgaaaggctaaaatatctaaagcccggccgtccacgtttcgatttacctgatcatttaagaccaaactgtcataaaggtgataattcatcttttagcaatgtatatggacgaatgagttgggataaagtatccccgactattacagggggatgtaccgtactgagtaaaggtagatttgggcacccggaagaaaacagaacactatctgtaagagaagcggctcgtttacagacatttccagacaactttatttttaatactaattttatcgatagagtatgtcaaataattggaaatgctttaccatgtaagtttgcctatcacatgagtaaggcttgcttagactcattgaaaatgcttaaagaataa

SEQ ID NO: 80514 - DNA, 2091 bp, Citrobacter koseri
atgccccagcaacaagatgcacagccattccagttaaaatatagtcataacatcattgaacatcttggattaaaactctatcagaataggcctacaaatgttttggctgaacttgtatctaactcttgggatgctgattcagagaacgtatggattgatattgatgctaacaatcttgctgtttacgatgatggcacgggcatggacagggaaacccttgtaaatcactaccttattataggaaagagaaaaagaacctcaattaatattgaagattgctctcctaaaaatagaaaatatatggggcgaaaaggaattggaaagttagctccatttggaattgccaagagattgtctgtcgttacggtcagcgaaattgataatacttgttgctggttagaagttgacttaacagaattattgaaagagtcgaacgaaaatgaactgacagaattcagctataaacctgaagtaatttttgattcaactccaatttcagaaataacttttgaaaaagataagcatggatacgttaagaaattcgtcgaaaaaatagaatataaaagcggcacactaataattatggatgatctttcgttaaaaagaaagatccctaccaagcaccttatggaatccttaggtcaacgatttactgtaactttattgagagatgattttaatgtcatcgttaatgatgaattggtaacagaaaaacaatcattgccagaattttcatatcgagaaccagccacagggtttgttgatgaaacaatcaacattaatggtatagatcgaaaggtaagacattgggttggctttgtacgagaagctgaatggcctcaagatcaagctggtgtgggtgtttatgcacatggcaaaatcgcccaagatcgaccttttgtatttggcttgaaagggagagaaatttctactcgctatatgtatggagtaattgaagctgattggctggatgaattagacgaggatattgtatccacagaccgtacaagcattaactggaataacgattatacagaggaaatgtataattggggtaaaaacctggtatcaaaatggatcgcaaattacaggaaatttcaaaaagaagaaaattcaggaaaggtattgcgcaaaattaaagaattgcctgatataccaaaaatcacagaagaggaaagagaagccattaaagatatggtttgtaatatgagtcctaaaatttataaagatgaacagttacaaaatgaagttatcacacaattaacttcagcatggactcatagaccaacacgaaacattattaaatctctctgggacagaatcgaagtttcggaaggggatgaacaaaatttcattgaaactttgaatgatataaccaagtatcttgttcctgagtctctttcattatcagtaagtgtttcacagcgtatttatgcattaacaaaattgcatgaacttagcatagttggcacagaaacccaattacaggcattacttgaaagcttcccatggatattaggctcagataaagggaaagtatatgccaatactgctttaaaagaattggctcgtaaggcaatattagatggcgtattgcccggtcatgcggatacgagtaaacaactggctgattcagctaatgcaggaacaaggcctgactttgcattcttttcggatgcaaataaatctacaatcattgtcgttgaacttaaaagcccacaggttccactacagtatgagcatgttttgcaacttttaacctattattattggatgaaatctcattatcccacttcaaaaataacaggttatttagtgggcaaaaatgccggttcaggaattgagtgtgacgatccgaatatacatgtaaaaacatgggatcagatctgcttacattcccgaaaagactatttagaactattagcttcgatgttaaatggtatatcagaacattatgatgactcgcgagtttatgatgtaatagagttgggaggcgaagcgacgaaagaacttctgaaaaaaatggcagatgtaaacaccccactaagtgagttctttgaaaacattgataaaaagttgagattgaaatag

SEQ ID NO: 80515 - DNA, 330 bp, Citrobacter koseri
atgaacgtattaacttttaaaaatgatactgtctctgtcggtgatgtattcgcgtcatcctggggctatgagcaaagtaatgttaccttctaccaggttctttctgtacatggaaagaaaactgtcaccgttcgtgaaatccgcgctaattcagaatatacagattcaatggtcggctttaaaacacctgtcattgatgattttacaggcgaagctctgaaacgccaggttaaagattgcttggacgatctcgctataaaaatagaagattttgaaaccgcttataaaacagcgccagaaaaaaaacatcgtttttcctcttactattga

SEQ ID NO: 80516 - DNA, 252 bp, Citrobacter koseri
gtgatcgttgtcaacggagtcagattgttcacgcaatctgactccattcagttccaaaaatatttattcatttctcagtttttcgatcatctcctcttttgccgcttgttgttcgcctggtgcataggcgaaatcaaaccaaccgtcgatatttctgattacctgctctttattgcacccacaatgttcgaaccagaatttaatattccgtttcaaagaggccagtgcgctaaattctctttccatttttaa

SEQ ID NO: 80517 - DNA, 435 bp, Citrobacter koseri
atgaaaataagaaattatctttttgttaactatataataaccgctcttgccgtttttctttctttcttacatgctggagatatatcttctatattattatggattggattccctcaatgctttgcgctcattttgattcttgggtatctacatacaagaaatgtactaaaagctgccgggcatcctgatgatttaaaagatagtgttagttctaaatttgcgatgatcactttaggcgtgtggtttttagcatcgatactactctcgcttgcgtttcctgctgcaattgatgcgccagttttttctcagatttttacattcgtgactgttttgtctaatttaatggcgttgtgtatagtcggggttcttatctatacactttatccattgcaggttaaatttaatgccggtgtttataaaaagctaatcgactaa

SEQ ID NO: 80518 - DNA, 258 bp, Citrobacter koseri
atgtcgcagaccggaaatgcagtaacttcctcatcgaaagtaaagcgaccataccgaaaaggtcagcctctgtcagtcagtgaacgtaagctgcgttcagtatccagaaaaaaggatactcataaagcagttactgtattcatacagaatgctcaaaaagacaaactggatgccctttgtgctgaatacaaaatgactcaggctgaattgattgagttgttgattgaccgagaagaaatgcaccaggataaagagtag

SEQ ID NO: 80519 - DNA, 795 bp, Citrobacter koseri
atggaaaaagccaggggattctctgaccgctttgaatttcttgttcacgttgcattttcccgttctctggggaagcgtcggcgtaaaccccctgttctgcgctgtcgggcgattgacgccctgatgcagggaatgtgttttcactatgatccactggcgggtaatttcggccgggttcagtgctcgataaccactcttgcgatagagtgcgggctggcaacggaacccaaaaagaaagtgaaaccgggagaaaaaccgaagcccggagcgctggccataaccagagctacccgcgccctgcgttctcttgccaatgattttgggctgattatctacgatacggagttcgatcctgaaatagggtgcaatgttccgtcaaatatccagttcacccccgcgctgtttgaggctatcggcgtatcaatggagtcactggaggcaatcaggaagagccgtgctgaatggcagaataaacagcgtgagaaaaaaggtctgtcacgcctctccctggaagaactggcattaaatgcatttaattatgtgcgcagcaaattccgggatattcaccgtgagcgccgtctgcacggaatcaaacgcgcaagggctgtacgtgatgctgaacgcagccgtaatgaaatcagggcactggtgaagcgtgagctaaccaaagaaatctctatgggacgtttcccggccgatatgacactggccagtcgagaggtggagcgacggacgtccgaacgaacaatcatgtccaggggcaatcatacacgtctttcccctgcccccgcctga

SEQ ID NO: 80520 - DNA, 267 bp, Citrobacter koseri
atgaaaattgaattcaagaacgctaccggagaaaatcagtctctggacgtcacatcacttgttatcacgctgagtaatggtgaaacaattgaagtcagcgatgagggacaacgcaggccctcacacctgtccgaagggataactctatgggggggccgtatgcccggggagaacgcgactcttgacgaactgaaagcatcaacccgaccgctgggaatataccctctggctgcaaatacccttcatcttgttcctttaaaaaattaa

SEQ ID NO: 80521 - DNA, 738 bp, Citrobacter koseri
atgtcaaacactgatttaaatattctgccagcatcttctttttcatccgaagtctggcgcggaacgcttgctgccctgccgatcattctcggttttcttcccttcggtcttctgctcggggcgcaggcggcgcagaagggaattcatactcatgacctgatgctgatgaccggcctcaactttggcggggggtcagaatttgcggcaatcgcattgtggacctctccgccgcatgtgctgaccattgtacttgtcagcgtgctggtcaacagccgccacctgctgatgggcgcctcgcttgcgccatatctttcaaatttgccgccgcgcagggctctgcttgccctttttttcatgtgtgatgagagctgggcgataggcatggccgacgcggcaaaccgccgcagtctcgggttatcgccggccttcagcacgggcttttacgccggcatcgcggcatccctctggctgacctgggtagtttccaccggctccggcgctgtgctcggccccgttctgggtgacatcacccgctggggattcgacatggcctttcccgccgtttttctggtgctgcttaaaggtatgtggaagggatgccgcgcagcgctgccctggctggtcagcctgacctgcgcgggggcgacataccacctctttccgggagctgcctatgtgccggccggggccatatcgggcattgccgccatcctgctgctgaaccggagggcatcatga

SEQ ID NO: 80522 - DNA, 291 bp, Citrobacter koseri
atgaacctgacactcttaaccattgttcttatggccgtaaccacttacttcacgcgcgcagcaggctacctgattctgcgtgacagaaagctcagcccccgggctgaggcagtaatggaggccgcgcctggctgcgtgcttattacggttattgcgccgcattttgtgacatcagatcctgcgaacctgctggcacttgtgatttcactgctggccgccatgcggttttcgctactgcccgtcgtgctgatcagcgttacggcgaccgcgattttacgtcatctgctctga

SEQ ID NO: 80523 - DNA, 1332 bp, Citrobacter koseri
atgaccacatttcgcatcagagacatcttcatcctgggattcatgaactttgccctgtttgtcggggcaggaaacattatctttcctcccttcatcggcctgcaggccgggactgccgtctggcctgcggcggcagggtttctgctgacgggcgtgggcctgccggtcgttacggcaatcgcgatggcccgggccggtggctcaatggctgcccttacccggccggtggggcgcctgtgcggcattttgctgaccgtcatctgttatctctgcgtcggaccgctgtttgccacgccaagaacagccacggtgtcgtacgagctggcgctgcagccgtttaccggcagcgaacgctggcttccgctgtggagtgcggtctattttggcgtggtggttctggtatcgctttatccgggccggcttctggatacggttgggaaggtgctttcccccatcaaaattgttgcgctgattattctggccgtcacggctctgtttctcccggctggctcgccgcaggaaccggctggcgcctacgccacggcggccttttcacaggggctgacaaacgggtatctcacgatggacacgctggctgctctggtctttggcctggtcatcgtgggggccatccgttcgcggggcgtgacctccgtgcgtcttgtcacgcgttatgccgtgctttccgggctgatagcgggggcggggcttgcgctggtttatctgagtctgttccggcttggtacaggcagtaccggactgacggaaaacgcgaccaacggtgctcaggttctgggtgcctacgtgcgattcagctacggtgcaggaggaggaatattcctgggggtgctgattacgctggcctgcctggtgacagccatcgggctgacctgcgcatgcgccgactacttcagcagcatcacccgcatcagctatcgggtatacgcctggttttttgccggcttctcaatgctggtttccaatctcgggctgacgcagctgatcagcatttctgttcccgttctgaccgcaatatatccggtttttgtcgtgctgattgtgaccttttttttccgcagcagtcttcgctcttcagcccgtgtggtggtgccgacggcgctggttgccttcctgtttggcgcagcagatgcactcgaaacatcaggcatcattatgcgtccgtttaccctgacccgtgagctcccgctgcataatcaggggctggcctggctgttgccggcgctggcggtaatggttgttgcaggcctgacggacagggttgtcggagctgtaaagcacgaaccgttgacggaaaaaaatgatggcatataa

SEQ ID NO: 80524 - DNA, 351 bp, Citrobacter koseri
atgatggcatataaaagtacaggtaagccggctgttaacggggctgtactgtacccctgcctggtcgctatggcagcggtattgttcatcggtcttgagagtctgatatggcacaccggggacagctatcctcgcgggctggcgcaggtccgttacgttgatgacgtccggctgctgacgccccaggcgatgcgggacatctgcagacttccactgacgatccccgagctggtacaaaaacagagcggactgtacctgcgctgtggcgtgccgggcctggaaggtgtttaccggatagagcggtacaaaacacagaataatgcccgaagcacgatcagcccagagggatag

SEQ ID NO: 80525 - DNA, 456 bp, Citrobacter koseri
gtggacgaaattgatcgccgtatactgaacgaacttcagagagacggacggatagccaataatattcttgcggacagggtcggcctttcaccttcgccctgcctccggcgggtaagggcgcttgaagaggccggcattattgaccgttacgttgccgtgctgagcccacaggcagtaggcatcaatctgaccgtattcgtccgggtctggctggacagccaggatgaagaaaccgttaatcacttctgtaccgaagtcagccggctcactgaggtggttgaatgtcatcttatggtgggagactgcgactttttactccgggttatgtctgctgaccttacatcttatcgtcagtttcagacccggcatctgacccgtatccgcggagtaaaaagtatcaaaactgaactgcctatgcagaccatcaagcagtctactgctatccctctgggctga

SEQ ID NO: 80526 - DNA, 996 bp, Citrobacter koseri
atgtttccagtcggcattgacgtaagtaaaaacaccctggatctttgcatgctgtataacggtatcaaaggacgcataaaaacccgtaacatccaaaataacagacattcagttgataatattcttcgctggctcaggctccaacactgcggtccggaagatgttcatgtggtgatggaggctaccgggatttatcacgaacggctggctactgagttacatgatgctggtttctatgtctctctggccaaccctcaccgtagcagagagtttgcacgcggcatgggaataatgacaaaaacggataaggtggatgcgtatatgctggcctgctacgcattccttaagaaccctcaccgctgggagccgccggcccccgaaatcagatatctcggtgcactcctgcgacggcgggatgttctgctaggtgatgccctgcgtgaggagaacaggctggaaaaatacctgtccacagacacacctgcagatattatcaattcctgcatgcatatggcgcagctgctgcgcgaggaggtaaacaatatcgagcggaagattaaagcacatatcaaagccaaccctgcactgaggcgtgattatacactgctgacctcaattaaatctgttggtccccagttgggaatgcatatgctggtcgtgcttcgcagccatgacttttcatcagctgagcaggctgcagcatttcttggcgtggtgccgatcgagaaacgctcaggcacatcggttcggagccggccccggatgtcgaaaatcggtccgcctcagttgagagcgaagctttacatgtctgcgctgtgcggaaaaatctacaataagcgaatgcgtaatatttacgacgagatgtgcctgcggggtaaacctaaaatagtggccattggtgcgctgatgcggaaactggtgcactggtgttatggcgtcctgaagaccggaatcgtttttaatgatgaaggcctgaaacaagtactatcaacctga

SEQ ID NO: 80527 - DNA, 285 bp, Citrobacter koseri
atggcaatgacgctgaataaacccatagttgacgcgcaaccggcagaagcaccaacagcacatgaagttgcccggttcatagctgatggtgataagcgtccaacgaagggcagggcagtttcacgtacttaccgcttcaaccaggttttcattgatgttatggaagctgatgcgcaacgtatggggcagggtaatactgatattttaaaggcagcgctaaccgcgtggcacaatatggacgacaacacgaaaaaccattggttattagaaagcgctaaaatgtaa

SEQ ID NO: 80528 - DNA, 663 bp, Citrobacter koseri
atgggtaaatcagtggtcgtcgcatcagataaaggtggcgtaggtaaaacaacctatgttgccaatacagcatcagcattagctaataaaggtaagtcggtggctattctcaagaccgacaaaaacgccgatatgctgaactggaacagtaagcgcaagtctaatggcctcccccctattcctgtttatgaagcctatggagatgtaagcaaggaaattaagaggctgtcgtcacatatcgacacgttattagtagactgcgctggccatgatagccaggagttccgtagcgcgatgacagtggcagacacgctaatcacgctggtaaaaccatcctccagttttgagcgagaaaccctcacacctgtaaccgaaaaggtcagaaaggcacaaaaagctaatcctactttgcaaccgtgggtgctcttcactcgcatcgaaaccaacaaaccgagcaaggtaaaagacgcaatcgatcttgataagctgctgcgctctgatctggtttggattcagccgctaaagaatcgcctttctgcactggatattttcgagagcgcttgcaatgaaggtgccggtgttcatgacgtagcgcgaggaacaagcctgggtaaggcaaaagggcagatcgaactaatcgccaaagagataggaatactgtag

SEQ ID NO: 80529 - DNA, 351 bp, Citrobacter koseri
atgtggacggtttattttggcagggtttttgatgaatggtttgaggagcaggaagctggcctgaaacaaaaagtgctggctgatctgagcaacctcgaaatgtatggcccttctctttcgcggccgtatgcagatacagttaaagggtcacgtcataagaacatgaaggaactgcgcatacagtatgcggggcatccaatcagggcattctttgcgtttgacccgattagacaggctatcgttctttgtgccggagacaaaagtaacgataagaaattttacgacagaatgattcgtatagccgatgaggagttttccgctcacttggccgaactggagggcaaaaaatga

SEQ ID NO: 80530 - DNA, 300 bp, Citrobacter koseri
atgagaacattaagagaagtaattgcggctcagtcacctgaaagtcaggctcgtattaaagagatggccgatgaaatgattctggagactggactgcaaatgatgcgtgaagaattgcagctttcacagaaacatgttgctgagctaatggggatcagtcaacctgcggtcactcagctggagcagcgcggaaatgatgtgaagctggcgactctgaaacgttatatcgaggctatgggaggaaagctaagccttgatgttgaactccctacgggtaaacgtgtggcgttccacgtttaa

SEQ ID NO: 80531 - DNA, 681 bp, Citrobacter koseri
  misc_feature (647)..(656): n is a, c, g, or t
atgaactcagcacatgtaggtcgttggattgcgcaatttgaggagagagatcaaatttttattcttgagcaaacgctggagttacttcgaaattcatatatcagcaaaaatgattatgtagaaatgattgctctcatccttgggaatcagagaaatagaccgatattttcccaatcagctttccttgatattcaagaagctaatcgtgggactagtcagagagatttgctggagctgttagaaacccaagcagaggagttagaaggggtagatatagttacattatcaagatcctctgccaatcagagagttgcagaattcaatagttttatttatcttgacgatgtttgtttttctggcaccaaagccttgaatgatattacttggtttgtagaaaattttaaccttagtaatgtgactattcgcgtgtgtttcttgggaacacataaatatgcaacctatatgctagagacgactctcgcacgaagatttgaagggcgaaatatcacacttgttatcaaagaaaatggatttatcaaaacacgcgaaaatcgccttaggtattcttcgtgttctgaagttttctggttacgtagaaatggtattgacctaccagattggattcaaaatccggagatctatacatnnnnnnnnnntctatacatcgcgcgaaggcactga

SEQ ID NO: 80532 - DNA, 306 bp, Citrobacter koseri
atgagtaaagaaatcgctgtagaaatcttgaatcaattaggtggaaataaatttattgcaatgacaggggccaaaaattttgtttggcttgaaaagggtggactcatttttaaactaccatcgaattttgcctgtaatggcattaatcttgttaaaattgaactagatccatcagatacctacaatgtggaattttttaaatccagaggtgcatcattgaaaagcattgcatcatatacgatgatttattgtgaccaacttcaggatatcttcactgaaacaaccggactatatacacatctttga

SEQ ID NO: 80533 - DNA, 294 bp, Citrobacter koseri
atggcgaacaaaattgttaatgcagagctagtattagatgtttttaagaaacatggtgcatatataacactttgtgacgttaacgaaacggttaaatattgcaataaaaaaggcggagacatgcaatatggtttagatcctgaagggtgggcgcatcgcttagcgaaggaagaagcctatcaacaggaatgtgaggctcaggaggctccttgtgactatgtgcattttgaccaggggaatcaggaacgtacagcagagatttaccaggttcctgggttgggagggaatgaataa

SEQ ID NO: 80534 - DNA, 243 bp, Citrobacter koseri
atgacagacaatattgtaaaagtaaacaagggtaactattcatatacaataacggtaattaacaatgaactgctaaaggtggttaagtacgttaagacaaggagtaaacatacgacaggtaaaacgaaacgagaagttgtatttgatgaaaacctaaccagagaacaggcgtttgctctcgatggcgaggttttgaaagcgcgtttactggattttctgaaaggtgtgaatgatgaagagtaa

SEQ ID NO: 80535 - DNA, 441 bp, Citrobacter koseri
atggacataaccccatcaatgcctcgcattgtaaaaaacatcaccaccgtaaaaaaacaatcctcaaaccttactaatctgataccagagacactcagaactcactgtgtcagtgttcgtctgaataacgcagaattgagcaagctaaacacattgagaggagattatgcaaaaggcgaatggttacgaatggcttcgttacagaagctgccaacgattgtgcctcctgtaaatattgatacctggaagaccctgggtgagatcaatcagaagctaaaccgtattgctcttcatatcgatagtaagagtaaagatagccagcttacccatactgaactatttgctgttagaagattaattaaagagcttcgccagcacctgataaattctgacatatggagcaaccccgatgaagggtatgcagaagatcaaaaggggtaa

SEQ ID NO: 80536 - DNA, 384 bp, Citrobacter koseri
atgcctcagaaacaggagaagttcaggtggcgtgaatttctcctgattttgaacgatgccaacttcaagaaaaccttcctgcatagctgcaaagaacctccgcttcaggagcttcgctcctttcttttcccaacttttcgtacagttgccccatcacaacggcaaggggaaaacacaatgaacaatcaaactactcgcctcatacgtctacctgaagttctagagcgaactggtttcggcaaagcctggatctatcgtctgatcagtgaaggtcggtttccggcaccagtgaagatcggtgttcgtgccgttgcttttgtcgagagtgaagttgacgagtggattcaatcagttatcgaaacaagtcgaaataatgttgcttag

SEQ ID NO: 80537 - DNA, 123 bp, Citrobacter koseri
atgacgaaaatatcttacttaaaaaaagtagatatttttgtggagctaaaaaacaggatgttgcatcctatcagcaatttattcctggttcatatctgcctggtgagtcagttgagcatttaa

SEQ ID NO: 80538 - DNA, 123 bp, Citrobacter koseri
atgatatacaaaataaaatgcgtcacgagtctggatttaaaaatattttcgcccgatacggatattatgatattgaaggtaagccgttacttatccggtcacaccaaccacggcaccttttaa

SEQ ID NO: 80539 - DNA, 201 bp, Citrobacter koseri; identical to SEQ ID NO: 80153

SEQ ID NO: 80540 - DNA, 270 bp, Citrobacter koseri
atgtcctgttttatcgtgttgctaaatttaatggtgattatttgcgaaaagttaaagcaaagcgaaatacgcgttgcactaacaaagcaactcattgtgatagctatctcatttttgtgtttttcgggtgttaaaaagggaaagcaaaattctcatgacgtattttatgaatgggaattttattttcccctgttaatcagttggccgatcccgcaagattcattcacgaccttttatattaagatgctttatattgccggagagtcgtag

SEQ ID NO: 80541 - DNA, 411 bp, Citrobacter koseri
atgaaatacacctcacccggcagagcgctgttgacggcttatggcgtccaggggatcgcgctgctggcggtggtgatgacgctcatgatggcgccgggtcatctgctgctgccgattctccagtgtctggtcattgtccagtccatttcgctggcctgcgcgctggtctgtctttacgccacgctgatgtcgctttcatcgcctttgcaggccggtgtcgacttcaccctctttcaatgtactgacgcggcaatcgccattctggcaggcgttatcggcggcgttgttgctcaacattttggctatgcggcctgcttcctgtttgccggggcattcacgttgctggcggcgtgggttgcttatatccggctgcattcggcaagagaactgatgaccagcgcaattgattga

SEQ ID NO: 80542 - DNA, 246 bp, Citrobacter koseri
atgaaacccatcgacattaccattataaatccccccggccgccagcagtctccctacgccagcgctgttaagggtatgagtctgggctttcggcgttggaacaaacagcttattgtattccgctggcagggcaagataactacactcggtattgcttatcagatgtttactgagaatataatcataatcaacagatattgtttctgtatctatctcgtcttttataatgcgaagctgaatacttga

SEQ ID NO: 80543 - DNA, 435 bp, Citrobacter koseri
atgcgtaatattcaacaggttttagagcgctggggtggctgggctgccgatagcaacaccgcggtgagctgggcgccaatagcggctggatttaaggggttggtggtcagcagttcgtccagcaggctgagctgctgcgacgacgacggactaatcattgacgcctgcgtctgtcgcctgcagcaggtccgcaagcccgaggagctggacgtcattatgctgtactacgtctacgggttgaccaagcgcgagatagggcggcggcgtcgctgttctgagggatttatccgccagcagttgcaggtagcagaggggttcattgaggggtgtctttgcatgctgggcgtgagccttcagatggatcctgaggtcgaaattcaaagggatgaaaaaagtattagtgcgctacgcaaaaactgcgctacgctggtatga

SEQ ID NO: 80544 - DNA, 603 bp, Citrobacter koseri
atgttctacagaattaaaataccaacttatctatttgatttatccctacgagttgctgctcttggtggcaagtttctgttgatggtggctatagcaagatacttgactgtcaaagatgttggtgattacggattatatgttagtataatagtcatatcgttatattttgttggtttggatttttatgtctactcgacaagagaacttttggatccggaagtaaaaaagaataccggaaatatattatttaatcttgtcattttttttgtttttagttatttattattagcagttgtatggcccgggctactatctttatcagccattacaaatgttggtggattgttatttttattgacgataactgaacatctttctcaagaatgctatcgtattttaattattaaagaaaggataacaatcgcaaactttatattatttataaggtctggaatatggtgttatttatgtgttccattattattttttaagatggtgaatcttgagcaaattttttatttctggctgtttttttctgctttatcagtttttattgcagtagcgtttatagtgaaattcgaacttctttctattttttcttag

SEQ ID NO: 80545 - DNA, 1056 bp, Citrobacter koseri
atgcgcaaaatcatacatgttgatatggactgtttttacgcggcggttgaaatgcgcgataacccggccctgcgtgatattcctatcgctatcggcggcagccgcgagcgcaggggcgttatcagtacggctaattatcccgcccgcaaatttggcgtgcgcagcgcgatgccgaccggtatggcgcttaagctttgcccgcacctcacgctattgccggggcggtttgaggcgtataaagaagcgtcgcagcatatccgtgaaatcttctctcgttatacctcgcgtatagagccgctttcgctggatgaagcctatctggacgtcaccgacagcacttattgccacggctccgccacacttatcgctcaggaaatccgtcagacgatttttaacgaactccagctcaccgcatcagcaggtattgctccggttaagtttctggcaaaaattgcttctgaccttaataaaccgaatgggcaatatgtaattacccccgccgatgttcctgagtttctcaaaaccttaccgctggggaaaattccgggggtgggtaaagtgtctgcggccaggctggaaacgatggggctgcgtacctgtgaagacgtgcaaaagtacgatctggcgatgttactcaagcgctttggtaagtttggccgcgtgttatgggagcgtagccaggggattgatgagcgggatgtgaacaatgaaagactgcgtaaatcgataggcgttgaacgtacgctggcggaagatattcacgaatgggcggaatgcgaggcgatcattgagcggttatatccagagctggaaaggcggctggcaaaagtgaagcctgacctgctcatcgcccgtcagggggttaaattaaaatttaacgatttccagctgaccactcaggagcacgtctggccgcgtttaagcaaggacgatttaatcacgacggcgcgtaaaacctggaatgagcggcggggagggcggggcgtgcggctggtagggttacacgttacgctactggacccgcaactggaaagacagcttctgctggggctgtga

SEQ ID NO: 80546 - DNA, 318 bp, Citrobacter koseri
atgggctgcgttggggtcacggaaggcgcgattcccttcgctgccgccgatccgctgcgcgtgatcccatccattatggttggctctgcctgtggtgcggtaacggctgcgctgtttggcgcgcagtgttatgccggctggggtgggctgattgttctgccggttgtggaaggcaagctgggttatatcgcggcagtcgccgtcggggcgatagtgacggcaatctgcgttaacgtgctgaaaagtctggcgcgtaagaaagtgtctcaggttgatgagaaagaagacgacctggatttagagtttgagatgaattaa

SEQ ID NO: 80547 - DNA, 675 bp, Citrobacter koseri
atgcttcttttctttagcgtatgtctccttatcgcttcaaatagtagtattaataaaaagttattgtcatttaagagtattcttctatgctcattcttgggctttatctttgtaattctggtttggacgagttatttttctctatctggcgatagcacacttgcctttgaatctctaaagattaggattgcagcgcagagccaattatggtgggggcttatagagagtgcggccttgcaagattttggtgcttccgatattatctataatttctttgggataggggcatttccagaagatacaggtatgtcatatcttatgggattggtcatgccgcagcatttattttcggtatatcaggatgcagggattgctttaacaatggcatttcctgctaacatacttttattcttcggaccgttcttatctcttttggtttgtactgttctcgctatttttcttgcgttggcgctatggtttaccgtatttactttaagaaataaggattatgtattattatttatcgcgatgaaggtttttaacattgctatccaatttatattgatgggaagagtgtatctgttatttgaatggaagattattttactcttatttccaatgatatttgctttcatcgcacattctaaaaataggatttcggggactaatgcctga

SEQ ID NO: 80548 - DNA, 600 bp, Citrobacter koseri
  misc_feature (581)..(590): n is a, c, g, or t
atgctaatactgtggttctggatatgcctttttttgattagcgttattgttcatggttctgaaattttaaactttgctattgtttttggttatatatcattattgttttactttttggcaaaaaaagagtctttttttataatcagtagtttctttctatggtcaatccttacaacagctataagtggtttgatccttgagtctggtgtttttctgcctgaacttggtatgatgtcaacgctaaatggtgcgacggctattaatgttagtctcgccgttattacattactagctacgtgtaatattttcaattttctgaatgaacgtattagggtaaatttaaattcttcatttttggtaaactcagctattgagaaaatatatccaatcattgttttagtcgctactcttatagttatctttatttcaattaaatatggtcgtccaagtaattatgggcaggatcgattttattattggaataatattgcaccgtcttggggaaatcttgttcggctttttgtagaacagtctgtatttattcttggatgtatttatgctaaaacgaaaaataagatgannnnnnnnnnttgggcataa

SEQ ID NO: 80549 - DNA, 435 bp, Citrobacter koseri
atgaaatgtccagagcaattagatggatggtgtgattgcggcaaatgcaaggctatgcgttttgataaagataaaaatattcatgtttgtcttgtatgtcacaaaagagcagagccgttagtcccgattgagctaaattcgaatgactggcttcctgataaaacagaacagtttagcgttaatctgggtgactggattaaacaagaggaagcagagttaggagaaaatgccttttatcatcctaataccgaatacttaaaagtcctccgtgaaaacaatcttcacgaaaaggaatttattgctaacagtcccgatcttttgaaaatggcgcgcaagtattcaaagacatacaaacacctcgctgaaaaagataaatccgttattgatttttggctgatggaggaaattttctctgtaacttatgatgatgattga

SEQ ID NO: 80550 - DNA, 303 bp, Citrobacter koseri
atgaataaagaaaaggctttgcgtgaactggaaagattgctttctaaaatgaaagatcaggcaaggactcttgatgaattagaaacggctcaatggcattacatggatttagtggatataacatccagtgggttgttcgatataaacacactggaaaaagaaagaaaggaaaaccctcattttattagaatctctgatggcatgcgagtttttgatgatgaacaatgtgcagagttcatgtcggttaaacataatcttccgttacagctctgtatggcatatgtacgtagtcataagtggtga

SEQ ID NO: 80551 - DNA, 597 bp, Citrobacter koseri
atgtacctgcaccttgttccaagattgtttcatctgatggcaaataaatgccatcttgaatcaataaccattcctgaacttgatttcataatcgaaggtgatgcactgtcaacgggaagaccctacccgaataaaaatatctgggttggtatgaggaaaggcagaaaagccataaatggacttttactaaagactgataagcatcttaagtggtttaccactgattaccagtggaatatagaaaatatgggtatgatcaatcatcgtgtgacaacctacatcgaagataacgattttgatatggtctcacacgatataatgttaaatggcggttttgattcatgggatcgtcgggttcattcagcttatgaaaatcttgctccggtgaaaattcagccaaagatggagtcatttctcaataagccaggagaaaatacccatgatgtgtggattgagtatgaatggggtgattttcttaagagcagagaggaaagtctgttactgcatactattcagtcagagcgactaaatacgcaacattctctttttgagcgactgccatcttttgaaagcactattgatttgactaagggctaa

SEQ ID NO: 80552 - DNA, 147 bp, Citrobacter koseri; identical to SEQ ID NO: 19093

SEQ ID NO: 80553 - DNA, 3009 bp, Citrobacter koseri
atgcccgtcgattttctgaccactgagcaggaactgaattatggtcgctatgttgcagaacccaatgacgtgcagctggcgcgctattttcatcttgatgagcgagatcttgccttcattaaccagcgacggggaaggcataaccggctgggaattgcgcttcagctcaccaccgcccgttttctgggcacctttctgacagatttaacccgggttctgccgggtgttcagcaatttgtcgcggtgcagcttaatatccgccgtccggaagtcctttcccgctacgcagaacgggataccaccctcagagagcatactgcgctgattaaggaatattacggttaccatgaatttggcgatttcccctggtctttccgcctgaagcgcctgctatacacccgtgcatggctcagtaatgagcgacccggcctgatgtttgattttgccaccgcctggttgcttcagaataaggtcctgctgcccggagcaaccacacttgtacgtctcgtcagtgaaatacgtgaacgggcaaatcagcaactttggaagaaactggccgcgttgccggacagctggcagaccgcccgcgtgactgagctgctggacattcctgaggggcagcgaatttcaccgctggagcaactgaaaaagggacctgtcaccgtcagcggtccggcatttaccgaagcgctggagcggtatatccggctgcgaaacctggagttttcccgactgagttttaccggtctgcccgctatacaactacgtaatctggcccgttacgcaggcatggcgtcggtaaaatatatcgcgcgaatgccacagcagagaaagctggccgtactcaccgcattcgttaaagcacaggagactgcggcgctggatgaagccgttgatgtgctcgatatgcttatactggatatcactcgtgcggcgaagaaaacggggcagaaaaaacggctcaggacgctgaaagatcttgaccgtgctgcgctactgctggcgcaggcatgttcattgttgctagctgagcaggctgacgatgctgaactgagggagaccatattcagcagcataccgaaaagtaggctggcagaatccgtcagcaaggtaaatgagctggcccggcctcagaacaacaatttccatgacgaaatggtggaacagtacgggcgggtaaagcgttttcttccggcggtattgcgcgacctgcatttccaggcagcgccagccggagaacatacgctgtccgccattcattatctgaccgaactgaacggctcgaaaaagcgcatcctggacgatgcgcctgaacatattattaccggcccctggaaacgcctggtatacgatgcggagggccggatacagcgtgccggttactcgctttgtctgctggagcgccttcaggatgcactacgccgacgggacatctggctcgaaaacagcgatcgctggggaaatccccgcgagaagctgttgcagggggaagaatggcaggttcagcgggtccccatctgtcgggcgctgggacatcccactgatggacataaaggcgtgcaacagctggcggtccaactggataaaacctggaaagccgtcgcatctcgctttgaaggaaatgcggaggttaatatctgccatgacggtaaatatccttccctgactatcagcagcctggagaaactggaggagccaccatcgttgcatcgtctcaacagtcgggtaaggcagctactcccgccggtagatttgacggaactgttgcttgagatagatgccagaacgggctttacacgtgagtttacgcatgtcagtgaatccggggcccgggcgcaggatctgcacatcagcctgtgcgcggtcctgatggctgaggcttgcaatatcgggctggaaccgctgataaagcacaatataccggcgctgacgcgccaccggctcagttgggtgaaacagaattacctccgggcagaaacgctggtcagcgccaatgtccgcctggttgattttcagtccacacaggagcttgctggccgctggggtggcggcgaagtggcttcagctgacggcatgcgctttgtcacgccggtgaaaaccgtcaattcaggacctaacagaaaatattttggttccggacgtggcatcacctggtacaacttcgtctctgatcagtattctggattccacggcatcgttgttcccggcacattacgtgattccatttttgtgctggaaggccttctggagcagcagacagggctgaatccggttgagatcatgacagacacagccggtaccagcgacattatttttggcctcttctggctgctgggataccagttttctcctcggcttgccgatgccggtgaagcagtattctggcgggtggataaatcggcaaattacggtgcactagacgaactggctcgtggttgtgccgatctgtcgaaagccgagtatcagtgggatgagatgatgcgagccgccggttcgctgaaactgggtaccattcatgcttcagaactcattcgctctttgctgaaaagctcgcgcccatcagggttggcacaggcgatcatggaagtggggcgcgtcaacaagacgctgtaccttctaaattatattgatgatgaagattatcgtcggcggatcctgacgcagctaaaccggggagaaggccgccatgctgtggcgagggcgatctgctacgggcagcgcggtgagatcagaaagcgctatcgtgaaggtcaggaagatcaactgggtgcactgggcctcgtcactaacgcagtggtactgtggaacacactttatatgcaggaagccctgagctggatgcgcaggaatggagaagaaaccgggggtgaagatatcgtccggttatccccactgatgcacgggcatatcaatatgctggggcattatacgttcacgctaccggaggatattttgaagggggaactgagagaattaaattttaatttaaacaatgaattaccttcttag

SEQ ID NO: 80554 - DNA, 552 bp, Citrobacter koseri
atgcgcctttttggttacgcacgggtatcaactagtcagcagtcgctcgatattcagatcagtgcgctcaaagaagcaggagtgaaagcaaatcgtatctttactgataaggcatccggcagttcggttgatcgtccggggcttgatctgctgcgtatgaaggtggaggatggtgacgccattctggtgaagaagctcgaccgtcttggccgtgacactgccgatatgatccagttaattaaagcattcgacgctcagggcgtagctgtccggtttatcgatgacggaatcagtactgatggtgacatgggaaaaatggtggtcactattctgtctgctgtagctcaagccgaacgtcaaagaatattagaacgaacaaatgaaggtcgccaagaagcaatggcaaagggagttgtgttcggtagaaaaagaaaaataaacagaggtgcgatattaaatatgtggaaacaaggtttaggagcctcacacatatcaaaaacaatgaatattgctcgttcaacagtatataaagtaataaatgaaagcaactaa

SEQ ID NO: 80555 - DNA, 2097 bp, Citrobacter koseri
atggaatttaatattacttcaaagtctaatccgtttggcgatacaacagcagaaaatgataagaaaatgttgagcagtgctttcatcgaaactgctgactttagaactttaattgaaacagatgaccgaactattgttgtaggcagacgagggactggtaaaagtgctttattcattcagctaaatgagcattggaagaaagataaaaaaatattaatcctaagtttttcaccagacgacacgcaaataattggctttagatcaatgttgaagccatttacaggctcattcaatttagccagggcagcaacaaggttattatggcgatatgctatgttaatggagatagcatcatatatatcttctcattataaattatcatctcaaatttcgacagaaacattgttgaatgagcatttaaagaaatggaatgctgcacaaggtgatattttaagaaagtgtaggattgtagcaaaagaatatttagatgaaaacaatcctgaagaatcaattggtgaccttcaatttaatttgaatatttcagaaatcgaaggcaatatagtttcacttcttgaacgctcagacaggaaagttgtcattttgatggataagctagatgaagcatatgaaccggataatataggaatcggaatcatagctggtctggcatatgcctcaatcgaattaaatcaaaaagcaaaatgcattcgcccaatcatttttttaagggataatatatttagatcgctatcaaaggaagatcctgactactcaagaaatatagaggggcaagtcataaggctgcattgggattgggcacaactcttaatgctatcggctaaaagaatgaaagtggcatttaatctagatattgagaaagatcaacgggtttgggataggtgtacagccgatgacctcaaaggaaggaatggttttaagcgatgcttgcaatttaccctttaccgtcccagagacttactgtcattgttaaatgaagcttttttctccgcatttagagagaatcgagaaaccattattaacactgatctagaatatgcagccaagtcaatttccatggccaggcttgaagatctttggaaggagtaccagaagattttcccttcaatacaagttataactagtgcattccgtagtattgaacctgaattaacagtctacacttgcttaaaaaaaatagaagcatctttcgaatcaatagaagaaaatgaagacccaaaaataatctctgaaatacaattactaaaagctagtgggatcctccaaagtttgtatagcgtaggatttgtgggtatacgtgataaaaacacttcatcctattcattttgccatgatggacgaaccccagacaaaggttttgaaagcagtgaaaaactattaattcatccatgttattggcttggtttgaatttaaatcgcaacgctcttgctccagaggaagctgaggaaataaatgacgaatatgatatcaatgttgtttccgataattcagccattagaaataaaacaataggtcaaataaccactcatctggatcaaataccgacaggaaatgaaggggctaatgaatttgagcaatggtgcttagacgcactaagaattgtatttgcatcccacctgacagatataaaaccgcatccaaacggtaacgcggttcagagaagagatattataggtaccaatggtggaaaatcagatttttggaagcgtgtattagaagactataaaacaagacaagttgtttttgatgcaaaaaattttgaagaattaggtccatctgagtacagacaattacaatcatatttaacaggtccgtatggaaaattagggtttattattaatagagaagaaagtgaggcattgaaatcagggagagatttggattggacaaaagaaatgtatcaatctcataattcattaataataaaattacctgcgaaatacatatctaaattgttgcaaaaattaagaaaccctgagaagcatgacgctatagatagtcagatggggaaacttttaactctatatgaaacatcatatatggccattaaaagcactcaaaagaaacgaagaaaatag

SEQ ID NO: 80556 - DNA, 171 bp, Citrobacter koseri
atggatttaaacactgctgcaaacgcacttcgagaactgggccacccgacacgtctcagcatataccgggagctggtcagggcgggtcatgaaggcctgccggttggcgaactgcagaagcaccttgagattcctgcctccacgctcagccatcatctttcaggggtttga

SEQ ID NO: 80557 - DNA, 225 bp, Citrobacter koseri
atgggttttccatcgccagcaaccgactaccaggaaaacaggctgtcactcgatcagcactgtaatacaggagcgccgggagtattcttttttcgaagtgatacctactctttccgggaagggataaagcctggtgcgctgctcatagtagattttgggggcacgcccgttgacgggtctttggtgctggggtctgaggtccaaccatgcgaaaaaccacgttaa

SEQ ID NO: 80558 - DNA, 240 bp, Citrobacter koseri
atgcctagacactatgaaattgactcagcctggcgtgcgagcattaagcgtgagccgaacggtcgtcagacagttacgacagaagcctttgtcagccagcttgcgctgattaattttcactggagttgtcgccaagcaaatcagtggattgaaacctacgtgaccgtttttaaagacatttccactcaggaaggagagaaccggacattcatgctttttaaccccaacggaggccgttaa

SEQ ID NO: 80559 - DNA, 180 bp, Citrobacter koseri
atggctaagaaaaagagatatgtcgtgatgattagagataaaaccaaatacagcggcaatcagcgattattagcctggttagtatggttcgctaacaggcataataaggccgttgcctatgactgcggagaatggattgtcgaaccatcatattggttaagaattggaaatccaaaatag

SEQ ID NO: 80560 - DNA, 216 bp, Citrobacter koseri
atgaaaactatcactgaaatcaaaaacgaagctcaggaactgctgttcaaattcaagcaaggccaaatcagtaaaaatgtactgtatgcagaaggtttcacgctgacaatgcattttaatgaggctatgaacaacgcaagtgacgatccggcattctctgaaatcaagaataccgcgattgcattgcaactgataaaacatttggcgacatcataa

SEQ ID NO: 80561 - DNA, 207 bp, Citrobacter koseri
gtgtttggccttatgtttcacataatttttgggcttgttttcattgtgatgagtgtggcttctctggttgggcttgttttacacggccatgaatacacgccgggacactttgggaatattaccgcattgtgtatagcatcggctctggcgtgggtatgggcgctttcaaaagctaaagaagcctggtacatcctgaagagtcggtaa

SEQ ID NO: 80562 - DNA, 438 bp, Citrobacter koseri
atggctattagcgagttatctctagggaagcagatacttgaaaaaataaacgatcatgatcgttttaattctaaattgcgtttaaaaatgaaaactttaaacgtgattgcgttcgttattctttttgcaataggagataagtttaacgaactggttatatgtgcgattgctttcgtggttttttttgtactaaccggtgtgtatttgaagtgcaagatggttattccatcgtcgttaatatttgattatttcgaacgtagtgctgaagacgaggggtttagaagtctttttatggggctgtttaacagcaaaaagtttcttaccgtccgggatgatcgcaagaaaattaatgattatctttatgagcaagataagaagtttgaagaattgaagaaaatagaaactatcactcatggtatgaatggtcgcggtgaataa

SEQ ID NO: 80563 - DNA, 243 bp, Citrobacter koseri
atgggaaacatcatcctgatggccgagaaaacaaaaggcgcggtttctgaagaagctgaagtgtatgaatttgagggaatggatgatttgatccggtttcgtaagcgattccctgaacagatgaaatatgaataccattacctgctttccggtggcacgaaaaattttcagcatatcgcgctcgttgaagccaaccattttaagcagttcaaaaagctggttaatcagtaccagaatcgctaa

SEQ ID NO: 80564 - DNA, 216 bp, Citrobacter koseri
atgaaggatatttcaaattttatgcgtggtactgtaaagcgggtttatatagctgaaaataaatctggttgccctgcatttctggattggtgcagaaaacttaataaaaaagaaaaattaccacaggggaagttctttagaaaatatgaaaaattccagcaatttgattcattgaatactgataacaaaaaaatagtcagcatcgactttgattaa

SEQ ID NO: 80565 - DNA, 471 bp, Citrobacter koseri
atgtatctgacaacggctttccatttcagtcagacgcaagtaggattattctccctgaccggtgttgccggcgcctcatctgctcttttttcatcacggatactggaaataataaattatagaaataatattcttttctttttagttgtggcaagtctgctggcaatgggattttcaggcaaccatttatctattaccgtcgcgggtgcacttctgattgatgcatttattcagttaatacatgttaataatcagcgtggactgtttctttcctgtcagggtaacgaagcacgagcggcgagttgctatatgatgagttttgttacaggaggtgcgattggtggatttatctcatcctatctctatgcaatatttggatggaatgtagtgctgattagctgtgcaatcatcaccatgattccgttatttatcaaaacaaaaacacgagaaaactttaatgaacctaactag

SEQ ID NO: 80566 - DNA, 1254 bp, Citrobacter koseri
atgtcccttaccgacgcgaaaatccgcactctcaagccttctgataaaccctttaaagtctccgattctcacggtctgtatttgttggtaaaaccacacggttcccgtcactggtatctcaagtaccgaattaacggtaaagaatcccgtattgcactgggagcctatcctgctgtctccctgtctgatgcccgacaacagcgtgaaggtatccgtaaactgctggcactgaacatcaatccggcacaacaacgtactgctgaacgtagttcacaaataccggagaaaatttttaaaaacgtggcactggcgtggcataaaagtaacagaaaatggtcgaagaataccgctgatcgtatgcttgccagcttgagcaaccatgtatttccggttatcggacatctgtcaatctcagaactaaatcctcgtcatttcattgacttgttaaaaaggattgagggaaaaggtttgctggaagtcgcatcccgtactcggcaacacctttgcagcatcatgcgccatgcggttcatcagggattaatcagcaccaacccggcggcaaatcttgaaggcgtgacggcacctcccgttagacggcattatcccgccctgccgctggagcgcctaccagaattgcttgaacgcattgacggttatcatcgggggcgcgaactgacccagcttgccgtcctgctgacgctgcatctgttcattcgctccagtgagctgcgctttgcccgctggccagagattgatttaagaaataaaatctggacgatacctgcctcacgtgaatccattgcaggcgtacgttattctgggcgaggtgcaaaaatgcgcaacccgcatattgtccccctttcagtacaggctatcgccattctgaaaaggattcaggacatatctggtgagtatgtactggtgttccccggcgaccataacccgtacaaaccgatgtgtgaaaatacaatcaacaaggcactgcgtctgatgggatacgacacgaaacgggatatctgtggtcatggcttccgggcaatggcgtgctgcgctctaatggagtccggtttatggtcgcaggatgcggtggagcgccagatgagtcatcaggagcgcaattctgtgcgtctggcttaccttcataaggcggaacatctagaagcccgcaaggctatgatgcagtggtggtcaaattatttggataaaaattatgagaagtatgtagcgccttatatttacgcaaatttaaaatag

SEQ ID NO: 80567 - DNA, 357 bp, Citrobacter koseri
atggcagaaaactcaaaaaaaatttataaggtagttgtaagagatgtaattgaatggataaatgaaaacttagaggagcagttgcatattgaaaggatttcagcaaagtccggatattctaaatggcattttcaacgcatttttaaagaggaaactggcattagcttaggtaaatatattcgagaaagaaaactgtcacatgcttatcaacttttggtaaatacggatatgtcagttattgatatttcaacttccctcgggttcacgagccagcaggttttttctagaacggtaaagaaagaacttcgacaatcaccgagagatatacgaaaaaacggagctattcaacctagttga

SEQ ID NO: 80568 - DNA, 1533 bp, Citrobacter koseri
atgtctagaattacttttcctcacttgacaggtgtaaaacttattgttgctgcaattgcgctttcccttgggaattttatggtcgtacttgatacaactattactaatgttgcaatgccgacaatttctggatatctcggcgtttcaacaacagaaggtatatggatcatcactgcctatgctgttgcagaagcaataacagtacctcttacaggttggatagcatctcagtttggccaagtacgtacttttctcttggccattattgcatttgttttattttccgtttgttgtgggttatcgtggtcgttaaccagtcttactatttttagggtgttacaaggattagctggaggaccgttaattcctctttctgctacgttgcttattgcagtttttccgaaaagtaaatcaaatatagctgtcgctctatggggaatgatgactgtcatcgcaccaatattcggacctattcttggtggggttatttctgataattggagttggcaatgggtgttttatatcaacattgcttttggttttatcgttggatgtggggcatggtgggtcttgaaagatagagaaacactcattaaacgttcccgtttagatagagttggtttgagccttctaattctatttgtttccacatttcaaattactttagataaaggccgagagttagactggttttcctcaagttttattattatatgttctttaatttctttaatttctttaattctattaattatttgggtgctcaactctgatgcccccatcattgatctccgtgtgtttaagtctcgaaattggctagtgtcgacgatagcactatgtatgatgtttggtatcttttttgggaacatagtattaacacctttatggttgcaacaatggatgggctataccgcaacttgggctggttatgcaactagccctatggggatccttgccgttcttagctcacctattattggtcgtatgctaccaaagttcgatcctcgtctattagtaagttatggcatgggaatgttggctgtttcctttgttatgcgttcgtttctgactacacaggctgattttatgtcagttgcattaccgatggtcatattaggtgctggagtccctgcttgccttattacgttaacatcgctaggagtatctcaactgccgaccgatcaagttgcagctggagctgggctccagaatttccttcgtgtaatgagtatggcgataggctcatctttgactcagacatactgggaacatatgtctaaatttaaccgttcaacattggtatcctctatgcaaccagatgtgatgacaaacttaaatgctcttgcagctcaaaatagaatccctctgaattcatctactttattactatctaaaatggttgatgaacaagctgtaatgttggctacaaataatttctaccagttagcaacacttcttatgctatgttcgattagcattatttggttcataaaaaaaactgagcatccacttcataaaaatatagggcattaa

SEQ ID NO: 80569 - DNA, 1194 bp, Citrobacter koseri
atgtttgaaataaaagcgttgcgtgaaaagctaatgaagatgtggcggcgatatgactttcatcaacgctggctgacggacagttttgagttcccgttgtatctctctttgccgaaaataacggatcgacaactgatgcatggttttaccgatctgcaacagcaggtcattcggtttcgcaacgactgcgaaagtaagccgggtattgagttggttgaaaaagagttcaatttctcatcaatggggcgacagagaataccggttgctgttgcattgacatcactggattcggtatgtcactttcttggacagaaagcctgttgggataatttcgttaatgatgttgttttactacgtaatcactttcctcaaattgaaccgtggcttagcgagaatatttctctaattgagcaacaccacggcgactggattaagttaatccatgtatgccgttattttctggcaacgccgcatccgggactctatttacgccagcttgatattattgatatcgacagtaagtttatcgaaacgcataagcgagttttgcgacagctgctagactatttgttgccgcaagaatgtatcgatctacgttattcccaactaaccggccatgggtttgaacaacgctatggtttgcagtatgaaaaaccggttattcgttttcggctgcttgatcctgcgttggcaaggcgtttttgtggcgttcgggatatggcgatcccgattgatgaatttgtgcgtctggaattgtttccgaaaaaaatttatatcactgaaaataaagttaattttcttacatttcctgatgttcctgatgcgatggtgatatttggtcagggttatggtgttcaaatgttgaaggaagtggcatggctaaattgggtgaaaatctattattggggggatattgataccaacggttttgctattttatcccagctgcgcggctattatccccacgttgagtcattactgatggatgaagaaacaattctagtgtgcagaacattctggggtgatgaaccggagaaaaattgccactcggctgagctattgccgttccttaccgaaaaggaatctctggtttatcaggggattaaatctcactattggaaaaagtttctgagagttgagcaggagagaattccgtttcatctcctgcagcaggcgctttcgaagttgggataa

SEQ ID NO: 80570 - DNA, 3282 bp, Citrobacter koseri
  misc_feature (37)..(46): n is a, c, g, or t
ttgatcggaacatctggtcaattacaccggagggaannnnnnnnnnaatccacgctggttgatgcgctgaccacgttgctggtaccgccccgacggcttgcttataacaaagccgcaggcgcggaagaaaaagagcgctctgctgagtcctatttttttggtcactatacttctgttcaggatgataacggcaaggccagagcgaaaggattgcgtgcagatgataaacattacagcgtattactggcggtgttttattctgaagcattacagaaaacaatttcgctggcgcaagttttctggctgaaaccaggtgagacaaagttaaaacgtctctatattgttgctcaacgagcaatatcggtggagagcgacttttctggttttggttccagagttaacgagctgcgtaagaaattacgtagagatagcgcccttgagcttgccgatacttttcctccttaccagcaagctttttcgaaacagcttgggttaggcagcgatggacgggcgctggaactgtttaaccagaccatttcgatgaagtctgttggttcggtgactgactttgtacgtcataacatgcttgaacagcctgatattgagaaacaattgctggagcttgagcgtaattatgacgcgcttcgtggtttgcatgatgcagtagttgcggcacgccagaaaatccagcttttggaaccggtgagccgcctgggagatgaggcaaaacaggccgctcaggaacgtgaaacttataaccgaagccgaaacgtccttgaaccctggatgagtaccaaagcgattgttttatatcgttcccgccttgagcgccagcagcaggatctggcaaaacaggcgattgaactggacaatcttgataactccgccatgaccgcacagcagcgtattgaacatatccgtgacgagatcgcagggaatggcggcggtcgactccagcagcttgctgccgacattaagcaaaaagaggctgaacgcgacgaaagacgtaagaattatcatttctatcagggaattgcgcaggcgttagaattaaatacccaacttgatcctgcgaccttcgtcagcaatattgagcaggcgaaaattcatgcggaaagtattagccagaaacttgaagcgcatgaagagaggcgtgatgaattaaatcgtcgtttatggcaaaaaaattcagagcagaaaaaaattgctgacgaactgaccgcgcttaacaagcgccaatccaatatcccctcacgccagttagcaattcgagagcaactgtgtgaaacgctggatcttgcagaaaatgagttaccatttgtcggtgaattgttgcagataaaatccacgcagcagcactggcaaggggctgtggaaagggtgatgcatggttttgcccttagtcttctggtccccgatgcgttttatcagcaggtttctgattttatagaaaatacccacctgggtggtcgtctggtttattatcgggttaaacagaaaagtgattttttgcctgccgtcaatttgtccgggttattgccggaaaagatagaaatcaggcctgatagccctttctatgcatggcttgataaagaaatcagacagcgctttaactattggtgttgcgactcattgaccgattttcgtcgtagtgaaagggcgattaccctgaatggccaggtaaagacggggccggatcgccacgaaaaagacgacagatatcagattcaggataaaagtcgctatgtgctgggatggagtaataaagagaaaattcagctactggcggtgcaatatagccagatgcaaactcagatagccaaaataaatgaggaacttggcgagtcgcgtaagtttaaagagtctcttgatgaacttcggcgaaaagctctgcagcttgctgatttcagctatacatttgcgcagatcaactggccactttccagtgagcaggttgaatcgctttttgcggaataccgtctgctggaatcctcttccgatacgctcaagcaattacaaagcgaccttgatatggcgcgccttgaactacgtcaggtacaggccgcgcgtgatgaactgcacagtaagcaaggagagctgaaaaataaaattgcgaccaatcagggagatctgaatcagcagcagatcctggcctccaccatcacagcgcagcagcaggacgagtgttatcctctgctggaagagctgtttgcgcgttacggtgcaggcgagggattgcgtattgaaatgctgactaatcaactgtcactactgcgcactaagctgaatgaaaaaatccagcatcttgaggaaaggcgtaccaaaaagcaggacggtatgatcgcggcgatgggggattttattcatgcttttccgaatgattccacagaactggatcgcagtttggcagcgttgccggaatatcagcagcttttggcacaactgcaaaaagaagatctgcctcgtcatgaggcgcgttttaaggaaatgctcaatcgtgatacgattcgcgcgatgactctgttccgcagtcagttagataaacaagaggaagagattaagaacaggattcgggtgattaaccattcgcttattgatttagactaccagccaggtacatatattgaggtgatgggcgtatcgtctccagatgttgaaatccgggagtttaaacagcggcttaagcagtgtgtggaatatagtaccgatgacaatttttattcagaacagaaatttgagcaggtaaaatcactgattgaacagatgcgtaatcagcctaaatggacacaaaaagtggtcgatgtacgctattggtttctgttcaatgttattgagcgctaccgggaagataatagtgagaaagagtgttactccgattctggtggcaagtccggtgggcaaaaagagaaacttgcttattctattctggctgcggcgattatgttgcaatatcatcttgttgatgaaggtgaaaataacgtcaatgccagacgttttaatttagtggtgattgacgaagccttcgccagaggctcaaaagacagcacccgatttgggcttgagttgtttaaaaaattggggttacaactgctgttagtaacgccattgcagaagttggatgtgattgagaactatgttaatcatgttcattttgtcgatcagaaagacaaccgttcaatggtgctaaatatgtcaattgaagattatcgtcagcgtttacagcagaataaagcattgcagggatatgccgaactggtagaagaaggtgactgtaatgtttga

SEQ ID NO: 80571 - DNA, 441 bp, Citrobacter koseri
ttgacgctggatgaggctgaaggttttgcttttttggtgcagcaacaaccggaaaacgatgattttccgcgcctgatccccagacgcaatttgacttttactcagagcgtgctactggtgtcgttaagaaagcgacttgctgaacatgatgcggaagaaggcgctccacgcctgatcgtgacgcggcaggagatttactcctggctaaagccttatctgccggaggtgaataatgaggttaagcagaacaaagatctggacgcattaattaagaaattcagtgaaatgggctttattagcgtactgaccaatcatcctgacgaatttgaagtattgcgtattattaaagcgatagtgacggcagaacagatcaatactttcattcagttgttcagagaacgaaatagtgctcaggagcgggaaggagaaagcgatgagtga

SEQ ID NO: 80572 - DNA, 1464 bp, Citrobacter koseri
atggcaaccgatctcagttttgatttccttgaacagtttaaagaaaagagcctagcgctcaaacttctgcgctcaacgcacttctcgcttattaccagtttcctgcatcaaacttttgtcattaccaatcgacgcagtgtcccgtaccaggagcttgttggcctactggaacagcatctttttgatattaaagagagctatggtgaagataaatttcctaaaaatgccagaaactatctggacgactggattaatagcaaaggtggctatttaagaaaatatctgactgaagatagcgatgagccggaatgcgacctccttcctgaagtggaaaaagttctgcactggattgaagaacttcagggacgccagtttgtcggaacggaatcacgtttgaaacttttgttggatatgatcggtgaactggttgaagggaccagtgaagatccgcagcaaaaactacagcagctcaaactgcgtaaagcagagattgagcaatctattgccgctgtcgagcttgggcaagatcaaggattttcagcaacacagattaaagagcggctttatttactgtctgatatgtctcgtcagctgttaggggattttcgtcaggttgaaactaactttcgtcagcttgacaaagactcccgcaggacgatcagttctggcggtaatatgaaaggcgaagtgctggataaaatatttgaacatcaggatgtgattgatgattccgatgaaggaaaatcatttagcgctttttttgaattattgatgacgccaaaaatgcgcagcggtatgcgggaaaacttgcagcttttgctggataatgagcaggggcgggaagttattcgccacgatcgtctgttaatcaatctatatagctggctgttagatgccggagggaaagttaataccacccggcagcaaataaccgatcagttacgtcgttatattcaggagcaatctcaggatactcgcagggtgctggagattattcgtgagtttgaaattgaagcgcatctttttggtgaacgagatgaggcgtgcgattttattgcgctgggcggtgtacaggctgagataaaccccttattaagccgtcagctctggcagcccaaacaggacgaacagcttgatagccaggccgccgttgctgaacgtgagcctgaggtcgattttagccaactgctggcattaagccacatcagcgaacggcagttgcagcgtaatattctgcagtgtctgatggataatcacgggcaggtcacgcttgctgacgttcttgaacgttacccacttgaattcggtcttgacgagttgcttacctatattaagctagcctgcgagcaggttgtgacggcggatatcaacaggcagtataaacagcaaatctcctggcagccggaacccggtctggtaagaacggtttcggtacccaaaatcacttttgttcggagtttatga

SEQ ID NO: 80573 - DNA, 1470 bp, Citrobacter koseri
atgtctgtttctaaagaagaagtcggtttgcgttctttgctgaaagagctggtttcattgccgaaagagactgagtgggcagaatttaagcataatgcaataaaaccagaagaactcggagagtatatctcggcactggcaaattcggctgctttgcttggaaagccaacagcctatatggtgtggggtgttgatgatgagactcattctataatcggtacggatttcaaaccctctctcgctaagcataaacaccaggagctagaaagctggctgttgcagggcctggaaccaaagattgattttacattccatgaattctcgtcacctgagaatgatgctgttgtcattctggagataaatgcaaattgccatacccctgtgcgtttttcgggaacagaatttattcgtattggctcttataaaaaaccgctgggtaaacacccagaaaaagagcgtgccctctggcgtgtctttgatcggaaaccctgggaataccgcgtagcacgggacaaatgctctattgatgaggtgttgcagttaatcgactacccatcgttcttctcgctcttatctcaaccgttaccagaaaataaagattctataatggattaccttgcaaaggattttgttgttgagataaatgatgcggggtcttgggatattaccaatcttggtgcaatactttttgcacgagaattagatgcctttaaaaatttgtcccgcaaagccattcgtttaatccagtacgatgcaaataatcgttttaaaacggtaaaggaattacaaggccataaaggctatgccgtcggttttgaaggcttgattgattatattaataaccttttgccatcaaatgaggtgattgggaaggcttttcgcagcgaagtaagaatgtatccggagttgtctatacgagaagttgttgccaactcgctgattcaccaggatttcaacattggcgggacggggccaatgcttgagttgttcgccgatcgcatggaaatttcgaatcctggcatacccttagtggcgattgatcgccttcttgattctcccccgcgtagccgtaatgaaagaatagcctctctcatgcgcaggatggggatctgtgaagaacggggaagcggtatcgataaagttgttattgaaactgagatttatcagcttccagcccctcagtttgaagtttatcaggagcatacgaaagtcactttgtttgctcatcgcgattttaaggatatggataatgaggaaaaagtcagagcgacttaccttcattgtgtattgaagtaccttgaaaatgttccgatgaacaacaccacgctgcgggaaagatttggtgttgatgaaaaaaacagcgcaatgattagccgtatcatcaaggaagcaatgaaagaaggccgtatcaaacaatacgattcatcagtaggaaccaaggcaatgcgctacatcccattctgggcgtag

SEQ ID NO: 80574 - DNA, 492 bp, Citrobacter koseri
atggcacaacaccgcgtaggccggataaggcgcttgcgccgccatccggcgcgtatgtgtgcacgaaagcctgatggcgctgtgcttatcaggcctacagcgtacagcaccgtaggccggataaggcgtttacgccgccatccggcatgtatgtgcgcacggaagcctgatggcgctgcgcttatcaggcctacagcgtacagcaccgtaggccggataaggcgcttgcgccgccatccggcatgtatgcgtgcacgaaagcctgatggcgctgcgcttatcaggcctacagcgtacagcaccgtaggccggataaggcgtttgcgccgccatccggcatgtatgcgcgcacggaagcctgatggcgctgcgcttatcaggcctacaatgatacacatgaaaaaaccggggaatccccggtttttttgtatcgtgcgacaacggtttcgattattgatccgcggctgggccgcaaccaccaataatttttga

SEQ ID NO: 80575 - DNA, 1137 bp, Citrobacter koseri
gtggatttgcttattgtactgacctatattgcactggcatggacagtttttaaattattcaggataccagtaaatcagtggacactttcgtcagctgctcttggcggtatagggctggttagtgggcttattttattaatgaactataaccatccctatacatttaccgcccaaaaagcagtgatttctgttcctgtgatccctcaggttacaggaagggtaattgaagtcattgacaaaccaaatcaactaattaaaaaaggagaagtactttttaaaattgagcctgataaatatcagtctcgcgtcgagcgtttacaggcagatttagtcacggccatccataatgttgaggtactaaaggcccagttgtctgaagctcaggaaaataccatacgagtctcagttgaacgcgaccgtctttataaagattatcaacgctatgtgaaggggagccaggctaaggtaaatcccttttctgaaagagatatagacaatgcccgacaaagttatctgtctcaggatgcagtagtaaaagcttctgttgccgaacaggctcagattcagagtcaactggacagtaaggtaaatggcgaacagtcccagattgttagtctgagagcgcaacttgctgaagcgaaatataatcttgcacaaacaatcgtccgggcccctggaaatggatacgtcactcagttgttgattcagcccggcacatatgcgtcttcattaccgcttcgtcccgtgatggtcttcatcccggaacagaaacgacaggttgtagcgcagtttcgtcagaactcattgttgcgtctaaaacctggtgacgaagctgaagtcgtgtttaacgccctgccaggaaaagtgtttgaagggaaattaatgagtattcttcctgttgtgccgggaggggcttaccaggccgagggcacactacaggcactaaccgttacaccggcaatggatggggtgatggtaactattgaacttgaacataatgaatatattgatgtgttacccgacggtgtttctgcgcaggtagctgcatattcggaacatttctcgcatgtttccgtattgcgtaaggtgcttttgcgtatgacaagctggatgcattatatttatcttgatcattaa

SEQ ID NO: 80576 - DNA, 327 bp, Citrobacter koseri
atgaaagcggcgcatcagctcagtgagcgcggatgctacctggcggcagagaacggatgcagcacgatcgtcgatctgtcgcccgcgctggcccgccagccggacagcattattacgccgccgaacagcagcattatgtttgcacaatgcgccgcgattccactgcttaccgcagaaattgcacagggcgaaagctggctgtgttgcgcggtttctgcttccaggcaacagaaaaaatatacggcaattccgcaactgcaaataaacgataaccaggtggttattcgcgaaccagaaagcgcacgccagttatcgttctttttataa

SEQ ID NO: 80577 - DNA, 375 bp, Citrobacter koseri
atgactgtaccaacaccacttcaacacgctgacgattatcagcaaatccatgacggtattattcgattagtggacaatgcccataccgaggccgtccgcagtattaatgctttgatgacggcaacctactgggaaatcggcaggagaattgtcgagtttgaacaaggcggcgaagcacgagcggcttatggtattcaactcattgagcggttatccgcagatttaagccagcgctataagcgtggattttccaccaggaatctgtggcaaatgagaacattttatctatgttttcagtatattgaaattccgcagacagtgtctgcggaatcttcacatttgatacaactcgctaaagtttttccgcttccctag

SEQ ID NO: 80578 - DNA, 1005 bp, Citrobacter koseri
atgagtgagttgacccgacttgagcgcgctgttaccccgctgtgtgaacgtcatcccggcgaatgcggcattctcgccctggatgacagcctggatgcctttgccgcacgctatcgattaacagaaatggctgaacgcaccctggatgtgcagtattacatctgggaggatgacatgtccgggcgcctgctgttttcgatattattggcggcggcaaagcgcggcgttcatgttcgcctgctgctggatgataacaacacgccggggcttgatgatacgctgcaactgctggatagccaccccaatatcgaagtgcgcctgtttaatcctttctcttttcgtatgctgcgcgcgctggggtatttaaccgactttgcccggcttaatcggcgtatgcataataaaagctatacggcagatggcgcagtcaccattgtcggcgggcggaatattggcgatgcctattttggcgcaggtgaagagccgctgttttccgatctcgacgtgatggcgattggccctgtcgtaaaagacgtggcggatgattttgaacgttactggcattgcaaatcggtttcaacgctgcaaaaagtgttgtcgctgtctgagcaggaaatcacccgacgcattgacttaccggattcctggtacaacgacgacattacgcgccgctatttgcataagctgaaaaccagccactttatgtcccatcttgatcgcggcgctttaccgctgatatgggcgaaaacccgtttgctcagcgacgatcctttaaaaggcgaggggaaagcgcagcgtcattcgcttctgccgcaacgcctgttcgatgtgatggggtcgccaacggaacgtatcgacattatttccgcctattttgtccccacccgggcgggccgcgcaactgctgcaactggtgagaaaaggggtcaggatcgcgattcttaccaattcactggcggcgaacgatgtggcggtcgtccatgcgggctatgcgcggtggcgtaa

SEQ ID NO: 80579 - DNA, 462 bp, Citrobacter koseri
gtggcggtcgtccatgcgggctatgcgcggtggcgtaaaaaacttctgcgctacggcattgagctctatgagcttaaacccactaacgggcatgcggctgaacttcacgatcgtggtttaaccggtaactcaggctccagcctgcatgcgaagaccttcagcattgacgggaataaggtttttatcggttctctcaatttcgatccccgatcgacgttactcaataccgaaatggggtttgtgattgaaagcgaaacgctggcaacgctgattcataaccgttttatgcagagccagcgtgatgacgcctggcaactgcggctggatcgttggggaaggattaactgggttgatcgccacctgcgtgacgaggtggtactgaaaaaagaacccgccacaggattctggaagcgggttctggtgcgactggcgtctgtcttgcccgtcgaatggctgctttaa

SEQ ID NO: 80580 - DNA, 1254 bp, Citrobacter koseri
atggcactaactgaggtaaaagtcagaaatgcgaaacctgctgaaaagcccgtcaagttaaccgatggggatggtatgcatcttctggttcatcctacggggtcaaaatactggcggcttcaatatcgcttttctggtaagcaaaaaatgttagctcttggtgtctatcccgaagtgtctttgtcagaagctcgtcgcagaagagaagaagcaagacaactcattgccaataatgttgatcctggcgaaagacgaaaagcagaaaagattgaagagaaaggtttactcatttttgaaattgttgccaaagactggcactcaagcaacagaacatggtcagacagccacagaacaaccgtattaaatagcctgatcactcatgtgtttcccattataggtaaacggaatattgctgagcttaaaactcgtgatttacttgtccctctgaaaaaagcagaggaagctgggcatcttgaacttgcggctcgcttacagcaaagaatcacagcaatcatgcggtatgcagttcacaatgctttgattgaccaaaacccagcttacgatctcgcaggtgccgtaactactgccaagagtaatcaccgcccagcccttccccttgaacgacttcctgagcttcttaatcgcattgatgcttataaagggaaaggcattacacaaatagcagtccaattaactctactgacgttcatccgttcaagtgaacttaggttcgctcgttggtccgagataaatttcaaaaactcgttatggacaatccctgcagaaagacaagaattggatggagttaagtattcaggtaggggctcaaaaatgaaaacccctcatcttgtgccgctaagtaagaaggccgttgtattgcttaaaaggctccaagctataagtggagaaaaggatcttatgttcattggttttagtcgcgatgacaaaccaatcagcgaaaacaccgttaacaaggctcttcgtaccatgggttacgacacgaagactgaagtttgtggtcacggttttcgaactatggcttgtagtgcattaatcgaatcagggttatggtcaagagatgctgtagaacgccaaatgagccaccaagagcgtaactcagtgcgggcagcatacattcataaagcagaacatcttgaagagcggaagctcatgctccaatggtgggcagactaccttgataccaacagagaagaatatataacaccatttgaattcgcccagagaataaaatag

SEQ ID NO: 80581 - DNA, 855 bp, Citrobacter koseri
ttgccgatgggggaggcattttgtcggcccggtaagcaaagcgccaccgggcatagcgccggatggcggcgcaagcgccttatccggcctacgggagagaagttttgtaggcccggtaagcaaagcgccaccgggcataacgccggatggcggcgcaagcgccttatccggcctacgggagagaggttttgtcggcccggtaagcgaagcaccaccgggcatagcgccggatggcggcacaagcgccttaccgggcctacgggagtgaatcttgtaggcccggtaagcgaagcgccaccgggcatgacgccggatggcggcgcaagcgccttacccggcctacgagagagggattttgtaggcccggtaagcaaagcgccaccgggcatggcgacggatggcggcacaagcgccttacccggcctacgagagagggattttgtaggcccggtaagcgaagcgccaccgggcataacgccggatggcggcgcaagcgccttatccggcctacgggagagaggttttgtcggcccggtaagtgaagcgccaccaggcatgacgccggatggcggcgcaagcgccttatccggcctacgggagagaggttttgtcggcccggtaagtgaagcgccaccaggcatgacgccggatggcggcgcaagcgccttatccggcctacgggagagaggttttgtcggcccggtaagtgaagcgccaccaggcatgacgccggatggcggcgcaagcgccttatccggcctacgggagagaggttttgtcggcccggtaagcgaagcaccaccgggcatagcgccggatggcggcacaagcgccttaccgggcctacgggagtga

SEQ ID NO: 80582 - DNA, 666 bp, Citrobacter koseri
ttgcggaaagtagcaaaactgatttatcaggatcctgaactgcaagattcagagattggtgtaaaaagagaagtcaatattcccttaccagattcagataatagctaccatgcagactacgtgatgagaaacttttccggtagaggaagagttgacgaagtcctcctcgaaatgcagggtggcggggaaacgagcagcacaggtgccattactcgccatattgccgcttgggctgatctcgaatttccaacaaatgaaattctaagaagaccagtagcagcaaatactatcgaaaccaacgcatggagacgacaacaagaacaatttcttgtgaaagggaatgttgttgatcaaactggtgggaaaatcgtttttgctgtaggtagcttactctatgactatttacacagacgttttaggaatgcgaatctcagggatctgaaagcccataactggacattatgtattttagctttcaaggaagatacatcggatgaaccacatccaggtccgattccgttgatcattgatgactcaaaaacattattcaccaactattcaacatttgtaagatttctaacagatcagggcgcaccacgccctgaactattcgaaggatcatttttacgtttagataatagtactgttacgataatgcctcgttga

SEQ ID NO: 80583 - DNA, 243 bp, Citrobacter koseri
atgcttccggaacctctgatacaggcctatcaaaagcagatatctattctatccagcatgcaagtattggacgaaaagcaaccgcaggacctcaagcaaaaggatacaggaacgacggagaaacctacacccttgactcaagaggaagttcagatgctgtatgtgcgccggatgctgccttccgagtacgagcgtctgcagggatttccagagaactggactctaatcgattcagagcagtag

SEQ ID NO: 80584 - DNA, 888 bp, Citrobacter koseri
atgcaagagaataacaatctcgcacaacaaacttatatcccatctgattggcttaccatcaatgaagcagtgaagttagccagaaaaaaatctggtatgaaagtcaaagatagcgatatctatcgtcatgctttatctcatgatatttttctttcaatttactttcaatctccagtttttttgaaggaagtaatgttttgtcgaggaaaaataaaattatcaacctcatgtaatcctattaggaatgactattttgcagcctgtacaaaaggaaaatttctagctactccttgtccaatcctagataccagactcctaggttgtgagtcctcattagttcaaaatttattggctcattctttgcgtatctctccaccaacgcgtgatacatacgcttttaacattggcatattggttaatattggaggagttgattttcaggtttttaaaaaatttccatcattggatgcaaaaatttcgaaacttaaaacaacatcaacatgtttatataatagccttaatagtttaatatatccacactgtagtgaagaaaatttattagcatatttcactcctgtttacactttgccaagtgatgcatgttttgttattaagcaccatgaattgaacaagttgattaagatactatccccgcaacagggaggtgtatcaacctcatcaagaatatccactcctctgtcaagaatgttttggcttgcatgcaaaaacaatgcaattatcagccccctaattagtaagccctataagcttttgtccatttttgaacaatgggcatcagttgaaggtattacagaacacttcagcggcgatacgctaaaaaatgcactagaaagaggcgccccttcttctgcatcctttacccgctga

SEQ ID NO: 80585 - DNA, 588 bp, Citrobacter koseri
atgattccattaattaattacaccatcttaactgatgcattgcacgcactgaaagttggggatattcgtcactgtgaatccctcggattcactttcgacgaaatgaatgctcttaatcagttatcactcgatgaactgtttacggtcagccgggcgtcagctccatttgtttcagtcagtgtccgccatgacgttctgtatcatttactggcgcaggcccgacaggaataccagcgacaacagcagattaaccgcgctatccggctgggcggttcgattgcactactcaaccactattttggcctgacgtctaatgatgtctgccttcgccgccgattgctgggggtcagcgtgccttatggccggacgcctgaaccggacgaagagacggattcggctatctggctgcaatggcaacagtgccggatagacaaccttgagtcgcctgacgcgctgattgccatgatgcagctgacagaggccctacatccagagtccaaagggctgtcacttaccacggtctggaagcgtatcgcacaatgcgaacaggacgctgccactgacaggagggggccacatgccggatga

SEQ ID NO: 80586 - DNA, 189 bp, Citrobacter koseri
atgctagcatgttttcctgccgggcgaggcgatcctgctaaccgggggcggtttgttcttaaattgcctcgttccggcatcaatcacaaccgagccaaagctgtctgcttgttgaacaccgcgaacagtttatctaccaccacccagaccgaggtgagaaacttcttgaaacaggtcacagtgccgtaa

SEQ ID NO: 80587 - DNA, 816 bp, Citrobacter koseri
atgtttgacaatatatttagcgttgaatccattatttccttagcagtaactattacggttagctttgctgttacctttaaagtcataaagttaaatctaactataaaaaacaaatcgcatactattaaaggcgacgggaatagcatcgagcataacgaattcaatatcgttatgaaagatgctcaaggtgaatttaggaatctaagtttatgtcttggtgggattattattttactacttccatattgcggctcttttgtcaattattttttgtataatttttcacgtattgctccttacttttgtgttgttggtattgtttttaccctatgggctagaggctttactaatcggttttttgattgtttctatattgtaccgacgctatttaatgtttatttcgcatcacgcgcagctgaaaattcatattattttatgagccattttgatggcttatacgatagaattttaagctcttttggttctattcttttttctgcgggaaagtttgaatactttagtaactcaattttatattttttagaacagatcgctattttttcatccattatagggtttgtaacggtgtctgtaatgttgttgtatgcaacttttggttatataaaacaacgcagtttctccagtgcacttacattcgctttaaaaaattgcatatggggttttacaggttatctggctgcttctgggattgtatggggtttgttttatggacaaaatcagtatattgcaagtattttcgagcctgcaattcagttgataaccggtttgtttaacatcagaactccactttattaa

SEQ ID NO: 80588 - DNA, 342 bp, Citrobacter koseri
atgtctattttcgacaggctgttctactatgtcttatgtaaactggaaccgtggcttccgccacggcgtctgaaaattatcaatggagactcattacccacaaagatgcctttacgttcaattattcttgccagagatggggatgaagactggtgcatcggattcaggtgcccttgtggatgttgtcgtactattgaactacttgttatagatgaagccagccctcgatgggattactctttagataataataatttactcacgctgcatccgtctgtatggcttaaagacggctgtaaatctcatttttggctaaaaaaaggacgagtattttgggtgtaa

SEQ ID NO: 80589 - DNA, 1371 bp, Citrobacter koseri
atgagcaccgggagtcgcctgatattgacgcaggagcttcatgcctcactccggaaacatctgttcccgggagacggaaaagaggctgctgcaattctggtctgtaatcgttacgacggtactcgtctgaagctcctggctaagaagctcattcttgttccatatcaagagtgtaaatccagggcgatcgattttatttcttggccgggtagctatctggagaaggccattgatactgcagaagaagaatcgatgtcaattatcctcgtccattcgcatcctggtggtttcttggctttctctgatatggatgatgcaagtgatgtgcagactatggcgtcactttttcagggcgttaataccattcatggttcggcaattatgattcctgacgggaatatgcgtgcacgtttctaccgggaggggaagtactctgagaatgtggaactggtaaccgtcgcgggtgataatattcactactggtgggacgggctcgctgagccacgaccgcctgcaatggcttttacatcggggatgacggacacttttaacaagctcaccgcagctgtcattggggtatccggtacagggtcgattgtggccgagcaggtagcaaggctgggctttggcgaaattcttttgattgatcatgatcatatagaaaagaaaaatctgaaccggatcctgaactcgacccttgaagatgcgatgctctgtcgaccaaaggtagacatgttcgcggaagttattaagcgtattcgtgggggcgatattgcccggcccattcacaatactattttctcgcgggaggccgttcttgctgcagcaaacgcagatataatcttttgctgcgttgacacctaccatgcccgaatgattgcagatcgtattgcttctgcttttttaatcccattgcttgatgtgggggtgaaaattccgactcatgttgatcctgacgatgggcgaaaaattacggacgtgacgggccggattgattatgtaaaacccggtggttctactttatctgatcgtcatgtgtatacacctgagcttatataccgggaaaacctgagcgcgaaggattatgaagatcaggtcgggagaggctacatcacgggggttcaggaagaggcaccatcagtaatcaccctgaatatgcgagcggcatcggcttgtgtgtcagaatttatcgcaaggtgtttcccttttcgcgaatatcctaataagagatttgcccgtattatgttcagtctttcaggtgccgaagaagactatatcgatgaaagtgatatagagaaggcgctgaatccacggcttgcagtcggatgtgaagagcctcttttggggatcccggaactgggagggaaataa

SEQ ID NO: 80590 - DNA, 1089 bp, Citrobacter koseri
atgaacgacctgcaatcacaacatccccaccatcgtatcattgaggtggcggacgagagcctcgcttaccgtcaggtaatcgtggatgataacacgcctaccggcgcacagatttcagctgcatcagggtttaaacctgatcagctacctgtagtgctgatgttgctttctgatggctctctggaggacatccgtcccgatgaagttgtggatcttggctctgaggttcgccgctttatcattgtcgagtcagaccgcacctatttgtttactattgatggcactcgtatggagtggccatgtcgtttaattaccggctatgttgtccgtaaacttggcaatgttgatgataataaaaaactgttactggagcgtgaagacgaagctgatctcgaaatccagaatgaccagtttatcgatctggatggggatggtattgagcgcttcattagcaggaaggcatcatggaaactgaatgttcagggtaaggaatttatttttgataccccgacaattgtaatccgtgacgccgttatccgtgcagggctgaatcccggtcaggcatggcatattttcctcaaagtcgaaggacagcctaaagttgagaagaatattgatgacgtcattgatttgcgtacgcctggcattgagaagctgcgccttacgccgaaagatgtgaataatggcgaagcatccggggtaacccgtcgtgagttcagtttgttacctgcagatgagcaatatcttgatggaatgggatattcctgggaaacctacctgaacggcaatgctcgctggctgattatccacgattatgaactaccggaagggtataaccatcataagattaaactggctctgttgattacctccggttatcccgtaaacatgctggatatgttttacgtatatccgccactgtcgcgggtcaatggcgtcaacattccagcgacggaagctacggcggttattgatagtgtcgcgtatcagcgatggtcccgccatcgctcatgggatcctgaaacagattccgtcatctctcaactggcgatggcggatggttgccttcaaaaggaggccggacaatga

SEQ ID NO: 80591 - DNA, 549 bp, Citrobacter koseri
atgaaagtcaaactgctggaactcactgaaaacaatgaccacccatttggaaatgttttgggacgggaagtgtttaagcgacttcaaagagttgttgactcacatcctagttgcaaggcatttgaaatttctcttgaaggtatcatcgctaccgattcttcctttccgcgggaaagtataattgcacttgcaaaacagctttgtggcgaaaagtacttctttatcacagatgtcagttctgtagatctcattgataactgggactatgcggcaatagcaaagcagcagtctttgattgtgatgcttgataaggaagtgcgtatcattggtcctgaagcaaaaagttcgacaaaggcattgctcgatgtcgtgttaagccgggatggagccagtaccgccaatgttgctaaagccctcaatatcactgtacagaatgcaagtacaaggctcaaaaagcttgtaagtgaaggacttattatgcgttcagaggtatcatcaccaacaggtggtattgagtttatctacactggccccggaatttctgattaa

SEQ ID NO: 80592 - DNA, 1104 bp, Citrobacter koseri
gtgttgttcgatatagagaaaatcaaagagctacttcgtgagtttcctggactgacaggtaagcaaatagccaaaaagcttgggtatcctgataaatctgccttgaattcatttttatacagcaatctagagggcctcaaacaggtcgaatggaaatggtatgtagaagatgaatatgtgttggttttggatgctgacgtttggatcgatgaagacatttttgaagctaacttatcggctgcaggctgcctattgggcgcttcagcaaacaggtgcagaatatgcttcccggagaattgccggattttattggcagctggtgcgagagtgattgctctgtcaaatcaggctgcttttttggggaaggcgatcgaactggatttcagtaaatgtccatcgacgaaagactttttggatcgattgggcttttttgaccatttacatccggatgtaagggtccagccagagaggccaacggaatctagggcaaaacgctaccggggaaataatgacaatctggttgagatagcatccattaacttggatgatttcgatgattcaattccggtgaaactgactaaacaattcgcgctccatgccggccaggaatattacatggctgtgtttacaattttttctgagctcattggtaatgtacgagatcatagcgagactcctattcctgggttcgcggcgttgcagttgtacaaggggaagcgacgtcatatccagactgtaatttcagatagtggtttaggcatagcaacaactttgaaacgaaaccttaaaacatattaccctgaaatttttaaggaacttgaatctttatccgaagatcctgacatatttttggttaagcatgcactaaaaaaaggtgggttgagtcagtttggctccgcgcctgatgaggcagctcgcggactgggattgaaacggtctcaagagttggccgccagatatgatgcagttgtgctggttcgacagccaaacttcgagttgagaatcatatataaagacggtgaactcaccgacattatagggaaaaaagggttggcgttgatcaaaggtacccaagtttgctttgatttttttcttaggctatga

SEQ ID NO: 80593 - DNA, 174 bp, Citrobacter koseri
atgataatcgcgcatgaggccagcgcatcgaccgctagctatctgtatcagggtcgctacgcgttgctaaaaagactgaaagttactgttagcagtataacatgttttttacataatatgttctgctatgcgaaacgtatcagtcaatgggtcgtgcaatgcaatgttatgtaa

SEQ ID NO: 80594 - DNA, 579 bp, Citrobacter koseri
atgcccagagatggctataccgatatggttggaaaaattcttgatcacgaactgattgaaataagaacagatactgagttttcagctaccgagagtggggcctaccagcatgtattttggtcaggcgcgctggatggttactttaactttagtgaggggcgtctgggttatcgcacgctggatttcgaaaaattctcagcagaaggtgactaccagggaacggctgttatcaactactgcgaagaaaatgtaccttatacccgaatcactgagcataagcatttctcaccctgggagtcacacgaaaaaacaacatgttatcgtgagtttagtcgcttctgcaccgaagatgatattccgtattatccgatccgtatggttaaggaaaaagaactgctcaatcgctacctggataaagcgatggaattaagcaataccacttttgtcgggcgtcttggtacctaccgctatctggatatggatgtcactattcgtgaagctattgatgttgcaaataaattccttgaatgtcaaaagagtcaggagccaatgcctgtatttaatataaatcctcgctaa

SEQ ID NO: 80595 - DNA, 297 bp, Citrobacter koseri
atgtcaatatttttgtttctgcttgttcctatgctgatcggtgatgccacttattttgtgctaaaaaagaccatcaactatgaatggcgtgatgaagcaaaatgtggtgagctaaaaattaagaataaaaacgaaaagtattttgattttaatactaataaatatacagtcttttattcagataaaaatgaaaaatgggggttctatgagcttacctgcaaaaaagggagtgacaggagagattcttatattgtagaacctttgccggaatataatataccctcgtggttaaggtag

SEQ ID NO: 80596 - DNA, 1689 bp, Citrobacter koseri
atgtcggtggaaaaactgattgtcgaccatatcgacacctggaccacggcgctgcaaacccgctctacggcggggcgcggcagctcgggtaagattgacctgtatggcatcaagaagctgcgcgagctgattctggagctggcggtgcgcggcaagctggtgccgcaggatccgaacgacgaaccggcgtcggtgctgctaaaacgcattgcggcggaaaaagccgagctggtgaagcaggggaagattaaaaagcagaaaccgctgccgaagattagcgatgaagagaaaccgtttgagctgccggaggggtgggagtggacaagatttggtaatatattcaaagtgtcatctggagatgcactaacctccaaccaaatgaatactcttggagaatatcctgtatacggaggtaatggaatcaatggctaccatgattcatacaatgttgcgaagagaacattagtcatcggaagagttggttattattgtggttcaattcatataacacctaatcatgcttgggtaactgataatgcctttatcactcatttttcagaaagtaactttgatttagactatgttgaaatactactgaaagcgacaaatttgaaagaggatgaaagtgcaaccgcacaaccagtaatttcaggaagaaaaatatatcctattgttcttgctgtaccaccactcgaagaacaaagaaaaatcgcaaagaaaacatatgaacttctaggcctttgtacacacctagaacagcactccctgaccagtctggacgcccatcaacagctggttgaaactctgctaaccacgctaaccgacagccagaacgccgatgaactggccgaaaactgggcacgtatcagcgaacatttcgatactctgtttaccaccaaagccagcattgacgccttaaagcagaccattctgcaactggcggtgatgggtaaactggtgccgcaggatccgaacgacgaaccggcctctgaactgctcaaacgtattgcgcaggaaaaagcgcaactggtgaaagatgggaaaatgaaaaagcaaaaaccgttgctaccgattagtgatgaggaaaaaccgtttgaactgccagaggggtgggaatggtctagattagatcatgttgcatcgaagattaccgatggtgatcataaaactccaccacgcattgctgaaggttataaattactttcagccaaaaatattcgcgatggttttttagactatgaaaactgtgactatatttcagagtctagctatataaaatcccgtgaaagatgcttacctgagaaaggtgacctattaattgtttcggttggcggaacaataggaagatcatcattaattactggcgactgtgaatttgcactcgtacgtagtgttgcaataataaaaccattaattattgagtcaaatttcttaaaaatagctatggactcccagttattacaatctatgattcactcgcacaaacgcggtggagcacaaccttgtttatatcttggcgaaataagcaaatttctattccctgtacctccattaaaagagcaaaagagaatcgttaaaacagtcaatatattcatggggattcttgaaaccttaactttagcattcaaatccgcccaacaaacccagttccacctggccgacgccctcaccgacgccgccataaattaa

SEQ ID NO: 80597 - DNA, 345 bp, Citrobacter koseri
atgactaccccgcattctattgcagaattcaccgttccagaagtctccctggcaaataaccgcgttgccaccgtcagttatgcgaaccgctacccggattacacccgtattcccgccattaccctgaaaggccggtggctggaagccgccggttttaccaccggtagtaagatggatatcaaggtgatggcaggcttcatcgtgctgacggcaaagcagccggagcctgaagaaccggcattattgcagtcgctgcgtcgggtgtgcaaactgtccgcgcataagcaacagcaggtgcaggagtttatcgacataatttcggcgaagcctgccaggcagaaataa

SEQ ID NO: 80598 - DNA, 642 bp, Citrobacter koseri
atgttcacattggcaaaagatttgctcaatattccagttatcacaagcgtcacccttgccattctcgccgcaattgcgaaaaagtatgtccacttcagccgacgggatttcttttctcgttctcctttagagcagatcgaagctgttaaatggttaaggcaatcaaaaccaccatcttcaaacccactagatgtggctgaacaacaattccgccttctatctttaggtctacatagggacagagatttatcctacaggcttgtggcttttcattccagccactctcaaacccatattcaatcactcaaagcggtattacgttggccggggttatatgatatcaacgatggcaagatatacccccatagtcatttgaagtggtctctaccattcatgcttatttttatactgacccttatgggttcagagataattaaaagctattcacgtgaagatgtcagtcagtttattttctttctaactgtcatcttagctactcttattccatggttctggatgttatcctgtactctcaagatattcggcatcagtaaaaaactgaacacatacactccaccagtcattgatgctgaaaccgataaagaggatttcagttcaatcattaataataaatatccttaa

SEQ ID NO: 80599 - DNA, 204 bp, Citrobacter koseri
atgccggtatcacgctggctgatgccgttaactttctggtggataagtacgagctggttcgtatcgatcgcagagggtttagctggcaagaacaatcaccttatcttcgggccgttgatattctgcgagcgcgacaggcaactggcttgttacgacgaagtcttaatgatgctgtattgtgagagttccgagcagtcttcctga

SEQ ID NO: 80600 - DNA, 222 bp, Citrobacter koseri
atgacggggattcagttcaccagtggtcagcatcgactctatctggctgataaaatgtggaaataccacatccagcttaagacattcttcgtcactaaacttaccggtgatactagcccggtcagccagctagtgcagccgattgccctcctgcaccagacgtgctcccaggctcggagtgatatcccgctgcaggtcccatgtagtgttgctcatttataa

SEQ ID NO: 80601 - DNA, 222 bp, Citrobacter koseri
atgaaaattatcagtaaacgccgggcgatgacgatttaccgtcagcatccggcctcccgcatttttcgatactgcaccggcagataccagtggtacggcagtgtctgtcattacaccggtaaggtcgttcctgacattcccggcgtgctggcggtatacgccgaacgccgccaggaccgcaacggaccttatacctgcctgatgagtatcaccctgaactga

SEQ ID NO: 80602 - DNA, 483 bp, Citrobacter koseri
atgatggaacagtcacttatcccactgactccggcactaccactaaccgcacaacgcacggtaaaacgcgccttaacgctgcttgaccgacacctgcgcgaaacaggcgtggcattcacttccactcaggctgcccgtgactggctgaaactgaaaatggcgggactggagcgcgaagagtttatggtgctgtaccttaaccagcagaaccagttaattgcccacgaaaccctgtttgccggttccatcagcagcaccgaggtacatccccgtgaggtggtcaaacgcgccctgtatttcaatgcagcagccgtgatactggcgcataaccacccctccggcgacaccatgcccagccgggcagataagaccataacgcagcgtctggtgcaggcgcttcagctcgttgatatccgagtgcctgaccaccttatcgtaggtggtacgcagatattgtcgttcgctgaacatggtctgctttga

SEQ ID NO: 80603 - DNA, 459 bp, Citrobacter koseri
atgacgacacaaactcaatgcgaattgatgtccgctaatgaacctcaatttgacctcactgcaacaccagtgcctgacgaacaacgtctcgatttctggccgctgtactttggcgatatcccgcagtggatatcgctggaaccccgtattttcgcctggatggaccgcttctgtgatgagtacaacggcggtatctggtccttttacacgctcagtaatggcggcgcgtttatggctcctgatgctgacagtgacgataaatggcatctgctcaacggcatgaacggcaatggtgcggaaataagcgcagaagccgcaggtatcgctgtttgcctgattgaatacagccatcacgcctgtcgtacagaatgtgacgcaatgaccgcacactattatcgcttgcgggactatgccctgcagcaccctgaatccagcgccattctgcgcattattgattaa

SEQ ID NO: 80604 - DNA, 237 bp, Citrobacter koseri
atgcctgaatctcacatgctgccaccgggaccttttacccgacagcaggccgaagcggttacccgccggtatcacaacatcagcattgaagacgaccagggtagccacttccgtctggtggttcgcgaccctgaaggtcgaatgatctggcgggcgtggtgctttgaaccggatgccggtgaagggcttaatcgctatatccgcaagtcaggcatgctcagagcatcctcctgctga

SEQ ID NO: 80605 - DNA, 411 bp, Citrobacter koseri
atgctgaaaataatgacctctgctgtacccgccttcattctattacttgccgcattcagtgccggtgctgctcagcttccggcaagcctgatggataaagataatcccggccaggagtactggtgccagggaaacgacatcaatacgtccatgtgctcactgaccagtgtcagcgacgaccaaaaatttgccctgattcaggacctgccgggcccggcctgtgaggacttaagcttcgggattatcgacctggtgcgccagaccggtgtcaatattccttacgacggtggtgactgtaagggagatgtgcaggccgggtttgtgcgaggcacgaaagataatgccctgtatgtgaaaattgtccggggcagtaaaaccctgcggctgtataaggtacaaaccggttactga

SEQ ID NO: 80606 - DNA, 438 bp, Citrobacter koseri
atgaaaacactgattaaaatactgggcattaccggcagccttctgctttgtgcgggggctcaggcccagccctataaccggacgctacctgcagtcgtcaatgacaacaacgggaatattttctggtgtgatgcgcatcgtcaggttaccggaaaatgcgaagccatgtctgttgaccgtcagggcgggatggtcacggtgcgttcagcaccctttaaagactgcgagggcggcctgtggggctggataacaatcatgcgcaacgatgtgtcgaagggattcaccattactccggacaagaaattcggtctcaccgtaaaagacctgtgccgtccgggcacggtagtgacctttaagcccaaccagaagaagccggaatatgacgacctggtggcactttaccaaggcagggaactgtttcgctaccggcgcttctga

SEQ ID NO: 80607 - DNA, 537 bp, Citrobacter koseri
atgacctggcattacgagaaaaatggcatacgtcacgacaatgtgaccgaagacgacatcactggcctgattaagcgcggtgaactcactgctgccacgctggtgtggcgacagggcatgacggactggcaaccagtctccgccaccccgctggcttcagcgctgctccacagcactacaccaccagcgctgccggggaactgcattccgggtggagtggtatggacgctggcatttgctcccttcattggttatgcgctcgagctgtggactgcagggctgaacggaatgtcttttgacgaggcatatgaggctgtctcgggcgggcaatactggtttatcacgctgctgctcaatatcgctctggggtatctcgatgaacgacggctgcgtaatgccggagtggataccaccatgttcggcaaactggcctggctggtgccgttctatttgtggcatcgggcgaaaaccctcggtcagaaaccggcttacttctgggtatggcttgtgatgctgaccctgaccgtctgggcctga

SEQ ID NO: 80608 - DNA, 711 bp, Citrobacter koseri
atgacacaggcagatcgccgtcatgaccggctggctgtcaggctgtcactgataatcagccgcctggttgccggtgaaacgctgaacatggcgcggctggctgcagagtttggtgtgtcagtccgtaccctgcgacgggattttcgcgaacggctgatgtacctcgaccttgagtatcgacgggggcaatgccgcctgcgcagcaccggtgggggcgtacagggcgagcttgatgcgctgaccttcgcgcaccgggccggactggccgatatttttccggggctggaccggcgtctggcgggcatgctgctcactgcaggagggatgccgtgtctggtatggcagccgccacagtctgtgtcaccggccatctcactggtgttctaccgtctcgtcagtgccattaccgcctgccagcgggtactactgctggccgagggagagcgctgtgacgggctggctccgtaccgcctgatatcactcgacggctgctggtacctcaccggtgaacttaacgggcatatcactgtgcaccctctggcgaccatccatgcggtgacagtcctgaacaccacttttaccccgcgaaaacgtctcagccagttaaccacacaggcgggctttattcgggctcttccgcacttcagctgtattcgcgaagtcctgtctcatgggccctctgaggaggagcagggcaatacactgatttaa

SEQ ID NO: 80609 - DNA, 825 bp, Citrobacter koseri
atgacccgtctggcttcgcgctttggcgcagcaaaccttattcgtcgtgaccgtccgttaacccgtgaagagctgtttcgcgtggtgcccagtgtcttcagcgaggacaagcacgcgtcacgcagcgcacgatatacctggataccaaccattaccgttcttgaaaacctgcagcacgaaggctttcagcccttctttgcctgccagaccagagtgcgtgacccagggcgtcgtgagcatacaaagcacatgctgcgcctgcgtcgggagggacaaattaccggcaaacaagtgccggaaatcattttgctcaattctcacgatggctccagttcgtatcagatgctaccgggactattccgtgcggtatgccagaacgggcttgtctgcggtgagtcgtttggcgaggtgcgggtgccgcacaaaggagatgtcgtaagtcaggtgattgagggagcgtatgaagtgctggggatttttgaccgtgtggaagagaagcgggatgccatgcagtcgctgatgttgccgccacctgcacaacgggctctggcacaggctgcactgacgtaccgtttcggtgaggaccaccagccggtgacagcatctcagatactctccccacgccgctggcaggatgagagcaatgatctgtggaccacataccagcgtattcaggagaacctgattaagggcgggctcactggccggagtgcaaaaggtgggcgaacgcatacccgcgccgtgcgtggtatcgacggagatgtgaagctcaaccgggctctctgggtgatggcagaagcgatgctgagtgggtttcagtcctga

SEQ ID NO: 80610 - DNA, 864 bp, Citrobacter koseri
atgaaacaatttgacggtctgcactcactgcagcaaccgctttccggcctgccccaatgggtcactgaacgcattctgcagcatataaatcagcttactcactatgagccggtgataggcattatgggcaaaaccgggacaggaaagagcagcctgtgcaataccctgtttgctggggatatatcaccggtcagtgatgtgtctgcctgtactcgaaaaccactgcagtttcgcctgcagctcggcaaacgcactatgactattatggatctacccggtgttggggagtccgaactacgggatgctgaatatgccgcactctaccgtgaacaacttcctcggctcgacctggtgctgtggttgatcaaggccgatgatcgagcgctggcggtggatgaacatttttaccgggaggtgattggtgaggcataccggcataaggtgttgtttgttatcagtcagtccgacaaggttgaacccacctgcggtggtgaaaagttgtctacagagcagaaacaaaatatcagccgtaaaatctgtctgctacatgagttgttccaaccagtaaatccgatctgtgcggtgtcggttcgtctgcaatggggactgcgggtaatggcagagcgtatgatgcgttgcctgccacgcgaggccagcagtccggtatcggtacaactcagtgcgccgcttcgtaccgatgccgttaataaaaaagcctgtgacgattttggggaaacggtcggctcggtactggatacagtaagttccatgcccctgataccggcccaggttcggtcagtcatccagtctgtgcgcgacatcgtggtatcagtcgcccgtgcagtctggaatttcttcttctga

SEQ ID NO: 80611 - DNA, 930 bp, Citrobacter koseri
atgagtgcaggaaaacgagtgaccagtctctggacgaaaagagtaaatttatggctttactgggatatctttcgctcagcattaatgcatgttgatgagtctcgtgaattagtggaaagaataggtgatgccactcttttcaaagagtcttgcattaactatatgaataaaaaagaaatggttaagtattggagtgcggaagatttctttgaaacgagtaagcgagaggttgagtgtaagttaataccttttagtgaacttgagtggattgattgtgagcgttcgttgtcatttgttgctaattatattcatgccgaatataagctatatacaaataataacaccccctctcttcttgatatcactttacctgaatggagccttggttctgacaagggtggtgtaaattatgaggggttaattcttttgatcgactaccaatgtcgtgtatcaagctttaaccatattcgttcaaacttagaacgtttgaaaaattcctggctccgtatccagaaaaaatttggcaatccattctggttctcatcaaccagatatgatgctaaatacctggcagattatcagtgggtgatgtcttacttcgataagaacaaaatgatcaatggtaatgtggatttttggtttgaaaaaaatttgaatctgaaagttcactcaatatttgatcaatgggttgagaataaagccgatgctgaaggtgaattgtttattataaaaacaaaaaaagcatggggtcagaaaaaattcagagatagtgttgcaaacaaaaaggttctcaatacctatattagcaaagacagtaagagacaacttgattatctggcaagtcaaaatgaaatgaaaatcaatgaattgattgagatgctgatcaatgatgcatacgcaaaagctaaactgaaaagttgggaaaattaa

SEQ ID NO: 80612 - DNA, 582 bp, Citrobacter koseri
atgaaaagacattacccacatttaaagaaaatcacccctaacgacttcctgctgaatttgattaatcaccatttcaatcagatcctggcatgtcacgccaagatactggcatttcgaatggattttgattatcagcggggtactaatcgattcattcgtaactcctcgatagaaatacaggatgacctcagagagcttactcagacaatgattagccttcctggcgttatcggtagtttctgggtactggaatggacattagaaggggcagttcatgcccatgctattttttatcttaatggtcgggaacatcagaaatcattcccattcattttaaaggcaggggaactgtggcatcaaattacctatggcgagggaaagtaccagcgatgcaaaccaaaggaatatcatcaggacaacattaacaatgtcgttgaatatcacaataacgaagccataaacagtctcagacgtatagctagttatctaacaaaagaagaccaaaaatatggttatctaatttggggatgtaatgaggtcccctcgcctgcaaggcagggtagaccaagaaagtttagttag

SEQ ID NO: 80613 - DNA, 207 bp, Citrobacter koseri
atgaacagtaaaccatccctgtttgaagatcagttcgttgatatgactttcatcacccgcctgctgggggtcagtgataagtggatttaccgactcatcaaagatggcatattcccaaaacccatcaaactggggcgaagttcacgatggctacagagtgaagtggaagcctggctacaggcgagaatccacgaatcacgcagctaa

SEQ ID NO: 80614 - DNA, 576 bp, Citrobacter koseri
atgaaagagacaaagacgcgatataacagtttgctagtcagctatcaacgctggctaaacgggttcacaaaactggccatcataaatggcatgtgtcatcccaatattcaggccagccaccatttgatggtgggcagtctgtactttcccggcgtagggcagatgactgcagtggtaccacaatgcctttaccgactgatttacggaagtcagcatccagagccagtgtcggtattgactgatatgcaaatcagtcttgagacaaagcaaaaaactttactgcaccacccaatgctggaagggatattgctgagtgaatgtatccgcctgaaacaacgtccactagcaaataggctgattagcctgttacaccaattcagttcaccggagcatcgccacaaactggtctggctatgttggtacgatttgatgatgggtgcgacgctggaagactggttggataacctgaaacgtaaggcacctgaagatctaggcttgtggctggttggacggcaggaggaaaacatatctcttacacaaataatggatgaatatctgctatttaccggccactaa

SEQ ID NO: 80615 - DNA, 420 bp, Citrobacter koseri
gtggagcgcagcgaaaacgtgatcctgctgggacctccaggtgtcggaaaaacccgtctggtcgttgctctctgcgtgaaagcgacggatgcagggcatcgggtactgatcctggatgaaataggctatctgccaatgaccagagaggaagccagcctgttcttccggctactgaaccgtcgatatgaaaaagcgagcatcatcctgacgtcaaacaaaggcttcgcagactggggagagatgttcggagataacgtactggcaacggcgatcctggatcggctgctgcatcactcaaccacgctgaatatcaaaggagaaagttactggttaaaggagaaacgcaaagctggtgtgctgaccaaaaacgcaacgccaatcagtgaagatgaaatggtgaaaagcggacagcatcagtaa

SEQ ID NO: 80616 - DNA, 231 bp, Citrobacter koseri
atgcctgaacttgaagtactgctgagtcgcctgaaaatggagcacctgggttatcacgttgaaagcctgctggagcaggcgtctaaaaaagagctgaactaccgggagttcctgtgcatggcgctgcagcaggaatggaacggcaggcatcagcgtggcatggagtcccggatgaagcaggctcgtctgccgtggaccaaaacgctgaagcagttcgactttaccttctag

SEQ ID NO: 80617 - DNA, 393 bp, Citrobacter koseri
atggctgaagttgctgataaacgggagcttcgccagttcagacaaacaccagagcagcgcttcgcgctggaacaggagcatctgcagccgttgccggatacggacttcgataccagctacttcgacatccgccatgtgtcctgggacagctatattgaagttggcggcaatcgttacagcgttcccgaaacgctgtatggtcagccggtctcgatacgaatatcgctggattatgagttgcggatctacagtaatgagcaactggtggcatcactccgtctctgttcagcatcgtccggctggcagacagtgccggaacatcatgccccgctctggaagcaggtcagcatggtggagcatcggcctctgagtgcgtatgaggagttaatgtga

SEQ ID NO: 80618 - DNA, 1068 bp, Citrobacter koseri
atgagttctcaccattactatccacagctacgatggaaacctgctgagtatgagtctctgatgcagctaaatcagacaacaatctcaggaattactcccatcattaccattcttgatattgactgggactacgaaaatgactgttataaaaaatcgttgagcggctatttatctgacttcggtactaatcttgcaacgtcctggacaccgaatcgtccagtattgttagatttaaagtatttagataaacatggttcgagtcgttctcatcccttagatatgtgcattaatgatgccagatctcatggaaaggagattgtccctgtcgtttccccaacatcctcggcaaactacatacatgctgttcagagaaacgtatctaatggcgtagccatttcacttagtccaacgacgtggcacgcgtttccacaactgttaaatctgttaaatcttcaaccaagtttgattgatatcatcattgattatggcgatatccaaaacgccaacgataacttaaaacaacaggcattagccacgatcaactcgctttcaggacaagccccttggagaacggtgattttatcttcaacctcttatccaagctcgcaaacgggaattccacagcatgtaattcatcctattccacgacatgagtatgctctttggttatatgtagtacagaatttaggcaatggcaggacaccatgtttcagtgattatccaactgcaagtgccaccattacgagcgtggacccgcgattcatgtctcagtatgttgcggtgagatattcgaatgacaattcatggatttttgtaaagggcactgccgttaaggggaatggatggggtcaaacgaaaactctatgtactactctcgtcaattcagctctatatcaggcatatggtccaaactttagttggggggatcagtacatttataatagggctaacggcactaataaatcaggtggctctaaagaatggcgcaaggtagcccatacacaccatctcacactagtagttaggcagttaactctgttatcacaaactttaccggctaggccctaa

SEQ ID NO: 80619 - DNA, 573 bp, Citrobacter koseri
atgaaagatcaagatgttagaactgcggtgcatcataagcttttgaaagaatcgcatttagatcctgattgtcttgtaatcgatgaattttccatctcccttggtgccagtagagcagacatagctgtagttaacggagttcttcacggctacgaactaaaaagcgagcatgattccctggaaaggttgccgttacaaatcaagcattattctgccgttatggataaggttacgctcgttgtcgcagataagcatctcgacggagcgcttcaaataattcctaactggtggggggttaagaccgtatcggtagggccaaaaggggcaattcgtatcaaacacatgcgtggtgaaaagctcaatagaaattatgactctttgatgcttgctcagttgctatggaaaaacgaatgcattgatattctagaacgttggggctgctctaaaggttacaaaagcaaaccccgatttgaattatggaatgtcgttgccaatcatatcccggttaaagatctacgacttgaaatcagaactgcattaaaaaaacggatcgattggaaacttagggcctag

SEQ ID NO: 80620 - DNA, 147 bp, Citrobacter koseri
atggcgattcagggcgcattaacggcgttctttatcgttatgcttttctctttgtgggatggggtactggggccagtaattggttatgttgctgttgtgtgtgacgttctccacgagattaaggatggttgtcatggcaaggagtga

SEQ ID NO: 80621 - DNA, 573 bp, Citrobacter koseri
atggcttggttaggtattccatttcctgcgggtgctgtagagtcgctaattataaataaattaccaactatcacactggatacacctttcgcttgggacacggttttaggttctttcatagctggtgcgattcctgcaatcattgcatggcttgcgataaagaataatttcaagttgtctgatagacaagcgaaacgcactgaaaaattaaatcttgaagaaaaactccggattgcctcattagactatctttgttccattgagtcggtagtgttcaatatgactaagtatttagcgagagattacaaaacacatgatcatgcattgggttatcctgaatattttcaagcagctttggatttagcgcaaaaaaacgagcgctacttattgttgctggttaagccagacgaaaggtcaaatgaattcttagaggcgattattaaagttaataaatcggttcagccatttgtaactctttctcaagttagcgatgaatgtccaaagatattaaagaaagcagcggataattttattttctgctttcataaatatatacagatgcacgaacactaa

SEQ ID NO: 80622 - DNA, 252 bp, Citrobacter koseri
atgactaatcgctcaacaaacaacacattaattattactcattgccctgcgtgcgaccaggttctgacccttgagccaatattcggtggcacaaagaatttcacatgcccaacccaccgtacatttaacctctcaaatacggtgatccaaatagtgaataatgaccaaaatctcatgagaaaccttggtaatcttatagagcaagggcgccataacgacttgaacccaattctaatcgaaaacgttcgttaa

SEQ ID NO: 80623 - DNA, 4695 bp, Citrobacter koseri
  misc_feature (203)..(217): n is a, c, g, or t
atgctggccagaacgcaagtacaagagctgaccaatcgcgatgtaccgctgatgctgttcctcgatcgtattattgaaatcagtatcgagatcgtgaccccggatgggaaatccgaaaagcacatcctgcagcggcagcaaaagttgctgggcagaattcccgacgcgccagatgtcacgctctacgaagttaatgttggtcnnnnnnnnnnnnnnnctgcgacagaaacaatcggtgttcctttccagtcccgccaacgctttttagtagccagaagcaatgttgataaagcgcgcgtgcagcaagctgtgatcgacagcttattgatggcaccacagttaaagcgttggcgggactggaaaggaacaccgattgtttctgtcgcagtaggtctaaacaaatcgacggtaacatctggaagactatacaactttttgcctatggggggagaagccacctcaccgatttgcggctatatcgatgcgccattttttgccgatattgataggcgtaatacgaatatgaatctgccattgaaccgcttgttaatggaagtggctgcagaaacctgtgccactgcggctttgtccgtcgtatctcgtgagctggctgtcggtgcatctgcggtttttgatctatttgcctggacgggagaacatcgtcgcatgatgcaaactgcaatggaaggcaagggaacatcgttcagcaaagtccgcttgattccggtgataaccccgcaaggaaagcagcaatggtcgagcctggaggaagtcagtatttggcctgatggtaaatttaacatcctgaagccgaaagatattgctagatacagtggtgcacagttggtttctggcgagttgaatacgccgcgcgtagcacgtttacgggagataacaaaattctcctatttatttcagtcgttagacccttcgactcagacactgagaaaatgggcagaagcttttgcccgttcgttggtggaacggaaatcgcccgctgctagttggagcaaattttatgatgatctgatcacgttgtttgcggcggtaaaagtaaaacttagtacgcttgaaaactgcccaattctatatgaccgccaaggtaaacttcagcccgctggaggacataacagtaatgaacacaatggcgtatttgtgcgtcggcatgtctccagaggtgagaaaaagaaagagaagcgttccgggattccattaccgcctgcgattatttcccggcgctaccgatttctggatgaaagaatcctgcttagtgcggcgacgttcaatgcatttacctccgctgatctgataagagagtacgacccggtcaaagctttgtcagggctgaaaacggcactgagtgataaggcaacaaacaaacagcgccaggatgcgctgctttgggcatttgagatatggcgcgctggaagcgtcgttgtcgatgcggagttgaaaaaagctgatctccatattcccgtgcggtcggggtggtctgcggcaagcaaggcaatgttttcatcttcctggacgcaaaatgggaaagttgtggaaagctatttaaccggagcagcggcgacctctctggactgccggcaggcatcagacttgttaatggttgagccgcaagagtggccggggagagtgcaaaacagcaaaactgactggatccgattcctacgtgtactaggtgttgcagatgggttacaacccattgaatcgaaggtaaaaacgcgtgcatatggcgacggttggaatagctttttacgaaatggagatgagcgtgaagggtttgacagtgactggcgggctgaagtacagcggtcgcagataagtttctcccatcctcagacggtctactcgacggaaggtaaaatatggcgactgcccgggcagcttgagtattcttcatttcctgaagatcttcgggagcagttatgcaccctgattgttgcctttctgaagacgcagaatgcagagttttttacctttgaggtcggccgttttgaacgcccgccttcgcaaactgacacccggacattgcctaccccgcttggcacttttttacgtactaaagcttggcttacctgcaccagctctcttgctgaaggattgtgttttagacgtccaaatacgtgctgggcttcgcgagagcggcgcaataaacctccacgctttgtggatcatctgttagagcacagcgttgacattgttgaagagagtcaactggcggagcgcctgttttctacgaaaattggtttgcgtgactggaacgatatcgagacggctttggagcgcatgagggagctgatcaacatcgttccacagttgaatgctggcgacaggacggatttgcagcgggaataccaacgaagctggcgtgaaattatcaatagcggcgttacgctgcccgacgggctggacttgattgtatttcgccgtggacagcatgaagtgctgcgcggcaatatcgatctgccaccagtgttaattgtaaccagcgcaggacaaaaggctgaagcgcaaatgcttgcttccgcgggctatgcaatactcagtattgggttagaggagacagacaagctcatagctcgccttagtgatatgggacgattttcacctcgcaagattgatgatggcggagtgcaacttcgtcttgatggcgagtcgttttatcccgatgagagcgacccgttacttatttctttcggcatgcattggctgccggaaattatggttattggtcatgctttgctagcggaaaatctggaacgaggcgtgcatgcttcaacggttgaaaagcaacttcgcgcaatcagagtgcgccgctgtaagaccctttcgtttgctatccagggcgaagatgccaggcctacggaatcgttcataagctatgcctggccccatgaaacaatgccaacattgattattgaagaagggctggtatttaactggcagaccttagcaaagatttcgcgcaacctatcacgactagtggatgcccggttacgttttattgaaaccttgcttttgcgccttgccgttggtcgggatgatggctttttcagtaaaccggatgacgctctcctggcatgggagatgaattgcgatgtgcaaacgatccgcgatcattacgcccggctacgtatggacattactcatgtgattaccatgctgtgtcctttggtaacgtacttcaaaggcattgaactggcacagcaactccagcgggagtatgccttagctagatcggtatttgatgtgcgtcattggattgcatcacatctttctgacaccgaatatccggctgaaaagatgctggaattctgtgaaacagcaaccgatttcagtgaacttagaaaaatgctgtcacttaattttcggcagtttaatctggcgctggaagcgttgggtgaaacaccactctccaatgaggatacgttacgtaggctttttacggcatatgtcggacagcaacgtttgcacgtttcaggtcggttacgccgacactatctggcgacgttcgatgccggcggcgatttgtcaaactatgttgagcataaatctttaggtttcattaccttcaatcctgaatgggttatgacgtatgaaaccctgaccaaagaaatggtggatgcacaggttaatgctcagctttttgaggcgttgggaccggacaacgatgaagaattgcctacgctcagtgcagtattagaagcgaatcgtaaaaatgtacgcgattttgccatgcaggctcagccgcaagtttccgcctggtgccgccagaatggtgttcaggttcattctcactggcagtacaacgagcctcaggccttttgccgacaacttgaaaataagggcctcctcgattttcggtaccttgcactggattcaataccggattactgcctgcgcgctgggttatggccgccaacgatgcccctcagcttggataataatgtgctgaaccttgatatgagccgggtatccgaagaaaaggaacgcgctgagcaggcaaagcggcaacaggaactagaacgtcggagtatcatttttgccggacagtcacttgatacggacagcccacagtttactgagcaatttcgggaactggcgagtgctgatggcagttggaaggggcgaagccagagcaagacgcagagcttgatggattttggcgcggcggcaatgcgccaggctagtggcggtggtggcggaaaaagaactgggcgcgcgtatcgtgagcctagattgacgcccgctcagcagcaagccatggggttggcgagcgagtggctggcttttcagtatctacgtgagcgttttactgattatatggatgaagcctgttgggtatcgggcaaccggttctcgttttgtggggggggagagggtgatgattcagctggctacgattttatggtgaagacaccgaaagtggagtggctttttgaagtcaaatcgacccttgaagatagtcaggaatttgaactgactgcaaatgaacttcgagtggccagtgcggtggcgaaagacacaagtcgacgttatcggattctctacgtcccttatgtattttcgccagataaatggcgcgttattgaattgccaaacccgatgggcgacaaaacgcgcaatcatttcagcgttgtggggcagggatctttacgtttgcgtttccagctccatgatcagtga

SEQ ID NO: 80624 - DNA, 1227 bp, Citrobacter koseri
atggcaagaatcgttactaagctcaacgacactcagatcaagaaggccaaggcaacagacgataacaaagagataacactgtatgatggcgatggcttgatgttgagagttaagcccagtggtaagaaagtgtggtatttcaactatcaagtgccagcgaccaaaaaacgaacaaaaacaaaattaggaaactaccctcatcttacacttgctcgtgctagagctatgcgtgatgaatacctgtcactactcgcaaacggcatcgacccacaagttcataatgaaaaagtggctaatgacctgaaagatgctactgaaaatacattgcaagcagttgctgaacgctggttagaagagaagaagaagacagcagaactctcgcaagaccacgctaacgatatctggcgtagtcttgaacggaacatctttccaacgctgggggatgtcccaattaaggaaatccgccccaaaatgctcaagcagcatctagacccaattgagcaacgtggtgttcttgaaactctacgccgtatcatttctcgcctgaatgaaatttttcgctatgctgccacggaagagcttatagagttcaatcctgccgacaatctcgctcagcgtttcagtaagcctaagaagcaaaacatgcctgccctaccacctgatgaactacctcgtttcatggtagcgttagctaatgcttcaatccgtttagaaacccgtatgttgatcgaatggcaattgttaacgtgggtgagacccggcgaagcggttcgggcaagatggtgtgatattgatgaagagaatagattctggaatatccctgcagaattcatgaaaatgaaacgtccacataaagtcccgctgagtaaagaagctcttcgcatactcgaaaacatgcggcctatcagcggtcatagggaatgggttttcccgagcatcaaagctcccctcagtcatatgcatgaacaaacagctaatgccgctatcattcggatgggctttggtggtgaacttgtggctcatggtatgcggtctatcgccagaacagcagcagaggaatccggtaagttcaggacagaagttcttgaagccgccctcgcccactcaaagaaagatgaaatcatcgcagcttataaccgtgccgagtatctagcagaacgagcaacactaatgcaatggtggggtgattatgttcagacgcagaaatttagagctctagcggcgtga

SEQ ID NO: 80625 - DNA, 150 bp, Citrobacter koseri
atgagcaaactcaaatggcctgaccatatcgtttcgattggcatcgagataatcagcctaccactgaagcatcaggtgacgttggtcaagatgtttggccttatgggtatagcagcacgaacgatgttgctttccttatggcccgtttga

SEQ ID NO: 80626 - DNA, 714 bp, Citrobacter koseri
atgtcagaaattgctcgccataataatgatatttcaaaatgcggggctaaaaaggcagatattaataaaaaaataacctcaaaaactggagatttacatcgttatcaattacaactcagtaaagagcaagagagtgagcagaaaaaaagaattactgctcagaagaaacttgaaaaagaacaattagaacatcaaaagaagttaacgcgggaattggaatcacagagaaaggccatgtcatttcatcgtgagacgaataaacctttccaatttagaaatgatgtaattgaattagaagcatcaagggaaacttatgatgtttttatctctcatgcgacagaggataaagatagttttgttcgccccttagctcaattgctcatagagaaaggagtaaaggtatggtatgacgaattttctttgggttgggggaccagtttgcggaaaacaattgattacgggttggctaattctcgttttggtgtggttgttttatcaaagtcctttattaaaaaggaatggactgaatatgagttaaacggtttgactgcccgtgagatgaacggtgagaataaggtaatactcccaatttggcatgaagtatctaaaaccgatattataaattttagtccgacattagcagataaattagcattgaacacatctattaacactatcaatgagatcgctgaacagttaaaattacttctttaa

SEQ ID NO: 80627 - DNA, 249 bp, Citrobacter koseri
atggctgaaaaattatctaaatgtcaggtttgtggtaaagaattaagtgcccttgctgaagaatgcaatggatgtaaatctcctgacccatttgggcataaacgaaataaagcccagagagagcaattattggctttaattgttgttttaggaatagcggtcatgggagctttatggtatttaggagtggtgagtccatttgatatcatggattatattatatcaatacttggttcatctaagcagtaa

SEQ ID NO: 80628 - DNA, 675 bp, Citrobacter koseri
  misc_feature (653)..(662): n is a, c, g, or t
ttggaatattcactattaggaaatactggattgtttatttctcgcatgggtttaggtggaatgacttttggtggcagaggtacgccaatatacggtgaagttggagggttggatttaaagcaaacaaaggaaattgttaatattgctgttcgcgaaggaattaactttattgataccgcggatgtatattccaacggggaatctgaaattttacttgggaaagcaatttcaccttatcgtaacgatattattctggcaactaagtttcatgccccaatggatcgtgctccaaatagatgtgggcaatcaagatatcacatgattcgctcacttgaggatagtttaaaccgtttgaatactgatcgcattgatctttatcaaattcataattttgatccactaacaccttttgatgaggttttgagggctcttgatgatgttgtaaaacaagggaaggttcgttatattggatgttccaaccttgctgcctggcagattatgaaggctcttggaatatctgagcataagaatctaaataaatttacctccgttcaggcatattattctttactaggtagagatgtcgagcatgaattactgccattgattaatgatcaaaaacttggccttttagtttggggcccccttgccgnnnnnnnnnngaaaatatactga

SEQ ID NO: 80629 - DNA, 141 bp, Citrobacter koseri; identical to SEQ ID NO: 77072

SEQ ID NO: 80630 - DNA, 822 bp, Citrobacter koseri
  misc_feature (807)..(816): n is a, c, g, or t
atgatagattgtgccgattcaaaaggagaaccaatttaccgtagtgaacgtctcagtcattttttgggctatgatttaagcaaactcggagaaaatggtagactcgatgccacattagatgctggggttcatcccgacgacttgcctggtgttaaggagcagtatgcctactcgctttccacgggaaagccctatgcgcgaaggcatcgtttgcgccgagcagacggagaatttcgttgggttgagactagggcggaagctatgagtgatgaacacggcaatatcattcaatggaacgtcatttgccttgatattgatcgcgaggttcgtgctcaagaagagcttcgttttactcatgagagacttgcaagagctagccaagcttctagtatggctgaactttcagcatcaattgcacatgaagtaaatcaacctttggccgcgattgttgctaattctcatgcctgcaggcgctggcttgttgctgaccccccgaataccagccgtgcacttaaaacggtagaacgtattactcgcgatgcgacgtcagctgctgatgtagtaagccgaataagagctctttttagacactcttctgaagagaaaatattaattgacctaaatagtgtaatatcagaggttctggggctaatgacagaagaactcgtcagatggaatgtattaacagaactaatgctagaacctaaactgccttatacaatggcagaccgcattcaaattcaacaagttcttctaaatctaatacggaatgcggttgaagcaatggaaaacgtcacacatcagcgnnnnnnnnnnacataa

SEQ ID NO: 80631 - DNA, 246 bp, Citrobacter koseri
atgcccagtgataaaaacaatgttattgaaacaaatatcagtgatcttggtggtggaatggcatctctggaacaaatgtttgaaccatttattacaactaagaaacaaggaatggggatggggttagctatatctcgttcaattatcgagtcacacggaggacggctttgggctgaggatcatttgccatatgggacttcactaatttttactatcccagtggaggtggcggtcaacaatgaataa

SEQ ID NO: 80632 - DNA, 906 bp, Citrobacter koseri
  misc_feature (889)..(898): n is a, c, g, or t
atgggaaaaatgaaatattggttaatagcgggatttattatccttcttgcgatcgtttatgctgctatcagtgacagggattctacgctttctaggttgaaatcagcaggtgaaaacggagatgtagaagctcagtatgcgttgggtctcatgtatttatatggagaaatactggatgtcgattatcagcaggcaaagatttggtatgaaaaagccgctgctcaaaatgatccgcgtgcgcaggttaaactcggtttgatgtatgcaaatggtctcggggtaaatcaggattatcaacaggccaaatcttggtatgaaaaagcatcggttcaaaatgatgttgatgcgcaatttttgcttggagagatgtatgacgatggtcatagtgtagagcaggactatcagcaggcaaaaggctggtatgagaaagcagcagaacaaaatttcgccaatgctcagtttaatcttggtatgctctattacaaaggtgagggagttagtcaaaactttcagcaagccagagaatggtttgaaaaagccgcgtctcaaaatcagctgaatgctcaatataatttaggtcagatctattactacggtcagggcgtaactcagagctatcgaaaggcgaaggaatggttcgaaaaagcagctggggaaggtcatgtcgatgctcagtataaccttggcgtaatatacgaaaatggtgaaggggttgggcaggactttcatcaggcgagggcttggtatgaaaaggctgctgctcgaaacgatgcgcaggcacagttcgatcttggcgttatgaatgagcttggtcaagggggaagtataaatctgaaacaagcaagaacttggtttgggctggcatgcaagaatgggaataaggaaggtnnnnnnnnnnctttataa

SEQ ID NO: 80633 - DNA, 330 bp, Citrobacter koseri
atggtgtatttttatccggtgagttgtcacaaaagcttcctaccctatctgttaaatgtggaaactgggtactgcaaacctcttcgctgcatagataggaatcctaaacgccacgtattaccattaacgtttatcaatcaccacaccaatagcgtggaagcaatcatgagcggagcagcagatctacagcagtgggagacacatcaggcgaaagatgaattgctgcaaggcgttgaacgtgttctcagacatgccgttcaggcgcacaaacatggattaaaagtttatcaaagtctgcaaaacctcaatgaggtaatcggaactgagtaa

SEQ ID NO: 80634 - DNA, 303 bp, Citrobacter koseri
atgggtgggacaaaaattagtttgtataatatgtttgtttgtaaaaagtcattgatcgatgaatactttgaatggcttttcccggtactttttgcgcttgagcaaaaaattgactaccaaaattacgatgcttaccaaaagcgtgtttttggttttatggcagagcgtcttttcaatgtctggcttcatcatcatcgcgaaaacttgcgcattaaatatatgccagtagtgaatattgatggcgaaaatattttactgaaaggcattggattattaaaacgacatttctggggtaaaaaatga

SEQ ID NO: 80635 - DNA, 162 bp, Citrobacter koseri
atgagctgctccattaatcgcatcctgcacacggatcagtttcatactccatgcgccagccataaaccatccgtctttctggacattctctttgaaatcatcccactggtcgccagtggagaaaacagttcgcactgcagtatcaataatcgatacatatga

SEQ ID NO: 80636 - DNA, 312 bp, Citrobacter koseri
atgaatacggatgataaaaacagaaagccaagaatagagaaaacaattaagcaaaaaattgcatcagcacagatgcgtttgaatcgtctaaagagtaaggaaaaatccctgactaaaagcgctgagacacgcctgaagataatccttggggcagaagtagctaaagcttttggctgtaaagtagaagaagtggataaagaattaatattaggactgatattacaatcatcgaatattagcattgaagataaagcaagattaaaattacgaggaaaaaggtttcttgaggatatggttgggaggcagaagtga

SEQ ID NO: 80637 - DNA, 192 bp, Citrobacter koseri
atgaaggataggatcgtcgaaatactacaatacaccctgaaaaaagattctggatctgactttcatcagatcatgcatgaagtcagtgttccacttcatacccggaacggtatcgatgtggttgcgtacggaaactctctccatgatgctgacagctattacctcatacgtgcttttgacagcgaagaataa

SEQ ID NO: 80638 - DNA, 462 bp, Citrobacter koseri
atggggagtaaagaatcattatttaaccatctttgctcgattcctttacctaattctaagccaacaaaaaacatctctaacctaaaagaagaagcaagtgcggttgatggcaagacagcaattaaatacagcatgttagagaaaattgacaccattgaattatcattcgatgaaatggaattgcttcaagatatcattgtgggaagtacagacagtcccgtttcatatcttataagtaagcttcagaactcagattgggtaaatgaagggctaaaatatttagagcaaacaggagactcccagtgtccattttgtcaatctcaaactataactgaaaacttggttcagcatattcgtaattatttcgatgagacgtatcaaaatagtgtggaaaaaataaagtccatccatactaaatataagtcattgattgatggcactgcctcccgatgcgctttctaa

SEQ ID NO: 80639 - DNA, 123 bp, Citrobacter koseri
atgggggcacttgatcagttaatagccgctcatgccaccagtatgggaatgactatcgttaccagtgacaccgctttttctatggtgccgggactggttattgaagactggacgaaagaataa

SEQ ID NO: 80640 - DNA, 453 bp, Citrobacter koseri
atgctggaagtatgcgccagtaaactggaacaagctgagataagagaccgttgcactttaatagaaggatatcttgataatataccggacaatgtggcttatgatgcagtattatgcctgctggtgactcattttatccagacgagtgaccggggtaacatttacaatcaaataaagaagagattaaggacttccggcaggttgattgttgctgaaatcgcgggagataccactgctggtaatttcgacgaacaactgtctggttgggcagccctccagtctgtttccaccccgaacatagcaatgcttgatgatctcaaaactttgctacgaaaaaggttgcttctattgtcccctgaaaaaactgaagaactaatttttaatgccggattttcgtcacctcatcatttctttcaatcactattaattcatgcttggatagctaagacataa

SEQ ID NO: 80641 - DNA, 315 bp, Citrobacter koseri
atgaatactgaagaactaaataacattaaggactcatcgactaaagtttttactgctatggcgaagaatctttatatcacaggaatacgtatatataaagaacaagaagaacatgagttattggcatcaattatgttggatagcaacagaacggaatcatatatttcgcatgttaaagaatatctggcaaaaagctttgatgaacatatggaagaagctggtaaaagagaaagacttatctatgttgatatggataaagtcatgtttgaaatgagatatgtgcatactaaagcattagtttttagtatgagttaa

SEQ ID NO: 80642 - DNA, 258 bp, Citrobacter koseri
atgaccaattataaagatgttcagtgtcctgtttgtggtagatggttttcaatgttccgacctgatttccatattgggaaataccataaaaatgcaactgatcgtgaacttttgctgatccgcgatgctcgcagggcaatgaaggatttccatattgaaacagagaagaaaagtaaaaatgccaccctgaaaaatattaacaaatccgatggaacgacttttcatggagggttaccgtcattaggtaaaaaaagatga

SEQ ID NO: 80643 - DNA, 204 bp, Citrobacter koseri
atgaacgaaagaaaaagatttatccgtttacctgaagtactaaacagaactggcctttgtaaggcttggatttatcgcctgattagtcgtaatgaattcccggcccaagtaaaacttggtgaaagagcaatagcattcttagagagtgatattgataagtggattgatgaaaagatttctttatcacgtaataaagtagcataa

SEQ ID NO: 80644 - DNA, 240 bp, Citrobacter koseri
atggcattaggtcgggtgaactatgagcgcaaagaaagtgaaaaaggcaatctcaaattccgtcgctctctttatgtcgtaaaagatgtgaagaaaggcgaaaaattgactagtgaaaatgttaagagtattagaccggggtatggcatggcgccgaagtattatgatgatattcttggcaaacatgctcgagtagatttgaagtatggaactcctcttagctttgatgtcatagaataa

SEQ ID NO: 80645 - DNA, 1269 bp, Citrobacter koseri
atgtctcttaacgactcaaaaatccgcaacttaaaaccatccgctaaacccttcaaagtttccgattctcacggtctgtaccttttagttaatccaggcggttcacgtctctggtatctcaaatatcgcatcaatagaaaagaatcacgcctcggcttaggtgcctaccctgatgtatctctggccgacgctcgtcagcagcgtgacggtatccgcaaattgctagcgcagaatatcaaccccgcacagcagcgctctgctgaaagaaccactacctcaccagaaaaaaccttcaagcatgtggcattggagtggcataaaagcaaccgctcatggtcagagaaccatgccacccgtctgcttgccagcatgaacaaccatatcttcccgataattggacacttgccagtcacagagttgaaaactcgccacttcatcgatctgctgaaagggattgagaaaaaaggtttgctggaagtggcggcccgaacccggcagcatatgtgcaacgtcatgcgtcatgccgtgcatcaggaattaatagagcacaatccggcggcaaatttggatggcattatcacccctccagttaaacgtcactaccctgcccttccgctggagcgactgccggagctgttgactcgcattgaggactacaagcaaggacgtgaattaacccgcttggcagtctcactcaccctgcacctgttcatccgttccagcgaattgcgttttgcccgttggtctgagatcgattttagaaacaaaatctggaccattccggctacccgtgaatccattcctggtgtgcgttattccgggcgcggtgccaaaatgcgcacgccacatatcgttcccctctctcgtcagtccatcgctatactgaaacagatacgggatatatccgggcatcaggaactgatattccccggtgaccataatccgtataaacccatgtgcgaaaacacggtcaacaaggcgctgcgcttgatgggttatgacacgaaagatgaaatctgcgggcacggattccgcacaatggcctgtagtgccctgatggaatctggactctgggcgcaggatgcggttgaacggcagatgagccatcaggaacgcaatagcgttcgagcggcttacatccacaaagcagaatatctcgatgcccgaaaagcgatgatgcaatggtggtcggattatctggatacgtgcagggaagcctatgtgccgccgtatatctgggggcaaggggataacattaagacggcataa

SEQ ID NO: 80646 - DNA, 1389 bp, Citrobacter koseri
atgcgtaatttttggcactatctgagaatcccaacgctagtacggcgaattatgatcgcccagatgctattactcacgctgatttggtgtatctttctgacctacattttatgggataacttacgtagccctccaatgctatcaggcagcaaaacctatgaaaccatcctgacagtggtggatcgtatgggggatcgcccgcgcgatctaaccgatgtgctggaaaaattcagcaaggcattacgggaaggctatggcggaggtgaagacccaaaaatgtcaatcagcctaatcgttcggaagaataaagagataatttattcatctgatggcgctccggtaggagtgacaaacaccacttatgggatgattcaaagtattcagagtagcggccgcacttggactagccgtactctgaagtctaggagctccgacacagaagtgacactgctcactcctgctggaggctggaacttcttcatatacctgaactcgcgcggatactacatattaccgctgctggtatgcattccctttcttttgtttcctgcatggctgtcaatccgcattgcaatgcgtccttggaacaaggtggcgaatgaagtttccttacgaacaccagaagatatttctcccttaaaagcagtaccaaagcacaaggagcttcgccaaatagtggacgcgattaatatattccttgctagggtacgagaaagcactgaaagggaacggactttcattgcagatgccgcgcacgagttgcgtactccgctggctgcaatgcgagtcaatgttgaggctttacagtccgatgtaagcaactgtattcaacaggaattgcttgcagggattattcgtagcaatagccgtgctgctcgtctcgtcaatcagttgctgctgctgatgcacagtgaagcgcgcattgacactgttatggagcctgtgccgctgacgacgctaatacaagagcgaatggctgagttggcaccacttgctgctgagagcagaattgagcttgagttttactctcatgaggaagtctggattacaggtgtcagggaacgcctgatgtcgctgatcgacaacttaattgaaaatgctgtgaagtacagtcctgacggcgggcgggttgaggtagaggtacgatcattagataaatccactcaattgcgtatctcagatgcagggcccggaatcagggttgaattgagggagcgggtgttcgacagattttttcgtgatcccaatcagatacaaagcgggagcggattggggcttgcaatagtcaaagcggttgcgcagcaacacaacagcagtgttttcctaagtacgtctgcagaaggtgggctcatggttattgttgatatcccaaatcaaaattgcgtctga

SEQ ID NO: 80647 - DNA, 678 bp, Citrobacter koseri
gtgaaaattctcctaatcgaagacgacatcgatctcggcaatggcgtacgtattgccctcacagaccagggattagatgtcatatgggttcgccgtaaagtggatgctctgcatcaactcgatgtatgcgtgccagaacttgtattgctcgacctcggcctgcccgacggtgatggcatgagcctgatggtgcgtctgcgtcagcagttcaaggggatccccgtcatcatcctgactgctcggggcaccctgcaagatcgcttgactgggctggatgctggtgcagacgactatctcgtcaaaccttttgttctcgccgagttattggccagggtgagagcacttgtgcggcgcagttatggttttcagaatgaggtgatagagattcgagggctatctctccatgtgccgactcgtcgcgtgaccgtgagcgaaaggcatgttgatttgacggcaagtgaatacgcgctgcttgaaacgttaatgttgcgtgccgaccgtgttatgacacgtagttttctggaagaaagaatcttcggtgcaaaagaaaatatgagtaatgcgctcgatgtacatatgggaaatttgcgtcgcaaaatcggtgacggctatgtgcgaacggtgagaggtgttgggtttgtcattgataccgtacccattcagaaggggggaggttga

SEQ ID NO: 80648 - DNA, 837 bp, Citrobacter koseri
atgagaaagatcgaactgagtcataagttcctccattcactctcggggcgtaccctgggaaaattgttgtcaggattcgtcctagcattactggcaaccccaatactggcagcagaacagaaacagggcaacgagttgaccctaggaggaggggtggaggttgcgccacgttattctggttcggatgaaaaccgagtcacgacggccctagtgattgattactcaatggtaaatggtttcttcgtcagctccacgcgtggtatcggttacggtaacaacatcggcaaatttgattacagcgctgcgctgagttatcgcgcaggccgaaaggatcgtgacgtggacagtgactcactcagctacggtagcgactacctgcgcggtatgggtgatgttaagggctcagctatcggtatgcttggcctaggatacgaggtgaacgactggcttaattttcaattgcaggctgaggtaccggtttctcagcgaagcaatggtgaggctctgcatttcagcattgtcagcccgttttatatgtcatcgaaaaactctgtgacgctggcgctgaccagtagttggggaaccagtaagtacatgcagacttactacggagtaagtgcttcacagtcggccgcatcggggtttactcgatatgatgccaagtctggaatttatgcctactcactgaatatggactggacgcacaagcttaatcaagactggagcgtagttgccgcagcaggttttacgcagttagctggtgacgcacgaaatagtccaattgttcagcgaaaaacatcgcccacgggcagcctgaaggtgacatatagcttctga

SEQ ID NO: 80649 - DNA, 192 bp, Citrobacter koseri
atgaatttaaaactgacggtgaaagtggctctagtaactcgagtccaaaccagaattagttttagcatttgcgaaaaaatcgtcgcgaactttgagtgctggattagtttaatctggtatatgttcttcttcttttttcctacagccagacatggtccggaaacgccgtctgaggcgcttattattcaataa

SEQ ID NO: 80650 - DNA, 561 bp, Citrobacter koseri
atgggatatgaacatgttctaatacagaaattacttgcctattctcttaaaatccctctaccggtaacaggagccattggatttaatcatggcataacagtaatcttacagggtgaaatatttcaactattcgaaagggtaacatggaagaaaaggataaaacaacaaatcatgagactccctaagaatattgcacaagatgtacacaaagaaatattctctcagagaataaactgttacttggaaaaagagtattttcctgctcatgttctacctcgtgacgcctgttttgtcattagaaactctgaacttgataaattaattaacatcgtgaccaagaacaaaatggacccactatcttcaacacgaatatcgacaccgctatctcgacttttctggcttgcctgtaaaaacaatgagtctatcagaccattaatcaggcaaccttataagcttctgtccatctttgaacagtgggcatcagccgaaggcatgaccgaccgattcagcggcgataccttaaaaacagcgcttgaacgtggttcacctacgtccatttag

SEQ ID NO: 80651 - DNA, 195 bp, Citrobacter koseri
atgacatctcatcagttattacgtctgaaacaagtagaagtaaaaactggtctgaaacgctcacaaatctacctgtacatgaaagaaggctcttttccatcttcaataaagattggaccagccagcgtagcctggctcgaatctgagattgacgagtggataaacctcaaattagctaaccgcttaacgcgctga

SEQ ID NO: 80652 - DNA, 585 bp, Citrobacter koseri
atgtttccctcactgaattatgcggtattaacaaacgcccttgccgcgctcaaggaaggtaattttcgttattgtgaaacgttaggattcacattcgacgaattgaatgccctcaatcagctatccctcgacgaactgtttatcgttagccgggcatcggcacagtttatgtcgatcactgtccgtcacgacgttctacaacagatcctgacgctgtcccaccaggaagcacaacgccagcagcagataaatcgcgccgtcagattgggaggatctattgcactccttaatcatttttttggcctcacctcgaatgaagtctgcgctcgtcgccggttgctgggtgtcaccatcccttatggccgaacacctatcccagatgaagacattgatgcagaaatttggctctcatggaaaaagaaccgcttcgaaaaccttgatacacctgacgcgctggaagcaatgatgcaggttactgaatcattgtcttccagcgaaaaaaggctttccctgaccgccgtctggaaccgtatcaccctttgtgagaaagaaggtctgaacaggagggcattgcatgccagatga

SEQ ID NO: 80653 - DNA, 210 bp, Citrobacter koseri
atgccagatgagatcgatcgcgatcaagaatttaatgagcaacgtctggaagagatgattgaacaaaaccgtttcaagccagcaactaccccctcattacattactgccgtttgtgcggtgaacctattcccgagcagcgacggcaaactctgccgggtgtgacaacctgtacggaatgccaaacaatacttgagcgccgtcagcgctga

SEQ ID NO: 80654 - DNA, 615 bp, Citrobacter koseri
atggcatttgaattgaaagacttattaaccccggcagcctccctcttggccgtttggcttactgccaggtttacccttaatcgggaaattcgtaagaaagagctggagatccgtgttgatcggctggagaagctctctgctgattgtgatgaggtcttatcacagcttattaattatgctggttttattagtgggcttgttcagtcccggcttttattactcactccgactcagtcaaaggcccgtatccctattcaagaattttctgaagacaaagacctattagataacagtaaattagctccagatagagagaaagggcgaagatgcgaacacggcttacgtttccatcattatcaggaatggcaaaaatgggatgctattgtcccgaagctgcaaaacgatatttatgattttttcatgattacacgtgcaggcgagattgttaaagatttgaagaatcagagtcgaacacaagaggattgtgaggcattcattcgacaactcagtaaatggcaaaaagatgctgatacactgcgaaaacagttgcttgacgctatgtccagcgattttcacgagttaacgaaatcgaaacctccttcatggcttcgatga

SEQ ID NO: 80655 - DNA, 771 bp, Citrobacter koseri
atggataaagcagaaattctggagaaaggttgttgggttgaaatttatattgaagaatttgcacaaaaggtaaaaggaatttcacgagataggtacccttcattacgctgtatcgcttgtggcgagcaagttcatgatagtggtttagtcactcccaatcccgagtatatccccagattctctcattcagcaccaccagaaaacggagaattttgccctctggggtctagatctcaacgtttcacaggtctttccggaaatgacaagttagtatcaacagagatcgctgcatctcgccgaaatcgattcatgcaatttgatagcctctgtcgagcatggatagtttgtaggtctctacgtggaggcgaaggaaaacttgatcaaaaatccttcatccgtttggtcagggtcgctgatagttttgggatctggcgttatagctatctcccggaatggggcatccctcttcttttaatgctaatggacaatcatccaacacctaatggtaagtctgcatttttttattcgcttaagaaagacagagcccgccggggtgttgagtggcaaaacctgaatgtccggctagaagcacattgggctagcagtggtaaacttattgtaccaaatcttgagaagccagcttcgttcctgctagagatcccttttaaagaatatgttgttaacaacattttggggaaagaggatctatcgtggtgtacaggggatgtgctgagaagcttgaatgcctttagcatcagtgaattacggtaa

SEQ ID NO: 80656 - DNA, 342 bp, Citrobacter koseri
atgaaaactctacctgctaaaatttcgcaggcagcgaagccctgtctgtcgcccgtggctgtctggcaaatgttactgatacgtctgctggaacagcactatggcctgacactgaacgacacgccgttcagtgatgaaactgttattaaggaacatattgatgccggtatcagtctggctaatgctgttaactttctggtggagaagtacgaactggttcgtatcgatcgcagaggatttaaccgccaggagcagtcaccttaccttctggcggtagatattttacgggcaagacaggcaatcggcctgctgcggcaaaaccatcctccttcgatcccctga

SEQ ID NO: 80657 - DNA, 426 bp, Citrobacter koseri
atgagcaacatcactatttatcacaacccagcctgtggcacgtcgcgtaatacgctggagatgatccgcaacagaggtattgaaccgaacgttattctttaccttgaaaatccaccttcacgcgatgaggtgctcaaactcatcgcagatatggggataacggtacgggtactattgcgtaaaaatgttgaaccttatgaagaactgaagcttgcggaagataagtttactgacgatcagttaatcgattttatgcttcagtatccgatcctgattaatcgcccgattgtggcgacaccattgggaacgcgtctgtgccgtccttccgaagtggtactggatattcttccggatacgcaaaaaggcgcatttgctaaggaagacggcgagaaagtcgttgatgatgcaggtaaacgactgaaataa

SEQ ID NO: 80658 - DNA, 210 bp, Citrobacter koseri
atgatttatgccaacgtgattggctgcgatctggggccgaaaattacacctattggtagcctggcaacgctactctggctgcatgtcctttcacagaagaacatgaccatcacctggggatactatttccgcaccgggatcatcatgactctgcctgtgctgtttgtaacgctggccgcgctggcgctacgtctctctttcactttgtaa

SEQ ID NO: 80659 - DNA, 138 bp, Citrobacter koseri
atggaaggcccttcagggtggaatctcatgagctcaacttttctaagcgttaatgtctgcttggattctactattcatagccatgtgatgaacactggtagtgaaaaacctctgatctatctcaaagtaaaagactga

SEQ ID NO: 80660 - DNA, 990 bp, Citrobacter koseri
atgactctgactaaagacgctttacagtttggcattgagcctgttcgtatcaccgacaccgacaacatgcaggtcaatgaaggtctgccgactaacgctgacccacaggtctatgccttccagttagctaagacggttaaggctatgctgaacggtgtacttaaagacgctcaggagaacatcccgttccctgtagaagtcctgccaacacgcaacagcttaccgaccccactcattgctcacactctggctaaccgctctgtggtcgttcctgtccgtggtggcaagcggcctgaagtcgttaccgttccgtccggtcaggagattgtggtcgaaccgattgaacaggctattctcatctctgagcagaccaagctatgggacgctaagtcctctactggtttcactcagggaacgctccagcaggacgctctgaacatttgtgagaatgtggtccgtaccattaactctaagatggttgacgttctggagtcctctaagctgctgaagacagtagagcttccggtcctgactggtagcctgaccgctaaggcagacactatcatggacgcgctgtatgaaaacaccgagtcttctttcggctctgaggttactgattacggtatcatcgcccatgagtcacacctcaaggctctctcccgtctggctgctaagcagggcttcggtggtgaagacgctatcgtcgatatgctggggacagatatcgcctattacaatggtgaagaccgtggtgtgttcatgatggctaagcgctttacggctctgagcttcggctgcttccgtcacgatggcgagaacattactgtggtcctatcccgtgatggcgactctcagtctcacgaccttgagattctcggtaaggtattcgtggtcgctgaggctgcaacgactgtaaagatggagactggtagcgctgctgctgtcctgcctgtagtcaaacgcttgagtttcactaaagaagccaactaa

SEQ ID NO: 80661 - DNA, 492 bp, Citrobacter koseri
atgttattcaataaccaagactggaaactgtcagtcaccgatatcaatctttacgagaatactgtgagtctggacggtcagtcctatccgttgtccctcgctatcaagaccctcattccgggctacctgtccggcctgccgtctaccagccgcgaggcaatggagttactggaagctctggctgaagctggtgtagctattggcaacttcttcagtaatgacctgatgaccgcctaccaacgccgccagatgaataagcgtgtcgaggctgagcgtatcgctaaagaactggcgtctcagaaagaccgtacccgcgaaatgttcatgaccgaagacgaatggcagaaagagctacagcgccgtgaacaggtcaaagctgaacgccggacctatggtgagaacctccgcagttctacccattccgctggtcgctcccgtgccgctattgtcgctgaccttgagtctggcgctaactggatggacagcttgtaa

SEQ ID NO: 80662 - DNA, 213 bp, Citrobacter koseri
atgattgaccaacgacctatgattgacccgcgcacacctgagggccgcatgactctccgttaccgtggttaccggactgaagtcatcctgaaggagcttggtctagacccggaagatgagacccgccagcaccaatcacgagacgagctaatagcccaactggtcgctatgaaactgtcgtcggctatcaagctagctgtctccaatacctaa

SEQ ID NO: 80663 - DNA, 702 bp, Citrobacter koseri
atgtctcaacaaggattcagcgtcattaacctcgaccagcttgtctccatgacctcggttgaaattgctgagctgacaggcaaggagcaccgaaatgtcctgcgtgatattcgcaatatggctgaggagcttaacgcgctcaaaactgagctggttggcgaggaagtttacaaggacgctaaaggcgagagccgggtaatgtatcgcctagaccgaaaacatacatttattctggtcgctggctattccgttcacctccgcgccaagtgttacgaccatattcagacgttagagcgtcgagtccttcaactggaagaccagaagaagcgggcagccattcagtccgctaaccgccgaggcgtgacttggggcgactactgcaaaacctatggtctacccgctcagaagctaatgaccgcacttctccagcatcgtggcctctttcgtaagaacccaatcagtaacgagtggtctgtaaatccgaagtattccgactgctttcgtatcattaagccgtctgaccagaagttctcagcaggtggttataactttcgcttcaacgctaaaggattggaggtcttcggtaatcctgtgatagtcgataaactgcgaggcatccttattgccttcactggcaccgaccagcagaagcaagagcacctcctgaagcaggcccaatccggcaagctggagggactctaa

SEQ ID NO: 80664 - DNA, 159 bp, Citrobacter koseri
atgagtttatcttgttatggattgtgttatcacaactccaataaagagaactttaagtccagcctccagtcctgtcagcccaaagtaaactatggtcgctatgatgtgtctccatactttgggtctaactggaggtcagattatggccttatcaggtag

SEQ ID NO: 80665 - DNA, 657 bp, Citrobacter koseri
atggcgataccgtttgaggcacctgagtttgaaaaagaagcctttaactgcccatattgtaacgcttttgcacatcaaaaatggcagcagttgtactattactattcaagtactggaggccttcctgttcatacttctatctgtgagcattgtgaagaaaaaagtttttggtttcagcgccgcttacttataccgtttgcttccacagccgaactaccaaacccggacatgcccgacaactgtaaggctgactacatggaagccaggagtatagttggcctatcacctaaaggggccgctgcactccttcgtctatgccttcagaagttaatggtccacttaggagaaccggggaataacattaatgctgacatccggtctctcgttcagaaaggactacctgtacgcatccagcaggcagcagacatctgccgtattgttggcaatcaggcggtccatcccggagagattagccttgatgatgatccgcagttggctcatggtctctttaagctgctgaacattattgttgatgaccgaatcacgagaccgaaagaaattgaggatatgttccagagtatgcctgaaggtccacgccaaggcattgagaatcaggacagacaggcgagggaacagcagcaggccgctaatgagtaa

SEQ ID NO: 80666 - DNA, 1440 bp, Citrobacter koseri
atggctcactctcgacacatcaagtcagcacttaaagcaatccatgcagacaaccctaacgcctcttatgaggagctacgggagcacctgaagactattgtcgagtgggaacttagtgtcagtcgtgatgacctgaacgacccggagtcctaccagctttacgttgaccagtacgacgacattaagtccaaccttcgggaagctgtagcgactgagcgtctgactgtagaccagcatcgctatatcaatgacgttatcggcgtacttaaagcctgtcaggatagactcaaaggtgatagctctggcctgttgtcttaccttgagcctgagactggcagtctaagaccgtccgtctccctatctgtattggcagagcctgaagttcctgaacctaaagctctgaccctcgcgtctctcattgagcagtacgagcaggagaacgctcagaactggaagccagcgaccctaggcgagaaccgagcgtctcactctacgttaatcgagatattcgactatctggatattcaggatgtcggcaaggcgactcgttcagatatgctcagggtccgtgaagtcctccagcagataccgaagaaccgtaagcaacgctttaagtcaatgccactgtctgacctgctgaaccgagagtctaagactgactgtctggacgtcgttaccatcaacaataaataccttatcaagatggctgctgtctttaagtgggcggtacgcaacgacctgatagctaagaacctgacagaaggtcttgaactgaaggtcccgcagcgtaaggcctcagacgctcgtgatgcattcagtcctgagcaggtagggcaactactggtcgccgctaaagcgtactctcagaagacagcaggtaagccataccattattacgtcaccgctctagctgcaatcactggagcaaggcttaacgaggtggcccaacttcaggtcaaagacgtcaggaccactgaggttgggaccgtgtttatccatatcaacgaagacgatagcagcctgccgggtaagagtatcaagaacgcccacagtgaccgctgtgtcccgctggtggatagagcttatggttttgtattggctgactttatgtcgcttgtggaagaccgtagaaagactgtgggtgataatgctatggtattcgatggcctcaagctgatgaagaacggctacggtgagcaggttagtaaatggtttaaccggacgttgctacctaaagtcctcgctgaccgtagcggcttagcttttcactcgtttaggcacactgttgcgacccagttaaaacaacacggggtcgagttggcgtatgctcaggcgattatggggcatagttcagggtctataacttacgaccgttacgcgaaagaggtcgaggtagatagactggttaatgtgatggctgatgtttataaggagacttga

SEQ ID NO: 80667 - DNA, 723 bp, Citrobacter koseri
atggataagttgaaaatcgaagatagtgtttttcaagcctctaaacgttacttacatgatttatatggcgacttcacacgcattgatgagcagaaagacaagcctgatgccgcaattaggctatcacaaaaagtagatagtgttgatgtaaccataggaatagaaataacttgtgtcgataaacaaggtgatttgcaatacttcaatgacgaaaaattctctcgagatataactcaacaacaaattgacgattgtataaatggagttgttccaacccaacccatgaaaaaagcttcaattgcgataggaaaagactatttttatgaagccattgagaaaaaacgcgataaatatgatggttataaaaatgatggcggttttgatggggtgattatattggtctttagtcagttatttggatgtgatgaaaaacatttcagtgactaccatgtttcatggacaaattatttgttaagtaagtctgattttccatttgataaggttgtttttgtcgatagagcacagtccaagtgtattactatgtttgataaaaacaaaccaaaaacatctccccctaaaaatgaaccgaataaagaattaggctttactcaaatacactctgggtatatcccaatgaatcagtcagtaaatatgtatgatatttttaaaatggaacctttagtaaataagaagaaaagcaaaagcaaacgcaaaaaaagatag

SEQ ID NO: 80668 - DNA, 258 bp, Citrobacter koseri
atggtgcggaagtgccgtttatgcggcctgctcatatttctgatgattttgctacaacagttgatgtcattcatcatgccttggatgagttatcccaaagtgtatgtattgattttgtctgctgcatctatgcgaccgccccctttcttcaaggccaggatttggaaaaagcatatgaaaagctgcagcaaagcgattgcgattatgttttctctgcaacatctttcccattcccgatccagcgagctgtttatttaa

SEQ ID NO: 80669 - DNA, 720 bp, Citrobacter koseri
atggcaagaattacaaaaagggaatcagcattacacatacaagtaatggatttagtacattcagataagcaattaacacaagatgataaggaattcatattcaccaattataggggggatggtattggtgccactggtgctttcttcacccctgaaatgttggcatgggatttcatacttgatgctggttgtactggtgactgtatcgaactatgtgcgggtattggtcgtcttagttactatcaatttctacgtaataaaccatcacatattacatgtgtagaactgaatccagagtacgtaatgatcgggaagcgagtgttaccagaggcggaatggatcacgggtgacgctctacaattctcaccagaccgtttctatgatgttgcctatggcaatccaccattcggtaagatcaatacctcagaagcgtatacaggccattataagggtagtgagtttgagtacaaggtgattgaacatgcttcaaagtttgcttcatacggggcatggatagtaccgcagggttcagcagggtttgtttacagtggggtacattgttatgaacgcagggaatcgcagaagtacagtaagttctttaaggataccgggtggacattagaagcagggtgtgggattgatacttcgatttatcgtgatgagtggaatgggacaagtattgtatgtgaggtggttacagttgattacacagctaactga

SEQ ID NO: 80670 - DNA, 795 bp, Citrobacter koseri
atgagtgatacaattactacagcagcaataaaaaaattgtatggtctttctgctgggcaatgtaatatatgccgtgcttctctttttaaagagcaggttcacataggacaaatggctcatgttatagccaaaagcccaaaaggaccaaggggtgatgaccgattagcaaatgacaattcttatgaaaaccttatcttgctttgtgcaaatgaccatattcttgttgatagagatccatccacttatacaatggaaaaattgcatcaaatcaaaagggaacatgaggcttatatagagagcgtaaccaataatacgttattttcagataaaaacaggcagtctgatatagagtttttaaatgcttatttccattatactccttttgcaagggttcgttcgttagttgaaactttacctaattcgtttcacactgattttctgatttttggagatcagtttgataatattttaagggattttccagcaggctaccctttaaacgataaattactccacggtcatttccaaaactttattgattcgtataacaatattgatcatatcatatgtgggcatttgccgatttcagataatagacacattcaggtgtttggtggtgcgaatcataatctttattgtcatttcaattatgatgagttgcctttagataaagcttcaataatagagcaagaactcattacacataaaatatctcttcttagtgcttatgatagctttataaattacattagggcatattaccctgaagtggaaatctactctcctattctttga

SEQ ID NO: 80671 - DNA, 294 bp, Citrobacter koseri
atgattagtataataattgaactacttaaatctggaatggattttttcattaagaagaaaaccattgatcaggaagtacagaaaacgaatgcagaagggcaaattgaagtaaacaaagaagagattacaaagaacacttttcactggcgtaactttcttggatttgtacttactcttatcatcctctataactggattatcgttccagtactggatgcttttggaattattgtgatccaagttccattagggcaacttttgcaggtgttattgattatggttggtggaagttga

SEQ ID NO: 80672 - DNA, 330 bp, Citrobacter koseri
atgatagatcaaatgagtctacactatgaggaacaaacaccatatatattagtagacaacgtaacgccattgatgaacagcctaccttttccccgtgggtatatgggaaataaaaaactaaagaaggtactacgcgagcattcagctaatgacaatgtacaaaacataatgaatattgcattccagaaaccacaggatttaaacattggcgatatcgttgactggtcgttatgtggcattgatctaaatgtagttgtactttgtcatgaaaaagcctttgttaaaggtacatatgtatggatggttgttgttggaattatcgaggaataa

SEQ ID NO: 80673 - DNA, 573 bp, Citrobacter koseri
atggcaaagaataatttagtaaagataaagggtactaagcaagtacaatcctatatcaataaagaaggtaagaattttaataatgagtttcgtaatgaaatgattactaaaatgagagaggtttcacgagaattacaacttggaattaataataccgcagatggtggtgtagtaccgttcacaggaaatgcaatgttatatttcttcaataaacgggcgactggtgttacctgtactattcaggttaaggatatacaggcacagtacttgtatggttcgattgttgaacgtgagaatattgataagtttattcctactactgacgcgaaactaactaagcaaggtaatattacgggactaaaagccaaccttaagagtggtaaatataaagtagtagaacataagggtgtaaaacgaatcattgatgcccgtaagaaagataagcgtgttattgcccgtaaagaagataagaatcgtaagattatatttgatttttataaggaagcggacaccagaattattaaagtcataaacaatatgcaaggacaatatagtataaggaatctaaaatga

SEQ ID NO: 80674 - DNA, 435 bp, Citrobacter koseri
atggttgactggctttattcaccggactggagtgaagatgatattacttgtggcagatatgcaggatttgtttatgtattcttctttcctgatacagaagaaaaatatattggggtgaaacaaatttataaatgcatcaaagatgctaaaaagataaaagaatcttcaaaagaaaatggatggcgtgagtacagaacaagtagtaagagagtacaggatatgattgattcaggaatgaactatacccgtactattctatgggcgttccccacaatgacagaagcaaactatgccgaggcaatgttaatcatgattcattcccttgattacaatattctcaatatggcgatgatgagtaaatgccgattgcctaaaggtgaacagcaacgaaaaatgagggggatcattcaaactattgaagggtggttaaactaa

SEQ ID NO: 80675 - DNA, 453 bp, Citrobacter koseri
atggacttaaaagatagattaatcatttatgaaggtacgaaagagtatcaaatgacacgcggttactataagaacggtaaattctggatgtataaagattcagaaggatatgacactatcgggtatggtcatttagtactgaatagtgaaagagaaaagtttaagaatggtattacgccaatggacgccgatttactattggcgtgggatattgaccgtaccaaacgtgatgtagcaacattaggtctttcactaccaaaagactgggaagatttcataattatcatgacgtttcaacttggtttaggtggagttaaaaagtttaaaaagatgattgcagcacttaaagtacaaaactggaaagaagcaattaatcaggctaaagattctctctggtatcgacagacaccaaatcgcctgaatgatatgattaagcaactggaaaacaaatag

SEQ ID NO: 80676 - DNA, 468 bp, Citrobacter koseri; identical to SEQ ID NO: 76994

SEQ ID NO: 80677 - DNA, 630 bp, Citrobacter koseri; identical to SEQ ID NO: 76960

SEQ ID NO: 80678 - DNA, 213 bp, Citrobacter koseri
atgtcaaataaaatcactggtctggtcaaatggttcaatcctgaaaaaggctttggatttataacaccaaaagacggtagcaaggatgtttttgtgcatttctctgcaattcaaagtgaagatttccgtactcttaatgaaaatcaggaagtcgaattttccgtcgagcaagggccaaaaggcccgtcagctgtaaatgttgtggcactttaa

SEQ ID NO: 80679 - DNA, 183 bp, Citrobacter koseri
atgacgatttatctacgaagttctgtaacaggaaaagttctgacgcaggaagagtggcaacaatccttaagtgagtgggaagacgaaggtggttcaccgtctccgaccgaagagtttattgaggttgtgaaggacagcaaagggaactgggttgagaaaaatgattcgtcctatccctcctga

SEQ ID NO: 80680 - DNA, 270 bp, Citrobacter koseri
atgagccacaaaaatgaaaaaattatagaaggatatgtgattgaaactttactccgtggagagatatcacatcccgtatgcatccatcgggtgaaatttactaatggtaagtttgctttgattcgcagtataggaaatgtctgttttgttcccggtgcatccatcagacgagaaaagtcatactggtctattcataatataaaaatcagacttcttccgtttgaatacattagtgaaactgagtctaaaagacgctttcaggagggatag

SEQ ID NO: 80681 - DNA, 537 bp, Citrobacter koseri
atgcaacatcttaaaaatttaaagaaatatactccagatgatgaagatagcctgtttctcatgaatgagcatggagcagagttttttatttctgacgatgggcgggactggtataaatcacagtctgattttttacctaatactctgaaagttgcatatgatgaagcgggaattattcgttgtatcagtaatgatgtgtcaactatttatccgcgagattttagcatcgtggaagttaaaaccacgtcaaaaaataaaatggcggatatttcaggtgaatgggtatttaaagatggaaaaatccagccgcgccagtattcgcaaaatgagctaatcgaacaggcggagacaaagaaagctgaattattgtcagccgcagccgctgcaattgctccgttgcaggatgctgttgatattggtatggcaactaatgaagaaacagcgcttttgctggagtggaaaaaatatcgcgtacaggttaaccgggttgatacgagtacagcgccgggtattgagtggcccgagcaaccgaagtag

SEQ ID NO: 80682 - DNA, 264 bp, Citrobacter koseri
atgttagatcttgaaagcatttataaaaatgaaagtgtagaagatgttcttttacattttgctcttcgtacaccctacccaactatcgaccggatgtatgttaattacaaatttgaggttgttgctaatggtgaactattaaatactcatcaaaaactctttaaagagggaaagttaaagaaaactggtaagccattacctgaaaaaggtccaaactggaaagagcctaaatttgtgaccgaaaaaaaatacggcattaaatag

SEQ ID NO: 80683 - DNA, 927 bp, Citrobacter koseri
atgacctttgaaaaactcctggaggagtactttttcgcccgtctgctgcgaccggcgacccaggattgttatcgcacggcagtggagcagttcactcactggcgcaacgtactgcccgccgaagtgacgccgcatatggcgctggaatggcgcggctatctgcttaacgagcgcgatatcaagccggtgagctggaatcattacatgcgccacctgcgggcgctgtataacttcgccatccgccaggggctgctgacgcagtttgtgaatccgtttatgaacatcacgctgcgcgaatcgcgccgtaggaagaaaactctgactcatgagcagattgttctctcacgcgaagtcctgcatcactacatcgagcaggagaaaacgcagtacggctaccgttcgccgttttaccccgcgtggttctggctgacggcaatagagacgttcaactacaccgccatccggttgaaccagcttctgcatctgcgtagccgcgatatcgatctgttgcacaacaccctgtttattcagagcgaggggagtaaaagccacgatgagcatgtcgtgcccatctcctcccgactgcgaccccatctggaaacgttactgtatgaagcgcgaaaacgagggttcgcctccggcgagcagttatttaatatcaactgcttcaaccagcggacgctacgccagggtaaaccgatgacagaaaatcaggtcagctacttttttgccaaactgagcgacgcctgccacagtcgtttttcctcacaccgctaccgccacaccgtggcaaccgaactgatgaagaaaccggagcaaaatttatacgtcacgcagaagctgctgggacacagggatattaaagttacgctcagctatatcgaacataatgtcgagatgctcagaagttgcgtggagagagattga

SEQ ID NO: 80684 - DNA, 1611 bp, Citrobacter koseri
atgcggatatggctggcacgcaaaaaaccagacaccacaccatccaccgaggagacaaacgccacggagggttggctgcaacctgaatctgctgaaatcctgctggcgaagccatcccgccagcagcttatccagtttatccgtcagagtaccgcgctccccgccccgctttttgaacgattctggctgacgccactccatcgctttgcggaactggcgcagtcgtttccggcctcggaaaaccaccaccatgcccacgcgggcggtctgctcgatcacagccttgaagccgcctgttacgccgcacggctgcggcagagttatctttttccacctgatgcagcgccggaagaccaggccgctcagtccgaacgctggacgacggttatcatctacgccgcactactgcacgatctgggtaaactcgtcaccgatattgaggtggaggacggcagcggaaaacgctggtttccgtggcatggcccgctgacccagcgctatcgattccgatatctgccgcaacgtgattacctgcgccatccggcaggggcagttcttctgctcacccaactgctccctccggaaagcctcgactggctcgccgctgattctgctgccttatccaccctgcttcattgcctgaacggacagtatcagtatgccgggctcgccggagaactggtgcagaaagccgaccgtgcatcggtagcgtttaatctcggcggcgatccggttaaggccattcatcgtccgcaaacctcgctgccgcagcaaattattaccgccctgcgcgacctgctggcgcatgagttccggctcaataacccgaacggcggctcggatggctggctgacggaagaggcgctgtggttggtcagtaagaacgctgccgatgcggtgcgtggctggctgctgcgccaggggattgacgccgtaccgcaacataacgtgcgactgttcgacgagatgcaggcgcaccagttgcttatcccctgcgaagataaagccatctggcattgtcggattgaggccagcagcggctggagtagtgagctgaccctgctgcgcttttcaccgtcgcttatctgggaaaaccagcaacaacggccagacgtctttccgggaacggtaacgcccatcgcttcagaaccggataaaccctgcgttgccagtgatcctgagccagaacctgttctcgccacacagccggatgaagaaccgctgtccggcgaagccttctggctgtggctgacccaaaacgtccaggcacagcgcatggaaatcaacgaacccaatgcccggatccacaccgtcgccggaaccgcatttctggtgactccgggcatttttaagctctggcttagcgcctgtggcagggatatcccagcagaacgctggcgggaggtacagaaagcgtttcaggacctgaatctgcaccgcaaacgcaaaaacggcctcaacatctggaactgcgccgttgtcggccctcgccgcagttcgcgtttaaaggggtatctgctccacgatcccacgctgctgttcggcgatgacgtcccctttaataacccgcatctcttgctgaatgaaggagagaatgatcatgacctttga

SEQ ID NO: 80685 - DNA, 1074 bp, Citrobacter koseri
atgaaaaaagcagtgatgattctggcgggcggcctgctgtgcggctcgcaggcgatagcggcggataaccccgacctgatcgcccaggcaaaaaaagagggcagcgtgacctttaacgtctggtacttacagccgcagtggcgcagctttgtgaaggattttgagcagcagtacggcgttaaggtgcgcatcccggaaggcagcattgacggcaatatgaacaagctgctggcggaaacgggcaaagcaaaaggcaaaatcgacgtgatcgccctttccgtggcgcagttgccggtgacgacgggggcgaaagcgctggcgaaggtggacgacctacccggctatggtgatgccattcaccagatacagaacgtcgatactcagggctatgccgtggcgttctggggcaaccagaccgggtttgcttacgacccgcagcagatgggcgatcgggcactgccgcaaacgctggagcagttgcagagctttatcgacgccaatccgaagaggttcggctataacgacccgaataatggcggcgcgggagaggcgtttatccagcgtattgtcaccacccaaggcggcgagtttaacagcgaagcggagagcgttgacccggctgtggtgaaaaactggcagaaaggctggcagtggtttgccgccaacggcgacaaaatcacccgcacagcttctggtgccgacagcctgacgcgcctgaacgatggtgagctgatgctgacgccagcctgggaagaccatctggctggcctgcaaaaaaccggggccataacctcgcggctgaaattctacgttcctgaatttggtatgcccggcggcggcaacatcgcggcgatcgccgccaacagcccacatccggcggcatcacgcttgttcctcaactggctgattcagcccgaaacgcaaaaagcgctgaataaggcgtttggttcgacccccatgatcaaacaggccagcccggaagcgaaacacccggacgccacggtgcagttttacggcaaggcgtacagtacacagctcaggaaagagtttgtgcgtgaagtcatgatgcagtaa

SEQ ID NO: 80686 - DNA, 837 bp, Citrobacter koseri
atgaactacactgccaacggtcgccgggtggtaacgatttcgctgatcttcttcgtggtcgccaacctggtctggctgggcatgccgttcggcatggcgatcctctggtcgctggttgacccggcccatccgtggagctacccggatatcttcccgccggtattatcgttcagccgctggctgctggtatgggagaaaacctcgctttccgaggcgctgttcaacagctataccatcgcccctgcggtggcggtggtcagcctgctgctgtcactgcccaccgcgtatgccttcgggcgcatgacctttcgcggtaaggcggtggcggagatgctgacgctgatcccgctggtgatgccggggatgctgatcgggatttttttcagcgccatgctgatcaacctcaatatcgacaacgtgtttatcagcattgttatcggccatacggtgctgacgctgccctattcgattcgcattatgtcggcgggatttaaggcggtgccgcaggatctgatcgacgccagccgcgacctgggctccggcgcgtggggcaccttctgtaacgcctatctgccgctgctcaagccaagctttctggcggcgctgattttttgtctggtgcgaagtctggaggagttcagcatctcatacgtgctgggcgcgccggattttatcaccgtcccgaccattctttactctttcctcggctactccttcgtccgaccggatgcggcggtggtgtcgatgattctggtgatccccaacgtcattctgatggtcatcatcgagaagttgctgaaggggaactatctgtcgcagtccacggggaaagcctga

SEQ ID NO: 80687 - DNA, 762 bp, Citrobacter koseri
atgaaaaactggcgcaacgatgcggttgcctggctgctgatgctcagcgggctgggcaccattctgctgttgatgggatcgacgttttacgtggtgatcgtccagagtctgggctggttcaacctcgaaggcgacagccatttctcgctggagtactggcgcaatatgttgcaggacgaggtgctgcaaagcgccctgttctactcagtgaaagtgtcgctgctgggggcgttcggttcggtgatttttgcgtatccgctggcgctgtggctgcgtaaaccaatggccggtaaagagggcattatcgcggtgctgcgcgcgccgatgtttatccccggtctggtggcggcgttcctgttcgtcaatatcgtcgcttatcacggcattatcaacgagctgctgctggcgctagggatcatcagcgagccgctgcggatgcagaacgacgatttcggctggggcgtggtgatcctgcaaatctggaaaaacctgcccttcgccctgatcctcgtcggcggcgcggtcaacgccattcgtaacgacgtgctggacgccgccagcaacctcggcgccagccgctggcgcagttttactgcgcgtagtggtgccgctgacgctgcccgccgtgcaggtgacgctgatcctggtgtttatcggcgcactgggcgacttcgccttcttctcggtggccgggccgcgcaacacctattcgctggcgcgactgatgcaggccaccgccatggagtacggcgagtggaataa

SEQ ID NO: 80688 - DNA, 1068 bp, Citrobacter koseri
atgtcaaaactggttctggaacaggtgaccaaaacgttcggcgaattctatgccgccagggaaatctcgttctgcgccgaagagggggagttcgtgaccctgctcggaccaagcggctgcggtaaaaccaccctgctgaaaatgatcggcggctttcatcagccggacagcggacgcattctgattggcgataaaacggtgaacgccctgccgccggaaaagcgcaacaccgccatgtgtttccagtcctatgcgctgttcccgcacctcaacgtggcgcacaacatctgttttggcctgaagcagaaaaaggtcgccatcggcgaacagcagacccggctggcggaagcgctgaagcaggtgggactggagaaccagcgcctgaaaatgcccacccagctctccggcggacagcagcagcgcgtggcgctggcacgggcgatgatcacccgtccggacgtgatcctgttcgacgaaccgctctccaacctggatgccaagctgcgcgaaagcgtgcgttttgaaatcaaggaactccagcggcagtaccagctcacctccatttacgtcacccacgaccaggcggaagcgctggcgatgtcggacaagatcgtggtgctgaacgccggtaacgttgagcaaatcggcaaaccggaagagatttactaccgtccggccaaccgctttgtggcggactttatcggcgcggccaatatcgacaccgcgcaagtcacgcccgcagagcagccgggctattaccgggtacgctgcgccctcggcgagttttatgtgcattccgtacagccgccgcgcacggagcactgctatatctgctggcgaccggaagacgcacagtatgtcagccagccgcaggcaggtgacaaccacttcactctgacgctcgacaaaatggcctttatgggcaacctcaccgaagcctggggccacaacgacgccgggctgtcggtccgtttacagctaatcaaaaagccgcccgtcgcccccggcgagcgcgcctgcttccgtctggcggagaacgccatccattttctggagccggtatcatga

SEQ ID NO: 80689 - DNA, 831 bp, Citrobacter koseri
atggcgtttaactttcaccgggcggcagaggggattgtgctggccaacagccaccggggttattccaactgcgcgccggaaaacacctttccggcctttgaagccgcccgcctggcgggaacccactgcattgaaatcgatatccacctgacggcggataatcaactggtcgtcacgcacgatcaccgtgtcgaccgggtgtccaccggacacggatttgtggagcagatgacgtacccgcaactgctggcgtgtgattttggcgtgaaataccatccgtcatttgccggaacgcgcatccccctgctggctgacgtgctgcgctgggcggtggaaaacggcatggggctgattgttgaggtcaaacagcgcaaccgccatgacgagtttgtggcggcgctggtcgcactgctgcatgagcagccggaggccatcggccatattcagttgctgggcttcaaccatgtactgatcaaccgggtgaaggcgcaaattccgcaactggcgttacaggtggtgacgctggagcggtacaataaccaactggctgcggtgcagcagtccaatgccggatgcgtctgctttgagttcgagttcgcccatatcgacgacctgcgggcctacaaaaacgccggactgggcgtacggatgtatctgcatgaaatgaaaaacggcatgactccactggagcagtacgactataaattcggctgtgacagtcgtccggtgattatcggctggatgcaggcggggctgattgatatgctcagccacgatgatattccgtatctgcaggggctgattgaagaagccggactgcgctggaactag

SEQ ID NO: 80690 - DNA, 1113 bp, Citrobacter koseri
atgaacgcccactctgaacgccttgaactgcgcggctcgcagcgcctgttgctggaactgatccgccgccacgcgccggtgacgcgagccgaactggcgcggctgtccgggctgacggcgggggcgatcacccagcagtgccgggagctgatgttctccggtctggtggtggaaggggagcgcaataccgggcagcgcggccagccgtcactgccgctgcgccttaaccccggcggcggctgcgctatcgggttgtcgttcagccccggttttatcgatatgacggtggtcgatctcagcggccgccagcttttgtcgctttccgaagcgcatcaggagaaccagccgctggcggcgacccttgtgcagattaaaaccctggtggagcagacgctgaaaaagcgacagctccagcacgcgcgtatcctcggtattggctatgcggtgccgggttttctgaaagcggatggtcgcaaacgccacagcgtgccgtggctggagagctggcgcgaggtggatttacagcaggcgtttgccgacaacctgccgtggccgacgtgggtggagaacaacgccaacgcctcggcggtaggcgagctgtacagcggcgaatggaatgcctacagcgatctgacctttatcgatctcggctacggtatcggcgcggggattatctccgggcataaaatgctgcgcggtgggttctgcaacgctggcgaagtcgggatggcctttccgtccggcacgccgcgcccgtcgtataaggatctgctcgccacgctggagcgtgaaggattcagtgaaactcagctaccggagctgattgccggacagcatccgctgctggagagctggtttgaacgctgtcgtggtcaggtggagcagacggtgctcggctgcgtgcagtgggtggatccgcaaatcatcgtactcggtggcgcgatgccgaaaccgattatcagccgtctggtgcaggagctgaatcaacggctggaaacccggctcgaccccaaccgcccgaaagtgagactggccgcgtcttcgatgggggcgcagagtgcgtcacgcggtgcggcgatgatcccgctgtatcaggtgattaatgagggataa

SEQ ID NO: 80691 - DNA, 249 bp, Citrobacter koseri
atgacaagaatgacaagcgtcgatgcgcatcgcgcagcaggtgaattgatagaccatttaaaccgtaatacgcctcttcacctcacctggaatagcgtatccttcactgctgtcgaaggtagctctgacgagtttctttttacctttcacgaaagtgatagagagtatgcaacttcttgcagattgccgctgacatcactgtcagtggcactcacatgcaacgagatatatcaggcattaagagggtaa

SEQ ID NO: 80692 - DNA, 258 bp, Citrobacter koseri
atgctgccacatcgtctaaaagaggcacgactcagggcggggctgtcacaggaacggctggggatccttgcgggtattgatgaagcaacggctagcgcccgaatgaaccagtatgagcgcggcacccactctcccgatttttctctggcgtgtaagttcgctgaagtactaaaagtccctgccagctacttctacactgtcgaagacgatctggcagaaatagtattagaatattcccggcaacattcagataaataa

SEQ ID NO: 80693 - DNA, 273 bp, Citrobacter koseri
atgaaaccaaaggatgactggcatcgggcggatatcattgcagaactgcacaaacgtggcaccagccttgctgctctctcccgcagtgccgggctgagttcttccactctctccaacacgctcgacagaccctggccgaagggtgaatggctgattgcatcgcgtcttggtaagcacccggcggagatttggcccagccggtactttgatgagcgagggcgatggattgaacgttttgttcgggggcagaaattaccggtgcccggacgctga

SEQ ID NO: 80694 - DNA, 207 bp, Citrobacter koseri
atgcaggctcacttcttaccgccgccatctgctgaagaactggtgatccgttgtcagatactggttcgggaaattattgccgcgaaacaacccggagtgcgggatgtactgacgtttattctttccgaccagcttgatctgctcaaaggtgcgatggatgcggggtatatcaataacgaggaagagcaggggagaacggcagagtag

SEQ ID NO: 80695 - DNA, 1503 bp, Citrobacter koseri
atgctaataacggatctcttcagccacaagatacattcgagtggtgatgattggccagaaaaattaatagatatagccacaatttttaataaattcgatggtcatccttacgataggttggctatcgaacaagagttgctaaaaatcagtccaagagcaactaaggttgctcgtgacccttcaaaattcagggatgaaataagtgcatatccagcttatttaggtctatatcgccttagtattgtaaatggagtttggcatatttatctaagtaattctgctaaacgattcttagttaatgaagaaccaaatgtatcggcttttttattaatacagctatcaatattccagtatcctaatggaatgggagtagcttatagctcagggagctctaacctgagaatccaggcaaacacaaaggaaagaactcttagttttattagagataacattcatttatcgcctttaagactgatatgtaaagctattcatgctgattctatagtaaataatatcgatatttttgaagccagtgtatcttatgaggaaatatttattctggcaaatgataaagatataaatactaatgcatctcctgatgaatcattgatacaagaaaagttgtatttaataagagatcaaggcattaaattccaaggaaaatatgaaagccgctttcatattttgaaacatacagatctttttgaagttgaacgttctcgaataaagttaagagcaccaataactaaagccgagaaagaattaattttcgataaaatatccacaattaataatattagtattcagttcaatggatttgacaacgttgaaaatgaggttgatttacacaacgaacttcgaacttgttcatggtctaattattatgatgctttaaaaactcttgaccaagagacaatttttaaactaacacacgaaaacaatgttgttactagtgatttagcagattttaccgaaaaaggaaaaatggttgaaattatctcctctgataagctatatgagctcagagaaataaataaatctatttcgacaaagcaaaacaactacaaaaacaaggtatatgtagaccctgaattgacaagaattcgacgccaaagagcaaatctcacacacaaaatattacttgaaaaacttaacgattatttagtatcaaaaggtgctacatctcttgaaaatgaacatattgatttatatgccaaattaaaaaacaataaaaaattcttatttgaagtaaagagcattgatgataaaaaccttttaagtcaaacaagaaaggggatcagccaattatatgaatacagatatcgatatcaaaacatcattggctatgacgttaatctatgccttgtctacccccacgagcctaaatacgttccatggttgcaagagtatctatgtacagatcgagatgtaggtattatgtggttcgaagaagataagcctattttttcaaaattctgtgagcatcttgaaaagattatttaa

SEQ ID NO: 80696 - DNA, 1128 bp, Citrobacter koseri
atgttaaatatcaatacattaggtttcttttctggtggtggtggtctagaccttggattctctgccgctgggtataatattattttatcttcagatattgatgctcactcctgcgaaacattaaagcttaatcaggggaaaaaaagttatgtgaaagagcatcctgttttatgtgaagatgttagaaaaattgataaaaaagcgattaaaggaatcatcggagatcaaaagattgattttgtgattggtgggccgccatgccaatcgttttcggtctttggacggcgtaaaggtcttgatgatccacgaggaaacttagttttcgaatatgtaagattaataaaagaattaaacccaagagggtttctatttgaaaatgttgctgggctaaaaagcatccatggtggtgaactatataaggagctagctaaagtcctttcaatggatgggaaatacaaaatatcagcacatgaatatgaagttgctgaatatggcattccacaatttaggaaaagaatatttttcataggttcattagacggtaaaacaatacctccaatggtaccaacccatgctcaggaaaatgccttaccattagattttaaagcatttaatactgtacaacaggtattaacaggattacctacacctataacagattggaaagctgcgccctatgttaatggacatgttggaagaaaacatagccagttaattatagatagatataaatccttaatatacggagagagagatcacaaaactagaattaataaattagatccagataaacctagctatacaattattgttggctcggatgctggtggtggaaaaggacatgttcatccttttgaacctcgtgaagtaacaccaagagaaagtgcaagaatccaaacattccctgactggtgggaattttttggtactggacgtcatataatccgacaagttgggaatgctgtcccgccattgtttggtgcattaatagcaaatcatgttgcaaaagaaatgttctctatcgatacagaacgaaatattgatgatttcatagacattcttgatttggggtttttccaaaatgctaataacggatctcttcagccacaagatacattcgagtggtga

SEQ ID NO: 80697 - DNA, 1284 bp, Citrobacter koseri
atgtcagatatcaatccacgcaatgccttatcccaggatcgggaagctctctataaacttgtctggcgcgaacctgcggagcgcatagccgcgcaatatggcatcagtacaacgttactggcaaaacgatgtacagaaatgcggatacccaggccgcttgccggttactggaaagcgctggcgaaagggactgcacctgcagtgccagcattgcctgatttgaagaaggacaaggttgaaaaagcttcaggtaaagccagtttggccgttccgtcgcccacaaaagtaccatctaaagtagcagtgccagcaccacgaaagcgagcaaggaaagcgggtagtggctatgcactgattgatgatctcaaaacttaccttcccgtctcttccgtcacaaaagacggctactacaaaccgacgaaaaagaaactactcgatctgaatgtttcagaaacggggttcaacagcgccatcgactttctgagttggttctttgctgaactggggaagcaaggctattgggtacgattagctgaaggcaatgaggggcttcatcgtcagggtatagatatccaagaagatccaaaagagggaggctttcgttgtgacagtttatggcgcccttgttcagccagcattatttgtgttgggcacatgctgttcgcgtttagtctggctgaaatgacagaatatgtcccggcgaaggaggttaatggtcgatacattcgcgatgaaacgatgatccgctggatgaggggaaagtatgacaagccatttcgctacgtcattaggcatgccttacctacagggcgatttctgctacagctctactcgccgtattcttcaacaaactggcaggttcaatttcgacagacaaagcaatgtgggcttgtaagccagattccgaagatcatttctgcgatgcatgatgctgttccgctgattaagaagcagttggaagaggcgagaatcaaagctgaagctcggagaatccagtgggaattggatgagaagagatatcgggagcaggatcggattagaagggaaaaagaggcatacaacgccagtttggccgagctgaaagctattatggtccagtgggctgaagataagcgtatagagcagttttttcgtgaggtggaacaggatgtggctggtcttgatgagctacagaagaaactgattatggaacgtctgcaattagctcgtcagtttttatcggtggattcagctactaagcggctgttggagtggacaactccactggagcgattaaataaatga

SEQ ID NO: 80698 - DNA, 957 bp, Citrobacter koseri
atgaatacacaactagtaacaatcgttggtcttgtcgccatcccgttttcaactgctctgggtttttgcgcgatattacttggattatttagctttgatgagaagagaaaaaataaaattgcaactaaaattaataacatcttacctaataaaaataaagcaactgttttttctcagtggtggacaaaaaaattcttccttatatttggatataattacctatcaaaaaggcaattgttaagcattccttttttcactattttatattccagcctactttttgttttatggttttcatggattttaatttttaaaaaccctgagcacattataccaaagcatattccaacatcaataagcctggaattacatgattttataactaatggatttttttactctcttcttcttgattttatctcgatatttataactagatggtatataaaatattcattaaaaaatgaatttaactcactaaaatcaatagggttatttatctcatcaatatttattatattaatattatttaccctcgtcatttatcatttaaagattaattcaattgaaaacttgtacatggatcaccaattatattttgaagctcgaccggatataaaatgggagccaattacaatattaggttcatctttaaatatcgaccacaatgaaacaatgattataaaaacctctaaaggatggttatcaagctattttataccacaggctttgatgctttacacatcaattataactcaactaagtttgataataatatttatgtgttacgcgacatctgctttattgttaaggacaaaaaccttatctttgtcattattaaagaatgcaggaacacctcaaatgagcgcctggggattcattatacttgcggcacttcttattcttactatatttatatctttactctttatcgctgcattccttcccacaacatag

SEQ ID NO: 80699 - DNA, 1065 bp, Citrobacter koseri
atgataaccagcggctatctaattgggcagataattgacgagctctccacattaggagaacaggcaaagctaagaaacaagcttggtctctctgatttatccgtcttcagcgagaatttcttcagagatattttaaacatcattgaagatcttaatttaattaacaccaatgaggatagagcaaacgaacctggtatagacttaggagatgaattaaaaaaaatagcgttccaggttaccgcgacaaaaacaagtgctaaagtcataaaaacactgaaaaaaatcaccactaagcaaaggggaaaatataatcgcttcataatccttattattggagagaagcagaacacgtacaaacctgtcctcgaagcactgagcgacagagtcaccagcgaaatacactcgtcaattaaatttgatccagctgaagatatcatggacttaactgatttagcacgtcgagtgataggacttcccctacccactattcaaagtttacaccggcttatccaagaccaagtagctcaggttaaaattgaattagaggtcccagacaaaaatggaaactatgatacgtctggttatacattgtgggaagcattgcctgtaccaaagttaggagacggcacctcctttgcggtttgggaatcgacaaattctgggatagaaccaactgaagattatgttagctctattaaagaagacattatggagctttcacgacgccttcataagctacctcgaattacccgggagttttttgctatgctccatgagcgggctgattattctaatctccgatttagagagtatccaagtctctttgttgattcagttaataaaacatatccaaatgcacaaacagaattagatctgctgcaggcgcaaaaccttctctatattgatttcgaaccgttaacatttgatgagaaatatccaggtgaaattggactaaaaatgggactccctggagatagttttcgtctagggttttatgatttcgtcattgaaaataaattatcttttcgacaggtgctcggcgaattagatttttcttccttctaa

SEQ ID NO: 80700 - DNA, 321 bp, Citrobacter koseri
atgaaactctattctttatttgtcgccgtaattctaatatccactgatgctccctatgccttcgccgcccccctcaccgagcgcgaagagctaaccctgtccctcgaccagctaacccaaatcgaagcctctctccaccgcgcccaacaaagcgccagaaccggtatcaatgagcgctactacttcgattatccacgcatccacggcgatatcaccactctgcgcagcgggattgagcattacctcacccccacccgcgcccagccgcgagatacggcgacgctggtcgggcaataccgtgaagagaaaaccacgccatga

SEQ ID NO: 80701 - DNA, 1614 bp, Citrobacter koseri
atgactagcacagcaagaaaattaaaagacacaagaaataaaagggcgagtaaatttcaagataatttatccccaatgaaaaccattgagaatcgccagtcaaatgatatttttttgggattatgtggttttgtcggttgtggtattaaaactgtagtcgatgtaactaaagaggttgctgaatcttggggatataatgtaattcacattagaattagcgatttaatgaaagatgaattatattttgagaaatctgtcattgatgcaaaccttgacaacagtattgacagacatctagcaatgcaacacctcggcaatgaattaagacggcattataaaagaaaagagctattatctgaggctgctattgctgcaataagcactgaaaaaaacaaaagcacaagttctcctgatgaagcaactgtttatataattgatcaattaaaaagacctgaagaaattgagcttttcagagttatatatcaacacaacttttatttaatgggcattttgagagatcaagaacatcgagtaagaaacttaaaagaagatggggcatcaaaaactgacattccaaatattataaatgttgatgacaaatctgatgatgactatggtcaaagaactagtcaagcaatccttacatccgattttttcattaaaaataatcaaagtcagaagaaaagtcttgaacataatatagatcgattttttggtctcattcatggacaaaatggtttaacaccaacaataaacgagaaaggtatgtatgctgcattttcagcatcactgcaatctgcatgtttatccagacaagtcggcgccgcattatttgatgacgaaggtaacttgttagctgttggcaagaatgatgtacctaaggctggtggtggtttgtacgttagtgacgatggagaaaaagatcatcgctgcgttcataaaagtggaaaatgctttaatgtttcaagtaaattaaaaataaaggaaaaaatagaaggcatattagctaaagaaataaaagatgccttacccaccaatgctgaaccatctattgagttaatccttaaaagattagaaagcaaaattccagacatcacagataaaatttatggcggaagtaaaatatcatctattatggaatattctcgttccatacatgcagagatggatgttattacaaccatggcccggaagtcaactgaagggacaaaagggaaaatattatatacaacaacgtatccttgccataattgcgccagacatattgtagcatcaggaattaagaaagttgtttacattgagccatttgaaaaaagtttggcattagacctacatgatgattcaataacaaaatcagaagattcttcgaaagttatttttacagattttgaaggtatttcaccccgcagatacagtaaattttttatgcctactgatgaaagaaaagacgaatcaacaggtatagcatacaaatttaatacaaagtataaaaatcatattgatgtgcaatacctagatagtcacagaaaatatgaagatatggttgcacaaaaatttttatctgaagtagcaaaacaagacacttccgcccaagacggagagacgactgtataa

SEQ ID NO: 80702 - DNA, 192 bp, Citrobacter koseri
atgtcatacaaaatagatataatagaagggtatgaggtattagaggcaaccaacgatcatgtcacactagacggtgtttcacccgttgataattacatcgataacattattgatttgcatgatgcgtttcataaaagagaaaccatcaatgcttttagaaaaattctttctaaagaaataatttttgattag

SEQ ID NO: 80703 - DNA, 681 bp, Citrobacter koseri
atgcccgaccatgtgccacaacccgttcgccgtcccggacagctcggctggctcgcattgttacccggcgtgctggctggcttttgcctcggcgcgtggatgctggcgatagcgctggagtggctgggcgatgcgtttttctggcggaacacctgcgccagccatagcgaacaggtattacaggcgacatggcagtggtggcggggttccgctagcgcaccagtgtggttagtagaagatctggcgcttgtcagtgatacgttgcagaaagggagcgtagcgctaattgcctcgctcaacaggcaaagtggcttgttctggacggaagcagtcactgcggtaatccgctgcgagttactgtctgcgggtaatgttaccctcacctttttgctgcggctggcgattttgttgcaggccctgccgctgtttgcgctgaccattaccattggccttatcgacgggttggtacgccgcgacttacggcgattcggcgcaggccatgagtccgggtttgtttatcatcatgccaggcgaatggctgactccagcctggtggcgacgggactggtatggctggcagtgccagtctttcttgagccggagtatgtgttggtgttaggggctgtggggattgcgatagcaatatcagtaactactggagcgtttaaaaagtatgtgtga

SEQ ID NO: 80704 - DNA, 609 bp, Citrobacter koseri
atgcttaaacgtctggcttatctgatagcaggcagcactcttcttctgctggcggcagcggtgttctggtgtttcaaccgcctgaacaccctgacactggcgcagcaacagacacaacgccagataacacagtggcgcgaccagccacagccagacagcgattatcacgagctgaaggttgccgtaaaaaacatcaccgatagcacggaggcccttgccagacagcttaacgatgctgccagcgcgcaagccgaacagcttcaacccattaacgaacagatcaaggcgctggagagacaggtccagaccctgagcaccagttatcaacacctgcaacaacagtccgccacgcgcagccgcgcaaaggcaaaaagccccatcccatctccgctttgggccgcaaaggcccctttttctcttatcagcagcgagtttcgcgccgggcggcagttcgccgtcattgccccatccggctatcgctcgctctcacagcttcagcttgttgcccccggcgacagcgtgcagggctggcaattgctgcaactggacgacagtcacgccactttccgtaaaggcgggcagcggctggcgctgaacgccggaggataa

SEQ ID NO: 80705 - DNA, 447 bp, Citrobacter koseri
atggttatcacactgctgatgctgggcggctgcaactcgccccaacggcccactgcgcctgtggcaaaaccaacatcaccgcctgtgcctgaagtggtgcgctatgaccgctacctgctgattaacacccgccccgatgaagcccagcgcaacccgctgcaccaggtcgtcaacatcaacctgccgctgaacctgaagctcaccgtgggcgacgcctttacctggctgctgaaacagagcggctacagcctgtgcatcgatgaccatccaacgcagtttctggcaggcaaaccgctgccgctttctcaataccgactcggcccgatgcgactggaagaagcactgaaaacgctggccggaccgggttggctaatgcagaccgacgtactgaaccgcgaagtctgttttcacctgaacacaccgggaacgggggaccatcatgcttaa

SEQ ID NO: 80706 - DNA, 1296 bp, Citrobacter koseri
atgaaagcttacacgctaagtcttgttgcactggcgctaacctcttcactggcgcaagcctcaacaaccgatctggtgctggataaagtcgtaacgctgaaccgccatggtatccgcccacagatggatacggcaaaaaaccaggcaatgtcgcctgaaaccttccctcgttttcagggcaaagatggtgagctaaccatgcacggctacgctgccgtcacgcgcatgggggattatctgcgggattacctacagcaacgccagttccttaaaaaagatagctgcctcaacaccgacgatatttttgttcgcaccagcgccaaacagcgtacccgtatgacagcttacgcgctgaccgatgcgctgtttcccggatgtggcgtcaaggtcagctcacctaccagcaaaaaagatacactgtttaaacccattgataatggcgtcgctccgctggatgtcgccagggccagcaatagcgtcttaaagaagatgggtggcagcctggatgcggcaaaacagcgttatgccagtgacatagcggcgatgcagaaaatcgttgaccaaaactgtaaaggagatcaatgcacctactccagcagtgaatggtcgattaagaacctgaaggatcgcaatattgagctggaagggcctctgttctggggcaacgaactgggtgaaaccttccgcctacaatatgccgaaggactgccactggaacaggttgcgtttggtcacgtcaaaaatgctgacgacctgacccggctcaacaaactgcaccagattaagttcgatctgatgctgcacgatccgtatatcgccacccgcgcgggctcacaactgctgagccagattctctacacgctggaaaaagggtctggtttccacgaccccaacgccagcccagagattgccgccagcgcgccagatgcacggatggtcatgtatttcggtcatgactccaacctgacgccgctacaaaccctgctcaacgtctcctggcaactggagggctatccgaaagacgatacgccacccggcagcacactgatgtttgaacgctatcgggatagcaaaacgcaccagacgtatatcggccttacctttatgacgcaaagcctggatcaaatgcgtcggctggagccgctaaatgcgaaaaatccaccactgcaacgcaaactgagcctgaactgcaaaaacagcccggacggctggctgtgcccgatagatgagtttgccgcgcaggttaacagccgtctcgataagactgcgatgattgcgcagaactacgcggaatag

SEQ ID NO: 80707 - DNA, 1146 bp, Citrobacter koseri
atgcaaaagcgcattattgcagggctgcttgcagggttagtctcggccagcagtcaggctgtcactatttatgaaaataaagatcagggtgccaaagtcgatattaccggctcactgcgtatgatgctggaaaacagctcaaaacgcggcagaaccgatggcgacagcgattcgaaattaaaagatcagggcacacgtatcggactgaaatttaaacgtggtctgggcgatcaattcgctagcgacagttgggtgaagaatctgggagcggtagcctatttcgaatatggcggagatacccaggcagcagaagacaatttccattttaataaccgacagtcctatggcggactgagttacaaaggcgttggcgaactggattttggccgggttaaatcccccttcgattatgttcatcagtctgattacagctatgaatatggcaacagcggggcactctattttggcggcggaaaaatcggtcgtgtcggcggcggtgataataactttatcaagcgcgaatccaataccatgcgctttatgtcggaacgctggaacggtctgaaaatgggggcgtcctataccatgcagaccggtacaaatatcaatgatatcgaaaacgcctgggcgctggcgctgctctacgaatccccctggaatctgacactcaacgccggtatcgcccaacagacaaccaatggttctactgacgccaatgcgaaaagcggttacctggacgtgaaatccgccaaagaaaatatctggggtgtgggagcgaagtacaacattccacaaattaatctctcgctggctctggactatggtggttatcaaatcaaggacggtaacaaaggcgacgacgacggttatgccgcttatcaggacactatcaacgtagaccttttcggcgctggcgcgaagtggacctgggataaatggggtatctacggagtctatggactgcgcgatggcgatgcagcggctgacaattatcaggaaacccgcaccatctttggcaccgattataccttcaacaaacaattcatcctgtggctggagtactgcaacatgaccgtcgattccgatgatgcggacgatcggtacagtgacgacaaaattgctcttggcgcacggtattacttctga

SEQ ID NO: 80708 - DNA, 1116 bp, Citrobacter koseri
atgaacagaaaaaagctcttttttctgctgcctgtccttttgctcgctttccagcaatcagcgcaggccgcccatgcgaattatgaaaataaagacttcccattatctgaatgcgactctctggcagtaacacagaagaaaaccgattgctatattgattacgccattagtcaccatttcttctattggggaaaattcgtttacggcgttaatggttccggcccgattgaagatggtttcgccaaagcttatcagtcagcgccgggtaatgagcaagttgccaacgcttatgccgcagcccagattcgcaataaacacgttaaagaaggtattgccctctatcaggcgaatttcaaaaagtttggtgattttgactccggctataacgcactggcttacctgcgcgctttagccaaaacgcctcaggagcgccagcagacaacaacagccctgcatcaacaactacagcagcgcttcccgactaaaacagcaaagtatgacgctatcctcgatgctgcggataaggtacttcaggctcccgatatcatccatttcaccatgcctaatgtcgctcatccaggacgctaccatgccatcgtggtgctgggctaccaactggataaagacggcaatccacaggagccgctgaaaggcatcatggcgcaggcgctgaaggttgccaaacagtaccctgaatcaaaactcatcgtgactggcggcgtaccgcgtaataaccgcgtcgaagcagaagtcatgtggaaatacttcaccgataacggcgtggctccttcacgcatcatccccgaggtgctctcttacgacaccgtacagaacgccaattacacggcgatgattatgcgtaatttcaacatccgggaggccactatcgtgacccgcgcaggccatatccgccggggtacggtactgatggaaaacgcgctgaagctgtatgtcccctggccggtagaactcacgtcactggcatggaaagacagtaattttgccactgaagatgacgcgaaaaaaccgccaaaactcggtagcggtgattaccgctccacctatcgggatgtattacggctttaccgtcaggaataccccggcttcgccatgtga

SEQ ID NO: 80709 - DNA, 519 bp, Citrobacter koseri
atgatgaataacccgacaaccgactaccagcctctggctgatgacgactataaaatgcaggtttacgtctcctcgctaaaaggccttttaaagccttttaagagtaagggggagcttgagctgctggaaagcaacgccagagccgcccgtgagatgatggaaccgctgatgcgacgcttgatccagagcgcccggcgataccccgtgcgccagcttccgctgatcttcaccatcggcccggctccttccggcgcaaattttctgcgctggcgtaaccagcagaataataaaaccggtactccggcattctgccacctgatcggcgacccgaaggtgccgcaacgcgccagagataccctgctggaaatcgagaaagatcgcatcgtgttcaacatgcagatgtcagtgctgacttttatcattcgccaggcgcgggagtgtcaggaaaaagttgagcaggcggaaagattgcacatggggttgctcaccctgccggaaaataatgaacgcgggagataa

SEQ ID NO: 80710 - DNA, 705 bp, Citrobacter koseri
atgtcggactacaccttcaacatgggtcccctgcgcagtgcgatccatattcagcttcacacccataacgccacccggctgtggaccgggcgacgggcgaccgagaacggccctgcgccaatcatcggcatgccgcgctttatcgaaatactcaaccagatacgcatcgcttcagagcatgacgatccctacgccgacctgtggatgctgcgtatagaggaaaagctcgcgcagtcgcgcaaaataatgcaaatgatgctggagcaggcgaaagcgcggttcaacgaattaccggaaggcatcgatattgaaagctgtctcaacgtacaacctgcccgtttcccgctatttatcaacgcaccgctggcatatcagggcgtctatctgctgaccgattttgaccagctcgcccgccaacttctgctggcttcgcatatcgccgtgctgtcgcgccgggatatgcaccactggctgaaccggggcgcatcggtgatccgcagtgccttcagcctggcgcagaaatatcagatttccggtctgaagcgcagggattttatcgacgatacgccgcaggccagggcagtcattacccgctgcggcccgctgccggaggcggtactgagcggcaaactgcgctcctcatactcaccgccgttatcctctgctgcccagaacaccactccgggagcctcccatgatgaataa

SEQ ID NO: 80711 - DNA, 339 bp, Citrobacter koseri
gtgaaattcaccacgaggttcttattaaccagtgtacttctgttgtctacgggcagttttgctgtgtacgccagtgatataagcatggcaaaccagtgcctcgcctacggaaaacgggttatgaaagataatcaggagatgatgaccctgctaagtcaggcaaaaatcaacgaggaaagtgttcagataaacaattattcaaaagcactgggtaagcagtttatttccacagagctggtggcgaaaattcacagcgatcaggagcagcctgggaatattttgtgcctgtttgaatctgatgataagcctctttattttcatctaacgttgatggagtaa

SEQ ID NO: 80712 - DNA, 2313 bp, Citrobacter koseri
atgaaactcgccccttacctgataacactgacgctaccgtttatctcgttatccgtcagagcggattaccacacccagattaacgccggaaatactgtttctggcgagaccgtggatggttcaaaaggtaatcaatatgtctacggcatactggccgactcaacgattacgggcacgcatgcctggagcgatgttggcgatggtgggcaaaccaatcacataactgttaccgatcacggtgagctgtttctggaaccgggcggtagcgcttatggcacacagataaccggtgatggtgatctacaggtgaacggttatgctgaaaatacctatgtggatagtggcggacaggtttacattaacgcgggaaataatggcgttgaaaattcagaacaaggcggccagattgctaataccaccgttggagctggcggcctggtcattaatcgatatggcatcgacacaaatacggttattgaagcagatggcgaactggataccggctggaattacgcttatgaaacccgcaacaccgctatttcccgaaatgccgttatacaaaacggcggcattcagcaggtcagcaacggcgggacaagcgagggttgtcgggtagacgatggcggcacattaatcgtcaccggcacatggcactacaatgtcgtcaccgacactcagccttctgctaggtatcgcggcaccgctgatgacacggctgtttatggcacgatgcaaaatcagggcggactcgatgaaaacaccacggtacagtccggtggacaatacgcgctgggcggcaatggtctctcccaccagctcaccgtagcacagggcggcagcgcccaaataaatgatggtgctctggatagcttctggctctatgggatgatggacgtcaacagccaggcaaccctgacaggcaccggttcagtgggtagcagtggcgaactggtacttaacgaaggtacaaaaacctccggcctgaccttagcgctggatggcgtactttccctgcaaaacggcattgatgctggtccgcatcattatcagattgcaggtctggagatggatggcggtacagtgctgtttgacccaacctccttctccacactgagtatggaaacgctctctggcagcggcaatttctggatgaataccaatatcgccgcacaacagggcgatatgattaacgtctccggggaagccaacggcgattttgggatctggataaacgacactggcgaatcccccgctgatccacagtcgctacaggtcgtacaaaccggaggtggagacgcgcagtttacgctgttgaacccaaaccagcaggtagatatcggcacctgggaatatggcctgacacccgacggtcagggcaactggtcgctgacgccgcaggcaactcccacgccatcaactgaagccgttctggcgatggcaaacgtcactcccatcatttttcaggccgaagccagtgcgctgcaaacccgcctggacgttactcgttcccgtccgcatcagggagagctatgggtgcagacgctgagtaatcgctttgacgttaaccgcacaggcaatgcagcatatcgccagcggctcggtgggctgatgatgggctatgacaaaagccttccccgccagactggcctgcttacactcggtattgcaggcggctacagccgttccgatcttgatctcaccaacaacagcgacggttcagtagacagctacggtgccgcgttatacgccagctattatgatcaaagtcgtttctggctggacggaatgctgaaaggcaatctttttaaccagcaccttaatgcccgcatgaattccggtggtcacgccgacggcagttacaccatccccggtatgggtggcagcctagttgccgggtatgacgccagattcgccaggaccaccctttctccctttattggtttcactggcttcatttcgcaaagcgatgattactggctgtcgaacggaatgcaggcgcatcctggtacggctaaatccgcactggggcaagtcgggttccggctgcgccagaatattactactcacagtggtatgcagttcattccatggctgaaagtcgcgctggagcaggagtttgtgcataacaacccggtcagggttaatgacgataatttcaataacgatattgccggaacaagaggaagttatcaggctggcatcagcactgttcttacgcagcacacgcatatttacgccagtatcagttacgagaaaggtgatgggatggaatcgccgtggaccgggaatgcaggttttagctatagcttctaa

SEQ ID NO: 80713 - DNA, 2226 bp, Citrobacter koseri
atggcgaaaactaatttcctgattgggcgcggtgaattattaaccaatgatattcccggtcccaaaagagccccagggaaagctgaggtttactctctttatgaatcgaaacaacgcctgttgccacaaattgcatctactatcgaaaattttgccaagttacccagtcgggcatgtcctgatgattatgcagtggctaaggtgactataaatccaagctatattgcacgatccttttttcctgcgaaaatgcttaaatctactggattgacgtcaattggcagcaggacggttagagttacgccgcaaagctggaagcgcaaagttgctgtgtcagaggttactacgacacagatgtttattgcgggtaaaagaaaatcattcgaagagttacctcattgggtgtccgggcttaaagaattaactgatgaagcgattgattttgcacgcatagaaaagtttgaagcatatttgcctgaagagcgtattgttaccgcaggtgatatggattcgtcgtattttgaggttggtgtacatctgctggctgaagatgggcaagatttgatccagcaacaatttgttcggttcgcgtcaactctgaacatcaaggtacatacctctctagcttttaccgccggtacgttgtggttcgtgccaatccaggcagatcgaattgctatagataagctcgcaaaatttacattcgtacgcgtaattaggcctgtacccaaattgcgtggaattcggcctatacaaagggcttctggcccattagcccaatgtaaattgcctgctgaagggccagtatcttcagaaataaaagtcgctattcttgatggtggtttgccatctgagcatgctatatctccgtggttaaaatcctatagagttttggacgaccatgcagaagatgatcctgacggtttagatcatggtttagctgtatcttcggcttttttatttgggccaattaataacaaatcagaggtacaaagaccatactcttatatcgataacttaagagtattagacaataagacctgccaagaggatccactggagttatatcgaactttgggctttattgaagaagtattgttgtctcgtcagtatcagtttatcaatctaagtttaggcccggatctgccaattgaagatacggaagttcatgcttggacctctgtaatcgatgatttattaagtgatggtgagacgctaatgactgttgctgttgggaacaatggcgaaatggatcgtgagtcaggtaatgcaagaattcaagttccatctgattgcgtgaatgccttggctgttggggcttgcgatactgttaatgaaactgaatggaaacgagctccatatagtgctattggaccgggtagaagtcccggcgtgatgaagcctgatttagttgcgtttggtggagacatagacgagtacttccatgttttgggaaaaggtaaaaaacctgtaatcacaccacaacggggaacaagttttgcttctccttacgctttacgtgcagccgttggtgttcgggcgattttaggaagtgatttaagtcaattggcgataaaagctttgttgattcatgcttcaaaaccgcttgatcacgcctgtgctgaagtgggttgggggaaactacctgaggacttaaacgacatcattgtcagccctgatggtgttgctcgtatcgtctatcaaggtgaattgaagcccggaaaatacctacgcgcctctcttcccattcctgaaggtggcttgaaaggtaaaataaatttaacggctactttctgttatgccacaacaacagatccgcaagattcggcttcctatacaaaggctggccttgaagttacatttcgcccaaatgattcaagagttaaagatggcaaacagaatgctgaaactaagggattttttgagttagccaaatactcaactgaaagtgagcggcgctctgacatgggaaaatgggaaactgtgttgcatagttcaaagaacatgctgggatcaactttaaaaaatcctgtgtttgatattcactataacgctcgtgaagcaggagccagcatagcgagtcacaaagcggaaaagataaagtacgctcttatcattaccgtgaaggcagcgaaacaccaagacctgtataacgaaattttgcgtgcttataatcaggttctggttccaattcagcctcaaacttccatcccaattcgttcataa

SEQ ID NO: 80714 - DNA, 1134 bp, Citrobacter koseri
atgggcgacttaagtggtattcagtcagatttagcccagctggttagactggtaatagctgaacaatatgatgatgttcggttgtatgtcgctcgcttggtgcgcaaatatcgggaaactatgccagctctatctgagcagcttgatctttatttacggaataaaccgcagaagccggtacaaggtctgcgtaaggctacgatgccaaaatctactcagtctcaggtcatgcctgtggacgaggattcaaggttaaccttacttaaagcgccaaatgaaaagataaccagtaagccactgctttctagccagatagaagactcactggatcagattattcttgagcgtaagcatatcgaccgtcttaagacccttggcttacaaccaacacgttccgccatttttgttggtccacctggtgtgggtaaaacgcttacagcaagctggttagcacagaaattaggtgttcctttctacgttctggatttaactgctgtaatgagtagttatcttgggaaaagcggaaataaccttcgagcagctcttgatttcgcaaagaaagggccgtgtgttcttttgttagatgaaattgactcaatagcaaaaaagagaagcgatgattctgatgtgggagaattaaaaaggcttgtcactgtaatacttcaagaagttgatgaatggccttcttcaagtctgttacttgctgcaactaactttgctgagttgattgatccggcattatggagacgttttgatttggtcctcaattttgagaaaccaaatagtgaaagcattaaagaggctattaagcgatttttaggccccgactacgcaatttttgcacgttggatagatttgcttgtcatcatgttcaaagatgaatctttcagtaatattgagcgttctataaataaattccgtcgttcagttgccttaggcatatcttcagatgaagagttgatagaatctttcattaaagatggtttatcagaattagaaagaaatgaacgtattgagatagcagttaacctaaacaggcattctaaattatcccaacatgccatatcagatttgactggggtcagtagggatacaattagaaaatatagccccaaaaaatctaacgcagcatag

SEQ ID NO: 80715 - DNA, 1116 bp, Citrobacter koseri
atgtttcgactttaccggtcacatgatttaacacggcaattagaccctgaagattttcaatacattctgacgccagcaggctcgctgaaagaggcgtgtatacattacgacctgtcttatgaagcgaacggccacagtctctcttttggtcttcccaaagaaaagtacagtttatctccacatgaaagaccgtatgagcgaaggcatcgcagctacgcagatcccatctatgatgaggtagagcacgagctgcaaattggctggcttgtcggtgtggatacctccaagcgctggagcagcgaccggaacccgttttacatcgacgataacggcgatctgattttcacccctacagcctcatcatggcatgaatggtataaggacgaaatcacgagcgcctatcagcacgcgattgccgatcggcaaggcaggaagcctgcccccactcaacgtatacaatacgattattacgcgccaacaaccgtaccggcggggaagacgctgaacagtaaagctattggccgcctgctggccgccggcggtgtatataacggcaacattgaagggtttcatgaaaccgcgcagcagcttggtggggatgctccagcgggttacgatcaagtcatgaacaacaaagggctaatcattacgggggcctccgttgcggcaggattgacaatgggcaggttaaaccctctcagtgaactagatgaaatatcgagtctgagtaaaataccaacttttgaaagcccatatgtaaaaggtttcacatctgagagcggtacgttagtgaacgctgaacacgccgttatcgacccgaaaaaactcgcgacttatgctttagattcaacacatcctacaggggggcacaaagccagggtgtttgagtcagcgctgggatacaacccaactaatgcggatgttttagcagcaagaattcaggaaggcgtattatcggccccagcaaaagtgttacaggccaataattacggtcaaacaatggctgtcgatatgcctattttaggcgtcaacggtgaaacagtgatcgtgcgtacaggctggatgtatgaaacagacgcgctagttcctcgcctgacaaccatattcgttaaatga

SEQ ID NO: 80716 - DNA, 684 bp, Citrobacter koseri
atgaaaagagccgaattagacgttgtggttttaggtgaggatttgccggatgaagggctggcaaaagggacggtgggtacgattgttatggtttttgataccccgacacttggctatcttgttgagttttgcgacgaggaaggaagaacaatcgcaatgcctgctttgctacccgcacagttaaagagttatttcactccaggcatcctcaaaacactgttgcttgacaataattacccggtagccaacccagtagacccagacgtaatggcggacctgatgcgcaaagcagcccctgcggaatgggatgctcagaagagaagggtttatgaggatatccagcacctgatgattaaacggctggactactctgatatgttccaaatcatggatggacttgagtacaacggtttgacgctgtacagcatggtgcaggcggagaacggtgagccagtatggtcaaatatctacatccgcaactttgaaacacgtgacaacgagatctatgtcgatccgaacctttctgacaaggtactgattggcgaagatggtatgtctgtgtttgcctacagcttcaaagatgactgtttcgagatcctcgataaagcatctacggattatgttattgagtcacataccaatttcagcgcattgttgtccgcgctgattgatatggcgagctga

SEQ ID NO: 80717 - DNA, 1134 bp, Citrobacter koseri
atgacaccgtacattcaggcgctgatcgacacgaccggcaacaagctccagcagcgaatgcagaaggatccgtcctcaacctccgacagcctgctgtttatgggcaacgcacatgacacggttccgcgtcgcttattgcaggatccgctgttatcgcccagggataaattcgcctggcaggttattcggatgcaggcgcaggagaacggcggcgcggtgttcccctcctacagcgaactgcaggtgcagctctctaaccgtcccctagacgaaaaagcctcgcgcagcaccgtcagccgggcattactgatgctgcgcctgactcgctggctaagcctgtgccacaaagcgcgggaccgcgtttccgggcgtattctgggcaatatctacgctctgcacgatgaaccgctcaccgtcctggacgccgtgcgttttgatgccagctatctgcatttgctggagcagtgctcgcggcacgagaacaaaaccatccgcgcctccgcgcaaggaattttgtatgacattcgccaggataccagcctgcgctacttatcatcgcgcattgatctgctggaagaacgtgcccgctggcaacaaagccagtcttctgaggagactaagcccaaaacgcccggtctcaatacggtaccaggtgaaattttacctagtactgaatcgggactaagccggaaaccggggcctggcggcttagtctcaaatcaggaccaggcttctgtacgtactgtatctacagatatttgtaatagtactaccgcgcgcgcgaactactcactgcctaactggccgccagaaatcccactgacgcatcccgaaaaacagcttgtcctgcaggccatgaagaacatgccatccacgttgcgccaggacgtgctcgatgatgctgcccggcgcgtcgctcgcggcggcgtacaaaacccgctcgcctacctgctggctacgctgcgcaaagcgcaggacggcgagttcaatcagtatcgacgggataaacctacggtgccggagtttgtgccgcctgcaattccggagccagaagaaccggtacagccgcgcaaaaagcgggatatcagtaagttggttgcggagatccgagcgcagtgtctggggagtggctga

SEQ ID NO: 80718 - DNA, 1485 bp, Citrobacter koseri
atgaacacgaaactgacgtcgctggagcttcagtcccgcctgctacagggtaattttgatcgggaacgctcacctgacgagcgctttgccgaaccgctaactgaaaccgcaatggtcgtgacgctggagcaactgcgcccctacgatctcaatccccgactgatgcgcaaccctaattacgacgatatcaaagcctcgatccgtcagcgtgggctggacacgccgccgccaatcacccgtcgtcccgatcaggactactacatcatcgccaacggcggtaatacacgcctgtcgatccttaatgagctgtggcgcgaaacgcatgacgagcggttctggcgcattcattgcctgttcaagccatggggcgggacatccgagcagcctgtattgggcgaactgcgctgcctgatcggccatctggcggagaacgatctgcacggcaaactcagctttatcgagcgagcgctggggatcaataaagcgcgggaactgtaccaacaggtggaggagtgtcagctttcacagcgggaactggcagagcacctgagaaacgacggctacccgatccaccagtcgcatatcagccggatggaacagacgcttgagtatctgctgccctgcattcctgaagtgctgtacgccgggatgggccgtccgcaggtggaaaaactgctgtccctgcgggcagcggcgctgcaaagctggcaacgccatgccaccggggacaccggttcctttgagagtctcttttcctccgcgctgtcgctgttcaacgatcagcctgaagacttcttcattgaacgagtacaggatgaactgctggggctgatgagccaggcactggatgttgattacaacctgttgttgctggacgtcgatccttcagagcagaagcgccaggccgtactcggccccacgccggagccgccgccttatatccctcccgatgaacccgaaccgcgccctgctgcacgcaggcgcaaagcggatgaaggcgaaatgcgtgggggaacggttattccaccgccggagtcaatgccagactcctcgccactgtgcgaaggcaatgaacccattacggatatctggcgtatttcaccgctctttgactcaaccgaagccttacagtcgataagcgatcggctggcatgggatctggcagagtgttgcggtatcgaagatcgggtgatcgcggataacgatgcagtcggcgttggctaccgactcaatacgtttgcttctgatcaccctatgttttcccggccacagtcccgcgcctgctgggcgctgctggcggcactcaatgatatcccactgacagaagatttgtccgccacactgacacccgccctgtttattcaacgcgatacgggcagtttcttcttcagcgatctgtttcttattaaagcattccggctgatccgtattgtccgccggatcagagaattacagcaggaggcacaacatgctgccgacgattaa

SEQ ID NO: 80719 - DNA, 591 bp, Citrobacter koseri
gtgaatcttgtaggcccggtaagcgaagcgccaccgggcatgacgccggatggcggcgcaagcgccttacccggcctacgagagagggattttgtaggcccggtaagcaaagcgccaccgggcatggcgacggatggcggcacaagcgccttacccggcctacgagagagggattttgtaggcccggtaagcaaagcgccaccgggcataacgccggatggcggcgcaagcgccttatccggcctacgggagagaggttttgtcggcccggtaagtgaagcgccaccaggcatgacgccggatggcggcgcaagcgccttatccggcctacgggagagaggttttgtcggcccggtaagtgaagcgccaccaggcatgacgccggatggcggcgcaagcgccttatccggcctacgggagagaggttttgtcggcccggtaagtgaagcgccaccaggcatgacgccggatggcggcgcaagcgccttatccggcctacgggagagaggttttgtcggcccggtaagcgaagcaccaccgggcatagcgccggatggcggcacaagcgccttaccgggcctacgggagtga

SEQ ID NO: 80720 - DNA, 174 bp, Citrobacter koseri
atgtccatgagtatgcagacggatattcccggaatgacgggcaggcagacaatgcgaaacgctttatcagcgccgatagagcagactctgtatgcgacagcgatgtcgtctgacacaaaaaaagacgccggggtatcggcgtctcaggtaagaaaattcagcttccggcattga

SEQ ID NO: 80721 - DNA, 234 bp, Citrobacter koseri
gtgaacgtgatgattaaacaggtctggattgccgatgccatgctgtgggtggagctgaaagacagccgggtactgggaacgccgttgacccggtttccgcgattattgcaggcgaatgagcgtgagcgtctgcagtatgaaatattcagtgaaggtgtccgctggccggtgtccggggaggagatattcctgaccgacctgttttccctggcggccgcgtcagcaggcagctaa

SEQ ID NO: 80722 - DNA, 561 bp, Citrobacter koseri
atgtctggattgatcgttttcattatctgcacagcaatttcggtactttgttataagaaagtttcaaatcgtagtagaaatagaggccatggaaagatcagagcgttgattacatccttatcaatgagtttcattgcttttatggtatctattgggattggggcaggggttgtttcacaagataaaagtactgatgtaaaggcttcaacggctgacaatactgaaaaggccaaaaccaatgtttataaatgtgacaagttcgatgcaataacacaaactcgacagggaactaaacgcgattctggttactattcagataaaggtattttagttgaatatacaatctcagatgataagttgatcagtcgaatgccaattccaggtgataaagatagtgtgtatactgctgaattcaacgaaatcgcatcagacggttctcggaagtacgggaattcatcaagtaactattttgtatcagtactgaatgatagcactataaaagtaattgatgttgaatttaaccataatgcaacgattacacaaatttgttctaaacaatga

SEQ ID NO: 80723 - DNA, 219 bp, Citrobacter koseri
atgctagtactgagaactggcatagggccgatatcttggcagctatcaagaagcgaggaggaacgttggcacagctatccagagatagcggtttacatgaaagaacactttacaacgtacttgagcgacattggccgaaaggtgagcgaattattgccgattttatcggtgtacccgttagtacgatctggcctgaacgctatgagaaacttaacgtaa

SEQ ID NO: 80724 - DNA, 498 bp, Citrobacter koseri
atgagcaaaaacactgatgttgtgcatgatcttgcaaatactgactacaagaagttgattgaaaggactgctgggaagaacttcaagttaactgattgtaaagctgagtttgataaactttttaaagaaaatcctcatgaattcattgatcagttgaatcgtgtatcaagaaatctttctcttgttgctcacgagtacaagaaggagcttgatgcaagtaaagttgatgatatcaagcaacagattttgcatttagatgaatcagtaaaggctgctctgcttgcttctttaggtattaaaaatggcaaggcaaagtccggtactgtaagaagtactaatcaaagagaaatcattaatgttaccgttgatgggaaaatgtacgagatcaaaaaaacaggtaacatcagtgctgaacttaaagaactgattaaatctcaaggttttgactacaaaggcgaagaacgcatgaagttctttgataagttcgaatcgaggtaa

SEQ ID NO: 80725 - DNA, 1563 bp, Citrobacter koseri
atgaaaaaagcggtgtattgctatgctcgcgtcagttcgagaggacaagctaaagatggctatggtatgtcgagacagcaagaaatgctgcgagattacgttgctgcatacgatgattctcaacataaccgtggctatgagttgggggacataagttggttgtatgctgaaggtgtgtctgcgtatagcggaaaaaatatcgaagatggttctgtactgaaaacctttatagatgatgtgttacagaagaagatcactaattccgtattagtcattgaaaaccttgaccgttttagtagagccgcaccgaaccgagcagcagggttgttcttgagtctgattaatgcaggatgcgatatccatgaggtggaaacagaaatgatacatcaccaatatagtgatctgaatattatttcaggcggcttacagcgagcacataatgaaagtaaacgcaaagctcgtttaagtattaaaaattgggatgaaagaataaaaaacaccatcgacggaacgtctgttttaactcatcgcgtgccatcctggattgaagtaaaaaacaacaaatatgtattaaaaaaaggtgagtcagaaaagtacaatcttatttttaaaatgtatgctgacgggtttgggcctgcagcaatccgtgatgagctaaaaaagagaggaatgcagataaatgaaagagaaccaacaatcaatcacttaatgaaaataattaaagatcagaggcttataggtaggtttaattctacagggcgtaaaattttagatggtatgtctatctaccctgtcgttgttgaaccagaattatttgaagcggttaatgatttaagaaagcaaagaaacccattagggaagataaatgtaaaggcaaataatttatttgcaggtttatgcatatgtatgaattgtggaagatatgtgcaagttaacagtgttgataaaaaaggtgatacatattttcgatgtggcggaagccttgtaaaaatagataaatgtaaagagagaggttttaagtacaagattgtagagaatgcgttactagaacatctcaggaattttgacttctctatgctgagaagtgatgataatgacatacaggttaaaataaactatctttcaatggagttagtttctaatgaaaaatacagcaatgaaattctagctgatcttgaaaaagaagacatacctgaccctaatgataggcgtatactgaaaaacattcaacgtcgtattagtgagatccgaaatgaaattactatactgaaacaatcaaatattggctacgaaacttttaatgatctaaaagattcatatactgatgatttgctagacccaaaaaatacaaagttaaggcttgattttaatgtaaaggttaagcgtgttattaaaaatataaaaatgaagcgttatgataatactatcatgctggttgtgagttatgtcggcgttaatgagaaacaagctatggtaattaatagtaagacaggagaggttgtttttatggcagtgcaaaatgatgatctaaaatcaattgagtacttaattaataatgattaa

SEQ ID NO: 80726 - DNA, 243 bp, Citrobacter koseri; identical to SEQ ID NO: 15164

SEQ ID NO: 80727 - DNA, 678 bp, Citrobacter koseri; identical to SEQ ID NO: 54015

SEQ ID NO: 80728 - DNA, 1200 bp, Citrobacter koseri; identical to SEQ ID NO: 6086

SEQ ID NO: 80729 - DNA, 783 bp, Citrobacter koseri
atgacggtcgcgatgctgcgggcgttgccggcgggtttattgctcgtgatgatcgtccgacagattccaacgggaatctggtggatgcgcatcttcatcctcggcgcacttaatatttcgctattctggagcttgttgtttatttcggtctaccgcctgccgggcggggtcgcggcgacggtaggcgctgtgcagccgctgatggtcgtgttcatctctgccgctctgctaggtagcccgatacgattgatggcggtcctgggggctatttgcggaactgcgggcgtggcgctgttggtgttgacaccaaacgcagcgctagatcctgtcggcgtcgcagcgggcctggcgggggcggtttccatggcgttcggaaccgtgctgacccgcaagtggcaacctcccgtgcctctgctcacctttaccgcctggcaactggcggccggaggacttctgctcgttccagtagctttagtgtttgatccgccaatcccgatgcctacaggaaccaatgttctcggcctggcgtggctcggcctgatcggagcgggtttaacctacttcctttggttccgggggatctcgcgactcgaacctacagttgtttccttactgggctttctcagcccggggaccgccgtgttgctaggatggttgttcttggatcagacgctgagtgcgcttcaaatcatcggcgtcctgctcgtgatcgggagtatctggctgggccaacgttccaaccgcactcctagggcgcgtatagcttgccggaagtcgccttga

SEQ ID NO: 80730 - DNA, 273 bp, Citrobacter koseri
atgtcacacaacctggagcaccagaaagtccacaccagaatggtgaaagaggttctgaaagccgtcgccagggccaataatcacccttatcagtctgtatttacagactttatcgccggtcatccctcctgtacggtctgtttctgggaaaccttccacaaaatgtacccggattcaccgtacgaatacgtcacgttctgccatacctgccgtcgttttgatttatacgaaactgaagcggagatgaaggcggatgacccgaagtggtggtga

SEQ ID NO: 80731 - DNA, 1281 bp, Citrobacter koseri
atgaaaaaatatgaccgaggctgggcatcgctggaaactggcgcggctttactgattgttatgctcctgattgcctggggagcgggcatatggcaggactatattcaaacaaaaggatggcaaactgaagcacgtcttgtcagcaactggaccagtgcggcccgctcttatatagggaaaaactacacgactctccagggcagtagtaccacaacaactcctgccgttatcacgacaaccatgctgaaaaataccggctttttgtccagcgggtttactgagacaaacagcgaggggcagcggttacaggcatatgtggttcgaaacgcccaaaacccggaattactacaggcaatggttgtatccagtggtggcacaccttatccagtgaaagcacttatccagatggctaaggatattaccactggtcttggtggatatatccaggacggcaaaacagccacaggtgcattacgttcctggtcagtagctttaagtaattatggtgccaaaagcggtaacgggcatattgccgtattgttatcgacagatgaacttagtggtgcagctgaggacactgatcgtctttacagcggtcaggtaaaaggcaatagcggaaactttgacgtaaatgtcaccgctggcggtgatatcagaagtaataatggttggttaattactcgtaacagtaaaggctggctcaatgaaactcacggtggcggattttatatgtccgatggatcatgggttcgaagtgtaaacaacaagggcatctataccggcggtcaggtgaaaggcggtactgttcgggctgatggtcgcctttatactggtgaatacttacaactggaaagaactgccgttgctggcgcatcatgttcgcctaacggccttgtaggccgcgataatacaggggcaatactttcgtgccaatccggtacgtggaagacttctggttcgctcaatggttcttacacaaacttaggttcacatagaggttcattctcagggcggaattcagggggcagtacattgtttatttatgcatctggaggtaatggaggatctgccggaggtgcatgtgcaaatacatcccgactgcagggatatgttggtgggacgctaattagcgtgaatgccagcaataaccctgcatatggaaaaacagcctttatcagctttgctgtacctgcaggtacttcctatcagataacatcctatccaacagaaaatacatcatgtggtgccggggtattttcagtatttggatatcaaacttaa

SEQ ID NO: 80732 - DNA, 663 bp, Citrobacter koseri; identical to SEQ ID NO: 19459

SEQ ID NO: 80733 - DNA, 159 bp, Citrobacter koseri
atgacgattgcagaacgtcttattcaaaaaggcgcacttgaagtggcgcgggaaatagcctgccggctgcgggatatgggctggacgccggaacggattcaggaggcaaccggactttccggtgaagaactgaaaaagctgtttcctgatgagcagtag

SEQ ID NO: 80734 - DNA, 234 bp, Citrobacter koseri; identical to SEQ ID NO: 8563

SEQ ID NO: 80735 - DNA, 222 bp, Citrobacter koseri; identical to SEQ ID NO: 8585

SEQ ID NO: 80736 - DNA, 180 bp, Citrobacter koseri
atgatccgcattgaaattcttttcgaccgccagagcacaaaaaaactcaaatcaggcacacttcaggcgctacagaatgaaatcgaacaacgtctgaaaccacactacccggaaatctggctgcatatgtgggaatccccgtccttcagagtgaggagctgtcaaccagcactccattga

SEQ ID NO: 80737 - DNA, 393 bp, Citrobacter koseri
atgtacgaaggcgaagaaaggaaaaaactttcactctaccttcacccggaggactctgccgattgtcttgcactggctgaaatcgaaactgttccccggaaaaaacggggggagttatatcggcaggctttgataaccggcctgataatgcatcagcttgatgagcgaattcccgccgtgttaaccgcgctattcaccagagaattgaatgcggatgaggtcattagtcagattgccaggataacaggctggaaaccctcctccggtgatttaaaagaggtactgaaggcgttgggagggcttcagagtacagtttcaccagaacactctcaggatgacggtgaacaggcccgtctgaaagcggctagggtgaagatgcaaaacctgatctaa

SEQ ID NO: 80738 - DNA, 975 bp, Citrobacter koseri
atgagaattttttgcgatgatggttctacaaatgtgaaacttgcctggtttgaaggcaagacgctgaaaagtgcggtatcagtgaactcttttcgccataactggaaagtcgagggcttaggcagcagtcgtacttataactatctgcttgatggccgtaaatatacctacgacccggtcagcgaagatgcgatcagcacgactcatattgagtatcagtactctgatacaaatgtgttggcagttcaccacgcattactgaacagtggcattgaaccccaggagatcgatctcaccgttacgttacctatcagcgagttttacacggccgactgccagaaaaatacgcttaacattgagagaaaaattcgcaacctgatgcgagaagtcaccctgaacaaagggggaacttttaccattaaaagcgttgaagtgatgcctgaatcactcccggctgtatttactcgcctagttgctgacaacgttggtcagtacgaaaaatcattggttatcgatctcggtggtacaactctggatgtcggggttattgttggccagtttgaggatgtttcggctgtacatggtaatcctgatattggtgtatcaatggtcacgaaagccacgctcactgcactgaaaatggccagcagtgataccagtccaatgattgctgacgagttgatcaaaaacaggaataacctggattttgtggggcaggttgtaaatgaggtctctaaactaaatctggtgctggataccattgatacagcgataaataaactgggcgagctagttgttgatgatttgctgcagtatcgaaacgtaaaccgcgtatatattgtcggtggcggggctgcactcattgctgatgctgttcgtaaggcatggaaccaccttggcgaaaaggtggttcttatggatgaacctcagacagcgctggtccaggctattgcacgcttcaaagcggaggagtaa

SEQ ID NO: 80739 - DNA, 375 bp, Citrobacter koseri
atggctgatgcgtcaaaacttagaactaaaagaacccgtagtgggttgggggtacccccgggccccgacgaagtggctaccagcttgaatgcgcctgagatagctccggctgtcgctgccactgatgttcagagacaacaggcagactcatcgccagtgcaccatgagcctgtggttacgcaaacagtgaccgaggtatatacccgccgcgatggccgttctgccagaaaaacaaacaggacgctggcatttgcaacacgtgtcacacctgctttcgaccaagagatccgggatatcgcagagcgtgaggggttgaaactggtggaagttctggaaaaagcagttgaggcatataaggaaaaacagggctattaa

SEQ ID NO: 80740 - DNA, 633 bp, Citrobacter koseri
atggcctggatagttggttttatttctcagaaaggtggtgtgggcaaaagcactaaagcgagagcgttagcgcgtgaagcatccgcctgtggtatcaaaacaaaattagctgatctcgacttggaacaggcaacgagtgctgagtggcatcgtagacgtctgtcagctggtttgtcaccggttgcttccgttgaagtgttttcaacagcaaagcaggcgatagaatctgccggcgattttgaccttctgattcttgatggccctgctcgtgcaagtaaaggtacttcagaaattgctaaggtcgccgaccttatcgtccagccaacgggagcctcccttgacgatcttgtcccggcaattaaagttttcaacgcgttggtaaaagaaggtataccacgttcaaaactggtcttcgctttaagccgggtaggtaccgaagcggaagagctggatgctcgtgcatatatcagtgaagcaggttatgaaactttatctggatgcctttttgagaagccagcatacagaaaagcgatgaattcaggactcgctgtgacagaaacacgttataaaggtttaaacgagagagctgatgaacttatccaggcactcatcgataagattggagaagagtaa

SEQ ID NO: 80741 - DNA, 414 bp, Citrobacter koseri
atgttttttattgagaatgaaggtcaggctgtcgccggaacggattactggcagtctgtacaggcgcaggccggatatgtctacctcagctggaatgccggcgcagccaggctgcttgtcccggatgcggcaaaacatttactcagggagatgcggggggctgagtacgtcatcatcagtaagggagcactgcatggccgcgatgcgctggaactggtatttgaagacggcagcgatgcgccgtttgtgatccacatgctgagtgagcagtgcgatcgcctgctccccgaaaacaaccagggagggggttttgttgtcaccgtctggacgcgtggaggtaaccagctccgttatccgggaaagtaccgtgttgtggaaaacctgcccgacgtttccccgtggagtgaacactga

SEQ ID NO: 80742 - DNA, 348 bp, Citrobacter koseri
atgaaactggatatatctgtaaagtatttactgaagagcctgataccaagcctcattattcttacagttttttatctgggatggaaagatagccaggaaaatgcaagaatgttttatgcgttcatcggatgcattatcagtgccattacttttcctttttcaatgaggataatacagaaaatggtaataaggtttacagggaaagaattctggcaaaaagacttctttacaaatccagttggcggaagcttaactgcaatatttgaattattctgtttcgttatatcagttcctgtggttgccatttacttaatttttatattctgcaaagccctttcaggaaaatga

SEQ ID NO: 80743 - DNA, 1881 bp, Citrobacter koseri
atgtctgaccctgtacgtattacaaatcccggtgcagaatcgctggggtatgattcagatggccatgaaattatggccgttgatatttatgtaaaccctccacgtgtcgatgtttttcatggtaccccgcctgcatggagttccttcgggaacaaaaccatctggggcggaaacgagtgggtcgatgattccccaacccgaagtgatatcgaaaaaagggacaaggaaatcacagcgtacaaaaacacgctcagcgtgcagcagaaagagaatgagaataagcgtactgaagccggaaaacgcctttctgcggcaattgctgcaagggaaaaagatgaaaacacactgaaaacactccgtgccggaaacgcagatgtcgctgatattacacgacaggagttcagactcctgcaggcagagctgagagaatacggattccgtactgaaatcgccggatatgatgccctccggctgcatacagagagccggatgctgtttgctgatgctgattctcttcgtatatctccccgcgaggccaggtcgttaatcgaacaggctgaaaaacggcagaaggatgcgcagaacgcagacaagaaggccgctgatatgcttgctgaatacgagcgcagaaaaggtattctggacacgcggttgtcagagctggaaaaaaatggcggggcagcccttgccgttcttgatgcacaacaggcccgtctgctcgggcagcagacacggaatgacagggccatttcagaggcccggaataaactcagttcggtgacggaatcgcttaagacggcccgtaatgcattaaccagagctgaacaacagctgacgcaacagaaaaacacgcctgacggcaaaacgatagtttcccctgaaaaattcccggggcgttcatcaacaaatcattctattgttgtgagtggtgatccgagatttgccggtacgataaaaatcacaaccagcgcggtcatcgataaccgtgcaaacctgaattatcttctgacccattccggtctggactataaacgcaatattctgaatgaccggaatccggtggtgacagaggatgtggaaggtgacaagaaaatttataatgctgaagttgctgaatgggataagttacggcaacgattgcttgatgccagaaataaaatcacctctgctgaatctgcggtaaattcggcgagaaataacgtcagtgccagaacaaatgaacaaaagcatgcaaatgatgctcttaacgccctgttgaaggaaaaagagaatatccgtagccagcttgctgacataaatcagaaaatagctgaagagaaaagaaaaagggatgaaataaatatgataaaggatgccataaaactcacctctgatttctacagaacgatatatgatgagttcggtaaacaagcatccgaacttgctaaggagctggcttctgtatctcaagggaaacagattaagagtgtggatgatgcactgaacgcttttgataaattccgtaataatctgaacaagaaatatagcatacaagatcgcatggccatttctaaagccctggaagctattaatcaggtccatatggcggagaattttaagctgttcagtaaggcatttggttttaccggaaaagttattgatcgttatgatgttgctgtggagttacaaaaggctgtaaaaacggacaactggcgtccattttttgtaaaacttgaatcactggcagcaggaagagctgcttcagcagttacagcatggacgttttccgtcatgctgggaacccctgtaggtattctgggttttgcaattattatggcggctgtgagtgcgtttgttaatgataagtttattgagcaggtcaataaacttattggtatctga

SEQ ID NO: 80744 - DNA, 1347 bp, Citrobacter koseri
atgccaatgatacttgtaaagaagaatccccggggcaaagtgattcgggagcttagcagtgaggaagagactgcagtaaagacggtctgtggactgaaaaagccagcaaccatggcactacataacctggccaatgatattctccgggaaatgcgtgagtatgatgcatggttacagtgtgactgtattccgggagattcgccggccatgaattttgctgctcttaaaaacaatacgggtactctttatctgtccagttttaatcatgagcatgcacctgaatgccccatgtatcgtcagttatccggaaatgaagaggaaacatcttccggagcaagccggcatcccgttagcacccgtataaattacagaaactttttaccacctgatgacagtaattctgttatcagactgcaggcccgctctgcttaccataatggtgagagctcctccgttcgcaagaaacgtctgcgccttgcccgtttactcctgtctcttattgacgatgctgggctgaataaactggattccctggctaatccccgtatccggactaattatcgtgagtgtcttgatgccatacggcaggttacactgcagcaggagtatattcggggaagatccttatctgaaattatccatttccggcctggaatgtctgaaaggtctcaggagcggttaatggaaacgctggagaattcagaacgacactggcctgccagaagaaagcatatgttctttcagatttttatggcgcagcacatctgtcgtgatgctgtggaaattcactgggcgaacggtaatattcaggtcatcagacctgtgcgggggatcagtattaatggtgaagcgcagggcggaatacgtcccccttactgggttattcttgctttttgccggagtgccgatggcagaatcatctgcagtgaagggtatgctcatgctctttatcaactgacatgtccggtgcctgtggacagcaaactggaacgaaacacgctcactgctcttctgaatgtggccagctggcttaaaagaaagccaggtacgccggaattaagtctggaaaggcccctgtttgatacagaagtttatgttaatggtgaaaagaaatatgtactgccggatttcattgttacagcaagggctcctgacggaaagacggccagagtggtcatcgaaacgatgggatatgaagacagtgattactgcgcgagaaaatccaggcagcataccggcatgaagcagattggtgttctgcataccgatccaccgaaatggctggataacgatcatcccccttttgagaaacatatgtacggtgtttttatgcatctcaggtactga

SEQ ID NO: 80745 - DNA, 267 bp, Citrobacter koseri
atgatcacaggaaatggaataaacactgtaactgtcaatggaaaagtgaaacacatcacagaactggatgatataacactttgtttagagtggacaaaactacgagaggaaaacaatcgtctttatgaaattaataaccaggcaaacagaggatggcgtggtttcatcctaagattgataggggttaacctgccagataaaaggactgagtttacacaacgtctcttattgacgcgcaaaatttcgggttcggtcatgaaaaagtaa

SEQ ID NO: 80746 - DNA, 2967 bp, Citrobacter koseri; identical to SEQ ID NO: 59353

SEQ ID NO: 80747 - DNA, 561 bp, Citrobacter koseri; identical to SEQ ID NO: 15275

SEQ ID NO: 80748 - DNA, 501 bp, Citrobacter koseri
gtgccgcatcgaacggccggttgcggaaagtcctccctgcgtccgctgatggccggcagcagcccgtcgttgcctgatggatccaacccctccgctgctatagtgcagtcggcttctgacgttcagtgcagccgtcttctgaaaacgacaatggaggtggtagccgagggtgtggaaacacccgactgccttgcgtggttgcggcaggcgggttgcgacacggtgcagggtttcctgttcgccaggccgatgccggcggcggccttcgtcggcttcgtcaaccaatggaggaacaccaccatgaacgccaatgaaccgagcaccagttgctgcgtgtgctgcaaggaaatcccgctcgatgccgccttcacgccggaaggggccgagtacgtggagcatttctgcgggctggagtgctatcagcgcttccaggcgcgggccagcactgcgaccgaaaccagcgtcaaaccggacgcttgtgattcgccgccgtcaggttga

SEQ ID NO: 80749 - DNA, 1014 bp, Citrobacter koseri
atgaaaaccgccactgcgccgttaccaccgctgcgttcggtcaaggttctggaccagttgcgtgagcgcatacgctacttgcattacagcttaccaaccgaacaggcttatgtccactgggttcgtgccttcatccgtttccacggtgtgcgtcacccggcaaccttgggcagcagcgaagtcgaggcatttctgtcctggctggcgaacgagcgcaaggtttcggtctccacgcatcgtcaggcattggcggccttgctgttcttctacggcaaggtgctgtgcacggatctgccctggcttcaggagatcggaagacctcggccgtcgcggcgcttgccggtggtgctgaccccggatgaagtggttcgcatcctcggttttctggaaggcgagcatcgtttgttcgcccagcttctgtatggaacgggcatgcggatcagtgagggtttgcaactgcgggtcaaggatctggatttcgatcacggcacgatcatcgtgcgggagggcaagggctccaaggatcgggccttgatgttacccgagagcttggcacccagcctgcgcgagcagctgtcgcgtgcacgggcatggtggctgaaggaccaggccgagggccgcagcggcgttgcgcttcccgacgcccttgagcggaagtatccgcgcgccgggcattcctggccgtggttctgggtttttgcgcagcacacgcattcgaccgatccacggagcggtgtcgtgcgtcgccatcacatgtatgaccagacctttcagcgcgccttcaaacgtgccgtagaacaagcaggcatcacgaagcccgccacaccgcacaccctccgccactcgttcgcgacggccttgctccgcagcggttacgacattcgaaccgtgcaggatctgctcggccattccgacgtctctacgacgatgatttacacgcatgtgctgaaagttggcggtgccggagtgcgctcaccgcttgatgcgctgccgcccctcactagtgagaggtag

SEQ ID NO: 80750 - DNA, 498 bp, Citrobacter koseri; identical to SEQ ID NO: 15298

SEQ ID NO: 80751 - DNA, 780 bp, Citrobacter koseri; identical to SEQ ID NO: 15299

SEQ ID NO: 80752 - DNA, 1260 bp, Citrobacter koseri
gtgagctcaaaaaactttagttggcggtactcccttgccgccacggtgttgttgttatcaccgttcgatttattggcatcactcggcatggacatgtacttgccagcagtgccgtttatgccaaacgcgcttggtacgacagcgagcacaattcagcttacgctgacaacgtacttggtcatgattggtgccggtcagctcttgtttggaccgctatcggaccgactggggcgccgccccgttctactgggaggtggcctcgcctacgttgtggcgtcaatgggcctcgctcttacgtcatcggctgaagtctttctggggcttcggattcttcaggcttgtggtgcctcggcgtgccttgtttccacatttgcaacagtacgtgacatttacgcaggtcgcgaggaaagtaatgtcatttacggcatactcggatccatgctggccatggtcccggcggtaggcccattgctcggagcgctcgtcgacatgtggcttgggtggcgggctatctttgcgtttctaggtttgggcatgatcgctgcatctgcagcagcgtggcgattctggcctgaaacccgggtgcaacgagttgcgggcttgcaatggtcgcagctgctactccccgttaagtgcctgaacttctggttgtacacgttgtgttacgccgctggaatgggtagcttcttcgtctttttctccattgcgcccggactaatgatgggcaggcaaggtgtgtctcagcttggcttcagcctgctgttcgccacagtggcaattgccatggtgtttacggctcgttttatggggcgtgtgatacccaagtggggcagcccaagtgtcttgcgaatgggaatgggatgcctgatagctggagcagtattgcttgccatcaccgaaatatgggctttgcagtccgtgttaggctttattgctccaatgtggctagtgggtattggtgtcgccacagcggtatctgtggcgcccaatggcgctcttcgaggattcgaccatgttgctggaacggtcacggcagtctacttctgcttgggcggtgtactgctaggaagcatcggaacgttgatcatttcgctgttgccgcgcaacacggcttggccggttgtcgtgtactgtttgacccttgcaacagtcgtgctcggtctgtcttgtgtttcccgagtgaagggctctcgcggccagggggagcatgatgtggtcgcgctacaaagtgcggaaagtacatcaaatcccaatcgttga

SEQ ID NO: 80753 - DNA, 780 bp, Citrobacter koseri; identical to SEQ ID NO: 30171

SEQ ID NO: 80754 - DNA, 333 bp, Citrobacter koseri; identical to SEQ ID NO: 38928

SEQ ID NO: 80755 - DNA, 576 bp, Citrobacter koseri; identical to SEQ ID NO: 38929

SEQ ID NO: 80756 - DNA, 792 bp, Citrobacter koseri; identical to SEQ ID NO: 38930

SEQ ID NO: 80757 - DNA, 249 bp, Citrobacter koseri; identical to SEQ ID NO: 38931

SEQ ID NO: 80758 - DNA, 246 bp, Citrobacter koseri; identical to SEQ ID NO: 38932

SEQ ID NO: 80759 - DNA, 864 bp, Citrobacter koseri; identical to SEQ ID NO: 38933

SEQ ID NO: 80760 - DNA, 1230 bp, Citrobacter koseri
atgaacagaataaaaaattggaagaaacaatttgctgtaatatacacagggcaggctttttcaatcttgggttctgccgcagtgcagttcgctgttatctggtggctgaccatccagactgaatccgcaatcaccttgacgattgcatccttagttgcctttctccccaatatgttaatcggaccctttgccggtgtgtggatcgaccgatacaaccgccgaacagtaatgattttagctgacggtctggtagctgtatccagcatcatccttggggcagcatttttacttgtggaaacaccccctatttggtttatctacattgttttatttttgcgtggattggggaatacctttcacggtccagctatgcaagcggcgatacccatgtttgtgccagcagatatgttgaccaaagcagggggctggggaaatatgatccaatcaatatccaacatgatggggcctgtgctgggtgctgcgcttatgtcatttctacctatttcctccattatgattgtggatatactgggagccgcttttgcgatagtttgcctcctatttgttataattccagacattacgcaaaccaatgagaagatgagtgtattgtctgacatgaagcagggctttatcgcaatgaaagcaaataaacctttaatggctgtgttttcccccatgctgctgatgaccatactttatatgccattaggttctctgttccctctactggcacgcagccactttatgggtgaagcctggcacaatagcattgtggaatttgtctttgcaggtggattgcttctttcatctttggttatcggtgtatggggcggcatgaaaagaaggtttttcatggcatccttagctattggcttaatgggtctggctacactgattagcggagcgctaccgacaagcggtttttggatatttgttatatgctgcttcttcttgggcgcctctggcacatttatgaatgttcctgttatggcttatgttcaagaaagcattgcccctgaaatgatgggcaaggtgttttcccttttgatgaccgccatgactctttctatgccgataggcttacttgttgcaggtccggttgttgaggttataggtgttaatacatggtttttctggtctggtgttgcgttgatagtaaacgctgttctctgccgcattctgacacgacgctatgacaaagtaacaatgaaaccgcaagtggactga

SEQ ID NO: 80761 - DNA, 705 bp, Citrobacter koseri; identical to SEQ ID NO: 8686

SEQ ID NO: 80762 - DNA, 1269 bp, Citrobacter koseri
atggcgacggacaccccacggattccagaacaaggcgtggccactctgcctgatgaggcttgggagcgtgcgcgccgtcgtgcggagatcatcagtccgttggcgcagtcggagacggtcgggcacgaagcggccgatatggcggctcaggcgctgggcttgtctcggcgccaggtatacgttctgatccggcgtgcccggcaaggcagcggcctcgtgacggatctggtgcccggccagtccggtggaggtaaaggtaaggggcgcttgccggaaccggtcgagcgcgtcatccacgagctactgcaaaagcggttcctgaccaagcagaagcgcagcctagcggcctttcaccgcgaagtcactcaggtgtgcaaggctcaaaaactgcgagtgccggcgcgcaataccgtggccttacggatcgctagccttgacccgcgcaaggtcatccgccggcgggaaggccaggatgccgctcgtgacctacaaggtgtgggcggcgagcctcctgccgtgaccgcgccgctggagcaggtgcagatagaccatacggtcatcgacctgatcgtggtcgatgaccgcgaccggcaacctattggccgcccgtacctgaccctcgccatcgacgtgttcacccgctgcgtgctcggcatggtcgtcacgctggaagcgccgtctgccgtttcggttggcctgtgcctcgtgcatgtcgcctgcgacaagcgcccttggctggaaggactgaacgtggaaatggattggcagatgagcggcaagcccttgctgctctacctagacaacgcggccgagttcaagagcgaggccctgcgccggggttgcgagcagcatggcatccggctggactatcgcccgctgggacagccgcactatggcggcatcgtggaacggatcatcggcacggcgatgcagatgattcacgacgaactgccgggaacgaccttctccaaccctgaccagcgcggcgactacgattccgaaaacaaggccgccctgacgctgcgcgagctagagcgctggctcacattggcggtcggcacctaccacggttcggtgcacaacggcctgctccaaccgccggccgcgcgctgggccgaggccgtggcgcgtgtcggcgtaccggccgtcgtcacacgcgctacttcgttcctggtcgattttctgccgatcctccggcgcacgctgacccgcaccggctttgtcatcgaccacatccactactacgccgatgggcactgttgcaaatag

SEQ ID NO: 80763 - DNA, 708 bp, Citrobacter koseri; identical to SEQ ID NO: 10331

SEQ ID NO: 80764 - DNA, 237 bp, Citrobacter koseri; identical to SEQ ID NO: 10330

SEQ ID NO: 80765 - DNA, 363 bp, Citrobacter koseri; identical to SEQ ID NO: 39670

SEQ ID NO: 80766 - DNA, 1695 bp, Citrobacter koseri; identical to SEQ ID NO: 31949

SEQ ID NO: 80767 - DNA, 423 bp, Citrobacter koseri; identical to SEQ ID NO: 10327

SEQ ID NO: 80768 - DNA, 276 bp, Citrobacter koseri; identical to SEQ ID NO: 10326

SEQ ID NO: 80769 - DNA, 363 bp, Citrobacter koseri
atggcaggcgcacacgagttcagacagcacggtttccatgcgcgccaagtcggccatcttctcgcgcacgtccttgagcttgtgttcggccaggctgctggcctcctcgcagtgggtgccatcgtcgagccgcaacagctcggcaatctcgtccagactgaaccccagccgctgtgccgatttcacgaatttcacccgaaccacgtccgcctccccatagcggcggatgctgccgtaaggcttgtccggttcccgcaacaggcccttgcgctgatagaagcggattgtctccacgttgaccccggccgccttggcaaaaacgccaatggtcaggttttccaaattattttccatatcgcttga

SEQ ID NO: 80770 - DNA, 213 bp, Citrobacter koseri
atggatttgatgattcccaaaaaacaatttttttatgtgggaaagataaatctgacaaaaaaagccttcgatacaaattctcaacttttctttcacaagagaaaggtattactcttacctatccagaagatttgtttgaggatctccttgaaggtcaaggaaaaaatagcctgctatctcttgaaacgcagcttgcagactctgttgatctga

SEQ ID NO: 80771 - DNA, 129 bp, Citrobacter koseri
atgtatcagtgtgatacgattgttgctcactatgagtctagcgttagaattactactagtttagaggaagaaaaagtgagggttgttcttatcttttttcagggaaaagttaaagggatcgtttactga

SEQ ID NO: 80772 - DNA, 870 bp, Citrobacter koseri
gtgattaactttgattctatcctaaatgagcattcacatcagccaattgttaaaggtgaatggtttacaattcagtggtgccctgatgttgccacaggagaaaaacttaatataggtgtatgttttaaagatagttttggaggggtatttgtacaaactcttgagtattttgataggatttcttgcttatactctcatggcatgatatttcaccttaagttggcttgtgaagtagctagggagatagtactttcaggggaagtatttttatcaaatcaatgccagaatttaacttttaaaaacaatggatatgctcaaggtgaatcagcagacgacatagtatcttctctgttttcaaatgttgttcctttatcggtaaaagtgacaaaaaaaagagagaaagtttatactccaatttcaagagatcgcctttacaatataatggatggctacctcaaacaacaccttgaatacgaagaatattttgaaatgcgagacccatcccctttaaaaagaattacactgggccaacaatcgcaaacaatttatcttccttacaaagccaagacctcgctcggaacaatagcatcagcagcctattctgatgaaaatttagctaagtgtcatttgtatgatgcacaaagagacatctcgttagctttgaataactacgatgagtataagtgtggagcgattttcatattgtctccaaacaatgacctcaaagtagacaaacgcgatcaagtagatttagagattgataagttttgttggtacttgaaaacacaagctatagaaaccgaagttgatagtgacccacatagtttatccgacagagcaatccattggtatcgtaggaaggctgcgtga

SEQ ID NO: 80773 - DNA, 804 bp, Citrobacter koseri
atgcacacttcgattgaagtactcagccaagcaagtttcaagtcggtactcggcagaccaaatgaaggccaaatggccttgacgcttttatgccttgttgattggcctgacggagtgcaaaggcaatcatatgtaaaaatatttactagggaagaaagcattggtgtcttcaacgaagttcttggatacctgcttaccaaatcaaatgatcttcctgtagccccaaaagcaggcatattgatattgcccgatggtgtcattgattcaattgacaagcccgtatcgccaattgcctttgttagctccaaggttaccggacattctccggctagctattacaacattggtgatatgattaaatttgagagtcttagaaggattcttgatggatgggaaaagttacataaaacgatcgcttttgatgagtgggtcgcaaaccaagatagaaatttagggaacttgatcattgattcgcacaaccaagtcacccttattgaccacagtaatatgcctgtagatctcatgtggtctcctgaagacttagccataactatcaacccagttaataagttagaaattgccctccgagccgtgccaacccttcctcaaaaaatggatatagtaaatggagctaacggacaaactgaagcattggatatcgtaatagcagagattgcttattggtgtgacaggcttctgaatccgcaagcaaaagattgtttattggaatttttgagtcaacgtgcagttttttcaaaagaaagattaagcagaaggcttggcgtactggcgggggtcgcgtga

SEQ ID NO: 80774 - DNA, 633 bp, Citrobacter koseri
atggggtgtgtcatgagagtttggggttatcttcgagcttcgacgaaggagcaggatgcaggcagagcctttaatgagttagaggcatttgcccattcacatgatctgaaggtatcaaagtacttcaaagagaatgaatcaggtgcaagcctgcaacgccctcagttattcctgcttttggaaatagcagaacgtggtgacattttgctttgtgagcaaattgaccgaatcagccgccttactggtgaggattggaaaacccttcgagggcttattgagtctaaggggatcagagtcgtgtcgttggatttacccacaagccaccagcttttaaatgttcaggacgaattcaccgcccgtatgtttgaagcaatgaattcaatgatgctggatatgttggcggcaatcagccgcaaagactacgaagatcgccgcagacggcaaatgcagggtattgaaaaggccaaaaatgagaaaaagtatcgaggccgcccggtagatgagagtctacacaataaagtacaagaattactgtctgacggaaaaagctggaacaaaattcaggcgttaatcggttgctctagagctaccattgcgaaagtggcgaaaaatacacctctgacaaaaggttag

SEQ ID NO: 80775 - DNA, 417 bp, Citrobacter koseri
atggttgtacaccaggctttcctcgcagggaaattgcttgattttatatcgatggatcaacttacgctggttaaccctcataataatcaacatctttatctttattgttcctctgcagttaatctccgtattgttggcggcatcccatttgtgaaatttcgggagtgtaaattgtcagaaatacaaaccaacaataatggactggttctggagaacgggagttatcaggaattatccttcagtcgttgtgatgtggatttaagactaagttctgccaatatgatgcatatgaatgttcataactgcaatttcaatgcagtctgtgatttcgctcgttttgacagtcagtgtaagtttacttatgacagaaatgataaattttcatatcagtctgaaagtgattttataaagaggtga

SEQ ID NO: 80776 - DNA, 453 bp, Citrobacter koseri
atgtttggtatctttcctgacaataagcaggttaatgttgatggtgaacttgtatctcctgcatctattgttattgatgaatttaaagaaatgatgaatattcctctaacatattggagtatagatgattacaagttatcctggctccggtctcttgaagatggattggcaaccaaaaaacatgctgctttagccgtatcgatgtatgagcctaaaaatattaattttatatttacatgggttctatatttccaaggagatatggctttcatacaaaataaagtgctgtttcttgacgaatgtgatggttttactgcttccaggattaatgattttgttcaaccacgttcaattctcactgaggaaggtatcaaaatttctgaatgggttactgatatagatagtattatcattttttataaaacccttcagcagtgggagatgtctcgttga

SEQ ID NO: 80777 - DNA, 10413 bp, Citrobacter koseri
atggcaggggataatatacggttttcacagcgtctgttaagcgggctgctcagcctgctgattgccgcccagccggtgcttcctgccgttgccgcgaccatcaccccgaccggcaacacgcagatggataaggcggcgaacggcgtgccggtggtcaatattgccacaccgaacggggcgggtatttcgcacaacaaattccaggattacaacgtcggtaaagaagggcttatcctcaacaatgccaccggtcagctcaaccatacgcagcttggcggcatcctccagaacaaccccaacctgaaggccggaaaggaagcgtccggcatcatcaacgaagtgaccggcacgaaccgttcgctgctgcagggatacactgaggttgcgggtaaggccgctaatgtcatggtcgccaacccgtacgggatcacctgtaacggctgcggctttatcaataccccgaatgcgacactcaccaccgggaaaccggtgctggatgcgaacggcaacctgcaggcgctggaagtcacaaaaggcagtatcaccattgaagggcagggcctggacggcagccagagcgatgcggtgtcggtgattgcccgggccacagagattaacgcggccctgcatgcgaaagacctgagcgtgattgtcggggcaaaccgtgtcggggctgacggtaaggtcagcgcccggcagggcgaaggtgccgcaccgaaagtggcggtggataccagcgcgctgggcggtatgtatgccaaccgtatccggctggtctccggcgagaaaggcgtcggcgttaaccttggtaaccttaacgcacgccagggggatatcacgctcagcagcgccggtaaactggtgctgaaaaacagcctggccagcggtaacaccgccgtgaccgggacggaggttgtgctttccggtgaccatcaggcgggcggtaacctgaccgccaccgctcagggcgggctgacgctggataagtcccggatgacgtccggcagatcactacagctgacaacggccgggaaactgacgcagaagggcggttctctcactgcggcaaccgacacccggctgacggccggaagcctcacccagagcgcggatgcacaggccggggccgacagcaatcttgccatcacggttgcagacagtgccgcgctgaaggggaaaaacgtcgccgggcaggatacaacggtgaaggcaaaaacactgacgaccgggacggaactcagcgccgcgcgccatctgtcgctgaatgctgaacagaacgccgcacttgatggtgtggtggttgccggtcagcgactgtcggtgaccggcggtggggacctgacgcaacgcgggacgctgagcggtacagacatcacgctcagtggccggaatatcatccaggaggatggtgcagaaagcagtgccggcggcaacataaccctcaccaccagtgagcatgccaccctgaaagggaaaaccgttgccggcaaatccctttctgtcacgaccggtagccttgataacagcgggacgctggccgcgggaggtggtacgacgctgaaaaccggttcgctgaccagcagcggtaccgttcagggcggcagtctggcggtccgggccacggacctcaccagtaccggcgacctgaaaagcgcctcctcgctcgatattggtgcccgcaatgtcactctggcgggtgatacgggcgcaaaaggtaaaaccgccgtcgccgcctccggcaggctggacaacagcggcacactggtcagtgatgatgcgctgacgctgtcggccactcaggtggataaccggggaacgctctccggagcgaaaggactggcggccaccgcggcaacctggaccgccggtgataaatcggtcacgcacagtgggggcgcgctgacgctggatacccgggacaccgtgcttgccggcgaaacgagtgcaggcggcgcggtttccgttaagggggatacgctgcggaccgcatccacgtcgcaacttcagggtgacagtgtggtggtggatgtccggtcggcgcagcttgatggtacgcaggcggctgcgggcagcctgcgcctgtctgcccgtgactcactgacgcacggcggtaaaagttctgcagggacacttgacgccggtaccgctgccctgaccaacaccggtacgctgacggcttcctcgctcacactgaatacgccggcactggtgaacagcgggctgatacaggggcagcagaccctgaatctgacgacccggcggctcgataaccgggcggtggggacactcaccaccggcggaaacctgcaactggatggtacggatatcaccagtgccggaaaaatcattaccggtggcaggtttgacctgcgtaacggccgtcttgttaacagcggggatgccagtggcgcagacattttgctgtcggatgtgtcactgaataaccttcaggacggcctgatatataccgatggtctgctgagtcttaccggcagtacgccggataacgccggtgaaattcaggccggacgcctggcgctgaccgccgatcgcctgtccaacagcgggacgctacgtacgctttcgtccgcagacatccagctgagcgatgcgcttgttaatccggggcggctgctcgggtacggttcgctggacgtggcggctggcgagctgcagaacagcggtacggtggcggctgaaaacctggtgctgtcgctttcctcgctggaaaacaacggactggtgcagggtaaccgctctctggggctggatgttccccggctggttaacggccgcgacgggcaaatcttctccggcagtgacctcgccctttccctgaccgggtcggaaaaccatggcctgctgcaggtgagcgggcagctggcgctggatggcgacaccttcacaaacgccggatacctggtggctgacggactggatctgcgcctgaccggaaacctgtataaccgggccggcggagaactgctcgcgggagacacgctggccattcagagtgccggcctggataaccggggccttatcctgggtgagggcagtgcggatgttcatgccaccgcacttgataacagcggcacgctggcggcggatgcactggcgctgacggcggatgttctgggtatcagcggtcttgtccaggggatgaaggccctgacgctggccgcccggcagattgataccggcgggcaggcccgcctgctgtctgccggggatgttgccatccgggcggatggtgctctgacctctgccggcacgatccagggacgtgatgtcacggtcagtgcagcggactggctgcataacggtgtgctgctggcaacaggccgcctgtcttcggttgtcaccggactgctgacgcaaaatggcgagatgatgagccagggcgacagtgatatacgcagccggacactcaccaacaccggacggcttctgagcgaaggcggaatgcgccttgatggcaatatgctgacaaacagcggggtcattcagggcggttcgctgtccacctcgcagtccgggatcaccaacagcggtacgctgacggggctgaccgggctcacgctcactcacgataacctggtactggataatacggcatccggtaaaatactgacacaggggctgctgacggtcagcgggaaaacgctcggcagccagggtaactggcagggtgaacgcattcttctccgggggcagacgctgacccagagtggcggagcaatacgggcagcggatgcactggatctgacgctgaccggtaatctgaccacgggccgcggcgcactgatttcttcaaacggccacgcagccgtaaaagcgctggccattacccatcaggggcagtggcgggcaacgcgtctgctgattgacggtgactccctgagaggaagcggtgaaagcagcggtgtggaacagctggatgtccgcaccggacaactgacgctggagaacggcggggcgctgttgtcgggtaacacgctgacggtgaacaccggcacgctcagtaatcacgggcggatgatggggaacggggtggacatccgcacctctgcactgacaaatgacgggcgcattcaggccgataacggtctgacgctcgtcaccaccggaaacatcacgaataatgccccgggagtgatccagagtgctaaagccctgtctgttaaagcacctgaactcaccaattacgggcttcttcaggggggcacggataccgggctgaccttctcccgccagctcagcggaaatggccgcatcctcgccgggggaatgctgacgcttgacgcaccagagctgaataacaccggctggcttcaggccacgtcgcttgtgctgaacgcagccacattaaccaatgccgggcaggtggtggtggccggggaggcgacgctgggcggtgacaccctgaccaacagcggtacactgcaggcgggttcgctgaccctgaaacataaacaacagacgcacagcggaaccgtactgggccgccagtccacgtcagtgaccgccgatcgtgtggatctggccgcgaacggaaaactgtacagcggtggcgggctgtcagtggttgccggtgcgctggtacaggccggacagattattgccggcggcgatctgacgctgaaactggtgaatgcctttactgcctcgaataccctggcggccggtggtgtgctgtcagttgacagccggaatgccattaccacccgtggcaccctgcagggggaacgcatcagcctgacggcaggcggcgcgttcaccggtgacggcctgttgtccatgggcagcggtggtggcctgatcagcgccgccagcctggtgctgaatgcggcaggcaaactgcaggccggtggtgatgtggtcctgaccagccggggaaatgccacgaacaacggatttacaggcacctccggcgggctgacgatgaatgtcgccggcacgctggtgaacaccgccctgatgtatgccggtacaaacttggatttgtttgccggtgccctgcataacctgcagggggatatcctggccggtaaccgtctgcgtattcagaaaaacgcggacggccagcgtagcagcgaggtgctgaaccagtccggcaccattgagacgcttcagggtgacctgaacatcaatacggcctggctccgtaacacccgggccgggctgaagaccggggaagctgtcactgaaaacctgatgagcaaatacccctggctgacgccgacgaaagccgatattccggtggactgggaggggatccgtgtctcttttgatgtgatcgcctgcccgacgagcctggggatgacctggtgcaacccgaactattcatccgggccgtttggcgggggcaccattcaggtgccgaaaccgcagtcgggctataaaacactggaatttgctgtctcaaaatcctctcttgccgtgacggcggaaggcggcgccgggcttatcagcgcgggcggcaatgccaccgtgcatgccgacacgctggataatgaggccagtaatatcctggcctccggcagcatgacgctgagcggcaacacgctgaataaccgctcctggttcccggaaacggtcacccgctacgtcacctatgattttgacgatgcctataactctgtggagctgcgctataaggcgcgttccggttaccgtgaagaggtgacacaggggacaccgttccgttcagtgctgcaggcgggcagcgcgctgaaggcgtcctttacgcagcagattaacaatggcgcgatggattcgaatgccggaaaggtcaccagcaccctgcgaccgccggtgctgaacctgcccggtcgggtgagcaccggtagcggtcagcaactgcttgcgccgggcagtgcagagcatgtcagcgtgggcagcccggagtggaaagacctgttgcagtcagccctggtgcagatacagggcggaaacgttcccggaaacatttccggcaatgcgcagcccggggacatccggccagggcagatccccgggcagactgctgacaaaccggcggttgataccggcgcgtatcccctgccgtccggggataatggtttctttgttgtttcagcggatccacagagtccgtatctcatcacgatgaacccgaacctgaacggactgggtgaactggatccgcagctcttcagcgatctgtataaactgctgggaacccggccggaggcggctccccgggaaacccgcgccaccttcacggatgagcagaaattcctgggatcgtcttacctgctggaccgcctggggctggcacctgaaaaggattaccgttttctcggtgatgccgcgtttgatacgcgctatgtcagcaatgccctgctgaatcagatcggcaaccgctatatcaatggcgtggggtcggatctcgaacagatgcagtacctgatggattcggctgcgcgtcagcagaaggcgctgggactggaactgggtgtctcgctgacggctgaccagatcgggcgtctgacaggcagtatcctctggtatgaagaagtggtgataaacggccagcgtgtgctggttccccgtctgtatcttgcgccggacgatgtgacggtcaggaacggcagcgtcatcgccggaaacaatgtcagcctgagtaccggtaatcttgcgaacaacggcagtgccgtcagtgcggataagaatctgtcggtgacggctgcgggtaccatcagtaacagcggtaacgctgtgctggacgccggggagaaactggatttactggccggtaatgacatccttaatgtgagctcggtaatcagtggtaagaccgtcgcgctggaagcgataaacggcagtatcagcaacctcacgcagggcggacagaccacctggcgcggccagaaagatgtgctttcctggacggaaaccgaccgcccggcccttatccgctcggatgagagcctgagcctgcgtgccggggacgatattctgatgaccggcggtcaactggaatcgggcggggatatgacgctgtctgccggcagggatattgatatagccgcactggaaacccgtacccacactgaagaatacgatgaccgtaagaagctgaccacccggacctctgaaacccgggatgctgtcagacagacggggagttccctgacgtccggcggcgacatcatcatgtctgcggggcaggatctgaatgtggctgcctcatcggtggtggccacggacgatattacgctggcggcaggccgggatatcggtctcaccaccgcgacagaaagcgaccacagccacaaagagaagaaggtggccggcggtggtttcctcggtaacagcagcaaaaaaaccatcacggagtcgggcagtacccgcgaaaagggctcgctggtcagcggtgataacgtgacggtgatggccggtcatgacctcggggtttcgggctcatcggtggtgggagaccgggatgttgccctgcacgccgggaacaacgtttctgttgaagcggccacgaatacggacatgtactggaagctgaaagaggaaaaacgcagcggggccttcgggggcggcggactcagcgtgacgttcggcaaaagcagcagccgccatgagctgaaagagaaaggcaccacgcagagccagagtgccagcaccatcgggtctgtaggtcaggacgtcagtatcacggcaggcaaccagctgcacgtcagcggttcagatgtgatcgcgggccaggatatccggctgaagggcgacagtgtgattatcgatcccggccgggatgagcgtacccgggacgaaacgtaccggtacagttctggcgggctgagcgttggtcttggcgggtctgcggtcgaagccgctgtaaacgcggcagagtcggcaaaagcggcaggccgctatgaggatgaccgtctggcagccctgaaaggcacgcagtccgttctgtccggcgtacaggcggggcaggccgtgcagcagtcctctgccagcggcaacccgggtaatgctatcgggatcagtatctcagtgggggggcagagcggaaaatcgtcatcccaccagtcatccagcgtgtcatccggttcgacgatcaccgccggtaataacctggacattacggcgaccggtcaggggacgagccggaacagcggcgatatcatcgtggccggcagccagatgaaggccggtaatgacgtccgtctcgatgcagaccaggacatcctgctggcggcggcatcggacacacagcagagcgctgccagtaacagcagtaagggcggaaatattggcgtcagtatcgggctgggtcagaacaccgggataagtatctacggtaatgcgcaggcctcacaggggcgtgagaaaggtaacggcacaacgtggaatgaaaccacggttgatgccggtcaccatcttagcctttccagcggacgtgacaccacacttgccggtgcgcaggccagcggtgagcgcgtgacggcagaggctggccgtgaccttaccatcaccagtcttcaggacagcgatcgttacgacagccgtcaggccagtgcgtcagcgggcggcagttttacctggggagccggcggcggtggttatggcagcgccagccgcgataatatccacagcaactacgattccgttaatgagcagagcggtattttcgcaggccagggtggttttgatatcacggtggacaaccatacgcagctcgatggtgcgctgattgcctcgacggcacctgccgacaggaactcgctggacaccggtacgctgggctggacggatatccataaccaggcggactacaaaaccagccataccggtgtgtcggcggggatgagcagcagtggcggcagcctcggctcacagctggccggtaatgcgctcgccaatatggggaactcactggttgcgggtggcggcagtgaaggccatgccgatggcaccacatcgtcggccgtcagtgcgggcacgattactgtccgcgacccggccagtcagcagcaggatatggccggactcagccgcgatacagagaacgcaaatggcagcgtggcaccgatatttgacaaggagaaggagcagcgccgtctgcaggaagctcagcttatcagccagataacggggcaggcgggtgatatcgtccgtacccatggtgacatggccgcgctggaagaggcccggaaggatccgaaaaatgcggggatgagtgaagacgcactgcgccagacggatgcttaccgcaacaaaatgaaggagtacggcaccggcagtatgccacagatggttgtgcaggccatcggcggcgtgctgggagggctgtcagcggataatctggggcaggcgctggcaggcggcctgaatccggcagttgcccgtcttatcaaggcggagaccggcgacaaccgggaagcgaacctgatggcacatgccgtctggggcgcactcgccgcgcagcttggcggtaaaaatgcgacggccggtgcggccggggcattcagcggtgaagtggccgcgcggtacatcattgataactactacggtggtcgcactgacaatctgagcgaacaggagcggcagaaaatcagcatgctggccaccatcgcctcaggcattgcgggcgggctggccggcaacagtacggcgtctgccggtaccggtgcgcaggcgggcaagaatgcggttgagaataatagccttagtgctgtaataaagggcgggaaactggccgcacagggctgtatgaagatttcagcatgccgtgatcgcctggtcggtagcgggctcggagctctgctgggcgtaggtgtatccacatcggcaatggatgcactttcggatgatgagaagatgaacctgatttatgtggcatcgctcaatgatccttccctgctcagccagttaaatgatgcccagaaagctgcctatgagtccctgacgggtaagacgctcaccagtacaggtggtacgcaggttatcaatccggggccgtcaaacacaggtggagaccagactgtacccggaaatgtgccttccaacacagggaataacgagtcttcaggtcagggggtaaccaatacaggtaacactgatggcaatcctgatactggcggcaatactacggttacaccgattccggaaggcccgagtaaagatgatttagcttatctggctcttaagggaaaagaagcccaagaagcagctaaaaatttaggattcgatcgcagaatcccaccacagaaagcaccatttaactctcatggacagccagtttattctgatggaaaaaactatattactcctgacattgatagtcataacgttacaaatggttggaaaatgtttgaccgcaaagggaatagaataggaacttatgatagcaatctgaacaggattaaggattaa

SEQ ID NO: 80778 - DNA, 381 bp, Citrobacter koseri
atggaaaacaacggttttgacccgaaagacattgaagacttttgcgatcgccagaagcgtaagcgtgcgtccgctcagacagccaaaattgattttgttgcacgcgataaagaaaaagtggctagggcacccgatatctctgtagcagagatgaataacctgccgccagccaaagttgatcgcggctttctgtggagtattgtggaaggcgcagcgtctgtatttgatgccgtggtgaaatccgccgctgcaggcgctgtggattcgttaaccagagagacaaaactgcggaaaatgtctgcaactgaatctaacaatgaatttcttagaagtaggccctatttgtggcagccctgggaaaaagaagaagactttaaataa

SEQ ID NO: 80779 - DNA, 2643 bp, Citrobacter koseri
atggcgctgaataatctgaaatcatatcaggaacaacttcttgacgatttctcttcattcctttctcgctgcagagaattacagaatccggcaaaagccttccatgaatcgacactaaaaggtttcagcagagttctaccctatcatcccttacccggtgcggaaactgttccctatgtctgtttaagagtacctactgggggagggaaaactcgcatagctggtcagtctattaaacgtgttaacgactattttcttggaacggaaaacgccctaattttatggctggtaccatcagatcctattagagaacaaaccctgcattcactgaaaacaccgggggaattattatatcaagatatgcaggatctgtttggctcagtgcatgtgctggatattcaggaggcattatatgtacaacctgccacattaaataccgggaataccatcattgttgccacaatgcagagttttaagcgagatacagaagatggattgagggtctatcgtcagaatggcaatctgatgccgcacttcagtgatacatcgtcaggactaaaaggggagcattcactcatggatgtcatccggttacgccatccctttgttattgttgatgaagcacataatcagggaacaccgctggcagttgacacccttgttcgttttaatccggcatgcatacttgagctgaccgccacaccagatcgtgctaatcagccatcaaatattctcaggagcgtttctgccgcaacattacaagcggaagatatgttgaaattaccgcttgaactcactgttcacccggaatggcaacgctctatggctgaagccattagtcgactacggcaactggaaacagaggcggagaaggaattcctccagacaggtgagaaaattaaacctgttgtaatgcttattcaagctgaacgacatgcaaaagatcaagagacgtttacgccggaacgtgttaagcagcatcttataaatgatttcaatatacccgctaacactatagcgatagcgacaggagttcaggatgaattacttgggaaaaaactgggagcatctgactacccccagttcattatcacagtagataagttgcgcgaaggatgggattgcccctttgcgtatatcttgttctcttttcgtaatacgacatcagctacggccgttgagcaaatacttggtcgtatattacgtatgcctcatgttaaaagaaaacaacatgagacccttaatcgttgttatgcatacgtcgtttcatcagaatttgcggctacggttcagggattgcgtgatggactggtgcaaagtgggtttgaaagactggaaacacagaatttaattcaaacctacggagatgacccatttactacaggcgatctttttgcgactcagagtgacatagttattcctttacctgagttagataacactctggttctacctgatgaaactgcactggaaattttaccaaaatcacttcgtgacaaactagagatttcccctgaaagtggcactctgacattaagaggtggtgcaaataataaacagattcagcaattggctgacacatttctgcaacctcaaatagttaaaaccgttcgcgagcagcttgaagttgcgacatcgagacaaaatggccctttacaaagggaaataacgccttccgaaagagggatttcggcccgaatcccattactcacatacagacaatcaggtttctttgatgtttttgatgagacaccacttttggatgccgattgggaaataggagactttgatccggtactgtctgatgacgagtttgcacatgatgcagaaattatgtatcgcgctgcattaagtgtttcccaattggaaagagtcgaatgtagcgtttatgaacgtctggacaatcaactggcattgtttaggtcagagtatggatggacagtcactgacttgatccactggttggatcgcaatttgccattcccatattctgaacgagacagaaaggtcgcatggattaaccaggcagttgattatttgatagaaaaaagagaattttctctgaacgaactggtttatcgtaaatttcgcctgcgtggagccctagaacgaaaaatggttacgggactagtgcttactaagcagcgaattttcaatgaattatttgatgatgagtcgcaatttgcagtactggatgaacatgctgtctcgctggaatccggacgctatgcatacgatttttgttatacaggttttatacagttgaggcgccatttttatcccgtagtcggtaatctgaaaggttcaggagaggaatttgaatgcgcagaatttattgccaacaggctcgaagatgtcgcctggtgggtgcggaatgtagagaaaaaaccaacctctttttggttgcaaactgcctcagatcggttctatcccgactttttgatacaaatgaatcatggcccactcgttgctgtggagtataaaggctctcatatcagtgatacccgtgacagccgggaaaagaaacgaattggagaactgtgggccagacgcagtgagggacgatgtctttttgtctgggttgagaacaaagactgggactctattcgtagggcggtttcagcgcctttactttttcggtaa

SEQ ID NO: 80780 - DNA, 1710 bp, Citrobacter koseri
atgccaacgttaaattggatcggcaaagaagccgtaattaaacaccataaagaagttcctttccgcttgcttgaacatgatgctaatttgtctcatgggcaagatgatagtggaaatattatcgttcagggcgataatttacaggcgttgaaagcattgttaccgcgttatgcggggcaagtgaaatgtatttatattgatcccccttataatactggtaatgagggttggatatataatgataatgtcaatagccctgaaattaaaaagtggttaggggaaactgttggtaaagaagatgaaacactggaccgccatgatcgctggttgagtatgatgtacccacgacttgttttattgaagcagtttatggctgaagatggggttatctttgtatccattgatgataatgaaattcattatttgagagcattaatggacgagatctttggagtaaagaaaagagtagcaacgttagtctggagaacagatggtaattttgataatcaagcaaaaataaaaaattgtcatgaatacatactcatctatgcatctaatcctgataaattacctcgcccaaaggtcatagatccatctgttacgaaagatagtaagttgaatcgtgattttattcaaaatactatagttaagaatggacctaaaaaccctataagcaaggtggttcttccctctggatttccggcatcagttcaagaagctagaatttctaagagatttgattcgtggccatatctctataacgatattattattcaaaatgggaagataacgaaagatgtaactgttgaaagcggttgggcatcaaagaatctattgatagaatttataaattctggattcaatcctgtattggataccaaaaatcaaaaaaccactttctttattacggctacaggtgcaattgaatcaaaaaaagagagggaaaatgccagtcatgtgattactgttattagtggggtcggaagtacacaatcacaatcgcaaaatcttttagaaatgggatttagattcccatttcccaaacctgttgagttagtaaagtatttgatttcaatgatcgatgataaggattgtatagtattagacagttttgctggatcaggtacgacagcgcatgcagttctgcaaaaaaacaaagaggataatggtaataggaaatttattcttatagaaatgaatgagcaaatagcgaaaaaactgacgactgaaagagtaagaaaaatatgtgatgggtataaaaatagtaaaggaaccgagtttccaggattaggtcgtggtttcaaattctttactctttctgctgagcctctattccagcataatggctcaatccgtgaaaatgtaacttttaatgagttaagtgaatttgtctggtttatggaaacaggatcagggctaacgacatctcctgtagaaccagaacaaacatttacgccattcctggggatacaccagggaaaagctgtttttcttctatacaatggtatattgaaagatcgctcagatattggtggtaacgttcttaatcatcgatccctaaaataccttaatgaaataacgcctcctgattttaccggtaaccgagttgtatatggtgctcgctctcgatttgataagacaaaactcagtcagttgaacattacattccatcaacttccttatgaactggcggtgaaaacatggcgctga

SEQ ID NO: 80781 - DNA, 435 bp, Citrobacter koseri
atgcgtaagccagtgaaggtactctgtgccatgattgtcatatttgctgccgcgctcgcatacgcctggccctggataaaaatggaatttgccagcagcgcgcattatagcgagcaggacacccgggaatatgcgttttatacccccgacctcctgaaaacaatgccaaggctctccccccgctatgattttgatttcgccagtatcacaggcccggcatcgcatgtgtctgccatcagatactatggcacccgtgagtcaggccggattgaccattatctgagttcaaaaggatatatcaggcaggacaactgtcatattgaagcggtttgctggcgcaacgcagtccccggagacggagatgaagatattgtgaccgtcagtatccttgaaaacccggacgccgtattagtctcagttatccataatttctga

SEQ ID NO: 80782 - DNA, 1041 bp, Citrobacter koseri
gtggcaatgcaacgagcatactacggtcaggatcgggatcgagagtattttgagcgtgtttttcagtcagcaaacatcaactttcttatcggctccggagcgtcactaccagctatccgcatactaggagatatcgaagcgcaactagaagagcacgtgcgttcaggagatgacttagcctattttcagcaagcaggcgattttctaacctcagtttgggaagctaatgacgttctactcgatagaactcagcaaggtataccgcatagtcaacccacgttagataacgtaactgtcactcgcacctattactccggtttcctacactctcttgaaaagattcttacccaaagaagaactggcctattacctaggagaataaatctctttaccacaaattatgatctgtttatcgaagatgctgccgtcaaaagctataacgttatcttaaatgatggttttagtcggcgaggaaatttgtatggtgcacatttatttgatccagccagcttctaccatacgactcatgctactggaaacctttataactatagcgttgagctaccgacaataaacctgattaagcttcatggttctttatcatggcttaaatataaaaatgatttttactaccaagtacccccattgagacctgtagcttttgctacccatgaagaactaagaaattgggtgctctcacatgcactcattcttcccagaaaggataaatttcgcgaaactcttcttgagaatatctattacgatcttcttagaagttattctaatgaattagacaaggaaggagcattgcttgtagtttttggtttctcatttgcagatgaacacatagagacgttaacaaaaaaagcgctaagaaacatgtctcttaaagttataatattttcctataatgaaatttctcgaatcgcatttatagaaaaattcagagactactctaatgtggaaatagtttacactccaggtaaagaattagatttcactaaggtaaacgaaattataaattgttttctgaggagataa

SEQ ID NO: 80783 - DNA, 1812 bp, Citrobacter koseri
gtggcacaagaatttattcatgaagaggcagttctccgtgtcggtgaagtatgtgaggtgtcaggaagaacaataagcatattggtcgataaaaataaaaaccttagcgatctttttttccgtggaaaagtacttaagaacgtatccgttggcggatttatcgaaatcaagaaaggattcatgagcctaatcggtaaaatagaggcagaaaagatacttgaggagaaaaatccattaggaagcggtgctgagtccatacgttttcgccgctacctgactgtctctttgtcgggttacgttgatcggaacggtcattttactgtcggtacaagggaaattcccttaattggaaacgaagcatttatagtgaccgaagagataattcagctcattcatcagatagtgagagcacaaacttgtgctatcacattcgcccgtactgatcttgaagatatcgatattaccctacctgttagcggtttattaaattctcacattgctattttcggtaataccggtagtgggaagtcaaacactctggcatctctgtacaaacacggttatgccgcgttgtctgaaatgctaaaagagagctttcaaagcaagtgtaagtttatattgtttgatttcaatggtgaatatggtgccgatgaatgcataacttcggagaaaattgtctataaccttagcacttataatgatcaaggggataaaatccctatgccggaaggtgtattacttgaacatgagatcctttctgtccttactgatgcaacagacaaaacccagaaaccatttttaaggcgagtacttgaactcaaatcggcagttcatcgctctgatgcccctattgatttttttagaaatatactcaagaaaaagatcagggaaactttgtgtggtagcgataagacacgttgtgatgcccttcttgatctttttcgaccaatttttaacgatcatgagcatatgacatccgatctagagtttcatttcggtagaaaagtttggtttaacaacacaggtcgcttttttgactctcctgaagatacggagcattcaaacctgttcagactcgcagaatcctatgaatttccaaatgatgttatagaatccttgcttggattcatgtatttgcagctaatcctcgaattcttatccggtcgctcaaatcctgaacacatagcaccagtagtaaatagaatgagtgcaaacagaaaagatattagaaaagtctttgataccaatgggaatagagatttttggggcaacagtaattttgtagtcatcaacctgaatatggtcaatctgaccatgaaaaaaacacttccattattactcgctaaatgggcctatgctgataaaaaagcaggtgacccctactcaactctcagtctcatcattgatgaagcacataatatcctgtctaatacatcttttcgtgaaaccgagagctggaaagattatcgacttgaaacttttgaagaaatcatcaaggaagggagaaaattcggtgtatttgtaaccctatcgagtcaaagaccgaatgatatttcctccactattatttctcaggcgcataattatttcatccataggttgataaaccagaatgatttatacgctattgagaagtcagtttcttatattgaccgtctcaccgaggaatcaattcccaccctttctactggcacctgcatattcagcggtgtggtatgtccaatgccgctgaaacttcgcatcaatgaattggagatacatcatagcccccacagcagtaccattacttttgaagaaatttcactactatga

SEQ ID NO: 80784 - DNA, 1935 bp, Citrobacter koseri
atgattctaactgacaacgaaacaaaaatcgatctgctaaacaatgaggccattgcctccaccattattggattgcttcgagagcagcccaatcacccagtaacaattggtgttcatggtgattggggtgcaggtaagtcgagcgtactcgaaatgattgagtcgggcttctccgacaaagatgatgttttatgcttaaagttcaatggttggcgtttccaaggatttgaagatgcaaagatagccttaattgaaggcatcgtctcaggtctggtagagaaacgtcctgcattgaaaaaagttgaaggagctattaaagacgtattccgtagtatcgactggctaaaggttgccaagcgagccggcggtctggcattaaccgcatttaccggtgttccgacacctgagcaaattggctccatcatcaactccctgcaaggtttggctgaagatcccgtcaaacttatgacgaaagagaatatctctaatactatcaatgaaataaaggcggtgacgaaagagggagaaacaaaaaatgtaccgatggaagtggaaacatttcgcaaagcatttgatcaactactgaaagatgctggtatcaagcaacttgtggtattggttgatgatcttgatcgttgtctacctgatacggccattgaaactcttgaagcgattcgtctatttgtatttacctcgcggacagcatttgttgttgctgctgacgaggctatgattgagtactcagtgcgtaagcacttccctgacctgcctgacagcactgggccacgagactatgcccgtaattatcttgaaaaactcattcaggtcccgttccggatccctgctttaggcgaaacagagacgagaatttatgtcacattacttcttgctggtgctgaaataggtgagaatgacccagactatgaaaagttaatcatcgttgcgcgggaaaagttgaaacgcccgtggacaagtggtggattggacgctgccacggtaaaaataactctcggctcgcaagccgataaagcaaataatgcactaattctgagtgatcagatcggaccaattttggctagcggaacaaaaggtaatcctcgccaaatcaagcgttttcttaataccctcttgctacgtgaccgcaccgcaacagcgcgaggttttggcgatgatatcaaactgccagtactagcaaaactcatgcttgctgagcgatttattccaagattgttcgaacagatcgcgtttgttgcggcgatacattcagatggacactgcaaagatcttgaagcattagagacgtttcttacgatttccaataaaaacgatgataaaccaaaagaaaaaaaagccgcagaagtattattgccacctgatagtacggttttgactgaatggaaatcttcagaaacgataagtgactgggctcggctcccaccgaagttatcaggtctcgacttacgtccctacttgtttgtaacaaaagataaaaaagattattttggtccggtatcagttttgggccacttagccgaggtggtcgagaaattgttcggcggcaaaatggcggtccaaagttacgaatcagagttgaagcaacttgtgcaacctgaagccgaaaaggtcttcgaggcagttcgtagcaaaataatgagcacagctacttttgatatcaaaccggcaggaattgatggtttgaccgttcttgtaaaggcacaaccaaaattacagagccagctaatggattttctagaggcattgccaaatgataagtgtggtccttgggctgtaagtggttggcagagtgctataaaggataccgaatgtttagcgcgtttgactgtactattggggaattggagcaaactaactactaataccagcctcaaagtcgcagccgaagcaacgcttaaaaatcacaaaggaatacattaa

SEQ ID NO: 80785 - DNA, 876 bp, Citrobacter koseri
atgggaacctcaacagcttatggagggcctggcggcgggactccacttattccatcatggttggataacgcccccccggcatccccgcaaggcaatggcccaggacaagacgaccagcagccaatagatcgtcctgaacccctgactccaccaaatcgcccaccaataccaggtacagctgatccgcaacgtttctcaaacgcgcgcaataacttcacacgatttgcagggtctggtggttcagatcgagcaagcctcgggcgggccatatcgaagtatgtttcaacgtcatcaggtggtgccaggcaggcagcacaacgtatgggagcttccagaggggcgggggcacggctcctcggtttcctagcggaggtacaaacaaggggtgtcaacgaagcgctacgctcactgaatttagaatcgctagcaggccgtccaatcactgaaattttcattgggctagctgatttcatctgcccaggagcaggtactgttgatgagggcattgcccgtgaagcatacatcgagactatcgtagaacttgctaacgaaggtctcactgatttgaatacatttacaccagatcaaatgcaaaccgttttcgaactatatgctactcacgcgatcgaagcacgcatttgtaatgacattggaaccaaagcggtgacgatgccaataaatgcgcatacagcacatcttgttgagcagcaggtgcgagatttcatccggggtggagtaagcgatgcactcgcacgcgctcaaattgggacaaatcatcttactccagagcaaattcaaggattcgtggatacgatctatgagtctgcgtttagaattttacaggctcttggcgatgcagaggctaataaacaatga

SEQ ID NO: 80786 - DNA, 1368 bp, Citrobacter koseri
atgatgcgacaactcctagttggtcatttcggttatgacgattcatttgaccctgtagcaggcttagatgaacagataacttccctacagctcgtcgccagcaaacaaactttggattatggaattggtcatgcactgtccagccttaacaatatcggcatattcccaacagaaatgggcattgacctgttggttttagcagcccatgtccatgctgctgacacacgaatctcgcgtgttgagcaatcgcaggattcgtggacacgcgagataagattgatagtacctgtgagtaatccctctcgttggtattcagcagcgccaaccctcaaaaattctcttgattttttaaccggcgatcgctggacggtcgattttaggccacgccccgagcgatttaatactgtcgtcaaagaagcaccaccaaccctgattgctcacccatttgattcagtcagtttattctcaggtggacttgatagtttaattggagctatcgactcgttagagagtggaactacaccgcttctggttagtcatttcggagagggggcaacaagtgatgcacaaactaagctgtttgccggtttaaaaaaacattacgtcaaatcatctttagagagattgcgagttggtatgtcctttgaggaaggacttgtggaaggcgtaagttcagagaatagtactcgaggcagatctttcttgttttttgctctcggtgttttcgcaggaaccggactaggaaaccatttcgttttgcgcgtccctgaaaatggattgattgctctaaatgtaccgttggatccactacgattgggatcaaacagtactcgcacgacgcacccatattatatggcgagatggaatgaactgctttccatacttggcatcaatggcgaaattcaaaatccgtattggaacaaaactaaaggggagatggcttcgtcttgccaaaatccttctcttttaaaaagcctgatatcagattctctatcgtgctcatcaccggccaaggcccgttggttggggcatggcattgaacagtgtggctattgtttgccatgcctgatccgccgagcagcattaatggcagcatggggacctgatagtgatccaacggtgtatacagtggcagatcttcatgctcaccccttggacacgcgccaagcaactggagtacaggtcagatcatttcaatatgcaattgctcgtctgaaagataatccgcaactagcaagtatcttgattcacaagcctggctcgcttgcggatgaagcaatgcatttagaccagctagctggtgtatatcagcgcggacttgctgaagttgcgcgacttatcgacggtgtttcgacaagaccagcttga

SEQ ID NO: 80787 - DNA, 753 bp, Citrobacter koseri
atgaatgcaactaaagggcttgtcgattttcactgtcaccttgatctctaccctgatcattattcagcagtcagagatgcagagaaagctggaatatttacattggcagttacgacaacaccgcgcgcatggcctcgcaatcacgagattgcaaagcgtacaaagtatgtccgagcagcattagggttacatccccaattggtagccaaccatgaaaatgaactagaactatgggatcagtacctatcggagacacgctatgttggtgaagttggactggatgctggtcctcgctttttcaagtcactcgatgcgcaaaagcgagtatttcaacatatattgcaacgttgcgctcaggctggcgataagatcattacagtccatagcgtcagagcggtcaaaattgtactagacttcattgaagcatatttacccttagggcgtgggaaaattgttctccactggttcactggaacaaagaacgaggcgaagcgagcattagagttaggatgctatttttctattaatatggaaatgattagcaatgccagacatattcctatgatacagtctattccaattgagcgagtgctaacagaaaccgatggtccattcacacgtattgataataggccttcacaaccagctgatatagaaaatactgtagaagaactagcccatttatatgggctatccacgagtgatatggtctacgtcattcggaataatttgcggaccctaatcagttattga

SEQ ID NO: 80788 - DNA, 804 bp, Citrobacter koseri
atgatacgtattccatcattcaactctcagcaccttgaggccgcctgtcgcgtccttgctgataccgaacgtggcttgagtgggtcgcagatcgagcgactgctacaagaaattaaagttgcggacacatcgccaggaatgacaaagtggaaacgtctgtttaatgcgctcgcaggtgcgcagaaccagtatcaggtcggcaaccatcttattatgttcattaaccgtgcgatgaacccggttaattacgcccgtgatccatcggtgtttgcctggcgacgtgatgaactcaatgttgtcctggctttttccggtttttatatccgtgaggatggtaaggtcgcgagcgccgctaaagtaacgactctggattctgctcgagcccgcgccggtcgacttaaggctgcactcgaaagccgtgctgtgcatgcggaagttttgaactattgccgtgccgaacttctggacgaaaactattttcatgccgtcttcgaggcgacgaagggggttgcggaacgtattcgtcagttgtccgggttgagcggtgatggtgctgacttggtgaacaaggcatttaccggacaacaacctgttctgactttgggatcgctcaccaccgactcagaaaagagcgaacagaaaggttttgcgaatctactgattggtctattcggcgctgtgcgcaatccactagcccatgcgcctaagaagaattggcccatgtctgaactggatgcgctggacatccttacgttggtttcgcttattcatcgcaagctggatggcacgcagaaacaactatag

SEQ ID NO: 80789 - DNA, 483 bp, Citrobacter koseri
atgatggtactgaccccggaacaaattcacttcctcaaccaatatgcaccaggcgaagctgtgtcacatgcattgtccgagctactattcattgatcatgatcttctcggtatcgatgctaacgaacggtcgattacctttcgctttgcgatgtacctccagcaatgtttccccggttggactgtagattgcgaatacaaccgggacagcattgaacctaaacggctcagacatttggaactttatccagacagcgaagacgttgaggcaaagacagtatttccagatgtgatcgtgcatcggcgaggtacacgacagaatcatttggtcttggagttcaaaaaatcaacgagtcgcgtcgatagagagatcgatctactaaaacttcgaggttataagcagcagcttggttacgagcacgctctgtttgtggaggtcggcaccgaagggcaatcgatcatcacggcgctcgagtgggtctga

SEQ ID NO: 80790 - DNA, 939 bp, Citrobacter koseri
atggcgacgataacggtttctccggttcattttgaggactacagtggtatccagttcgagcgccttgtttttgcataccacctgcgcgcgggttggcatgatctgatttggcacggtcaatcaggaggtgatcaagggcgagatatctcgggtattgaaccatttgatgaccagccagcacgtaagaccatcatccaatgcgcgaaccgagacacgttgacactggcaaaagccaagagcgacatgagtaagtcgattaaagcaactggcagtgtcccagacgtctttaagttcgtctctcgtggtgcggtctcggatgctggcagaacgcgcatcgagcaagcagcagcttccctgggcgtcaggcatgtaacgatatggtcgggcgtagagttcgaagaaaacttgcgtcttcgtgctgaatatctgctgcaccgttttgtccagggcgtcgagtttcctgatgttgaagctgatattcaaaaattcacggatgattttcccgacctttccgacgccgatgttctgcaactgatggctgccgtatttgaccgaccagcatttcgcacaccgtttcaacaagaaagttctctccctgcttttcagaaggcaatcgaagataccattggcgcactaaatacaggtttgtggagaacgcgtgagggcgtcgagatcaggcgcattccttcgatccaccatctcaaaaatcaacgcatccagacagtgatgggaaaagtggttcgtcaggtcgaccaactgcggcgcatcttcgtaactcggcttaaggaaggggaaatcagaccttgtggatgtggtcagcccgattgccccacgtttatgctcacgcaacgcgtggctgacgagctagacgacgcgagacagagaatcctcacgacgtttcaatcagtgtatacttccttcagtgtgagccttagttag

SEQ ID NO: 80791 - DNA, 237 bp, Citrobacter koseri
atgcagaataacttattagtaaactggacgcgacagcagcactgtagctcgcgcacaaaacaaatctccggatcgagtgtccttaacgacctgtctcaattaatcaaaaacggcgttctgctatttcttaacacaatccgtcgccaagagctgaggcagattgagattggccttgtagccaaaacgactatctacgagatgggtgcggaagtgagtttccgcctcgctttaatctga

SEQ ID NO: 80792 - DNA, 426 bp, Citrobacter koseri
atgagcaacattaccatctatcacaaccctgcctgcggcacttcacgcaacacgctggagatgatctgtaacagcggcaacgaaccgacaataatttattatcttgatacgccaccgacacgtgatgagctgattaaacttatttcagatatgggaattacggtgcgtgcattactgcgtaagaatgttgagccttatgaacgcctgggtcttgatgaagagaagtttagtgatgaacagttgattgatttcatgcttcaacatccgatcctgattaatcggccggtagtcgttacgccgcttggtactcgtctttgccgcccttcagaagtagtgctggatattctaccggaaggccagaaaggagcgtttaccaaagaggatggcgagaaggtcattgacgaaacggggaagcgggttaagtaa

SEQ ID NO: 80793 - DNA, 1290 bp, Citrobacter koseri
atgcttttggcagggagtatatttttactgacgctggtactggtgatctggcaacccagaggcctgagtattggctggagcgcgagtatcggggctgtgctggcgctcgtgaccggtgtcatccatatcgctgatattcccgttgtctggaatatcgtctggaacgcgacagcggcatttattgcggtcattatcatcagcctgctgctcgatgagtccggcttctttgagtgggccgcattgcacgtctcccgctggggtaacggacgtggccgcctgctgtttacctggatagtgttgctcggtgccgctgttgctgctttgttcgccaatgacggcgccgcgctgatcctgacgccaattgtgattgcgatgctgcttgcaatgggattcagcaagggcacaacgctggcctttgtgatggccgcaggatttatagcagatacggccagcctgccactcattgtttctaacctggtgaatatcgtctcggcggactttttcggtctggggtttacgcagtatgcctccgttatgatccccgtagatgtggcagcgattgcggtcacgctggtcatattgcatctcttcttccgcagggacattccggcgacgtataacgtttcgctgctgaagacgcctgccagtgtgataaaggatccggcaacgttcagggcgggctggattgtcctgttattgctgcttgtcggtttctttgttctggagcctctggggatcccggtcagtgcgatagccgctactggcgcagcagtactgtatatagtggcgaaaagaggtcatgccatcaacaccggaaaagtcctgcgcggtgctccatggcagatcgttattttttcactgggcatgtacctggtggtctatggcctgcgcaatgcagggctcacggagtatctgtctggcgtgctgagcctgctggcagaaaaggggttatgggcagcaacgttcggcaccggcttcctgaccgcgttcctgtcgtcggtaatgaataatatgccgacggtgctgattggcgcgctgtcgattgacgggagtacggcgactggcgtcgtcaaagaggcaatgatttatgccaacgtgattggctgcgatttaggcccgaaaatcaccccgattggcagtttggcaaccctgctttggttgcatgtgcttgcccagaaaaatataacgattacctggggatattacttccgcaccggcattatcatgactctgcccgtgctgtctgtcactctggccgcgctggcgttgcggctctccatcactttgtaa

SEQ ID NO: 80794 - DNA, 321 bp, Citrobacter koseri
atgctacaacctgttcagcttttcaaaatcctgtcggatgaaacacggttcgccatcatcatgcttcttcgggagtcaggagaactgtgcgtctgcgatatctgcgcggccatttccgaatcgcagcccaaaatctcgcgacatatggctatccttcgcgaggctgggctggttctggaccgtcgtgaaggcaaatggatccactatcgtctgtcaccccacataccggcttgggcagctgagacaatcacgacgtcctggcagtgtatgcgggaggatgtgcgtgaatggctggataaatcagcctgcacctcctgctga

SEQ ID NO: 80795 - DNA, 699 bp, Citrobacter koseri
atggaacaatttcctgccctgaatactgaatgctttgatcaacacatcgctgaacgcctgcacctgcaggagccgccacggattctcatcctgtatggctcagtaagagagcgctcctacagccgctttgccgcggaagaagctggtcgcctgctgatggcgatgggcgcggaggtaaaactctttaacccctccggtttacccctgccggatgatgcgccggacacgcatcctaaagtcaccgagctgcgcggtctggtcagatggtgtgacgggatgttgtggagttctccggaacggcacggggctatgagcgcagttatgaaggcgcagattgactggataccattaagtgaaggcgcggttcgtccttcgcagggcaaaacacttgcggtaatgcaggtctgcggcggttcacaatccttcaatgcagtgaaccagatgcgtattctgggccgctggatgcggatgtttacgatccccaaccagtcctccgtagccaaggcatggcaagagttcgacgaaaacggacgaatgaaaccttcgccatggtatgaccgcatcgtcgatgtagccgaggagctgtttaaaatcacgctgctgcttaagggacaaaccggttatcttgcggaccgttacagcgagcgaaaagagagccatcaggagctttcatcccgtatcaatcaggacaaaatataa

SEQ ID NO: 80796 - DNA, 540 bp, Citrobacter koseri
atgtctagaattacttttcctcacttgacaggtgtaaaacttattgttgctgcaattgcgctttcccttgggaattttatggtcgtacttgatacaactattactaatgttgcaatgccgacaatttctggatatctcggcgtttcaacaacagaaggtatatggatcatcactgcctatgctgttgcagaagcaataacagtacctcttacaggttggatagcatctcagtttggccaagtacgtacttttctcttggccattattgcatttgttttattttccgtttgttgtgggttatcgtggtcgttaaccagtcttactatttttagggtgttacaaggattagctggaggaccgttaattcctctttctgctacgttgcttattgcagtttttccgaaaagtaaatcaaatatagctgtcgctctatggggaatgatgactgtcatatttctgataattggagttggcaatgggtgttttatatcaacattgcttttggttttatcgttggatgtggggcatggtgggtcttga

SEQ ID NO: 80797 - DNA, 1101 bp, Citrobacter koseri
atgaacagaaagaaaattattataactttttttttattggtgttgttggtttttctctacttcgttttgtcagtttttatttctaataaaacagtgtctacggataatgcctacacggctgctgaattggcagaaataacccctcttatcgaaggaccaattaaaaaagttaaggtgataaatacccaatttgtgcatgttggtgatgttttggttgtgatcgatgatactgatgccagaattgcattcatgcaagcggaatctaatttggaaactgcacgtagaaaagtgatgcagattatggctaatgatatcgctttgaatggtaacctgaggtcacgcgaagcaaacattcttgaatcagtacatcaagtgaatcgtgcacaggcccattttgataaagttgctctagacgtgaagcgtcgtaaaaatcttataaaaacaggtgccatctctgaacaggattttacaaacgctaaaactgagctacgtgaagctagcgcaatgctggagtctgctaagtctgctctaaaagctgcccaggctgatgctatagaagctgaaggtactaggaaagcaaatgagacattatttctagacacaacgattgataataatcctattgttttagctgcaaaaactcgccttgagcaagctagaactaatcttgatcgaacaatcatccgagctccggtctctggaattatcactcaacgtactgcagagattggaagatttgctaaagcaggagaacggttaatgagaattgttccccttgaaggtatttacgtcaatgcgaattttaaagaaaaccaacttaaaaatgttagggttggacaaaaagttgaactaatttcggacctttatggaaacagtattatctatcatgggaaaattgtaggttttgatggcggtactggctcagcgctgtccttgattccagctcaaaatgcgacagggaattggataaaagttatacagagattaccggttcgtattcacttaacgaagaaagagttacttaataatccactgcgtgtgggattatcgatggttgcgactgtagacctcacttcagatgatgtcaacgaaggagaataa

SEQ ID NO: 80798 - DNA, 567 bp, Citrobacter koseri
atgcccacccagaacggcgggttcatcccattcgtcgcgcagcttgcgaatgtcacattcggcgacggtattagtgtaacgacggcgttcaccccagccgcttggccggacgattatcttcataccgtgaccgagcctgctccgccatctgacctttcgttcggctccactaacaacgatacaaagcttgccggcgccaacgtcccaggtatagccggcctcgcgggcggatacatccgcacacacacgggggacgccgactaccactttgccactgacactgtagccttacgcaatgggttatccgacctgaagggacctaacgacaacccgcatgctcctggccatcaatctaccccaaccatcgtgcagtatcaatgggcacccgctatccagaacaccgacgacccggcaccggatttcaaggcaacggtggcgacttttacgtttacggccatggtcggtacgacggtttactcgcttgcggacaaattacctgatccgagtgctgtatacgacaacgaaagtttgtcaacaacagtcacatacactttcactgccatctga

SEQ ID NO: 80799 - DNA, 2445 bp, Citrobacter koseri
atgattgaggctgaaacagggttacccattggtcacatgggagttcaatgcaaatttgttaagcaaagttcaatgcttagctggcttctggaagactcggtttacagcttctataaacagaactgtaaacattgtaatcaacgggttccggtgggatttcccaatattttagagtttgtaggcccaagagaaaaatctgccgaagaacgaaatttggctcgcaaagaagatgaaaggcagagaaagcagaagcagctcaatagacaacaagaacgagcagtattacgtctttcacttactctagaagaaacgtttgtgcttgatttgcttgatgaactcgatcaagaagatatagagaacaacgatccccgtttggaacaacttgctaatctggcacctgagacatttacaagtaaaataattgaacacttgttgcctgcagtgttacatgagaaattaccatattcaatgccagcagcaaaagctttaataagaactgaattatcacaagcggaaaaactggcaatttcagtatatttaataaacaacttcgaatattgtccacctgctatagaagcaatcctcttggaagcagagaatctatctgaagatgatttcttaaaagtcctttaccactttgttagaatggctgttgaatctcctcctggaatgatgattggtacatttgagcgaaaagtacttaataaaggccccattcagtcactttttaaaaaaagacaagctgatatctgtgatgttgttgatgaatacataaaagatactcaccggggaaaatttcaatttgctattgagataattattgcatcggatgatgatgagttgcttctaagacatattagaagtatatttgctaagctgatgcgtcgacggactctactcccggaggaacggagagatagcagcattcttttctttcttcgggaagctgctacgaaatgcttagatagatttcccgatgaaagcgataaagttattcaatcctatcttgctgacaaagatgatattgggagacatgaggccaatagagcttacagatctgtactgcgaaataactatagaaaaaaaagtaaaataggaaagacgcaaaaaatagcttttagacgtttactctgggctgcagtggaaaatccagaggatagcatggatgatgcaggacaattcttaagacactcttgggacgaatttactgagcttgcagttgataattttgacgatttgatcggagcggctgcaacgctaagcgagaaatttgatgcgttgaataaagaaaaaatcatagaaataaatgagagttttctagatcatttagataaaagtaataagcgtaatgctattgatggcttacagggtgcattgattgaatgggctgcgattggagctaaatctagagggagtgaaggaatcgatgattttcttcagctctatagaagcttaccagaagaacaaactcaaatgcgtgggaacatgattgcccatgtttctaagttattaactggtattgacagcctaacactagtgctctctgattggtatcgtgctcttatggatgagagtacattgattcgagcacgtgccgtacaagcgtgggaaaatgttccctatgatttagtgaagaatttcccagatttattcttcgaagcatattcagtcttgctattagatcaatatgttatggtgcatcagtatgctgttcgcgctttgagccgtagatcttttcctgaggagaaacggggacttgtgagatcccggctgtggaatctaatttgctattatactcaacaagataaaaaagataatttcattgtagaatgcattgacgtattttcttctctttgcttatcagatgaagagagaaagggaaaaattggattgcttctttctaatatattattaatcttagaaggaagtgcactttatgatgctatcaatcgattgcgtttccattttgatgatattcccggttttgtcaaagtcgcactcaaagcaattcaggataagtatactcgcagtatttctattgatgactgcatctcagtgatattaagagcgccacatgatgagcttcgaaattgtaaagacgatctccaaaaagcatttaatgctctgaaaccatttaaacctcaacaatttattgaagcattagtgtacgtggctgcgttaagcaagtgtggtgataacgtaactgcaaatgtttgtttaaaggaactactggaagaaattccaaatgatgaaagaaatacacaatggaaacttaaggctgctttagttacagaagcagctagtattgaacatgccataagtgtttgcgaaccctataatgacttaattgaaaaatggaagggccttacggctgagttggagaaagaatatgaagaacgagccaaatttcgagattttccgccaagctttttctccgagagttga

SEQ ID NO: 80800 - DNA, 531 bp, Citrobacter koseri
atgaagaacgagccaaatttcgagattttccgccaagctttttctccgagagttgagattgcagcagcgttggatggtgcactcaagtccattccgaatgacttggtgaaacttaaagaagcgtgtcaaaagctcaatgaaacgctcgatgagctcggtcagggatatgttgaagatcaatatcgtgcatattgcatagcaatgactatatttgtatctctagctgagtggaaacatgctatacgtaatgctgagactgatgctcaaaggtttttaaattcagcacaattaaaagcatcagagatcgacatgacgacgagtctctcggagaacaaacaatttaatgaatttatagagcaagtccgttcaatcagtaaattagattcattaaaacaaatacaagaccagttaacaagctggtcattgcctctactcttattcgcaaatcttcgcgataaaaatattgagaggattaggcaaagaatatctagtaaagggacaaaagacaagaatcaacagttgcatttctaa

SEQ ID NO: 80801 - DNA, 504 bp, Citrobacter koseri
atggaaaaagtaaatgacctaaagggaaagcacaacgaactatctttatataaagaagcatatacgtactggaatgctatgcatgatagagtgagaaataaaagtcactatggtaatgtatcaatctgtgatgaatggtacaaatttagtaacttctatcattggatggaaagtactgaatacaacgaaggttggcatttagataaagatataatgggaggggctatatatagtcctgatacttgtttatttgtaccgcaggaagtaaatcaactattccgtaatgtcaaaacaaaatataacactggtgtagttaaaaatggtaatggttatcaggcacaaggccgctttaataaacagttatataaatttggtacatatccaactattgaagaggcacactacgcatatgtagtaggtcgtaaacagtacattggacaacttgcgatgaagtacagtaactttactaaacttagctctgtactattcaaactatcaaaataa

SEQ ID NO: 80802 - DNA, 153 bp, Citrobacter koseri
atgaaagaaaagaaaacgattagtgtaggagtaaggttaagtcctacacaggaagcatatctacaaaagctaatcagcgaaggcagggcttcaacaatctcaggtgccattcagtacttaatcaatcaacaagtgatcttaggagggaaataa

SEQ ID NO: 80803 - DNA, 381 bp, Citrobacter koseri
atgaccgtatcaaaaagtggccgtgtgccaaaaacaatcaaagaagccgtacaagaacagttcagtcgcatgggggaacgctacactgcaagcatgaagtggaagaagtctgaaagcgttgcctactttagtgtatttcgtgagttgccaaatgaaccagaaccaataatctatacatttgctattcatggtgatgaaatacgctacacaagttgtgatgtgaacacctgtgaagcgactcagctatcgttagcctattcagaggatgcgttctttcagttcatgttcaaatgtgatctaccattggatttcgatacgtttacagaaattatgcgtttgatctcattgtatggattagacgtcactgccttctataaataa

SEQ ID NO: 80804 - DNA, 1836 bp, Citrobacter koseri
atgaggattgtcaaagcgtatgtctatagtagggtatcaagtatgcaacaggttgatgcttttggcttagatcgacagattagtacagtattagacttcctcgaaaacgctaaactacccgctgaattagggtatcgactcgatcccagtaattatgaagttctcgagtctgacaaaggtttgtcgggttacaaagggcataacttcaccaaaggctcgttagggcagtttaagcgtcgtgtcgaagctggggagattacggaagggtgtttgcttatagaatccgttgaccgcttttcccgtaagcaaggatatgatgcgatcgatgagttcacatttttgataaagcgtaatatcgatatcgtagaagtagaaacagggcaaatctacagctataagctcgaccatcggctatccacattatcaaccagtattgaacgtgcttacatggagtcaaagcgtaaggcaagaattagccaaaaatcatggaggaatcgaaaggaaacgtcggtgaaagagggggttgctcttaacaacaatacaccagactggttatcgctcagtgatgataaaaaaacttatgaaattgatagttgtaaggtagtaacaataataaaaatcttcgagctgtatcgtgatggtgttggagtgacagatattgtacagcaactcaatgagtcaggtgagcggtataatggaaaaggttggaatactgtaaaagtctataacaagctgagggatcgccgtctgaatggctatcttgttggtaagtaccaaatcatgacaagaaaagataatgagagtgtcagtgatacagaaaggagagtattagaaaacatcaagatcaaaaaagaagcaaatgataatgccaagcgtatctatccaatagtgattgatgatgagctttttacaaaagtacaatccatgatggataaaaattcattatctaaaaaacaaagaagtactacctcaaaacaacgaaatttgtttaatggactaacaaaatgtcatgagtgtggtagtccaatgatcgtacaaagtatgacaaatgggggacaatatctgagatgctataggcaacgaacaaaggacgaaaagtgcaattctaaaatgttacgctattttgaaagtgaaagggttttattggaacacattaagggactaaacttggatgaattgtacggtgacaaaaaacataaccaatccttagatagcctcaagagtactctttctgatataaatgagaagataacattattaaatgagaaaattaaaagtgcaaatgatgaagatgaactatttgcaattatgagctttaaaagaaagcgaatggctgaaaaggatgaagtaataacacggataaattcacttgagaatgaaagtgaggttgtgagattagtatatgattatgatattgagaaaattgttaatcaggataatacagtactgagacggaaaactaacgagcatatatcaaaaatcatttcttctattaagtgtttaagaagggattctggttatataggtgcatactatatgtttgatattgaatatcacaaagatgtactaaaacatcttcttataacagatagtagcggtaatttagtaagtgaaatcactattactcaacagaataatgagcgtacatacagagtacgagaagatggtaatacagtattcaaaatagaatcaaatggtattgcatggtcattacatgcgagtagaaagaaaaccattgatgatctactacattacatgtatatgatgatggttagaagagaaccggaaggatttgattatgtgcttaacgaagatatgattgaatggattgattag

SEQ ID NO: 80805 - DNA, 1275 bp, Citrobacter koseri
atggaagacgcgtcgattcaggtgcctgaggctggcggtgtgttcccgccagcccggcgtctgcgcagtgtggttgtggggctgatagcgctgttgtcgggctgtgaccggactgctcccccggcagcgttgccgcatcctgtaggggtggtgaggctgtccacgcagcgagtcccggtccatgttccgctgccgggcagggtgtccgcctggcgggtggcagaagtgcgtccgcaggtcagcgggatcctgttgcagcgacgtttctctgaaggctccggggtgcgggcgggcgagccgctgtatctgatagatccggcaccgtatcaggctgcactgacacaggccacaggaaaccttgcccgctcgcgggccgcagcgcgccaggcgcatcgtaccgcatcccgttaccgtgcgctgctggggacgaattatatcagtcaacaggatgtggatatggcggttgcgcaggcgcgtcaggcagacgcgcaggtgacggccgaccgggcggcggttgaccgggcgacgctaaacctgaattacacggatgtcagggcacccgtggatggtgtgacgggtaagtctttctttaccgaaggtgcgctcgtgactgacggtcagccccagccgatgacggtgatccagcaactggatccggtctatgtggatctgacggaagacagtgacgcctggctgcggctgcggcaggaactgcattacggtgcagtcacccccgcggccgggcaacggatcccggtgaccgtgaatgtcgggtcagggaaacatgccatgtcagtcaactgcagcctgttgttttcggatgtcacggtggatgtgtccacgggggctcttgtgctgcgggcgcagtgtccgaacccggagcatacgctgttgcctggtatgtttgtgagggcggtggtgtcgcccggtgttcgtgagaacgcgttactggttccgcagcaggcggtgtcgcgtacgccggatggtcaggccacggtgatggtggtggacaaggacaaccgggcacagttacggcctgtccgggtggcagaggcgaccggagaccagtggcgggtgacggagggcctgtcagcaggggagcaggtggtggtgacggggcaactgatgctgcgtccggggatgcccgtgacagtgcggtccccgacaccggcgggcaatgtcagaacggggagcctggcctcccgtgatgcagggcaaccggcggatgaggcggcagcggaagacgcggccaggaaggagaaagaacatgcgtaa

SEQ ID NO: 80806 - DNA, 477 bp, Citrobacter koseri
atgaattctgggttactgacagcagggggaggcgacctgagcttattcctgatggggggcatttttttgctgaccatggtcgtacacatctgtgtgagtctcttcccgttgcggccggagggacgacgtatttttcgtcagtcgcgggggggcgttgtccggtggtttaccggtgaattctccccggcactcagtctgttctgggggttgttgcttaccgcggtgacgacgctgtcgggaataattctgagcgctgttcccgggagagagtgggccatgctggcggggccgttaccgggtgttgcggtcactattcctgttctgctgacaagcctgcgtcggctccgggggcacggcctgaggaaaatttttttctctgttctggtcaccctgctgatgatgtttctggctggcctgttactgatgctgatgcccggggaggtgggaatatggatcccgtttctgcgtccgtcatga

SEQ ID NO: 80807 - DNA, 387 bp, Citrobacter koseri
atgaagggggctgtggtgtgggtggaggcgcttaccgggttgtccggtctgcgtgcgccggacgggggcagcgatgtcactgacatcaaaaccattctcgttgtctgcggtgtatcgctgctggtctgggggatggtcctgctccgtgccacccgtatacaggccggtgacgggcagggctggatggcctttcgtgaatggggcggtccggtcaccctctccctgggagcgctggtgctcctgtccatcagcgatggcggggaggtggaccggtttctggcccgtgcccactggcacctgcttgaacggtttgaagtcgtctccgccattggggtggacatggttaacagtgtgtttccctgtcgtacgggaggaggtaaaggatga

SEQ ID NO: 80808 - DNA, 438 bp, Citrobacter koseri
atgaataacaaaacaaaatctgccggtcatttgccgggcgaagacccggaggaacagaccggtaccgaccggccctgccaggcagaggccctgcccgtctatctccgggtcgccctgtgggtgttggtacagggcaggggagtcacccgggatgagatagcggaggagttccggatttctgtgcgccaggcgggtgacctgatgctctatatcagcacctccggcagcaagtacgtggatgcgacccggacaacgctgcgaggccccggccggggtatgcaggcggtgctgaaggtggcggcggttcacacgagccggtatgtccagcggcggccgggcaggccgaaacgggcccgcccggcaccggacggcggaacgccggttgcgctccgtgacctgtttttgtacggcgcccggcgacgaggcgacgcgtcatga

SEQ ID NO: 80809 - DNA, 303 bp, Citrobacter koseri
gtgaaagttgccaccgtcctcgacgctgtagtgcaggaactgccagaggagattaagcaggacggggctggtgacgtggcaggtaagttgttcatacaggcgctgcttattaatggcggcgtaataacctttgatgtcagtgcgaaaaacaaagggggtgctgtgagtgataaggtggtgatggacgcgcagggcgctttgtcggccgccaccgtgacccttaatgtgttcgcacaggggatggaccggaagctgtcctgtaagaacagaggtcagcattttcagtaccagtgcatcccgtga

SEQ ID NO: 80810 - DNA, 303 bp, Citrobacter koseri
atgaaaatgatcctattcaccgcctgccttttctgcatgaacttactactgccctcttccgtaatggccgctgatgcctgtgagattgttttatgtctgtacggtaaaacaactggtaacggcggaggaaatgaatgtcagtctgctgaacgttccttctttaaggttgtgaaaaagaacagacacggatttcaccccaaccgtaccgccgatgcccgaaaagctttattactcgaatgcaaatcagccgacccgaaaatcatcgaccagataattaataaatttggccgcgtgcgtaattga

SEQ ID NO: 80811 - DNA, 1017 bp, Citrobacter koseri
atgagcgctgaaaatctgtcgctggattttatgaaaaaccaattgttcggcgattatctcaaactggatggcctgacagaaatcgccatcaatcgccccggagagatccacaccaaaataaacggtcgatggcagaagcatgattctccggttacgttgcgtcagtgccatgcttttgccaaagcgttggcctcatggaatgaggacaatatcgatgatacctcccctatccttgccgctacattaggatcaggtgaacgtgtccagaccattatccccccagcctgcgagcgtaataccgtgtctattacgctgcgaaacccgtcatttgcgcagaaaacgcatcagtcctggattgatgccgggttttataaccggataaccggtaaggagagaaacgaaagcaaagatgatgaactaatccgctgctataacaatggtgatattccaagctttatcgaaaaggccgttgagtacggtaaaacgatctttattgttggtgaaaccggctccggtaaaaccacctatatgaagacgttgctacactatattccgccacatctcaggctaaccacgattgaagataatcccgaaatccgtttttaccatcacgccaattatgtgcatctgttttacccggcagatgccggagatgatgcgattatcacgcccggcagacttattcgggcaaattatcgaatgaatccagatcgtattctgctggcggaaattcgtgggcgggaagcgtgggacgcgctgaaaattatcggttcagggcatgaaggccttatcacctccctgcacgcaggcagtccggaagaatgtatagaagggatcattgaccgctgttatgaaaatccagattgcaaaaatatcccgttcgatgtgctgttacgcaaggtacttaaatgcgtggatatcatcgtcagcgtagatattcacggtgatattcgtcggatgggggatatttatttcaaaccaatacatcttcatcaaatgaaagaaaccttcagataa

SEQ ID NO: 80812 - DNA, 1224 bp, Citrobacter koseri
atgactgataaatccatcccagagacaacggaaaaaaccgtggcagagctggaggttgaagcccgtgaacgcgcccgttcagcgatggcgagtcagacaccggagcagaacacgcctcccggccaacccgaagtcacccgcttcaaaaaagcctccagccaccggacgctgcttgtcagcctgctgagtctgggtgcactgattgcactggcattgggtggagatcgcttccttgcatcattaaagcaacgcgatgataaggcggttgaaaccacagccccgccatcagccagtacgggacagcatgagcgtgaaaacctcggtatggacaacaatccgttcggcctgttcggccaggacaaacaggaaaccgcaacagataatcccccaatacaggcagcaccaccgtcagagccacctgctttaaataaggcggcggcactggtcgatggctcaagtagtgccgctgagtccacacaacgcggtaattctcaggcttcacaaactgcaccctctggcagcacacagagcaagaacaccagcacaacgcctagcacagaggctaacgacgccaatcccggtgtcgcaaaagtgaccagcgtcaggcgactgggtctcgatcccaatctttacctgccggttgatcgttatattccgtgctcgatgatgcggcgttttgtctctgatgtgggcggtcgtatttcctgccttatcggcgaagatgtctacagcgctaaccatcacgtgaagttgctccctgccggaaccgtcgccagaggcatctaccgcaccggggcgctgcaacatggccggagccggatgtttgtcatctggacggaattacgcacaccagaacccggcagcctgcaaattccgctggttgataccgaagccaccggcccgttgggtgaggctgggattagcggctggattgatacccatttctgggaacggttcggcaatgcattgatgttgagcaccgtacaggacgtggctgccgccgcatcagattcagcaccggggaaagaccgcaataccgattacaccgaaaacacccgcgctgccgcgtcagaaatggcgaaaacggcgttagaaaacagcatcaatatcccgcccacgatgtacctcaatcagggcgatttgatcggcatcatgaccggtacggatatcgatttctcttctgtttatcagctacgtctaaaaaagaggtggtatgagcgctga

SEQ ID NO: 80813 - DNA, 894 bp, Citrobacter koseri
atgatgctgaaaacaaccgtgatcttgtggctccttctggtgtcatccatcgcctggagcgcggcgatgccgcgcagcagcacgtatgacagccgaatgcagaatgtcacctataacagtcagaatgctaccatcgtcaacacccgccccggttacctcactacactcctgtttgatgacgatgaagaagtcatcgacgcgcaggcgggttttccgaagggttggaaagtcacaaaaagcaataatcgagtcggtgtcagcccaaatcctatcacccaaccggtaaccgatgataacggcaacaacgtcaataaagtgtttctgccaacggcgagcgagtggagaaccaatctctttgtcgtgacatcgaagcgtgattacagtctggaactgaacgtactggagaatgactcgccttcacaggcctttattatccgttttcgctatccggatgacgagcgcaagcgatcagaggcagccagcgcagcgcgtctgaaacttctgcgtgaaacacaggaaaagcagcagatagcgacagcatttgagcaggctaccacgccacgcaactggctctataccaagcgagtcgcagccggttcagcgtccattgcacctaatttcgcttacgatgatggccgctttatctatctcggtttttctcccgtcaaaatccttccgtcaatcttccgggtcgttaacgggcgagaacagaccgtaacaccccgcatagccaaacacggaaactacaccgtggtcgtcgtgcgggcaatgtcgccacagttggtattgcgctacggcagcgcggtagtcgggattgagaatacgtcattcggcaacgccactactggcagcggtgacaccgtttcacctgtcgtcacgctggaggctaaatga

SEQ ID NO: 80814 - DNA, 684 bp, Citrobacter koseri
atgtctgaaacagaaaacatcattgcgtcatcccgcgcctttgaatctgtcctgctggaaaaggatgaacgggaaaaaaagatggcgtggcgaatagcggccatagggtttgctctggccgcaatggcgatcactgcactgattattctgctgccgctgaaaaccaccgaaatcgaattatggtcggtggataaacagaccgggcggtatgaatatatgacccggattaaagagcagagtatttccacagagaaagcactggctcaggcgttagcggcgcattatgtcaggctccgcgagggttataactattttgctctccagcgcgattatgacgatgtgcagttattcaacagcgatagtgtgaaccgggattatctcgacgggttcaacagcaatcaggcacccgatgtcattttcaataaagcggaatatgtcgtgtctatcgacattatttccaacgttcacgcgaccgcgacagcgcctgaccatctggcgaccttacgcattaaacgcactatccgccggattgtcgataactcggttaaaacagatgtctggaacatccgtctgacttatcgctacctcccacgaaagcaacttacagacagccagcgagaagtgaatccgctagggttcatcgtgaccagctaccaacgcgataaagaactgaggggtgaatga

SEQ ID NO: 80815 - DNA, 1041 bp, Citrobacter koseri
atgtcaggtggtatgtttgttggaatgaacaacacgatcactgacggtttacatgccgtactgcggggacaaacctccgtgtacggcgatatggtaagcattatcgccgtcagctccttcacgttatttgtcacttatcggggttatcaaaccctggctggaaaactccaaacgcctgtagaagatgtcatatgggatgtcgggcgaatgctattaatcatgacattcgttttaaatctcgatggttggctggatttagccatttctgccattaacggattaaccgacggcgtcagtggtgatgacaatgtctgggtcttactggataccgtctgggcaaaagcgcaaacgataggacaaaagctttatcagcaggatgattccacctatgtaaaactcaacggcggtattgcccaacttctggtctggggaggcgctatcgtcaccctgctctttggttcggcagttaatctgttagccggaattatcattgtattaatgaccaccactgcaccgttatttattttctgcctgctgtatggattccttatcccaatgtttaacaactggctgaaaattatcttcacggtgatcctgacgattatgttttccgcgttatccatcaggattgtcattaattatctcaatggcttattagataaagcggttaactttgcagatagcgccaatatcatcacactgggtgttcagtgctgcgttgcgggtgttatttcaggtgtcattatctggttctcagccaaaatcgcgaatgcactaggcggcgtagccgttcaagcagcactacagggtgccgctatgggcggtctacgtgggctggcgaagccctcttctgatgcagcaaaaccggtcatgaaaaccggtgcggcgggtgctcagttagcggcaaaagcgggcgtcagcgccgctactgcaacaggttcacttatcgccgcaggcaccagcaaagccctatccgcatggcaaaaacgtgcggcgtctatcgatagcatgaagcgtttcaaccaacagcgtaaccgctaa

SEQ ID NO: 80816 - DNA, 225 bp, Citrobacter koseri
atgaaaacgtcactttgcatttttacagttattttaggctcattatttctgtcggggtgtgataacccgaaatcaacgcaatggtacaaagaacatccggatgaaatgaaccagcgatataaagcgtgtgaatcatccggcgatgactcccaagattgcaaaaatgcacgagaagcgcgatttgaactccgtcaggaaaatgccaaggttcccgatttgaattaa

SEQ ID NO: 80817 - DNA, 717 bp, Citrobacter koseri
atgcagaccagaaaaatatttctggcgttatcgctattgatgtctacaccagcgataagcgccggtatcccagtatttgatgccgccagtaataccgagtcgattaaccaatggatacagaaactccagcaatggcaggaaacggtcacccactataaaagcgagcttgacgcctataagcagcaattagcgaccgcaacaggcatccgcgatattcagggatttctccgcgaggcgaaaagcctgaaaaacgatatcgaacatctccgtaaaaatggtatttcactggatgacctgctgaccaactcaaacggttattattcttctgaccttcagcgcctatataaaaaatatcaatcgttcgatatttgtaatcagtccagttcatcgcaacgttatctggaaagttgcaaacaacttgttctcaatcaggcggtctcgattgagagtaccagcgatgttcaaaacaagattaatagcacattaaacgatatatcagacttatccgaccgtattgccaacgccaaagactcgaaagagtcacaggacctggctaacgcggtagcagccaaaagcgtacaattgaatacattaaccagccaatgggaaatgtcggtcaagcaggctgaacagcgatccgtgatgttgactcaacaacggcaaaaagcattcaatgaacaacaactcgccgctccgattcctgactttaattattga

SEQ ID NO: 80818 - DNA, 2748 bp, Citrobacter koseri
atgaccaccttgaacaaagcactgacccgccctgccgccattatgggtatccctctcgttccgttcgtgatcgtcagcggggctatcgtcctgctgtcggtctatatcagctattaccttgcgttgttattgattccagcttggctggaaatgaaagcaaaagctcgaacggatattcattatttcggactgctgtggctggcctttaaaacccgtgggcgatttgccacgaatcgccatttcggtgccagtgctgtgctggcaagccactatgacaccgtcgatgtttcggagtttaccgataagatgaaattaaacgaacgcatcacactggataaatacattccctactcttcccacattcatcctcacatcataagaaatcgcgccggtgatttagtcgctacctgggaattgggcggtactgtttttgaatgtgaggatgaacatcatctgacattgctagcaagccaccttaacaacctgatccgctcgtatgaagggctacctatgaccttctatatccaccgcatacgggagaaatatcaggatggctttgaggccaattcgggcattcccttttcggatgaagtcacggaacgctattaccagccactaaaagagaaaccactctggcggcatcggctttttttcaccgtctgttatgccccgttctccacactagagaaaaaagtcatgaagacgcagccagccggaaaaaggaaagaggcgctggatgatgctctgaaagggatactggaacaccatgaagccatccacaccaccctgtcacgttacgtggcaaagccattgggcctctatgaggaaaaaggtcgggtttactcttcgcaactggctttctaccatcgcctgattagcggcaaatggcagaacgtggcggtgacatgcacaccgttttatcacacactcagcacgccggatgtgttcttcaccaccgataccgccgaatgtcagacggtcggcggttcccacttcttccgcagtctggaaattaaagactattcaccggagacctataccggcctgctcgatgcgctgctgtatgccgaaagcgagtatgtactgacgcagtcttttacctgtatggcacgggatgaagcgcaaaatcatatccgactggcggaaaaacggctgaattcaaccgacgatgacgccatttcacagcgtgaggaattgatcatcttacgcgatctgctccagtccgggcatgtatcttgcggcaagtatcacttctccctgctgctctcctccaccagcgccgatcaagtggtaaaggagactaatgcgctggcccagccttttaacgatctcggcatcatgacatccctgtctacgttgtcgttacctgccgcctatctggctcaactccccggcgtctactcgctgcgaccacgtctggtggtggtcagtagccagaactacgcagatatggggagtctgcataactttcatcctcacaagcgtaatggcaatccgtggggtgaggctatcgccatcctgaaatctcccggtggtggcggttattatctgaacttgcatgacagtcaggcaggacggaatgacttcaatgagaaaacgccggggaatactgccatcatcggtaaaacaggttcaggaaagaccctgctgatgacgatgatgaaacagttgacgcagaagtaccgcaatccggcaacattttccgcctctgccaccatcaaacggctgaccaccgtttactttgataaagacagagcagcggagatgtcgatccgccagatgggaggtcgctatttccgtatccggaccggtatccctaccggattcaacccattttcacttgctcctactcgacgaaatatcagctttatcaagcggctgatccgcatgctgtgccgtcgtggcggtaagccactcgatccccgcgatgaagagcgtatcagcactgcggtggataccattatgctggactacccgccggaatatcgccgttatggtattacccggttgctggaagtgttgcccgaaccaccgaccaaagaagctcgaactaacggtctgcgtatacgcctgaaacagtgggcgcagggcggtgaattcggctgggtgttcgataacgaggaggacacgttcaacatcagcaatattgataactttggtatcgacggcacggaattcctggatgatgacgacatacgtgggccgatcaccttttacctgctgtaccgcgtcaccagcctgctggatggtcgccgactggtgatgttcatggatgagttctggaaatggctagctgatgtcgagttttctaaattctccctcaatatgctcaaggtgatccgcaagctgaacggcatttttatccccgccacccagtcgcccgatgaaatagtcaggcatcccatcgctccggcgattattgagcagtgcagcactcaaatctttctcgccaatcccaaggccagccgtgcagattacgtggagaaaatgaaagtcccggaaaacgtttacgatgttgttcgcaaccttgatcccggcgagcactatatggttgtcctgaaaacaccactgcgtgctggtgaaacgcgcccgtttgtcgccatggcaaaaatggatttatcgggcctcgggaacgtcaccaaaatcctgagcggcagtgaagacaacctgaaaatatttgatgccatttatcaggaaggcatgtcacccagcgactggaaagaaacgtttcttaagcaggcaatctga

SEQ ID NO: 80819 - DNA, 276 bp, Citrobacter koseri
atgcaaaaacgtaaatactggcctgcgttttcttccctgttgatatcaacccaaacgctggcagccgggagcggatttaataaagccaacgatacactgagtaatacctccaccggcttgctcggactggccgccgtcacgatcacgctggcaaccatgtgggtgggttacaaagtgctgtttgacggtaaaagtttgcatgacatgcgcaacgtcattatcggagccatcctgattgtcggcgcatcgggctttggtgcttattgggcatcctag

SEQ ID NO: 80820 - DNA, 666 bp, Citrobacter koseri
atgctttcacccactgcttttctggcggcggtcatgcagtgtgccgccaccattcacccatccaccgcatttgatgtagctaaagtggaatcaagctttaatccttacgcagtcgctgagattgtgccgaaggaagaaagagcgcccgatagcgtaggcgtcatttctcatcagcccaccagcaagcaaattgccatcaacatcatcaagcgggtagcagcaaaaggtcgacgctattcggtcgggctgatgcaaatcaccagcaccaacttccgacattacgccgtgacggctcatgacttgctagacccctgcaccaatctgtccgttttcgagcgcatccttaccgactgctaccagcgaggtggcacgctgaaaagagcacttagttgttactattccggcaatttcgatacgggtcagcagccagaatctgcctttaaccaaaccagttatatccagcgtattggctatgaggtcccgtcaatgcgggaagatctcaagcgtagtaccaccagccaatccacttcagatgttcattatccgcccaccgtcctgcgcggtgagcttaccgataaaaccacaccagttttgacctccttgcactatcccgacgccatcattcgtggcgatgtatccctacctgtaattaatgactgtaattaa

SEQ ID NO: 80821 - DNA, 222 bp, Citrobacter koseri
atgagaaaacctacctatcacgtgtttgtcacgcaggaaagccaatccgataccagcagagagaaaaacacctactggacaaaagtcggcgtagcgttcgctcataacggcaaacctgggtttaacatcgtactgacacccggtattgccgtctccggtaagttggtactcttggaaccgagagacgatagcgacataccgcaggccccccagcacgattaa

SEQ ID NO: 80822 - DNA, 1881 bp, Citrobacter koseri
atgagatcaaagttactaaatatctttgttaagaatataggatgtatcgggccggaaggagttcaggttaagcttgatgatatactttgtcttgttggaccaaataactctgggaagacaactatactcagagcttatgaactcgcatttaaccctagttctttcaatatcgctaatgacagatgtaattgggccacaacagagcagtcctctgaagttatccttgatatccatattcctgagggaatgggaaatgtggatgagaaatggaaaattattgaaaatgaaaagagaatagttagaagtttatggacgtgggatgaattaggcaagcctgtaagaaaaacatgggatccacagttaggtgattgggctgctgatggaaaagcaggaggtgcagataatgtttttaaatctcgtctaccaagacctatgcgtatcaaatcccttgatgatgctgtaacttcagaagatatattgcttacccttgctttgagcccattagtaaaagaactaaaaacacttgagagtgataaggactcacaaatatcaaaagataaatcagccttggccgcaacagtaaatgccctagctgagccacaccagaaaagattatccagtatttctcagcagatacaaacgggattccagagtatatttccagggttaggtgtacaacttcatgttgaaatgacgcctcctgaactgaaaattgaaaatctgttaaaacaaggttctggactattgattgaggaagcagcaggtcaatcgcggatcggtcaacaaggaacgggagcaagacgggcattattttgggctatgttgcaagttcacaatgagatcagtcgacaaaccgaaaaacgagaagttcttcttaaatccttgaaggatcaactgaagaaagaatctaagaaagaagccgacagcgaagaagcaaaattacttaagcagcaaatcaatgctattgaaaatggagatcctgtgcctgacgatgcagaagatcctgcattacctgggtatattcttttgatggatgagccagagaatgcactacacccaatggctgctagagctgcacaatcacatctttatgctctcgggaaacatcctgattggcaagtattattgactacacactcaccttactttatcaatccattggaagaccacacgacaattgctcgtatgcagaggtcaactgatggtaaatcactctcaccacgattgtatattgctgacgaggcaaatttctctcctaccgagaaagataatctacaagcattacaacttactgatataggctttgctgaaatattttttggaagttatccgattgttgtagaaggagatactgaacatgcagccttcatttctgcaattgtaaaatcacaacatgaaatggcggggaaagttagtattatccgtgctcggggtaaagcagttcttgtaccactaataaaaatgttacgccacttcaaaaccaattttgggattgtccatgatattgattggccgtacaaaaaggatggttctggaaatggaatgtggacaataaatacaacaatccgtaacgagataataaaatgtaggggaaatggtcaaacagtctatcatcgctggagtatccccgactttgaacgttttctgggaggggaagagcttgggaaagataaaccttacacagctttcaaacgaatatcatccgatgaaaaactgaaagaaagagtacaggatcttatatcaagtttatttgaagggggtaattacgatccgattggatatgaccctgatgatgaatttatttctcagattatggcggatttaacagattgggcaaagggaaataatcagggggataatatccgtattataggagtgtga

SEQ ID NO: 80823 - DNA, 300 bp, Citrobacter koseri
atgaacctttcagcattaaaaaaagcattgcaaccaaaactgcatgaaactgtaattgatggtattacagtttatattcaccgacccactattaaagatgctaataagtgtacaagtattgaggcggtattagtttattgtgtaaaagatgagaatggtaaagctattttcacatttgaagatgaagaagaactcattaacgttaatgaaatcgatcaagtagtagctaatgaaatctacattaaagtacttggactaatcacagttgaagatgaagcagaatctattgaaaaaaaataa

SEQ ID NO: 80824 - DNA, 357 bp, Citrobacter koseri
atgctacacaagcgtggtctttcccttgaagatttaagcaatattgatcccgaccttttcaatgccttgtatatctatgacaccgttatagaacctaatggtgcaaagattgacatgattaaacatgccaatctatgcaacctgattctaatgacttctcaatctatcagtacagaaggacgtaagaaagcaaaggtaaaagattgggactttctggatcttcttagtgatagttcgttaactgtgcgtgagaaagcattaaaaagggaagaagaagaactggagaacaatagaaataatattaaagctattggagacatgattaagaaacaggcgggtaaaaatggcaaaaaataa

SEQ ID NO: 80825 - DNA, 780 bp, Citrobacter koseri
  misc_feature (751)..(760): n is a, c, g, or t
atggcaaaaaataagaagatcgtagtagaggttgatggcgatactactggtttacagaaaaaattaaatcaggccgaagatagtattggtaagtttggtaaaaaagctggtggcagtatgggtaatgccgcaagttcgattagttctggtatcgggcgtatcagtggtggttttgctggtttagtaggtatagctggtattgccactactgctattacaggactggcattaaaactgaatgacagcgtaagagaactaaaccaactttctaaacagtccggtatgactgtatccgacatacagaagctaaataagacctttcgcgaaagtggattaggtatggaaaagctattggacattaaccaggatgtaaaagataagatgggagagggattcgccacaggtggcggtgaattcgctacaactattaaagagattggcggcaatttagaagaatacacgcagtacctcaataaacctaatggcggtattgaagcgacattacatctaatggatgcaatgactaaagccggtaaatcatccagtgaaattacatttgcattagaggcaataggtagtgatgcctcccgcctttatactcgctatcaggaattgggaagtgccgccgcagtactcaatgatatgcaatcacagaccgcagccgttacggatgatacagccgctgcatttttgcaatttgataagaatttagattcaatgtctactactggtcaaacctttctctatgacnnnnnnnnnngaatgatctatatgatttag

SEQ ID NO: 80826 - DNA, 1383 bp, Citrobacter koseri
atgcagatgttatatcgtggtgccgataactttctaatgggtggtaaggggtttattcccgatacactaaagaaaatgatgggtaaagattcattagattctgctttcatttctggatcggttgaaaatgattttgttaacgcatccagagcaggatatgaagcaaataaagaccgctttaagtcaaaagctaatacaagtgtaccaactcgcagaggctgggtagatccaaaagaatcagagaaagcactaaaggcacagcaagccgcagcacgtaaggcagaagcagaagccgctaaagcagcagcaaagcgtatacaggccgaacgagcgttagaagtggcattatcacaagtcgcagagaacgcaggggagcaacgcctacaggtgtttgatcgtcagcaaaaggaactactcaaaactattcaggatactgctaaaactctcggtaagagtaccgcagagattgaagcaatgttagagcgggctaaacaggctggtaaacgtgcccgtgatgaattgatcaattccatgattgggtattcaaatccaaatcaggacttaattgatgcgaataatattgcaggtatggggatcaatcaggaacaaagtaactttcttgccaatcagcaaaaccagcgtttaggcaataacccgtttgcaacggacaatacacaacaactattagatgaaaactcgcaacgcgagcaacttgaattacaaatcaatgaaaagctactacaaagtactgaggaatttgaaaagcgtaagcaggaaatccagacacgttacgcagcacaggcgatgagtattgcacagcaaaatactcaggctcaaatgtcagtactggcaggtgcggcgggtgatatgggtactattctggaaggtgtatttggggaaggtaataaagccgccgcagccgctttcgccgttcagcgtggtatcaatatggctaaaatcatgatgaacattcaggtcgccttaagtgaggctatggctacaccattcccggcaaatattgccaattatgcacaggttgccagtatgggagcacagctcattggtgcagctaagggtatcaacattcagggacaggcacatagtggtattgaagaagtaccgggatcattaggtaaagattctacgtggattctacaggcaggtgaacgtgtcgtcagtcgtgatcaaaaccaacaactacagcaatttcttgataacaatagtagtaactccagtaatacgggtgaaacgattgtcaatgcaccattaataattcaggggaatgtagatgggggtgatgataagaaattcaatgaaatgttgaagaaacatagtcaatctgtcaatcaggcagtacgggacgcacaaaaaagaagtacataa

SEQ ID NO: 80827 - DNA, 567 bp, Citrobacter koseri
atggcaaatattacattcagtagtaagatcaaactttcagattttactttatcaagtcagtcaccccaatatagtaatcagtcatggacaggggcaagaattcaacgtagtacgggtgtacagtggtacacatttaatttcacattaaacttcaatcagcgtgatcgcggtgaagttctcgcatttattgccgaacattcacagggtaaacctttccgtatgccattaggtcatatgtcccaatacatgggaacacaaacaggtgcagtaagtgtaaaaaactctgttaatcgtggcgtatataagttcactactaatactactcagcatttagaagtgggtacgatgattcagttcagtaatcataaaaagctctatcagattgttgcaaatactggaaatgatgtatcaattttccctgcattacaggccaatatacaagccagtgaaactgtattctataacggccttgttattgaggctgttttagatgtggataatgactatcaactaccagtgacgaatttagttgcagtacagtttaagtgtacggaggtagtcagataa

SEQ ID NO: 80828 - DNA, 624 bp, Citrobacter koseri
atgaatacaggtgtttttacaaatcccgatcttcttgagtactggaatctttttagaggcggtaataaaacaaaactgacactaatggaagtgttaagtatggggattcatgttaagtgcatcgatgttattccaaaacaaattgatgcaattcactggaatgatggacttggtgaggttaatttaggtggtactccttatgtaccatttcccgatttaatcagtgattcattaccttcattcacggaggaaaaacaaatcactaatacaaatatcaatttcaagattagtaatgtatcgaacacgacacgaatacttgcacttggtggtgcttttaaagatgcgaaagtaaatatctatcttacattacttaacccggctacaggtgaagtacttgattatgatctcatgtattcgggctttattgattatattgaagcagaagccgatccaatgaatgagaagagtgaattaactgtacagctaaattccgtatataaacaattagatctacagactcgtacactttgtgctaattcagtatatcaaagctattatcccggcgatgagattatgagtttacttggtgtggtaaacagtggtcagacatggaagtataagtaa

SEQ ID NO: 80829 - DNA, 435 bp, Citrobacter koseri
atgagttttaagaagagtaaccaactatatgacatatgcaataacgcactatctacagagtataaattcggtcataacgactgcaatattatttgtctacgtgttgttgatttatattgcagtactgaatgggctgatattgctcagtacgattctgttattgcaggggtgaaacaactaaatgaattgggctttaaaagtacacaagaaataatcttacagtatgcagatgaaactcaattcccaatcgatggtgatatctggatggattcagataattcattactaatgggaattgtgtttagtagccgtcttttaggtgtaaatgaggagcatacaaaatttcaattaaacccattaaggaatgatgggaagtattacagaataaggaaagtaaaatgggatcttcaggaaatggaattcttggagcggtaa

SEQ ID NO: 80830 - DNA, 3201 bp, Citrobacter koseri
atgggatcttcaggaaatggaattcttggagcggtaataaccgccgttgccgtcgctttggcagcatggacgggcggggcatcactcgcagccgcagccgcatggggggcagcagcaggagcactatcattcgtggcatcaagtgctatggcacaacttggtactactggttatgacgatgccgccacatcattatcccgctctacatcgccagtaacgggtttacctgtattgcttggtggagaactaccacataaaaacggtgttagtggtggatcttttattcaatgcggtacagtagtcccgtggtacaacatcaaagatagtgaatctcaatatctattcaccgaacatgtagtagcgatgggcggtactgaaaagcacattgaacaaatatatattgatgatgaacctgttttagctgtacccattaaatcagatggcaaagtactaaaagaaaatatcgttgctaaatatcaaccatatctacagttggaagtacgattcggtggtaattatacgaacagtaaatcccttccattagaatatgccggatctcgctggaataataatttccgtggtgatggtgtagtaagtatcagtactgtaatcaaaaaaacgcaggattcacttgaagatagtattctaataaatgataactacgtaatgaaagtggaaatgaagggattaattattcgttccctttcagatatgacaatgaaagcaagtagtaacccaccttcacaaatctatgaagtattgactaatgctatctgggggatgggattagatcccgcattgattgatttaccgagtttccgtacagcagcacaatattgtgaagatatggagtattactctaatggatcaatgtcatataacgatacatataaacaaacggttgaggctattctacagacgttcagcggattactctatattaatgcgggtaaaatttgttgtggtattgatcgaaaatcattaccagtacacacatttaatgaatccaatattgttggaacattgaaagttacaaccagtggtaatactgattactgtaataccattgatgcgaaatatacttcagtaggtaataactatgggcaggatgtagtacgttttccgagtgatattagtacagatgatgttatccgtagtgatgggcgggtaataaccaaggcattagattttacatggatttatgataaagagcatttagcacatcttgctaatcgtgaattacttaaaatgaagtacgcacaaaaaaccattactttcactactcccgacgcatgggaattacaggtatgggactgtgttactattcaggttgatgaatttgatattaatggtaagtaccgaattgttgctaaggatatcgccacatcacaggattcattgggatacatcaatcttacatgtgttgagacaaatgatggtatctatgatggtgtagatccgggtgtatggactccagatggtagtattaatactgtgattggtgtattaccgcctggtgttcttgaagttgttcgccgtggtaatgttgtcagcggtaacattgttgacttgtcatggatggcatcacctgatgggaatttgcgtggttattatgtatactaccggaaaaatggtataagccaatggacatttgcgggtactacaaccaagtatgaaactggttttgccttatatagtctgtcaccagatgaaagctatgatttcgcggtagccgcctataacaatcttggatttgtgagtgctaaagtaactgtaaatgggataatcccacagtatgattttgctttgccgtccgtaacgggtgtacgcctcgcgaatagtacagaatcggcgtatgtcactgatgcaccggattttgatattgtatgggatgatcaaagtaacttagttgttaatggtagaccattccgggaatatttaaagtattacactattaatctctataatggcagtacatttatcaggtcttatacttcatccactaattcattcaatttgacactcgcattaaatgaacaaaagatacgtaagccaacacttgagatcattgctcagggatacagtacaggcacatattcgcagggtgtaagtattactgttgagaacaagcaatgtaaactggcaacaggttttactattggtggtggatttggaaatcttttttgtagctgggatgaaagtacagagcgtgactatgccggggcagttatccaactatccagtactgtagttaataaacaatatattagtaataagccggaatttgattcaattccaaatgttcccgatggggaatataaagttaagatgggtttctttgacgtattcgggatggataacattcaatatacggcagaacaaactattagtattaactctaagtatcaattcacagaggaagatgcggaagaaattaatactattcttgaccttgatcagaaactggaagatacactaaataatgcagtgaatgaatctaatgagtatacaaatacgcgtatagatacattaaagaatacggtagacgggaacacagcaaaaatcacaacgcttacacagactgtagcggataatgattctgcacaaacacaggcaatcttacagttgagatctcaaacagattcacagattgctactgttaaccagtccatgagtactaaagcggataagaatactgtagacagtcaatatacattgagtgtgaatgctaacggtagtgtagcgggtatgcgtttagtcgcaagtcagggtagtagtaataattcagcaatctattttgctgcgaataagtttatagttagtggtagtgatacagccactgtaggcggtacagcaccatttgcaatagttaatggtaatacctatatcaaaactgccatgatacagcagggtagcttaggtacagcttatatagccgatgctgcaataaccaacgccaagatagctaacctctctgttaacaccgctaaaattgtagatggtagtattaccaatgcaaagattggaaataccattcaaagtaataactatgtagctaatagtacaggctggcagataaataaatctggtacgttttatattaatggttctggaggtacgggacgtatggtcattagtaataacttgattcaggtttatgacaataacaatgtactccgtgtacgtatgggattatggtaa

SEQ ID NO: 80831 - DNA, 768 bp, Citrobacter koseri
  misc_feature (756)..(765): n is a, c, g, or t
atgaaatatatggaaaaaatcatttcatttctcgaagttgaagcttccgatacagcaaagtttactgctggtggaaaatggtccgtaggattcccagctgaaaataacattaaatttggtactgcgttacgtggagagtattggttgaaaataggtaacgaaaatccacagttaatatctatgggtgatgcctatctacttgttaactcacagagttatgtggtatcaagtgagccaaatctaaatcctgttgatggaaaggctctttacaaagaatcagaaaataattgcgtatactatggtggggaggatgtgataattattggtgtgggttattcgattaacaaacaaagcgcttctctattgcttgatatgctgccaaaagttattttaatgaaaggtaatacattcccttcattaatattcaaagaaaccttaaatatattggataaagaattacaaacgaaaaatgtcggttcctcaatgatcgcaaatcgtcttggtgaagtattgctaatgcaagtattacgtgaatatatacaaaatgatcagccagtagagtggttgaaaggtttgaatcattctggagtacgaatggcactagagttgatgcatggaaatatttcgaaatcatggacggtagatatgttggcaaaaaaagctggaatgtcgaggtctagttttgcaaaaaattttaaagagaaagttggagatactccgttagaatatcttctccgctggagaatgtttcttgcnnnnnnnnnntaa

SEQ ID NO: 80832 - DNA, 159 bp, Citrobacter koseri
atgtatgtagtgctaacgttatctagttcctcaatatcgtttattgatagcgataaattaattgcggaaagattatccattaattggtcagcgtttctcacaccagtaattatgctactaacagtaggtttgctgagcaaccaggataaggatacttga

SEQ ID NO: 80833 - DNA, 540 bp, Citrobacter koseri
atgcacatggatcatatcggcggactccttattgatggtgtaaaagaaagattacgcccagatttacgtattcatgtttcaacgtatgaagttaaattttgggaatcacctgatttcacacatgctcatatgccacagggatttccagatgccttacgtcaaaccgcgtgtaaatttacttcattgtatcgtaaccaacttcaactctttgacgatatccatgaaatcgccccaggaatcacagcatgtcgtacgggggggcatactccaggacatagcattgttcggttagtatcaaaaggcgagcgattgacattcgctggggatgctatttttgctgttggttttgaacacccaaactggtttaacggtttcgaacatgacccagaagaagccgcacgtgtaagggttaatttattaactgaactatccaaaacgaaagagtatcttgtagcaactcatttaccgtttccatcaataggtaaaattgcagtagaagaggatgcattccgttgggttcctatattctgggattattaa

SEQ ID NO: 80834 - DNA, 162 bp, Citrobacter koseri
atgactgaacgtgcgccgagactgtattacaacttctccattccggataacttcttcgaaactactccgtattgcactggccccaccactcagtatgcctgctatgacatgatcgtaaactgcccacccgagatcctcatcaaatttaagagtcgcagctaa

SEQ ID NO: 80835 - DNA, 492 bp, Citrobacter koseri
atggcaattgttcgcaaagttgatttgaaaggcgatattatcaaaggcgagacgattacttttaactatccggttggtactgatatcgatattatcagtccagaaggtacaaaaacatcatacacctatcccttccccgatattgatactaatacgtggttgcctggtatatggacggcaattattgaaagtcctaatgtatatggtgtacagcagtttgaagtaaccgatccgaccgcaaaagcctcagaatataatgatctcattcagatcataaaagatattgaccaaataacattagaccgtattaagggtaatggtgtcattagtcaaacaattcaaaataaatcgttaacatatgaaagtagtgaagtgttattacgtctacgctcaatctatgtaaaacgtgccaatgatttaattacagatatgaaaggactaaacgcaggtagccctattaaatcaattactacatttaacagggggcgttaa

SEQ ID NO: 80836 - DNA, 261 bp, Citrobacter koseri
atgttcagtcacaagttcatcaatatctatgctagtattgaacgttggctctatacgcgtttccatccaatggatgcttccgttttgcaaatagtttcggtgtcgaatgacttgaggaacgccagtccaaaaggcacgagactctgcgtgctgtacagtggtaagatcattagggtgaacggtaccaatgtgatcttggcttctggaggattgttctttatcgaaagaacaatttgcgatagctgcaaattgtttatttga

SEQ ID NO: 80837 - DNA, 177 bp, Citrobacter koseri
atgcattcatctaacatgtcagtgattgatgcagtggctttggctatcactgattatctaattgggggaaacaatgagtttggcgtctttagcaacaaagtacaaagatgtattaactataagtttttcagtactttcatttatcatcgcatgtacgtccttgtttttttcaggtag

SEQ ID NO: 80838 - DNA, 414 bp, Citrobacter koseri
atgacagaagaactcgtcagatggaatgtattaacagaactaatgctagaacctaaactgccttatacaatggcagaccgcattcaaattcaacaagttcttctaaatctaatacggaatgcggttgaagcaatggaaaacgtcacacatcagcgtattttaagtatcaagacaacacacaaaaacaatgttattgaaacaaatatcagtgatcttggtggcggaatggcatctctggaacaaatgtttgaaccatttattacaactaagaaacaaggaatggggatggggttagctatatctcgttcaattatcgagtcacacggaggacggctttgggctgaggatcatttgccatatgggacttcactaatttttactatcccagtggaggtggcggtcaacaatgaataa

SEQ ID NO: 80839 - DNA, 129 bp, Citrobacter koseri
atgaaaattacagtcgataatatctctgaaatgttcgagggaacaaaagaattgttaattggtggtttgataacagctattactggtgtttttctcaccaattacaaaagtgacagcaaagatttttga

SEQ ID NO: 80840 - DNA, 273 bp, Citrobacter koseri
atgataaataatagtgcattaagtaatttaaattttagtgactttgacaaacttacacacgcccaatatgtaccaactcgtcaaatttctttagatccatataaagatcttcaaacagaagttttggcaattcaaaacggaattaagagtaaagcaatggttattagtgaaatgggttatgacccggcggtagtcatggaagaaatagaaaaggaaaaaatggaaaatggaattgaaacaaactcaacaagtgagggcgatcaacttaagtaa

SEQ ID NO: 80841 - DNA, 156 bp, Citrobacter koseri
atgcatttcgttgtgctattaattcttttattatttgtgtttgagtggctccgcgaggtaaagatatgtctttatgccattgaagagtatagtcaaatttatcaagtgaagagaacctgtcaatttgatcttttaacttttgcgttatttctatag

SEQ ID NO: 80842 - DNA, 459 bp, Citrobacter koseri
atgagcaaatatcacctgagtgaagaatcgcgtgcctttagttatcaggataacggccacaagaaaagcgtcctgctgcgccagatcattgcccttaccgactttaacgacgtcaaagccggaaccactggcggctgggtagacgacgaaagcgtgctggcgcaagaaggacactgctggatttacgacgagaatgccctcgcattcgccggggcgatgatttcaggcaacgcccgcatcacccaggcctgcatcatcagagatcgcgcgcaaatcggtgataacgtctggattgatctggccgagatcagtcacggcgcccggataagcaacaacgtcaccgtgcagaattcggtcgttcgcggtgaatgtcatctgtctggcgacgctcgtattctgcaccattcggagattatcgccgcaaaaggcctaactcaggaaagcgacctgacgctgtaa

SEQ ID NO: 80843 - DNA, 1062 bp, Citrobacter koseri
atgggtatcagaaaacagccggacgggaaatggttgctggacttttacccggaaggaaaaccccagggaaaagccagcaaacgcatccgcaggacgttctccaccaaaggcgaggcgctagcctaccaaaatcacattatggaaaacgtccatgtaaagccctggcttgacggtaaagaggatcggagaaagctacgcgacttagtaaaccaatggttcgatgaacatggtgtgacgcttgacgatggcgaaaaacgtaaaggcgcaatggaatttgcgtgtcaaagcatgggtgatccgctggcgcatgaatttgatgccacaatgttttcgctttatcgcaaaaaacgtttatccggtgaaatatccagaacagcgcgtgtaaaacaagtcgcgcccagaaccatgaatttagaactggcctattttcgtgccgtgtttaatgagcttaagcgcttaggacattggaaatctgaaaaccccctgtctaacgttcgcccctttaagtctgaggaagctgaactggcttatttggaacatgatgaaatcgaacgattgttatccgaatgttcgaaaagtcgaaacgccagcacttactgggttgcatgtttatgcctgataaccggcgctcgctgggatgaagcagaatcattaacgactaagcaaatcagaaacctaaaagtcagcttttttaaaactaaagggaacaggaacagaactgttccaatcagccaggacttttatgacgctttgccgaaaccagaaaaaccagggcgtttttttacgccctgctattcggcctttcgcaaagcagtagagcgtgcggaactcgacttacctgatggccaattgtcacatgtgttacgacacactttcgccagtcactttatgatgaacggcgggaacattctggttttaaaagagatactgggacacactgacattaaaatgaccatgcgttacgcgcatttcgctccaagccatttgcaggaagctataacgctaaaccctttgggacaaaatgccccttttctgtcccctcagaactcaaacatccaataa

SEQ ID NO: 80844 - DNA, 588 bp, Citrobacter koseri
atgagcaaattcccttttgagcagatagggcacagcagcgacgtgcttgatcgagtagtagaggcttacggcttcacttcaaagctacagcttgcggaacatttcgatatggcctcaagtagcctttccgcaagatttaaacggggaatattcccggctgatatggtagttcgctgcgtagcagaaaccggggcgtctcttgagtggctatctactggccaggggaagaaattcgatgatgatcagttagacatcatgaaatttcctcgtaaaaaactagttgatggccagctctatgactctggttacgctatgttcgataaagtttttttcagggcaggagcaccactccccacagcacctttctgcgtgctagatgaaaaagcgcagtacatcctagaccagaaattttccgaggtttttgatggcgaatggttggtgaatatcgaaggaaaaaccggcatcagaacgctaacacgcatcccggtaaaaaaggtgcgcgtcagtggtgtcggcatggcttttgactgtggactggaagatatcgaaattatcggccgcgtggtcatgacgataacaaacgcataa

SEQ ID NO: 80845 - DNA, 222 bp, Citrobacter koseri
atgcgtcctaacattacaatcaccatcccagccccatatctaccacttaaagagtggtgcaaattaacgaatacagctgaaagcacagcccgtgacatgatccgggatggccgtctgcctattcgtggcaaaggagaaatgcctaaaggccgtgtggaaataaacatggccgctctgaccgttgaagcgttaagcgaatgcaatatttcgcttaacgcgtaa

SEQ ID NO: 80846 - DNA, 624 bp, Citrobacter koseri
ttgtttcgcgatgtgattcgcgagtgttggcggattaccgatcagtctctgtatttttccgaccgtttggaaaccgaacagcagatagcaaagcgctggattgataagggctttgtcattcttgatacagaaaccacaggattaggatttgatgatgaaattgtagaaatttcgatcatcgactgtgctggttacgttttgcttaatacgctggtcaagccatcgaaacctattccgggagcggcaactgcaattcacggcattacggatgaaatggttgctaatgcgccatcatggttggaaattctgccgaaagtattggagttaactagcaaaggctgggtcgcatataacgcaaaatttgatgcgcgtatgttgcggcagtctggtggggattatgaacagcatgaggatatgcgccaccctgagtgcgtaatgcagctgtacgcagattataacggtgaatgggatgttgtacgccgtaaaacccgttggaaacgactagtggatgcagcggcggcacttaaggttgatgctggagaaggtgcaccacacagagcgttgtatgactgcaatctgacgcttggtgtgatccttgctattgcagaaggtggtgcaaaatga

SEQ ID NO: 80847 - DNA, 1023 bp, Citrobacter koseri
atgcaccttaataaccgtgcgcgggatttactggataaatattcgaccgggatggcacagcagtttggtgcgcgtgataccagtcgttatttttccctgaatgatccgcaggaaaacgcgctgcgccttgcgttgctggagtccgtggagtttttgagcatgatcacctgtctggatgttgaccagctgagtggtcaggtgatctctgttggttcctctgtactgcataccggccgcagcgaaaacggccgctttgtccgtcaggtgggcgtggacggtaacgattattcgctggttgaaacagacagctgcgccgcgctgcgctgggatctgctttcggtttgggcgaacgcaggtaaggaagaaaacgagttttacaacctggtacaggcattcaccacgcaggcttttgcactggatatgctgcgcattggctttaatggtaagagccgcgcaaaaaccactgacccagaagctaacccgaacggtgaggatgtgaacgttggctggcacgagcgtatgaaaacgctgctggacggcaatcagattatgaccgatccagtggtgctcgatgaggccggggattacaagtcactggatgcaatggcgtccgatcttattaacaccaaaattccgtcacagttccgcaatgacccgcgtcttgtcgttctggttggtgccgatctggtcgctgctgaacagtaccggttgtatcaggcagcagatcgtccgactgaaaaaatcgctgcgcagatgctgggaagcaccatcgctggccgtcaggccattatcccgccgtttatgccgggtaaacgcatggtggtgacgccgctttctaacctgcacatctacacccagcgcaatacccgtatgcgtaaggcggagtttgttgaagatcgtaagcagttcgaaaacaaatacctgcgcaacgaaggttacgccattgaagtgccggaactgtatgcggctattgatgaatcggcggtgaccatcggcgcagtatctgaaccagcggagggctga

SEQ ID NO: 80848 - DNA, 435 bp, Citrobacter koseri
atgagcaaatatatttacagcccttcccataacgcgttttatctgaccgcattaaaagcagagtatgagctgtctgataactggcccgaagatggcatggaaattagcgatgatttattcatccagtacacatcaatgccaccggacgggaaggcgcgtggggccggaatggatggaatgccctgctgggtagacttacctgtaccaacaaaagaggaattactcggtgttgcagaaagcgaacggcaacaattaatcactgaggccaatgcatatatcaacagcaggcagtggcccggtaaagctgctattggccgtctgacaggcgaagaactgtcgcaatacaatctgtggctgaattaccttgatgcgctggaagctgttgatacatccagcgcacctgatattaactggcctgtacccccggaactgtag

SEQ ID NO: 80849 - DNA, 840 bp, Citrobacter koseri
atggcaaatctacccgaaaccccgcagtgggaagacggcatctaccagattgaggtctccgaccccgtactgggtgggcctgacggaatttctaaccgtcaggctaaacagctggccagccgtacttcatacctgaaacaacaggttgaaaaaggcggttcagatctcgcgaaacacatcgcagcggccgacccgcatacccagtacgcgacgaaggccagcccaacattcacgggtacgccaacagcccccacgcctgcagctaatgacaacagcaaaaagctggtgacgacagaatttgtggcgagggcgattgctgcgcttgcaggtacagccccagaaacactggatacgctgaaagagctggctgatgcccttggcaacgatccgaactttgcgaccacagtgctgaacaagctggcggagaaactggccaaagaccagaacggtgcggatattcccgataaggcagcctttcttcaaaaccttggtttgggagacgctgcaaaacgtgatgtagggacaggggcaaatcagataccagctatgaatagcttcggcaatagcctggcaacaactggctaccagaagctaccgggcgggttgataattcaatgggggttcacatcaaccggttcaacgggaaatacagttacctttcctgttgcgtttaatagctggattgctggttgcgtcggatgtgaggccggggacgatacgtcaattaaagtcgtatcagttattcctaagtcactttcgaccattaaagtttcggggcgtgtcgttggtgccagtactctggctaacacgtcggtacgctggattgctatagggtattaa

SEQ ID NO: 80850 - DNA, 498 bp, Citrobacter koseri
atgatgcgctggctgagggcgacgttatccgcattctgcgcggggtgtgacatgtactgcaccctggcggatttgcttgggcagttgccggagcagacgcttatccagctcaccaacgatgagatggacttcgattcgcccgcgacggtgaaaactgacgtggtagaccgctgtattcgcaatgttgatgagctgatcgatgcccatctgcgcggacgttataccctgccgctggcggaggtaccgacagttctgcgggacattgccatcatgctggcgcgttaccggctttacacccgtcgagcggaaggcgctgtgccggacactgtgaaggatgataacaaagaggcccggcgtcagctggaggctatccgcgacgggaaactgacgctggggctgcagtccactcaaaaagacgtgcctgagtccggtgaaatccgggcacgggcacgccgccccacctttggcgggcgcgacggcttactggagaaatactga

SEQ ID NO: 80851 - DNA, 1524 bp, Citrobacter koseri
atgaatcagctcgcgccggttatacctgacacctctggtaatgaagcacctcccgttctgctgccttatcaacaacgttgggttgctgatctatctccagtcaagtttatggagaaaagccgccgtaccggtatcacctgggcagaagcgtcggataacgtgctgattgcggcatcgtccatcgcagcgggcgggatgaatgtctattacatcggctacaaccaggatatgaccatcgaatatatccaggcgtgtgcgatgtgggcacgggtattcaactatgccgccagtgaaattgaggaaggcttctgggaagaggatgaagaagacaagcacatcaagacctacaccatcaaattccctgactccagtttccgcatcgttgcgctctccagccgtccgtctaacctgcgtggccgtcagggcgttattgtcattgatgaagctgcgttccatgaaaatctgaaagaactgctgaaagcggcaatggccatgcttatctggggcggtaaggtgcgcgttatctccacccatgatggcgataaaaatgaatttaatgttgagattaccgatatccgtgccgggcgtaaggggggcagcgtacaacgcatcacctttaaagaagccgtggcagagggattgttccgccgtgtctgtatgcgcaccgggaaggaatggtcgcaagcgtccgaacaggcgtggatggcgtcggtgtacaaattctacggtgccggtgcatccgaggaacttgattgtattccggccaacggaagcggtgcctggctgtcccgtgccctgattgaatcccggatgtccgctgatacgccggtgttacgcctgacctgcccggagggctacgagctgctgcccgacgaggtacgctggagcgagacgcaggactggcttgatacgcatctgaagcctttgctggaggcactccccgctgatgcccgctctttcatggggcgcgactttggccgcagcggtgatttgtcggtggactatcccctgttgcaactgaagaacctggtacgacgcgtgccgttcgtactggagctgcgtaacgtgccgttcaaacagcaggagcaaatcacctggtatctgatggacggtctgcccggtctgctgggtgcagcgtttgatgcccgtggtaacggtgcctatctggctgaatacgccatgcagcgctacggttccagccgggttaagcaggtgatgccaaccgaaggctggtatcgggagcatatgccgccggtcaaggctgcgctggaagacggcaacctggtggacttaccaaaggatgaagacacgctggacgatctgcgggccgttcaggtggtgaacggtgtcccccgtgtgccggagcagcgctcaaaagcaaaggctgacggtggtaaacgccacggtgactcagcgattgcagtggcgctggcgtacttcgccagccgtgaaattaacaaagggccggtgaaggcaagctcacgccgtcgtcgtcaggcggcccgtatgctggaggattactga

SEQ ID NO: 80852 - DNA, 273 bp, Citrobacter koseri
atgattacgccaaaagaagccgaaaagatgacccgagaaattgttggaaaatatatctccgattgtggctgtgaaacccctgaccatattcgcctggtattaatcaagttaatcagcatggcttcgcacgccatcgtagcaactaatggcctggatcaggccatctatgttcttcacacaaccagcgcccacctgagaaagcttcctccattatacgaactggaagttactgaagacggccacgtcaaagttctcggcgtatcacgccattga

SEQ ID NO: 80853 - DNA, 489 bp, Citrobacter koseri
atgatctccgcaccagagccgcttcatgccgggcacattcttaccccgttttgctgcggcgtggattctatggataactggctgaaacagcgggcgatgaagaaccagctttctggcgcgtctcgtacgtttgtctgctgcgacgatgctaaggtgatggcttactactcactggcttcaagcgcagtggcgacaaatactgcgcccggtcgttttcgccgcaatatgcctgacccgatcccggttgtggtgctgggccgtctggcggtggatcaatcgctgcatgggaagggcgtcggacgggcgctgatgcgggatgccgggctgcgggtgattcaggtggcggagactatcggcattcgtgggatgctggttcacgctctgtcggatgaagcgcgggagttttacctgcgggtggggttcgagccgtcgccgatagatccgatgatgttgatggtgacgttgggggatttggtggggagtgtttaa

SEQ ID NO: 80854 - DNA, 699 bp, Citrobacter koseri
atgttgtatcgagttgatgaaatactgggatatttaaatcgttgtgagcgtaccacatcaaatcagtcagatccgctagagattctggctaagaggctctccttacgcgggctgatcgtgagctttattttgttgttgttaatgctacttccattcgggatttatgcccattttcctgagggcgtgcttattcgggtgagccaaattttcttcatattgctgatgttgagttgcatattcacgttattggttgagccagcattgatgctattaggtttatttaagtggaaaacgatgacgttaacccgatttctgaaagaagtccgagaggatgaagggcatgtggcaacattagaacgctatgcagaaaaagagcttaagtatgcagaatatcaattggtcaagaaaatcacggcgaatgaaaatagaataaaatttttctttggcgagaaaacagcaatatttgcgttgctggcgttttcggttccgtttatgaaggatctttttggaagggagcttaatttgtcagcttttcgttgggaggatggtttttctggttccgttgacattttattaggatttgtttgggcattgatttttggcatgtctctgggggctgttgcattaaagttagtgactgaacgatataaatatcagttatctttactaaaacagacgctatggattaaaaaaatttag

SEQ ID NO: 80855 - DNA, 1701 bp, Citrobacter koseri
atgaagtttttaatctcacaatatattagaacgctgaaagaaagaaatgaacttgacctactgctgcctaatttgttgctatcgatgggtattgttcctctttttactacgcaaacaggcacccggcaatatggagtagatattgctgcaatcggtaaagatcctgaagatggtgtaagaaagatttttctctttgtgatcaaacagaaaaatctgggcatggccgaatgggattcaggaagaaattctatcagacaaagtttaaatgaaatttttgatgtttacataaaaaataatattttaccaaaacataaaaaattaccaaagaagataatactatctaccagcggagatatgaaagaagagctaagtcaaagctgggccggttacattgatgagcaccagccccacgagtttgatttctggggagcagctcaactagcaacacgtatagaaaaatatatgctaaacgagcatatattcactgacaatgaccgaactgatttgaggaaatcgttatcattaatttgtgaaaataattattcaagagaagatttccaccgcttattacttcgtacactacaactcaataataaaggagaaaaagtaaaacaggtcaaaagatctgaacttgagaaatcaatccgtacagcctatcttgccacaaatatactggcctattgggcaatacaagatggtaatgcaaaacaagccctctatgtatcggagcgttgcctgctatgggtatggcaccgtattcaccttgaaaaaagtccacaacaatacttctctgccattaatattatatggcaaaactatattaatatctccgcagaatacttttctaaacttcaaccctattttcacgaaaaatatcttctgtcgtcatactctaccgatagcgcattaattaatcttactatatttgaacaaataggtatactctctactatcgggctaaataatctcctcacgggtctacgatgtaatggtgatgagcagacagccagatttaataatgcaactatcattgccgagagtttatgcgcacttatcagtaataacccagcatcaggctcacctcgttttgatgaaaatgcaatagatattacactggcttttatttttctttctttaacaggggaaaaggatcgtgctggagaatggctcgaaacattgatcgtcaggctggactttgtacttaaaattggacgaaatcaccctatatcgacagattccattgatgatcttatctgcctggattgcaataatgatgacacgtatctcagagaaaaaacaacaagtacatcatggataattcctactctgatgggatgggctgtcattctggagaaagaaaaggaatataatattttactgagaggaataaaagaattctatccaaaaatctgctcccagctatggcatccaacgaacgatctttatcatcatctctactttcatcaggcgcaatacgtcacaggcgaaacagaagcgccaataacatttccggacaatatgaataattaccaggccaggatgaatgagttgaaagaaaaggatagatataatattttcacggaatcaagtgcaagaaaggccgatttaaccattctggattttatagcctacaggcatttcaggacaccagttccacctgccctttggtataatatgcagaaaaaacagaatgacagttaa

SEQ ID NO: 80856 - DNA, 1911 bp, Citrobacter koseri
atgaaggacaatattgttcaaaatatcgctcataagctttttttggcaagatccgatgtactggagcatgaactcaccgaacaggaactttcttttttactcaaagaggaatcaaaaggctattgtctaaaggacaataaattaatcttttcatcttatgaagacagagatcattacgttgtccgtcattatttttcagaaacagacagtgattgcgccgacgcggagaaaaccataatacaaactgcttttagcatctgggaaaagtctttgcgcggcgatcgttcaaccgctggcttatttctcagcttatatgaagataagatcaacgtatggcaggcgctgctcgcatctgaacgtaaccaatatgaggttacatctcttgccgatcaattcataaagcattccggaaatatagatataaacactctgtttaatttcttctccgtcatttacaataaacacaaccaatatgttggtacatttatattattagaagaacgactagccagtaactctaaaaaatgccatgagataattaataaatttcattcagatataaaacaaggaactcttcacctttataatattgccttattctcactaaaaaaagaaaactatgcacctgctattgatattctactcgatgatatagaaaaaaatgatactttactctctccacaatcattatggatccttggcagaatcgtagaagcaagcgacacggaatacaaagttgatgaaataaataaaacaattatggataacatttcatcagctataaaagtgatatcggattcagcaatacaagctgccgtgaatacagtagaaaagataccggacatgcgaaatattatcagagaattactagaatccaataatacggaggcaataaaaacactcgctcataaagtatatactaagaaacaattaacgtcgcacacagactttcctttttggatatcacgtatttgtgattctgcaacaaacaatccagaactgagtggtttaatttttcatatattttcctacctagctaaagatgaatcaaaacataatttattaactgattgcctttttataatgataaaaaacgattcggtatcacaggatcatcaggcagtggaagactttttatataaaattgtaaaataccctgatttacttaataaattatttacattaacgttaattgatgaaaatccagaaacaactattttttcgcgtttagtatccacatacctgtttgtgcacagaagtaaacatatactagagtgtagtcttgacgtcattaacaatttcacagagagagattttatttttctggtacgaagaatactgggttttatctcaaatgaagcacagctaatatcattaatattgtctttattaaaagtcaaaaactctgaaaagaaaacgtatgctcttgtaaaagcggtgattgtaaatgaaatagcaatggactatcccggctatgtggttgatgaaataaaacgctatcggaatgcactaaaaagcaaacgaagtaatattaaaaaactatatgatgaaatactgtcagttattgaaaaccatataacatctttttccacgcttccgagaataaaggaattagaaccatcttcaatgttcgcacatgcttttcaaaaggaaaagcataaagtcatggcgaaaaaacaagatctcaacaaagaggactctttagcatttaaaatagctactcatattccattgaaagcgggcgtaggttctttccattataatgattataataactctggttacagtgaaccatcctatctgcacgaatattcaagcagttattccctgcccagacgttatattatggataatgtcggttatgacatcaggcttgctcagttcagatgtgtaaaaaaggatacggtatga

SEQ ID NO: 80857 - DNA, 267 bp, Citrobacter koseri
atgttttataccagaaaaatcattctgaccagctttattgaatcaatctatgtaatttctactgtaaacatgaatatgttctgcgtgcggtgggagaggcccgataccaagtttaacgaactggctaatatatcagtgagctacacctttccagcgggttctttattttctgcgacctgccttccacaaccccgcttgctgtcaaccgctaatcgcggtatcttttacccgtacctgcaaattcaggtgccgggcttgacctcctga

SEQ ID NO: 80858 - DNA, 462 bp, Citrobacter koseri
atggctacgcccctcacccagattcacccattacttaacgttcccttcaatgccgccacggatttcaccatactggcagaacactgcaaacagttcgctgaaatcctgatcgaacacgacgatcccacgctgaaaatggcgctttgcggcaggcttaacgcctgtctgcggctgctacagccctcgttgcttgatccgatcccggatcatatggtggacaggctgaccgttgacacgctccccacccgttcaccgcgtttcgatcccgaatgtaccgaactttgccactactgccttgctctgacgcaggttctgacggggcaggggctgttaccggaaaccagaaattaccttggttgcctgctgtacgacctgatccactatttctctgatgaaattactgcgccgcgctggctgcgtaccgccgacggcgtaaagtttattgacggggtggcggcatga

SEQ ID NO: 80859 - DNA, 591 bp, Citrobacter koseri
atggctttgctgtcagaagatcgggagaaggcaagcgaagcgcgacagtgcaggctcgcaaaaatcctttttgacgcaaaaacagtttttcctttctgcgccagcagtacatgcgtagtctcccccttgccctatgctgttgtagacagcgccacgcttcacaacctgaaagaagcgcctgttatcaggacggttggttcgtttaccggtgcagtcctctgcaaacaccgggtcgcagaacatcgcgacggaggcccgggttttaacacgatacgtcctttactgcgccagcctgctggtctgaatctgcaccgcgccggaattctcccggctaacttatatctgctgataccctcagcgccttttacctttacgggctgcggcctgcattgccgacaggctttgctgccgcgtggccgtaaaactgcaccagacgataaattttcagacgctgcaccagtccagtgcgtcactttaaccgcgcagagcgggaaagtgacgcacgaaccctttttacctgcaccagaaaactcaactgcgccagcttattgctggattctgacactgccttttcaggccatttactcataa

SEQ ID NO: 80860 - DNA, 534 bp, Citrobacter koseri
atgcttacagtcgaacgaaaccgattacatccctcgcatcctctgagccatgcaagcatcagatcaattatttcggccctgaagggcgagttggcgcgtatcgaaggtgaaatggcgattcacatcaaggagcatttcagtgaattatccgagcttctgaacgcagttaaaggagttggctctgcgacagtcgccgtgctactggcagaagttccagaacttggctcactgtcacgacgagaaattagcgcccttattggggttgctccagtaaacagggattccggtacgatgcgcggtcgccgaacagtattcggagggcgagcttcagtccgtacagctctctatatgtcagccctggttgggacgaggcacaaccctgtaattaaagagttctatacacgcctggttgccgcaggaaaacctaaaaaagttgcactgacggcctgcatcagaaaattgctgaccatcctgaacgcaatgctgaaaaaaaatgaagcatgggatccgatgtatcaccagcatgcttcgtag

SEQ ID NO: 80861 - DNA, 1515 bp, Citrobacter koseri
atgcacaggaaaaaacaaaaaattctgaagccgttagcctttcttggtgtggcatttttggttggggcaattttagattgcaccatttttgttcgagatcaaaatgagcgaaacagaactacggctatcgaacttacctcagtgattgagaaaatcattgcttatgcggatgacgtgaataccagagtgcttaagctcccctatagtagtaattcctgcgaacgacagttacctgagattaggaccattattacaacgacgccttttatccgctcagtacttacaggaaatggtaataccatcacatgtcattcgttaatcggtaaattgaatgtggttgatactcaaagagagtatcagggtggtaaacttgccctgctgtccggaaatctgatacagacaaggcatcctattttattagtgagagatatacgtggctcatttttttctgtttctgccattgatggtgtgtatgttcagacagttatgcagcaacttacggagtcaggatcagtaatacaatttacgattggtaatgtaaatctgcattcagatggttcattgagctgggaatcctattccggtaaaacggttgcttttcagaaggtatcttcagacagatacccctttgatctgagtgtcagcctgaataattcgtcgattctcggtgcctggtttatgtatcaaaaaatgcatatcgtcctgatggcgctgctctttgttgttctctccggagtagtgctcttccagggcagaaagagttttagtctggatgatgacattaagcttgggattaagggtaatgagtttattgcttatggccaacgtattgttgacctcgataaaaatagcgtgtcgggaatggagattctggttcggtggattcatccaacagagggcatcattcgtcccgatctctttatacctcacgcagagcggtcagggatgattattccaatgacccgaagtttgtttgttcaggttgccagccatatcaacagctccagtgtgccagacggtttttatttttcattcaatataacagcaaaacattgcactgatatgggattgtatgatgactgcatgacttttctggaaagtacaaaagataagaacatctcccttgtactggaattaacagaaagagaaatggttcctcaaaatgaacagacactcagattgttcaaaatgctcaatgacgcgggcgtcatgatcgccattgacgactttggtactggtcattccagtctctcttatcttcataaccagcacatcaccgtactgaaactggatcagtcttttgttgccaagattaatactgatgcggtttccgggatcttgattgacagtattattgaactcgctcataacctgtccctgaaaataatcgcagaaggtatcgaaactaaagggcaatccatttatctgaaaaggaaaggcgtaaagtttgcgcaaggctatctgtacggaaaacctcaacccgtggatgagttgttgtcttcattgagaaaatga

SEQ ID NO: 80862 - DNA, 1998 bp, Citrobacter koseri
atgagtgacacaaaaagcaccccacagaaatccgggagccagataaataaggctgttttctttccttcagcaatattgatcgtccttcttgttgtctttgcggcgttgttcccggaactcgctgataaaaaattcaaactactgcagcagcaaattttcacaaatgccagctggttttacattctggcagtggcactgatcctgctcagcgtcacttttctcgggctgtcccgttacggtgacatcaaacttggccccgatcatgcccagcccgatttcagttaccactcctggtttgccatgttgttttctgccgggatgggcatcgggcttatgttcttcggggtggcagagcccgtcatgcactatctttctcccccgacaggaacccccgaaaccgtggaggcagcaaaagaggcaatgcgtctgacctttttccactggggtctgcacgcctgggcaatttatgccatcgtggcgctgatactggcctttttcagctatcggcatggcctgccattgacactccgttcagcactgtatcccattatcggcgaccgtatttatggcccggcaggtcatgctgtcgatatttttgcggtcattggtacagtgttcggtgtcgcaacctctctgggatacggcgttctgcaggttaatgccggcctgaatcatctgttcgggatccccgttaacgaaaccgttcaggtgatcctgatcgttgttattaccggactggcaaccatttctgtcgtgacaggactggataaaggcatccgtattttgtccgaactgaatctcgggctggccgttctgctgctggcgctggtgctgttcctggggccaacggtactgttgctgaaatcgtttgtcgaaaacaccggtggctatctgtctgagctggtcagcaaaacgtttaatctgtatgcctacgagccgaaatccagtagctggctgggtggctggacactgctgtactgggggtggtggctgtcatggtctcccttcgttggcatgtttattgcccgtgtttcgcgtggcagaacgatacgtgagtttgtcaccggcgtactctttgttccggccgggttcacgctgatgtggatgaccgtttttggtaacagcgcaatttatctcatcatgcttcagggggcgactgacctggcagatacggtacagcaggatgtcgccctcgcactgtttaacttccttgagcatttcccattctcaggcgtgctctcgtttatcgcgatggcgatggttattgtcttctttgtcacctcagctgactccggagcgatggtggtcgataccctggcatccggaggtgtcacaaccactccggtctggcagcgcattttttgggcggccatgatgggggcagtagcagtagcactcctgattgcgggcgggctcagcgctttacagacggtgaccatagccagtgctctgcccttctcagtgatactcctgatttccatctatggattactgaaagcgctacgccgggatttaacaaaacgtgaaagcctgagcatggccaccatcgcccccactgcagcccgtaatccgatcccctggcagcgcaggctgagaaatattgcctatctgccgaaacggtccctggtcaaaagattcatggacgacgttattgaaccagcgatggggcttgtacaggaagaactaaacaaacaggggacaaacagtcatatcagcaacgccagcgaagaccgccttcggtttgaagtggacctgggtaatgagctcgactttatctatgaggtccgtcttcgcggctataactcgccagcctttgcgctggcagcaatggacagcgatgaaattcaggcagagcagcataaatactaccgggcagatgtctatctgaaagaaggcggtcagaattatgatgttatgggttggaatcaggagcagctcattaacgacattctggaccagtacgagaagcatctgcatttcctccatctggtacgctga

SEQ ID NO: 80863 - DNA, 372 bp, Citrobacter koseri
atgaaagaaaatatttcagatttaatagagagcaacacaggctgcccgatggttagttttgtgaatctgatagctggtaaatgggcgatccccatcctctatcgtctcattttattaggcgaacctgttcgtttcagtgagttacaacgagctgtcagccctattactcagaaagaacttactcgccaactgcggcaatttgaaactcgtggattggttaacagaactgtgtttgctgaagttccaccgagagttgagtatcaaataactgagctgggcaaatcgctgcgtccgacactcgattctcttgctgagtggatgaatgccaacgcaggatcaatgagcaaaacgtccgattttcgctcaaagtag

SEQ ID NO: 80864 - DNA, 744 bp, Citrobacter koseri
atgggccgacttgatggtaaatatgcactgattactggtggcaccagcggtattggtttagagacagcacgtcaatttctggcagaaggagcgaaggttgccatcactggtcgcagtgaaaaaaaactacaagaagcaaaagaagagttaagcgacgtaattctttttcaaactgagtcaggcgatattcctcaacaagctaacctgtcggcagcgttagagaaactatggccaagacttgatatcttatatataaatgcaggggatgttacgcataagccgctggaactctgggatgagcagacttacgatgctctcatgaataccaatcttaaaggcccgtttttcctgataaaagcactgcttccaatattatccaatccgtcctccgttattgtttgtggctcagttagtgcgcatattggttttccacaaagcagtgcttacgctgcaagtaaagccgcgatactttctctggcacgaactctctccgcagagcttcacccgcgtggagtccgtgtaaatggtttaagccccggcccgactgaaacaccggcattaaacaaagttgggggcgaagtggacaaaaataaattcagagaagatatcagagcactggtacccattgggcgtttaggtacaccctatgaattagctaaggcagctgttttcctggcttctgatgaatctgcattcatggttggtactgagctactggtagatggtggagttgggaatctttag

SEQ ID NO: 80865 - DNA, 552 bp, Citrobacter koseri
atgacgcacgcccggcggaaaatccacgacgtccatgcccgcacgccgaccgacgtcaccaccgaagcgctgaagcgcatcggcgagctgtatgccatcgaggcggagatacgcggaagcccggcagaggaacgactggcggtccggaaagcgcagaccgtgccgctgatgcagtcgctgtacgactggatacaggttcagatgaaggtgctgtcacgccactcggatacggcgaaggccttcgcctacctgctgaagcagtgggacgcgctgaacctgtactgcagcaatggctgggcggaaatcgacaacaacatcgcggaaaacgcgctgcggtgtgtcgccctgggccggaagaactggctgttcgccggttcagacgcaggtggggagcgtgcagcggttctgtactcgctgatcggcacctgccggctgaacggtgtggagccggaggcgtggctgcgttacgtcatcggccacatccaggactggccggtgaaccggctgcgcgatctgctgccgtggaaggccgacttacctctgctgatttga

SEQ ID NO: 80866 - DNA, 846 bp, Citrobacter koseri
atggcacgctcactctccgacgaaaatgcccgtctccgggcgctgctggacacgcagcagcacaccatccgccagatggcggagtataaccgcctgctctcacggcgggtggcggcgtacgccagcgaaatcaaccggctgaaggcgctggtcgctaagttgcagcgcatgcagttcggcaaaagctccgaaaagctgcgtgagaaaacgcagcgccaggtgcgcgaggcagaggagcgcatcaatgccctgcaggaggagatggcagaagtgctgggcgagcagcatgacccggtactgccacagccgctgcgccagtcttccgcccgcaaaccgctgccggcctcactcccgcgcgaaacccgcacgctgtctccggatgagaccgcctgtccggcgtgcggcggcgagctcagcgcgctgggttgcgacgtatcggagcagctggagctcatcagcagcgcctttaaggtcatcgaaacgcggcggcctaagcttgcctgctgccgctgtgaccacatcgttcaggcccccatgccgtcaaaacccatcgagcgcagctatgccggccccggcctgctggcgcacatcgtcacggcgaagttcgcggagcacacgccacactatcgtcagtcggagatatacagccgtcagggcttggagttgagtcgtgccacgcagggtcgcagctcccggcggcggtgtggttcgcgtactcgccggaccgtaagggcgttcatccacagcagcatctcgccgggtacagcggtatcctgcaggcggacgcgtacgggggctacaacgccctgtacgaagacggccgcattacggaagcggcctgcatga

SEQ ID NO: 80867 - DNA, 348 bp, Citrobacter koseri
gtgatctcccttcctgcaggcgcacgtatctggctggtcgccggcgtgaccgacatgcgtaacggcttcaacggtctggcctcaagggttcagaacgtcctcaaagatgaaccatactccggccaccttttcatcttccgcggacgtcggggtgacatgataaaggtactgtgggcagaccgggacggcctgtgcctgttcaccaaacgtctggagcgtgggcgcttcgtctggccggtcacccgcgagggcaaagtgcatctgacgccggctcagctggcgatgctgctggaaggcattaactggaagcacccgcagcggacggaacgccctggcctgcgcatatga

SEQ ID NO: 80868 - DNA, 300 bp, Citrobacter koseri
atgatgccgggcgtcagcgtggcgcagcttgcccgcgaaaatgacatcaatgacaatctgctgttcaactggcgccggctgtatcagctggggctgttggggactccggccaatacgccagcactgttccccgtgacgctgaccgctgccgaaagaccggtgagcgcgctgcccccctctgcggaagcgtctccctgctgcgaactggttctgcccgccggtacgctgcgtatccgcgggacactcacgccggaacttctgcagatgcttatccgggaaatgcagggaggtcagcggtga

SEQ ID NO: 80869 - DNA, 1494 bp, Citrobacter koseri
atgacatcgatactggaaaaaatcggtaaggcaattgactgctcacgccgcgcatctgatctggtgatcacggaagatcagcaaacaaccacccggaaactgttcatttccggaaccatggataatgacatccttcagttatggggagaagtgatcgatactgatgctgaaaaccttcggatcacctttgttgatgaaagtcgggatgatatccaccccgcacagggtgtccccggtcagaagcactttatcaccataatcagcgatgagatccccgggatcctgcgactcttcacccttgaagggtggcgcacgtttttactccaggatcccaggcttcgtcagtatcaccgtatctacgccctgtttgtcaatgaatcgtttgaaacacaacagtggaaggttgtgccatggaaacagatgcagccggaggcaagtgaaatcaacgtccccgtacggacagtctccctcacaaaaagtattatcaggtgtttttcaaccgattttcttcctccggataccattgccccctggctcctgatatccggtgataaaatgaccgacgaaccaatgaagctctgggcgtcgctcgcctgccgggagttgttgaagtgtttcgtcaatgagcttttttccgccgaaataaaaaaagtcggattgtccggaaaaccaccacggaaaatccctttcggggaagaacatgcagctctgcccgcctttgatgtcattcaggaaacggcaaaatggatttttctggaaggggacgaaattgagcttaaacatacctttctgtccagcgaactggccagagaatggccggagggtatcacgttctgtgaaggcattgtgtaccggctcccccctgcgctagagtcagccaggctgctctacaaggcccatatccggacggggggaaaagacaccctgaaatcgctggccgatttgcgaaaaagcctagcggaggagacccagaaaattctacagcagtcgcgggatctggcctccgcgttgtggaaagatatggccctggttatcagcacgctggttcttcgttacagtctggagtctctgaaggcaagtggtccgcaaaaagtgtatgccctggcattttgtgcactggccctatatatcgccatctcatacgggatgtcggtctatatcaacagacattccctttcactgttgggaaaaaacagaaccacttggagaaataagttatatggttttctggatgaacaggattatcaggagctggcgggccttcccgttaatgccgcaatgcagtcatattgccgggttgagcgaataacgtcggtcatcgtactcattctggtcacgctattactcacagcagcagcaagtgaattctggtcgatcagtacgctcttgcagtctggctacacctgggttatgagtgcgctacagtttctgactcccccgtgggtccaatgcggaccgaacggggttcttgtgcatcctaccgggctgaaatga

SEQ ID NO: 80870 - DNA, 744 bp, Citrobacter koseri
atgggaatcgcacttgttaccggtggtagtcgcggtattggtcgggcaaccgcgctgcagttagcgcaagagggttacacggtcgccgtgaattttcatcacaatattcgtgcggcaaccgaagtggtgaacaacatcaccgcttcaggtggtaaagcatttgctctgcgtgcggatatcagtgatgaaagccaggtggtggcgatgtttgactctattgaccgcgaaggtgagccgctgactgcgctggtgaataatgccgggattttgtttgaacagagcacggtggaaagcctaaccgctgagcgaattaatcgcgtactggcgaccaatgttaccggctattttctgtgctgtcgggaagcgatgaagcgcatgtcgttcaaacacggagggcaaggcggggcaattgtaaatgtttcttcggcggcatcacggcttggcgccccttttgaatatgttgattacgcagcctcaaaaggcgcagtggatacgctcacaaccggcctggcgttggaggtcgcggcgcaagggatccgcgtgaactgtgtacggcccggtcttatctacactgaaatgcacgcgtcaggcggcgagccgggaagggtcgatcgcgtgaaatccatgttacctatgcagcgcggcggacaaccggaggaggtcgcgcaggcgattacctggttgctgagcgggaaggcgtcttacgtgacgggtagttttctggaactggcgggcgggaagtaa

SEQ ID NO: 80871 - DNA, 495 bp, Citrobacter koseri
atgaacattgaagattttttaatcgaattaaagaagatgatggacgattcaggttatcccatagaagattccatcaagaactcattcattgaaagtataacaaaaagaaatccagagattaaaacttctccaattctcgaacaattatgtgatgaagtatgcatactattttctaatcaaccagattacgtaacgttcttagaaacaatggatgggttcgagtatagcggattaagaatttttagcttgtcaattccagaaccattagttaaaaatttatttgttattaacgaattttatagaaacaactatgactatataaatcctgaccttaaggaacgattagttattggtgacgacagcatttcattattcacctatgatactaaagcaaactgttttgaaatcagagataatattggaacagacaatgtttttggttcattcaattatttctctgactttttgaatgaaatattagataccgtacggtaa

SEQ ID NO: 80872 - DNA, 246 bp, Citrobacter koseri
atggtaaacaatactgaactgaacatcttgaaattactagcatcaagagatgatgtaaattggacatggtataatcttgatcgcacaatgacccgcaggaatatggatggggtgggtaacgtagccagactcgtggataacctatccaaagcgggtttagtcgacatagtaacaagaacaccgtcaggtatggattattaccgcgtatctatccagggccataagttgctaaacgaaatgagttaa

SEQ ID NO: 80873 - DNA, 132 bp, Citrobacter koseri
atgttgacaaattctatatttaacgcccaacctgcgatatttccgaaatatatccacattcaaaaaatcgtaccatatggaaactttatggttatttttccgccacgttttcagcataaaagcctgatataa

SEQ ID NO: 80874 - DNA, 636 bp, Citrobacter koseri
atgcctcaacgaattcagcaaatccaaagcatcgtggctcaaagaggaatcgagcatcttgttcatttcactcgggtcgataacttagcaagcataatgcaaaatggcatcatcccaattgcaaacaccgcccaaaatcaaattaatccagtcattaatgatccttatagatgggatggacatacaaatgcgtcatgtctatcaataacgcgaccgaaccaccatatgttttacaggttacgttgcgataaccctcaaactgaatgggttgttctacttttgcgtccagctttactttgggaaaaaccatgtgcattttgttgccacaatgctgctgatggaacaatgagtagccaacccctagatcagcttcaagatactgccgcactctcaggaatgtttgatgaaatgccagcgttacaaactcgacaagagcaacgcttgctgccctacgacactacagatgcgcaagcagaagtgttagtatttgatacgattgagccacattatattgttggcgcagcattctgcaaacaagcggtaaaagcagattatgaaaatctgcttttgggaagaaatgtatgtttgaaccaagtagggggcggtttctttgcttctcgctcattcgttcgataa

SEQ ID NO: 80875 - DNA, 708 bp, Citrobacter koseri
atggcacaaagaccagtatacgttcctgttgttgaacaatcactcttcgttaaaaccgaacttgtggaattcaagtggtttccgggcatgtcagtttcacagaaacagaagtctatcgactctcttcatgaagcagccaaaacaaatctgccaaatgttgacaaaattcttgagatttccagcaagtcgcgtgacagtctcggtattgcattgagtgcttttaacctgtcttttactactctgaaacaccaacgcacattaactatcgaatgtgcgtttcaaggtagcaaagtcttccaacgaggggggccatataccgacatgtttgacatgacccctcgcgaagccaaaaaggacaagcgtttattgacctctggcagactaaccggattcaagttttttggtaaagaatgggaactggagccacgtactgcattttatgattggctgtacataagtgcattgaaaaaacgtaccgagctagcagagcaactaattgaatattcagcatttaccgacatagagttcaaccctgagcgctcgataaattgccaagcatattctgcggcattatatgtttcattgtacaaacaaggcattcttgatgatgccattgcatctaaagagagtttcctagaaacgatcaaaagtgcatcaataagtaatgctcttcaagatgaaacaactcaatcgggttttgggttttga

SEQ ID NO: 80876 - DNA, 207 bp, Citrobacter koseri
atgcacatgaaactattcgattcgaaaggtctgccacttatggcaatgagccttgatagccgatctgataattggctgaacctgtcagccattgcgagatatttcgacgttccacgcagcacttttttgcagcgggtgaatgattacggttgggaatcagcacttgctcattatgagcagcatcgaaagactaaactgaaacattga

SEQ ID NO: 80877 - DNA, 1041 bp, Citrobacter koseri
atggctattaaatcatttgattatgttgactacagcaaggtgtttcgcactcaggttccgcagagtaatttactactgacccacctcaatgtatttgcagaccgtcagatcgcggattcccacaaagttagtgtggatcgcatccaagaatctgccattggtgtggacgctccattgatgcgcttttccagtgagtgggggacgatcgagaagccgacagcaggatcgtatctgtatgagttgccttgggcgggtgtcactgaccgagtgacctcagcagacatcaaaggattcagacgtgccgggagtacgttggagcagtctcttgatgagattgaggccaacaagtttcttcagatgcgtgctaaattcgaacgctctcgcgaatatgcttactggcaggcgctgatttttaacaaggtcgatgcattcggcactcagcaaccagaaataaactggtctgtagagttctcactggaccagcaaactgctgaccttcatcagggggttagtgatgatccgatgcgcgacattgacgatcaggttagtgccacaaaagcactgatggggggtctgactcaatacctgcgtggctgggttctgctgtgtggatctgatgcctaccgtgctgtgcgatatcatccgcaaatccgcgaactcctggtctattcaaacggtctggttggttctgatgtgctgttcccgtctgatgttctgccgggcttcagttcctttatgttgggttctgtacgcctgatcgagtgctcagattctgccttcactggtgtgaaaagtgaccaagcatttttagttcctgtatttggcaatgctccggttgagcagagtttgcctatgggacgcttcattggtccatgtgctcgccatcttgaaatctccgcttctggtgatgttgaagattggtatgctttccgcagctatgatgaacttctgaaccggaatttatatagtgaatacagcttgttagtctataattttagacctgatttgatcaccagaatgactctggttccggtcgagtaa

SEQ ID NO: 80878 - DNA, 351 bp, Citrobacter koseri
atgaaactggatgattatccaaaaacgtataacaacgtggtgaagaattcggcaactgcaaattttgaccgcagaacgattatattatcgacactcgcacaggctgtggagccaggttccgtggtgacctctaccggaacgctttacacctctgggactgatgcgcttctgtgcctctcctacgctgaagcaggttctgatgttcctgtcattgtggctgaccgccttatttacgtgtacccagaagcaatccgcgccgtaatgggttcagcaacaaatgcagcactagcagcattgaccgctaacggaaacattcgcctgacctatgacgatgttgtcatcgtagaataa

SEQ ID NO: 80879 - DNA, 438 bp, Citrobacter koseri
atgaaccttgattacatcttttacctgcccgtggtctggctggcgcttcgtcacgtcctgatcggtgggtttatcctactctggaaacataacaatatgaataacattgaagcaatccgcgcaagtatcctggaagcaatgatcgcaggaacagacaaaccggaagatctgaacaaatccgctgaggacacattggcggaggcggtgcagagttacctgactgcttccactgcaacagcccgtgaaccagccaagaaagctggaaaagccatcaaagagaaggggatcgcactctgccatcaggcccaaggttatagcgctaatcagcgtccggtcagtctcatgatgaaggcaaaccttgatgagctaacacctgaacaacgcgctgctcttgagcgtctgggctacattatcaatcaggagggaaataatatataa

SEQ ID NO: 80880 - DNA, 477 bp, Citrobacter koseri
ttgtgtgaacacgttagcggtgaactgaccgcagatgaagaacaaaagctatcccgcctgttctccattctagagaaaccgatatataaatcccggtccaaaccatccgacttggaaacacaacgtaaagcatgtttgctattgaatcgtgggttttcaccgcaaattgtcgctaatagactagatcttccgtttgctgaagtctggaggctcgcacgtcaaaaacaagcggtgacctgggcaatgatgacaccgacgaccagaacacagtttattgctgaaatgtggtcacatcggatgcacccggaacagatccgcaagcgttgtgatggtctgtcatacgtcagccttcgatattaccttcacaatgcagggatcaccgacgctgaaatgctggggtacttccccgacgtgttcgcaaatatctgcaaactcccgacagtgaagaagaagcgcattaagcgcaaatccaaataa

SEQ ID NO: 80881 - DNA, 1068 bp, Citrobacter koseri
atgaccgagacagtagaagttaagcctaattttgaccaagccgccagcccgttaaaaggtatcaaaaacatcattacaccatccggagttgtgatgcgtgtcgctgctgttgacctacagtggttcaatcacttttacaccttcgaggcgcagggcaagaagtgttaccagagcattaaaacaatagctaaggagatgggccgagccgtctcagtagcacaggagaggatcgacaaactgcaagcgctgggccttctggaagtaggtaaagagccattcaaggacggttggcgcaataggtacacctgtacgccgattgatatcatcctgtctcgcatgactgatgcaccagtgacaccccaagataagccgctgaaaaaatcacaactcaattccttgctgaagaagtccggacaagttgatccccatgcagttaaccgtgggatcaagatgatggcaaaaactatcgcaaatcgtgatctctctgatgaagaggtgatgcaatttgcctttcagatcgcgactgagaaattagccgcgcttgggtggaatattgaaacaatcattgaggagaaaaatgatgaagacgaacagcaacctgttactgatgcccctgagactgccgcgcctgttgctggacaaaccggatctttacctcctgtggatgctggtgatgatgttggcctatccactgatgatgatgcgatgaatcagataacgatcttcgatgaagatggtgtggttactgaggagtttatcaattccctgagcggtgacgctgcccctaatcgtaatactgacggtacgttgcagagtatcaggtacgtttattgggttgctcgacattcacaagatgaacgtgacggcatacctgtacggacacgtgaggaatatatggcagaagccaaaccagaatacttcccttttcacttactgcctgatgatgtacccgcgcctataacagaaccagcgctagcaatgcagcaggttaatgggtctgatgtggaccacattaactgtgaagatagtgaagaaacacaggaagaagagtttgaagctccgttttaa

SEQ ID NO: 80882 - DNA, 393 bp, Citrobacter koseri
atggaaatcatccaaggcaaagacggctttaacgagatggcaacaggaattctggtgaaactgtttgcgaactatccgttttactcatatttcgacttttcagacttcggctggaagcccaggggagacagaactcagattgacctgttgtgctacacgctccaggcgctcactgatatgggttatacggagattatttcttcaaccgacatggacaccgccgccaagttaacacctcgtggtttgaatttacttcaacagcaggctccaggcgtaggcgataccgtgattaacattctgaaagctggggctgaaaaaacaggtggtgcagtagtaggttcaacagtaagcgccttgattgattggatttttaaaggcaataaaagccgttaa

SEQ ID NO: 80883 - DNA, 822 bp, Citrobacter koseri
atgttgtacttaatctattcagctatggaggctgttttgaagaagatttttgcgttacctcttatgttcttttccttctcgtccttctctgagggcgttcagtctacagatgttcaaccataccctgagtacctagcgatctatatcaaaagggtggttacagccagttgtgagcaagtgcttgcggatgatggaaagaactccattgagagatccatcaagtccataagcgctagcgccaccaaaggaatgactaccgacacggaaagctactacgctgtttacaattcaatcgtcattggcgctgagatgggtgacaagctaaaaaatgctaagaaacagaaaatgattctggctacaaaagacaaaattgggatagatagttgtggtggtgttggtgcctatatattgatacaaaaggattttagcaagctgatatttgacggactaatgccttcagcacgatttcaagttgccgatggtaaacctaaagtgcccgcttctgatgagggcatttaccgtacaacagcaaaaactctggctgaactgtatagtgccaatgaagttgcggctgatgacaaaattggtggtcgtaacgtcgaaatcacaggaattgttcaggatataactaaaaatttcacggatgatgtagttcttaaacttgaaagcggtaatcgattcatgcctgtgagtttaagcatggaaggatcagaaaagccgcaggcatcgaaacttaggaaggggcagaagatcgttgtaacgtgcggcaagatgcaactattcatcggtgcgccatcgggtagcaactgtaaatttaactga

SEQ ID NO: 80884 - DNA, 210 bp, Citrobacter koseri
atgagaattattcttttgattggcagtatgttactgacttttaatgctacagcaggcaaaatcaccatgagtaatcctgacgaacaggagttgcagggcggaaagcggctttgtacttacgaaaacagcatttacctgtttacgctggtgactcgctcgcagtcttgccccttttcaaagacgttcgacacctcggacaatgaaaaataa

SEQ ID NO: 80885 - DNA, 267 bp, Citrobacter koseri
atgactatttgttacaagcagcaccgctacagccttaaattcattaacttaccggacgatcagggtggtgagggtcgccataaatgctgtggctgcgcttatgaacaaggctacaatgcgggactgactcgctcgggacaaccttgggttgatctctctgcccttcctgatagccaggcgggaactgttcgccataaaagcccgcaagctgcatttgcagagggttatcgtgatggtgtgcgtgaatcttaccgtcacgctggttaa

SEQ ID NO: 80886 - DNA, 1017 bp, Citrobacter koseri
atggataaacgttaccaggtttttgtaagttcaacttttacggatttagaagaagaacggaaacacgttatacagactctgatggaaatggattgcatcccagcaggaatggagttgttcccagcaatcgatgaaggtcaatgggagttcataaaaaaagtaattgatgactgtgattattatctgctgatcattggtggacgctatggctctgtcgcagaagatggtttaagttacaccgaaaaggaattcgattacgcagtttcaaaaggtttacgcgtcgtcgttttggtacatgagaatcccgaaagtctccctttagccaaatcggaaaaagattctgaactcagggaaaaactaaaatccttcatcgataaagcgtcaacaggaaggttgcgtaaatcatggtccactgccagtgatcttccggggttggtcgcattaagtatgagtaagacaattaagacttatcctgctacaggctgggtgcgagcaaatcagacgacaaaagaatccgatttaaggtcgctcattgaattgcagaaggaaaatgaaaaaattaaattagaaatcaatcaattaaaagcaagagataccaaagcagaagatctcaaccttgctgattttgaaagtgttttcgatttcaaatgccaatcttcctatgtacagaatggccgtaacagatactcaacatgggatacaaggatgtcttggaaagagatttttaatatcatctctccctacctaattcaacatctcaacgaatctgttgtgtcacggaatttgggcgatgccgctaaagaaaaagaaaggcaaagtggaagctcaccaaagatcacatcgcaagatttaaaaacgatctcaatccaattacaggcatacgggctaatcaaagttgaaaatttaaggacaacatcaggaggatatgacttattttggactttaaccaaacgtggtcacgatgaaatggtgaaaatccgaacgatcaagaaaacaattccagtaacagcagaataa

SEQ ID NO: 80887 - DNA, 1356 bp, Citrobacter koseri
atgggccacagaaccatacgtcacaccatcacacgcaacgggatttattacgtccgtttccgactgcccggtaataaatattttcgcaagtctctggagactgacagccacacccaggctcagttgctcatgtcttttgcttctcctgtaattcctctggttcaacgtggaatcatccaaccggatcacttcggtaagcgtctttctgagtatggcaatcgcttgaaacagcaaaaagaacgctggattgcacatcagttcctcaatgacgcgcagcacaatatccagccgatggtagttcaggaataccgggagattgttaccccggcagtagttactaagccacaaaagcaagacgaaccaaaagaagtgctaacgctggctggcgcgtggaatatgtacaaaaaggagaaggctcagaactggacgaaggtaatctcacaggccaatgaacgctttatggaagtgctgatgattgtcttgggtgcatctacagacgtaaccacgatcaccaagcaagacattaagcaggtgatggaaattgttgaaaacttgcctaagcgtgttgtgcagccttatcggtcgatgactgttcagcaactaatcgagtgtgatgatatcccgcctgaagatttggtaggcgctgagtctatccacaagcatttgaagatttataaatcgctgttcaaaaccttcctgactgacaataaagatattctggagaagtctccgactgatggagtagtcgccgcaccgtcgaaagcgaggtttggcgcatatagcgcagcagaaatgagaaaatttgttggttgggcgctcaagcagcctgacggctgggagaaatggatcacgttgctgttggcatacacaggagcaagaaggggggagatcgccaaactggagaagtcacagatcaaatatgacgaggacagccagcggtactatcttctgattgcagaaggagggcagggaaaaaccgagaacgccacaagacaggtggcgatccatcccaaattgatcgagtggggcttccttgatttcgttaaccgtcaatggaaagagaaaatcttctcgcctgtgtcaggtaagaacatgccgaagatcggcaaagtgttagctgacgttcgcgatcagcttggtattccgtatcttgatgattatggacaacggcgattggtgcatagcttcagacacaccatgatctcgacttgtttagctggctgggttggtaatctggcacacttacaacaggtggttggtcatgagaagagcggctcagggatcactcggcgctatctgcatacgttccctctatccactgtttgttatgttattgacggactatgctggggttag

SEQ ID NO: 80888 - DNA, 915 bp, Citrobacter koseri
ttgagttattctaatgactggcggcgtattagttataccttgtctgcgagtcagagttatgatgaggataatcgggaggataagcgtcttaatatttatatttccatcccattctcctggggcgatggcgtcacggcaacgaaacgcgagctctttgtttcaaactcaacgacgtttgataacgaaggctatcagtcgaataataccagcctaagcggcattgcgggtggtcgagatcaatttagctatggcgcgaatcttgcgcatcagcggcaaaataatgaaacaagcgcaggtggaaacctgacgtggcgagcgccggttgcgacggtaggcgccagctatagccagtctaataaataccggcaggctggtgggaatatccaggggggaattgtcgcctggtctgatggcatacatttaaccaaccgcctctcagatacacttgccattattaaagcgcctgggttagaaggggccgctgtgcaaggtcaccgttatctgaccacggacaagaatgggtatgccatatatgacagtctgacgccatatcgtgaaaactttttaacgttggatctttcccatacctacagtgatgtcgaactacgcggtaatcgtaaggggattgtgccttatcgtggtgcggttgtgttagctgagtttgaaaccgacaggcgcaagctctggtattttctggcgcgacgtccagatggttctccattaaccttcggttatgaagtagaagatcattccgggaaaaatgttggcttagttgggcaaggaagccgcctttttatccgtacagataatgttcctgcctctttgaaagtcgcgacaaacaaacagcaaggattgttttgcattattacttttgatggcgtaattgatgagaacaagacctatatttgccgatga

SEQ ID NO: 80889 - DNA, 435 bp, Citrobacter koseri
atgcgtaggcccggcaagcgcagcaccccgggcaaattgccggatagcggcataaacgccttatccggcctacgatggtttgtaggcccggcaagcgcagcgccccgagcaaaaattgccggatggcggcgtaaacgccttacccggcctgtgatggtttgtaggcccggcaagcgcagcgccccgggcaaattgccggatagcggcataaacgccttacccggcctacagacgcagttagtcaacttgtgcggtagtgtgaaccatatagttaacatcaacgcccggcccgagcttgaaggtgttggtaatcggattgtagtgcagtccggtcatgtgacgctctttcaatacggtctgagcgacccagttcagcaactccgcaggcttaataaattttttcacatcgtgcgtgcctttcggcaccatgcgtaa

SEQ ID NO: 80890 - DNA, 654 bp, Citrobacter koseri
atgtcaggttttcaggcttataattcacatggtgctctaacgatcgattcaaataataaatctatagttatgtcaaccgtaaaggcgatgggtacattaaccgatgtgggatactatctgttaccatctaatagtattggtaatggttctacactcggcttcctcaactatgctttttgggggagttctcccggcttgcgatggttccagctacaatccaatggaagatattgtttcccaggtgcgaatctctatgaggcaggtacgggaagatttatgttttccagtaacactacaacattacagagtgggttttgtgatgtttttgatgcgagtggtaaactgatatggtcggcggcaagtgctggtacaatgccccgtatacgtgatttctttactgtaccaagtggtcataatctgggaacggcaattacgctaactactgcatttgcagatccgtggatttgcattagtcagtgtcccggaaacgtttctgatgatggcgtggtaacaggtatgagcggtgtacttattaaacgtaatagtagtacatcattcacattacagtacattaataaaaatcagaaaacttatacacaggcaatgggtaataatggattacaaatagcccttgcaagttttactggttactaa

SEQ ID NO: 80891 - DNA, 270 bp, Citrobacter koseri
atgggaatagaaacacttgctattatcattgctggagcgggttttttatggacagtgtttcgtgataaatcacaggatgttgatgatattaatgagcgtattactgtacttgaaagtaaagtagaaactcatagtacagaaatatccaggcttgagaaagggcaggatgaattagaagatagtctacgcagtctacaagatcagattcataaaatggacttgaaaatagaacgtattctgacaattctcgaaaaacaaaaaggggcttaa

SEQ ID NO: 80892 - DNA, 714 bp, Citrobacter koseri
atgactgaacgcggaatgattttcaacggcgagatggtgcgcgccattctcgacggccggaagacgcagacgcggagaattatggcaattcagccagagcattcagagctgggattacgccgggtgattgactccaaaaatggcagagataacgggaagtatttttggtcgcagtccgatgcgtgcggtctgaaggcacgctcaaaagtgttcggttgtccttatggagacgttggcgatcgcatatgggtgcgcgagacgttccaggggccgcttgtttctgaagaattattcgaggaataccgagcccatcctgaaaagttcgaaacgcctcaatactgcgaatatgccgccgatggtggcgccaagcctgaatactgtgatcttgacgataacctccgtcatggctggcgaccgtcgatccatatgccgcgttgggcaagccgcatcacgttggaaatcaccagcgtacgcgtggagcggttgaacgatatcagccaggaagatgcgcaggcagagggggtgaagcaactgcgtggtggttactggaagcactaccaaccaaatgagtggacgcagttccaactcagtgcgcgcggatctttcgctactctctggaattctatttatggagaaggtggctggtgggccaactcctgggtttgggttatcgagttcagaaggatcgaagggggtgatcatgcgactaattaa

SEQ ID NO: 80893 - DNA, 417 bp, Citrobacter koseri
atgaaatcaacggtagaaacaaaaatcattgagttagtgaagttagggcatgagctggcttctgaactgaaagcgtcatgcggtgctgtagacgtacgcagcgtagcgcaactgattagcgatctggctacgcagcttgaagtgcagtttgcccgtagcaatgcgctggctgcaaagctgagcatgattaacggcctcatggatgctgctgaacaggctaacaaacttgcgcaggaagcaactgaaaaactggtacaggagcgtgacgcgctggctgcggagaatgcggggctgagcaattttatctcaaacagttgctatgtgcaggcgggtgaagattcttcatggcatcaggcagttgaccacgcaccggaaaccctagccaccgacgctttcttggcagaagtgcgagtgtag

SEQ ID NO: 80894 - DNA, 285 bp, Citrobacter koseri
atgtctgatattaagaatggttatgaggttgccgaatatatgaatattacaacggagtctccatgtaaaattatctttattaaaggcgtggattctggggatgggtatatatttagaaatgtctttagtgataaattggaagtgttctctgaagatagaccctattccaggtcgcgaaaagataacattaagcttttgattttaaggatgcttttggagaattttgtttgctttcaaaacttaaaggattcacttgggaaaatggaggcggttgaggaagaatga

SEQ ID NO: 80895 - DNA, 399 bp, Citrobacter koseri
atgaaagtaaatgaggcacctagaataataattcagcttatgttaagtgctgttttattttttctctattcatttaaatacaaagacggtttacttacattactttcagaacaagtgtattaccaagtattaattattttggtaatactatctggttatgtagctaaatggatagatagtttgcgaattttcttgattcacgaatgtatgatgatgctctctaaaagttataaaataaaatatttaaaacgtgaattggaatacttgaccaaaaagactgagaatgtgaatttatcaaatgatgcgaaaacgatgatgactgacataacctcatctgattttgagttggaaggttatattaagcaaatgcattctgaaattcagaagataaaaaggtga

SEQ ID NO: 80896 - DNA, 144 bp, Citrobacter koseri
atggccactattaccagagaacggcttgaatggctttctaacatttctggccgtgatgatatcgaagatatctgcggtgatgaaattcgtgagctggcacgtatcgcgctggcagtgcatcaggccattgaagcatctttctaa

SEQ ID NO: 80897 - DNA, 240 bp, Citrobacter koseri
atgaaaactatggtgcgccgggagatccccggcgttctcaacctgagaaaaaaccattttcacctccgctggtcaaacagcttcctcaacatccaccagcagcagatttttcagatcaataatccgattggagacgtattgcagaagttgatccatcacttcatctcccgccatacccgcttattacgtctcgggaagcgttctaacctccatatccaaatcatccacaacatcttatga

SEQ ID NO: 80898 - DNA, 495 bp, Citrobacter koseri
atgctgatccgtgaccgttcaaacatggaggctgcaatgaatcttacccttcgcgatttggtagaaaagaggaaattggttacagacgcggcatggaagcgtcaggagtttttgcagttaaaagtgcatcagcttacaggagaatacaaagaatcactggcgctgactgatggtgatgaaaaagttgtccagacgggcattattgggcctgatgggcaattcgaagcatgccggtatccacaactagaaactaatgatgaccatgaattattcttcatcatcaggacagacctttccgattcatccggtgaaaaacactggtgtgatactcatctaaaaatgtggaagatcagggataacctccatgttggcgttgaagattccagtagcgacatcatcattatccggggtgagcctgaaggttgtttcggtgaggtagtagccgcaataaaagaaagtatcgtaagaacattcgtttctgcaatgcccgattga

SEQ ID NO: 80899 - DNA, 528 bp, Citrobacter koseri
atgaggattagagcaaaacttagtgccgccgttctggcgctggttctcgccggtgcgccagcgtcggttattctcgatcagtttctccaggagaaagaaggtaacacgctggtggccgtcatggaccccggcggtgtctggtctttatgtcgcggggttacgcgaatagacggaaagcctgttgtaaaaggaatgaaagttacccaggcgaaatgcgaccaggtaaacgccatcgagcgagataaggcactggcgtgggttgaccgcaatatcaaggtgccgcttacagaaccacagaaagccggtattgcatctttctgcccgtacaacatcggacctggtaaatgcctgccatctggattttttcgtaagctgaacgcaggagaccgcaaaggggcctgcgctgaaatcaggcgctggatattcgacggcggtaaagattgtcgtatcaggtcgaataactgctttgggcaggtatcccgccgtgaccaggaaagtgcgcttacatgctgggggatagaccagtga

SEQ ID NO: 80900 - DNA, 534 bp, Citrobacter koseri
atgctgggggatagaccagtgaaaattgatccgctgttaatcgctgttgtaatcattgcagggcttgccatcgctctcgtaaagagttgcgccgacgtaagcaatatccagagcgataacgccgtattgcgcaatgacaacaatttacagacacaagtgattacctcgcaggcattcaacttcaaccgattcaatcaggttgctgagcacgctaacaggcttaattccctcattaatgtcagcaccgaagataccgtgatcaaataccgggagattctccgccgtgaaaaaacctgtgatctgcctgttcctgctgacattgctggtgggctgctcgaatacgcgcaccgtttacgtaccagcgcaatgcactccgattccgggaacgctgacgcagccggtgatagctcctctaccgccagcaccctgacatattgccaggctgttctctggattaagccgctactggccaccatcgagaaggcaaacaatcaactggcaggaatacgccaaatcgaacaggaacggcaatag

SEQ ID NO: 80901 - DNA, 201 bp, Citrobacter koseri
atggcaaaaaacaatgaactggaggcgcagagactgatgttgcttggtgcagtttccacgctcgatgagcatattcgtaatgagatttttgaactaaaaagtagtcttctcaagttgtgtgaaaacgcgagcgagaaagaatacgccatgactgccatctcattagctgcactggatatccagaaagaattatcggagtga

SEQ ID NO: 80902 - DNA, 1473 bp, Citrobacter koseri
atgggaatttttacgattgacaaaaaagagcgaatgttatttatcgcaattttggtcgcatcatttttttatgtgcttccaataatactatctggacaattctacatagatgacttaaggcgttctatatggggtgatttaggatggtcacagattggaaggccattatcagatttaatattaaaagttataacgcttggtgggttagctggtgacacatttccgttaacactaatactatctgtgttactgatatcctttagcgtgtttaagtatgtaaaatcaatcagaataataactgataccaaagttatattcatgctcacagtcagcgtgatgtgcagcccatttatgatagagaatatgtcgtttagatatgactcggtcaccatggctgcatcactgtcatttatcattttagcatttacaataaaaagcactgacattaaagcattagctattggtgctttgctggtaattttttcgctttgtacgtaccaggctactattggtgtattttttacactttcaattttagaattttgcataaaaacaaaatcaagccaaaagtcatttgacaacatcttgaccctaattaagagggtagctcagttcttaacatcattcattatatacacaaaactcatatcaccttactttgttgtgggtttttatggtgaaaaccactcagagctattaccactaacagccgagtcaattactgcggcgataaaaaacacagcaagctttgcaagcatgattgttgagcttaattacatatatggatatattcttatagcatcagtggtgctttctatgctttcatcattaatgattgctagaggtgctatcaaaaaagaggtatccttatattcaattgcctcagcagtaattgttattgcatcgccattttttgcagttctattctcatttattcatttagtgccgctcaagaatccagtaatacttccaagaacgatgatgtcgttttgtgcgacaattatgttttttggaattagtatctctatgctgtcaggtagatcagcaaaagcactattggctttgtttattctatgttctttatcttatgtatatacgtatggaaatgcctctaaatcgcaaagtgaaagcgatggaagaatagttgagacattaagatatgcagtcggcattaaagggattgatgctaagaatctcattatatacggtgagtctccaaaaacaaaacaatcaattattgctgaaaaaaaatacccatcgataaaaagattgatacaaatgtatttatctggaaacagaatgtggtctaggtttttgatgatgcaccatggtatgggcgttaccttaatcgataattcatcattaaagttaagtcgtgtatgtgcgtgggatacaatttacaaggatgagtcttacttgataaagaatgaaaaaacaactgtcgcggttattttcggtgataagtgcaagtaa

SEQ ID NO: 80903 - DNA, 861 bp, Citrobacter koseri
atgaagaatatcctcgccatccagtcgcatgttgtgttcggccatgcgggcaacagtgctgctgaatttccgatgcgccgtcttggcgcaaatgtctggccgctgaataccgttcagttttctaaccacacgcagtatggcaagtgggcagggtgtgttatgccgcccgaacatttgactgaaattgttcagggtattgcggatatcgataaacttcagacgtgcgatgcggttcttagcggctatctgggttctgcagagcagggtgagcatattctggggattgttcgtaaagtaaaagcggcgaatccacaggcgaaatatttctgcgatccggtcatggggcatcctgaaaaagggtgcatcgtggcgcctggcgtcgctgagttccacgttcgccatgcgctcccggccagcgacattatcgcgcctaatctggtggagctggaaattctctgtgaacatgcggtcaataatgttaatgaagctgtactggctgccagggaactgattgtggaagggccgcaagtcgtgctggttaaacatctcgcccgggcaggatacagccccgaccgctttgagatgttgctggtgacggcggatgaagcctggcatattagccgtccgcttgttgatttcggtatgcgtcagccggtgggtgtcggggatgtgaccagcggtttgttgctggtaaaactgttgcagggcgcaacgttgcagcaagcgcttgaacacgttactgcggcggtatatgaaattatgatcgccacgaaaaatatgcaggaatacgagttgcaggtggtggccgcgcaggatcgcgttgctaaacctgaacactatttcagcgcgacgcagctgtga

SEQ ID NO: 80904 - DNA, 246 bp, Citrobacter koseri
atgaaaaaagtattagctctggttgttgccgctgctatgggtctgtcttctgctgcatttgctgctgaaacggcaacgtccacgacggctccggctgcggcacccgctaaaaccacgcatcacaaaaaacaccacaaagcagcggctcagaaagcgcctgaacaaaaagcgcaggcagcgaaaaaacacaccaaaaaagcggtaaaacatactgcggctaaaccggcagctaaaccggcggcataa

SEQ ID NO: 80905 - DNA, 1206 bp, Citrobacter koseri
atgaaacagatcattgtcacccaaccgaaactggtcgcagacttttcctgcgtgggcggggaatgtcgtgagcattgttgtcagggctggacaattgtatttgataagtcttctgttaatcgctatgtgaacagcagagatagttctatccgccgtattgcgaaaacagggattaaaattacaaaaaaacactatcaacactggggggaggttatctttcagacggaaagcaaaggttgtccgtttatggatgctgaaaggctttgctctattcatagcacaatgggggcccaggcattaagtcctacctgctcgacattccctcgtacgagcagaatctataaaaatgaagttgaaaaatcactcaacctttcatgtcccgaagtcacgaggcttcttctgagcgataaagattcgatgtctatgatggagtcaacaggcgttcagcaggattataataacgcgccattacttgacatgaagattaaggttatcaatctcttttgccagaatatattcaatgtgacagatgtcagtgttgaagaacaaatttacactatggtgaaatttctcatggtggctgagaaagttgacagcattgaagaaagcattagcgacctggagaatgtctattgtgcactggttaatgaactggttagcggtaaggtactgaccgagttacagaatttcaatcaaaactatagtcttaagtttgcactgatctcactaatgcaaggttacttcacgaagaaaatgtcgagtcgtggtggtcgggtgttgaaccattatttcacgcaattatacgggcactttgacgcgacgggtgatacggtttccgctgagtcaacaatgagaaaaattgaagctgaatggtgtgatgtggcgggaaattatcttaaagataatgagcacctgtttaagaatttcttcaaatacaagctgtggcagcaggggtttccgcaaaataatggccgtagcatgctgaataatctttatttaatcgttgctgaattctatttcatcaaaacgttacttgcgggccatgtaatggcgacggggaaaattgaacaagataatattgttgatgttatttacagttttcactctcttagccagcataatcaggatgttcaacagttgtttcatcagcaaatagagagtgtaagattgggagatgatctctcattgttacaattgttaatttag

SEQ ID NO: 80906 - DNA, 816 bp, Citrobacter koseri
atggcagttatcaatactaacctgatgtccctgactactcagaacaacctgaacaaatctcagtctgcactgggtacggctattgagcgtctgtcctctggtctgcgtatcaacagcgcgaaagatgatgcggctggtcaggcaattgcaaaccgtatgacctctcagatcaaaggtatgaaccaggccgcccgtaacgcgaacgatggcatctctatggcgcagactgctgaaggttctctgaacgaaatcaacaacaacttgcagcgtatccgtgaactggctgttcaggcaagcaacggtactaacagcgctagcgatctagagtctctgcaggatgaagttaccgctcgtctggctgaaattgatcgcgtagctgaaaaaaccgacttcaacggcatcaaactgctggatggtactgcgggtgctgttaaaattcaggttggtgtgaacgacgacgataccatcgatctggatctgagtggagctaaagcggatagcactacattgggtgtgaaggacattgatcttaaagctctggctggaggcgaactgaaaactatcgatgatgctattgctaccgttgatagcgcacgtagtggcctgggtgcggtgcagaaccgtttcgagtctgctattaataacctgaacaacacttctaccaacctgtctgcggcacagtctcgtattcaggatgctgactacgcaactgaagtttccaacatgagccgtgcgcagatcctgcagcaggctggcacttccgtactgtctcaggcgaaccaggttccgcagactgttctgtctctgctgcgttaa

SEQ ID NO: 80907 - DNA, 1431 bp, Citrobacter koseri
atggctactattagtaacctgggggttggctctaatctggatttaacgacgttgtataaccagttggagacagctgaaagaacgaagcttacagcaattacaactcagcagaccacctacaacgcccagttaagcgcatacggaaaactacaaagtgcgttaactaatctacaaactgcaacagcagcacttggcaaaacagcgacctggaactcaacgacggttggtagcactaatacatcgttcagcgccacaactaccagtgatgcagccgtaggcagttatagtattaatgtcggccaggtagcaaaagcacaggtattaatgtccgatagctttaccagcggcactgaaaagctgggagggacaacgactgacggaacacgcaccattacgattacccagccgggaaccgaagatccgctggaaatcacactgtcagattctgataccagtttgaatggcattgccagcgcgatcaataaagaaaacggtaatgtcaccgcgacagtgattaaggcagaagacggagattaccgtttgatgcttacctcgaaatcaacgggtacagattatgatatgactgttaccgttaccggggatgacacgctacagcaaaaaatcggacacgatgcgacatcatcgggtttgaacgtacagacagcttcgcaaaatgccgaagtaacggttaatggcgtaaaaatcgttcgctccagtaataccatttcagatgccgtaacagggctcacactgacactgaaagcaaaaagcacagccgatgagacgctagagattacccgcgctacggaggagaacaataaggctatcagcgactgggtgacggcttataatgcattacagtctactatcgctagcgtgacaaaatacgtcaaaacagacacaggttcctctagtcagtccagcaacaatggcgcgcttttaggcgatactaatgttcgctctattcagtcccagttgcgtagcctgcttacggatgtacaaggtggaacttacgccattatggcgcagttaggtattactcaggatccaactgtcggctctgacggctccaccggcaacctgaagattgatacaactaaattaaccaaagccttgacagataatcctcaagctgtgcaggaatactttatcggtgatggcaaaacgaccggtttcgccactcagatgaacaacaccctgaccaaaatgctggataccacttctggtagcactggggtaattaaaaatgctcaggatggcattaacaaaacgctcaagacattagaacagcgctatgacgcgatggaagcctccatagaagcaaccatggcgcgctacaaagcacagttcacctcgctggataagttgatcagtcagatgaacaatactgcaaactacctgactcagcagtttagctcatcaagcagttaa

SEQ ID NO: 80908 - DNA, 477 bp, Citrobacter koseri
atgaaaaaccccacgctattgcagtacttccactggtattaccctgacggcggcaagctctggccagaactggctgagcgcgctggcggcctcaatgatatcggcattaatatggtctggttaccgcccgcctataaaggcgcgtccggcgggtattccgtaggttatgattcgtatgacctgtttgatctgggtgagtttgatcagaaaggatctgtcgccacaaaatatggcgacaaagcgcagctgctggccgccattgaggcgctaaaacaaaatgacattgcggttttgctcgacgtggtcgtcaaccacaaaatgggcgcggatgaaaaagaggccattcgcgtacagcgggtcaatgaagatgatcgcacgcaaatcgatgacgagatcatcgaatgtgaaggctggacgcgttacaccttccctgcccgcgccggtcaatattcgcagtttatctgggatttcaaatga

SEQ ID NO: 80909 - DNA, 498 bp, Citrobacter koseri
atgaatgaatcatcaagaaggctaacaaatttcactagtgtactactgctgattatcaaagaaatcagacttgaaaagagcatgcatcaggctcaacttgcggaaagaatcaacaaaacccctagtgccttagcaaaaattgaaacgggtaaaagcccattatcaatggaagtatttttagcctattgtgctaatttatcagtatccccctctgccgttatggctactgctgaacgttacgctagcttgttgagcaataacggttggactttgcttaatagtgctttagaagagaatgatgatgagcttctaaaagaagctcatgagtactatgcctcatcagcttataaaaatcggattagcattttccaatcagcgctgaacgggccgacctattatcctaacggaaatgtcgatggcttagcggtatttctttttgctatctctccacagtataaagctcagcaattgacccaatctgcgcttgggggatggtga

SEQ ID NO: 80910 - DNA, 258 bp, Citrobacter koseri
atgcaggtcacaatagatggcgtccagtatgctcccattagctcgacatcaatgcgggtaggtattgctataatggcacatcagcgtttcgaagttttgaagagagcgctagaacagcacatgaagcatttgccagccggagcgttggtggttgttgcagacgatggggcaaaagctgctgccgtaattcctgctggtgtgcagttggttcgacaagaatcatcactcggcattgttgcgcagagaacgtttgcttaa

SEQ ID NO: 80911 - DNA, 234 bp, Citrobacter koseri
atgaaaagtatctttgattatttcagtgaaagcacagggactggttccgcagtaggtaaagagttttccctttatggaatgtctatcggtaagtttatcggctcagatggtaaggtcatgttttttgagaaagatggcgaaaagatggctgttcccgtaaccatcacattaccgcaattcaatattcctggtccgattgagaatccagctctcaaagacattaaagaaatttag

SEQ ID NO: 80912 - DNA, 1023 bp, Citrobacter koseri
atggctaaattagatgctttggaacggctggttactcatcatagtgtgacgattgacacacaattccgaacaaaagctgatgaaaaaacaaaagcacaatgtaattgtcctgttccagatatgaagagccttgcatctatgatacaagctcaaattggacttaggcatagttatgatcgtggggatgttgtacttactttacaagatgttaagttatatacaaaccgagaagacaaagctccaactcatttagcgctgctaattaatagtgttgataaaaatggaagcactactgttttaaaaaacacggaaacagatgcgcgaatcgaaatagcaccaaaacatgaagaaggtgaaggttatgaagtttccgcgcacatggtcatttctctgagcggaaagatgagaacctatgatatgacttacactccaactcctggcatctcaactggtaggatcaatagtttcttaaataggattttatttaaagcatccattgcgaacgaaagtaaatttacttgtaaaacattaacaaatcaggtttcacctacaaataataaagtattaaagattttatacaaaccaatttttgagttaactggattacttgatcagcagctttttaaaaaaataaatgatgaaggtttgtcagatgtagtcttaataaaagacgaatatactacaatcaatgctccagatgtaaatgcaacttacattccaaaacaaaccaccttaaagcttgttcctaatcatggcacagatgttattggctggattaaatctgtagccgaatattttggcaatgaaacaaatggtggatacgacaagttaaaaataaaatttcaagaaccagatacaggcaaaccacgtcaggttgatttcacaaccaaaaatataaaactagatagtttagagaaaacattcattaaaaaaagcattttatcaaactttgattcgcgccttaaggactcatatgataaaattgacagcagtttcatcattaaaatgattgatattatgtga

SEQ ID NO: 80913 - DNA, 579 bp, Citrobacter koseri
atgcttactaccttttctcacttagcaaaaccatttggataccttttcattaaaggtataggtggtaaggcagcttatgactgggctgcgccaacaggccttacactattgacagccgcatatttttgcctcttcaatatcactcctgctgttcttttatccgatagtggatttgttaaaacagtaacatctttcatttctaacttacctgggttttacattgcggctttagctgctattgctacattcaacagagagcaaatagatcacccactgattagtaatactggtaccccttcaatagatgttaaagtaacaaaagagaatgggcgagttatcaattcgcaagaaccacttactcgccgcctttttttatgcatgctattcgcttttctaacagcattgagcataataatagttatgcttaatgcgttggttgctcccctttttacggtacataacaatatatattttcaagttatatacctactattatttacgtttagcacttggcaactattggtatcaacattcttcggtctatactatctaggtagtagaatccacctaaattattaa

SEQ ID NO: 80914 - DNA, 492 bp, Citrobacter koseri
gtggctaaggaaaaactagaagtaccctttgagggaaatgaccaatactatgaaggtattcgtggacttatgatcagctctatttgttcagtgttaggagttatcctttatgctgttttgttaggtaaattaacgtggagcaatcttagcctcgatacaatgattgcattgcttggctgggcattcgtatgttttataatatggggagtgtccttcaaaagaaccaatagagtgctcatttcttttgcagatcctacacctcgcccaaaagtagctggtattttcttgatccttctatacatagttattggcaccttttgcgctcttctattcgatgctttaactatgttagataaccctttgactacagttgatgatttttggaaaacatttaaagcattccttattaccgcggggtgcctgttcgtcttcctatttgcttttggcaattacgcagtaaataaggtttcccctttaaaagattcagaataa

SEQ ID NO: 80915 - DNA, 582 bp, Citrobacter koseri
atgccgactacacataacgtcactgggttacaaccaagaatgaccagagagcaactgatcgatgcagctcgtaccgctgccaagtatctgccggttgcctccgctcaactgatgaatgaaatagctacacgtctcgactacaccagcgtcgcgctttgtgaagcgatggaacagcgtaaatcactggcaattgaaaataccgttctccgtgaagacgtaacaaactgggctaaagaatgcgatcgcatcgtcgagcgctacacaaaaacacgtagcaacatgcacctactggaagcgcagagagaactgcgcgacctgacaccaacgaccgactctttcctggctgaagtgcaatcaaaagctcgcgaagaaggtgcttactttgttgctaatcgaatgcttgctgcatgggatgccgaatttatcgacgacaccgcaagtaacgctgcggacatcgcgcgaatgatacttacctccacagagtttatggctgatgcgccggaaggcgatttcgatcgctcgttcgctgatggcgtgctgaaagatatcgcagcccagcttcgcaaaggagcagccaaatga

SEQ ID NO: 80916 - DNA, 1011 bp, Citrobacter koseri
atgagcaacatcgacaaacgctgctttgcagaaaacactttcaatctaatatctatgtccggtggaaaggactcattggcccaatgtctgtttgcagtagagaacggcgtgcagcacgaacgtgtttttgccgataccgggcacgaacatcctcaaacaatggaatatttggattatctcgaacaaaaattgggacctattaagcgcgttaaagctgatttcacgcgccaaattgaagggaagcgcaagtttatcgccgaaaaatggccggtgtcgttggttgaagagtgcagaatgtctcacgatgaagccgcagagcgcattgcaaaggctctggaaatcctccattcaacaggcaatccattccttgatctctgcatgtggaaaggacgctttccatccactaaggcgcgtttctgcacatttgacctgaaacatgaacccgtacgaacccaggtggttttgccagcgctggatgagttcgacgaggtgattagctggcagggtgtgcgcgcgcaagagtcaccggcgcgagccggtttacccgactgggaggaagacgctgataacacacccggtcttcacgtctaccgcccaatcctgaactggttacacgaagatgttttcgctattgcaaagcgtcatgggatcaagccaaacccgctttatcaacagggatgtagccgtgtcggttgtatgccatgtattcatgcccgcaaatctgagcttgctgagatatttcggcgctggcctgaagagataaagcgcgtggctgagtgggagcgctttgttgctgcctgttctcgccgtggaaattccaccttcttcccgtcgacacacgatccgcggcgggcggaacgccgcatagacgtaatcacagtcgatgcgtttggaattgaaacttatcgcgactgggcaatgaccactcgcgggggggcgcaatttgatttactggccgctgcgaacgacaaatccgtgtgcagcagtatttatgcgggggtttgtgaatga

SEQ ID NO: 80917 - DNA, 159 bp, Citrobacter koseri
atgaacgaaaaactattggatgacgatgtaaaaatcatccgccgccaaattgaagaaggtgtgccatacggtgaagttattaacttcatggttaaccagcttggattaacgcacctggaagcgcaggacgtttacgagcgtctggcatgtgaggactaa

SEQ ID NO: 80918 - DNA, 504 bp, Citrobacter koseri
atgggggttaggtatagacaattttttgaagagcaagttaaatcaaacggtaaggttaactgttttgcatcattgatacaaccagaacagtggttgatatttatcggtgttgctgcgttaaacggtgttattggaaatgctacatatgatttagtaaaagttataatcaagaagattatcgagaaagcaaaaaaagaaggcgcaaatgaaatcgcagaagaatatgactcagatgaaaaaattgaaattttaatagtccaaattaatgaatatattaactttccggagaaaattcaccctgaggtactacgaggaattaaagaagaggaacgagttgatgactatatgtatggattttcagagataatggagattaaaggtaatataaatattactcccgaagaggtggaggagaaaattaaaaaaataaaagatagaaaatctaagattaagtcaattgatgaaaaaaactttgcccatttctgggataatctcaaaaaataa

SEQ ID NO: 80919 - DNA, 144 bp, Citrobacter koseri
atgcataagccagacagctcagccgcagctaaacttccgttcctcgctcatagcagactattcacttacatcagactgttttgcgtcaaaacggacgctacgattaaccattttctgcctctggcgatcttaatcggctcataa

SEQ ID NO: 80920 - DNA, 1263 bp, Citrobacter koseri
atggcattaaccgataccgctatccgcaagatcaaacccaccgaaaaatccttcaagattaccgacagtgcaggactctacctgctgatcaaacccaacggctcaaagctctggtacatgaagtaccgtattgatggcaaagagaagaagctggccttcggcccctacccggatgtttccctgtttaaggctcgtcagctacgcgatgccgcccgcaccagagtgcgtgaaggggccgaccctgccgcggataagaagatcgcccagcagaaaaagaaaaacggtcataccttccgccagatcgccatgaactggcatgccgatcaccggcgctggtctgaacattatgcgacgaccatccagcgcaggctggaaatgtatgttttcccggatatcggggactgccttatcgatcagatcacaacggcggatctgttactcacgttacgcaaggtggaaagcaaaggctttctggagatcaccgcgcggctgaaaaactacgtgacggaaatcatgcgctatggggtgaaaaagcagctaatcaaatcaaacccggcgctggatctggatggtgaatttacgccgccagaaacacagcattacccggccctgccccttgagaaactgcctgaactgttatcgcggacggatagctattccggcaggctgctgacaaagtatgcgcttaagctgtcactgctgtttttcgtgcgctccagcgaactgcgctttgcccgctggagtgaaatcgactggcaacagaagctatggataatcccggaagagcgcgagcagatcgacaacgtgcgcttctctcatcgcggcacgaaaatgaaaacacagcacatcgttccgctgtccgatcaggctattgcgatcttaaagcaaattgaagcgctctctggccatctggcgtttatcttccccggcgaatacgatcaggataagtgcatgagcgacaacaccattaacaaggcattgcgcgtgatgggctacgacactaaaaaagagatctgcggtcacggcttccgagcgatggcgtgcagcgcgctgagtgagtcggggttatggagcaaagacgccattgaaaaacaaatgagtcatcaggaaagaaacagcgtgcgagccgcctatattcataaggctgaatatctggaagagcggatcgcgatgatgcagtggtgggcggattatcttgatgcgaatctcgacaggtatatttccccttatcagtacgccgcgccgctgaaaaacgtatcgtaa

SEQ ID NO: 80921 - DNA, 1044 bp, Citrobacter koseri
atggcgactaaacgagcgttctatgggcaagatggtgaccgagactatttcgaacgagtatttcagtctgcaaatattaacttcctcattggctcaggagcatcgctgccagcaataagtattttgggcaatattgagagcgaattgcagaagttgattcatttggaagatgaagaaggttactttgataaggctgccgaatttcttcactcagtctggataccacatgaacatatcctcgcaagacacaatgccgctcctaccccaccacttattatagaaaatatagcgattgtcagaagaaattactctgaattcctgtctgcacttgaaaaaatactaactaggcggcgtactggcctactaccaaaacgtattaatatatttaccactaactatgatctatttgttgaagatgcagcaacaagaaataataacatcattattaatgatggttttcgtaaacgagtcaatatatggggtggaaccgtttttgatgctgcctgctttcatcaaaccatttttgcaacaggaaatttatataactacaaagttgagctccctactgtcaacttgataaaacttcatggttccttgtcatggcgtaaatataatgatgacatttattacaacatattagatgccaaaccattaatatttaataccatcgaagagaaaaagtcatgggtactatctcactcacttatattaccaaggaaagaaaaatttaaagagactgtgctacaaaatatatattatgatctgcttagaagctatgcaaatgagctagataaggaagcaacgctactgatagtttttgggttctcatttgcagatgagcacttagaaacactgacaaaaaaagctttacgtaatgcaacattgaaagtaattatttttgcatacgatgagggtagcgttcagatctatatggataagttccacgattattcaaatgttgaggttgtctataccccaggaaagtcactcgattttatagtactaaataatattattacctgttatctgggaggtatacgatga

SEQ ID NO: 80922 - DNA, 207 bp, Citrobacter koseri
atgatatcggaaagtatcgctcccgctaccagaaggatatttttcttcaataatcttttcggcttcgaccttaccaataagactcatgaaacctttcttaatctcgataaaactaccgacggaaacattacgaagtactttcccacgataaaaaagatcactgaggtttttatttttatcgacaagaatgcttacagttcgccctga

SEQ ID NO: 80923 - DNA, 171 bp, Citrobacter koseri
atgaactgcatcacttcttactttatcaccactgaaaagattctgtctcaccctctttttaagaatatttcgcatataaaaaagggggtcttcagagcccattatatgattacgaaactcaagggttcgtttaagaaatggtttctgcgttttgtctgttgcatcagttag

SEQ ID NO: 80924 - DNA, 654 bp, Citrobacter koseri
atgggtatatctagatttgctactttaagtaatggaaaatattttgaacctaaaaacagtttaaaaaatagacaaattaaattagcaaaactacaaaaacaattaagtcataaaaagaaatttagtaataattggaaaaaacaaaaagcaaaaatttctaaactacattcacagattaccaatactcgtaatgattacttacataaaatttcaaatcatatcagcaaaaaccacgcaatagtatatattgaagatttaaaagtaagtaatatgtccaagtcagcaaaaggaactttagaaagtaaaggaaaaaatgttaaagtaaaatctggattaaatcgttctatattagaccaaggatggtttgaatttagaaggcaattggactataaattgctatggagtggtggatatttagttaaagttaatcctagaaatactagccgtacttgccctagatgtgaacatataagcaaagataatcgtaaaactcaatctaaatttgagtgtatagaatgctcatatagtgaaaatgcagatttagttggagcaataaatatattaagggtaggacatacccagttagcttgtgaagtgaacggtgcagtaatgccgtcagcaacaagaacctaccgaaacgcttttgcgtcgtag

SEQ ID NO: 80925 - DNA, 219 bp, Citrobacter koseri
atgtggcagggaacggcatatatgcatcaagatccagatctggaatataataacgggaaacgttgggcgacagaaaatgcattcactataaagtatcggtggaatgaatattttagcccttatttcgaatatgattatcttgacgagcaaagtaactataaaggcgagaagggtaaacctgactcgcgtattcgtgtgggggttacctttaatttataa

SEQ ID NO: 80926 - DNA, 270 bp, Citrobacter koseri
atgcatggtattgcagatgtgagtgggaaaaaatatattatttctcgcgttatacatttcacatatgtgagaaatgggcacacctacttccttactaacactaatacacattctttagataaagaggaagttcatgcaagtggtattgataatcattttcctgggttcttcaaagcgaaaggtcgtaagttggttttgacactggaattcgataaaaataaaaagccaatgttttttattaatggttcccttgggttttattgtaactaa

SEQ ID NO: 80927 - DNA, 807 bp, Citrobacter koseri
atgttaaatccaactaaagtaaatccagaagaaaaaaatgatacgattcctttggaaaactactggatttctaatgttgttctttacattccagaaaaaggtttgcttaaatataattccccgatacaaactataaaacttcagcagcctgccaataaatgtcttgagtttttattaagcaaacgatttgctgttgtttcacaaaaagaactcatggtttatgcctggggtgaggagaaagaaaaatttgtaagtacgaatgcattttatcaaacaatgtttcatctgaggcggtctcttcaaaaagccggttgtgatgatttaatcctttctgtgcctaaaaaaggttcggtaataaatagtgactattctatatttgtcacagaatcggatgtgccattaaaatccgggggcaatgatacgaatcgggacagtgatgcaaaaaagcttgttgatcgctttaaatatacccgctatattgcggcagttattctctctgtaaccgtctttatcgttgcattttatttctatattaaaagtcagtctgttgacttttatgctaactacaaaataactcaagaccagaggtgcaatatttacctgccgccaggtgctaataaagtcgattattatgctttattagaatcagcaaagattgactgcacccaaccacaggatgtatatattactgttcggaaaggatatcttagaaactcattgctggtttgttctgtaaaaaacaagcagagattatgttctgctgtgactgtgatgaataaatcggtatctctatatgaaaaagattaa

SEQ ID NO: 80928 - DNA, 864 bp, Citrobacter koseri
atggttttttactctctggatttaatctttgagttccatctgagttccagtgaattgattatgttgcttgttcacctgagattaataatattaatcaggccgaacctaaacctgagttgtgagtggattatgcattttgttctattatacattatttttatggggtttacggcatctgcaatatcagcccccagtattaatgttgggcaactttatgagtttattgaaccgcagcaaactacacttttaaaacgtattcgaaacagcggtgatcaaacggcttatgttcgtatagcggtaagtgaaattatctacagcgggaaagcaaagccggtagaaaaaccattggatatggcagcgctgtcgcatggaaatggtgaaggtcttgttgcaagtccgaccagaatgatgattcctgcttcgggtgtgcaggcgaaccgcttactctatattggaagtcgtgaaaaggagcgttattaccgagtacgttttacacccgtagtaccgactagtggcaaagaatttgggctgagtgaaagtgaaagatcaaaatataaagaaaaaatgagtactggcattaatgttatggctggctatggtgctatcgttacgataagacctcaaaaagcacattataatacatcgatatccgaaagctccaaccagtttacaattgtgaataatggaaataccaccatcattattgaagggcttgctgaatgtaagaaaaaaataacccaatgtagttcccctattgtcagacaccttattcctggtgctagtctcaaacaatcacgccagcccggaaaacattatcattttactctcatagaggggagaaatgaaaaaaaagtccaactgtga

SEQ ID NO: 80929 - DNA, 486 bp, Citrobacter koseri
atgtcaattaaaaaatatactctaaccaccgcatttttattgttctctgcatcttcattttccgcagatacagttcagtttacagtagaagctagtattccttcgagtgaattttatgtcattccggatggagactggaatatttctccggttcgtatgaactatgaccctacatcttcttcactgaaaccaagaaatgttgggcttcgcgcaaaaaatacaaatggtggtattgaagcatatcttgagttagccccacaattagtgcaggttgcaggcgagcatactattcctctggagattctggttgccggtaaagagctccctgttggttcaggttcagctatagaagtgctggatgccactcaggcagcaactgaaaaggaagtatctgtacagatcaaacagtccagtagtgccattttgagtccaggtgattattttgggactgtaacaataatgtttgacgccatgcaagaggcatag

SEQ ID NO: 80930 - DNA, 2433 bp, Citrobacter koseri
atgtcaaatcaccgtatttccctgaatatcattttgacgattggcttttcatctttacagataaatgccgcacagcataatattatcccgcttactatacagtcggagtcattacctgatgattttcgccaggcgttatttataacaccagtttcggccagagtattacttaacggaaaagtattaggtgatgcactcattatgctgtatgaaaatgatacggtaaaacttatctcatttaccgacagctttgacagctctctgggtgaagaactccgcgaatactggctcaatgcgttgcagaaaccgctctccattggccaatgctcaggggaatgtccgtcggatctcctcgcgctggagtattctctgactaacgcccaactctcgttagtgacgaaagacgcagggcaagctgcggtaccgcaatggcatgcactgcctgaaacgggcaatgcaggtctcattttcagtaatcagcttaatctgagcgcaaaccagggacaaccgacagtatttaactggacaggtgatctggaagggagtgtcgggaactggactgctgttagcagaatgctggctgatactaatagttatcatggccgacgtctgaactattctgctacaacactgtttcttgagcatgagatggaagggaactttgtccggggaggatactttgcacccgacagccaggggattttacgcacaccttatacacgtggagggcgtgtcagtacgctggttggtgcaatggcaggaacctccgatgcgcgtttgaaaaacagccaaagtgtcagtctttatcccatttacgtcacggctaatcgtgaaggggtagtcgaaatataccgtaatggcagcctacttgatacacagcttattgaacctggtttacagccaattgatacaacccgactgccatctgggatctatgatgttgaaatacgtgtactggaagacggacaggaagtcagccgggcaaacgaaacgatacataaaccaactcaatggaaggattcatcacgtcgcctacgttacaacctgtttgctgggcaactggcaacattgtctggttcagataaaaacaaacaagacggtaaatttgcggcaggaacaagtctgaactatttgctgcactccacgctggtcggtggtctcgcgctccaaaaaaatgcacatgaatatcagaccgggatgtctctcgactggcaggtttatgacaaagtaaaactgtatggcaatgcttactacagcaataccaccggcccaggttttgattcacaggctctgtggttctatggctcaggaagtatttccctgaatcacagcagaagctggtaccgccccgaatatattcatgggtttgtacgacaacgcgggagaatggatgaacgtaccagcttgacaatgacacaacgtatagcaggaaatcattctataaccgcccgtatcagtcatgagagcagcagtggagggatggggtacgatctttcctgggccactcgtacccagtttgaacataccatcgtgaactggcagctttccggtttcgatcgcccatatagggattataacgattcccgtaaccatggtatttcactcactgccagtttctctctggggaaacaagagcagcgtgccagtgcaagtatcggtacccgcaatgatagcaagggcaacagggatcaatacgcttcggcatccataagccagacatggcaaaaaggtccaataaaagaaagttcattcggcacaacagtggatcgacacggtattggtcttaatacctggaatacgctggacagttcatgggtgaatggaagtgcctggggaatgagcagcacggaaaaccagaagtttagtggtggggtaaatcttagtaatacacttgccattggtaccgacggagcagttatgagccagcacagtaacatgaaaggtgcgggcgttattgtagatgttatctccgatgatccctctgtcacactgcaagccaatcacgataatggcaatcatcgcatgacgaccggacgcaattatattccggtgaatgcatggaaagccggtgtgatagaggttgattttcccggcacagaagatcccgggttaaaggtgtggccagagcgagttagctatcaccttaaccgtggtggtgtttcacaccataccgtacgagtaatgaaaacagtcatggtaatgggccggatcaccgacaaaaaggggataccggttcctggtgcaatggtggtgaaccatgccagtaaaggtgttactgagcacgacggaatattcacgatgagtctgagtgtgcaggatcccgaaattactatcgaaacaacaaccggacttagctgtaaagttcgttttccggcggagaagattcgagatgacgggaaaatgatttatgcgggtaatttattatgtggttaa

SEQ ID NO: 80931 - DNA, 1005 bp, Citrobacter koseri
atggacgaagtttatctgcgaacgccccctgcaaaaaatattatactaactaatgtttcctccgatgagcaacaagaactgatatttaacatcgccgatattggctatcagacacacacctacaatggtaatgccgatacagagcctctccataaactggtgccggaagggagctctttgacgacaccatcaggtagcgcacagtgcaataacggtggccgcgttttaacagggactggtgagactacgtattttttctggggggtaaattctaatagtggtgcaacctgctattcatatctaaaagagggaacagatcaagagtttgagattatgcaactcttcctgggctatacattgcaaacaggatcaccatccacattctctaatggtacgtatcaggggagcttacaacttacggttggccctgaaggtgatatctcatttggtaacactaattctaacgatattattactatccactttgagatcgtcgtacatcatgccttcagaattcagttcccaccagattccactcgggtaactctggcaccacaaggtggatgggggcagtggctaaactcaggaaggatgcccccactgctaagacgagatattccctttagccttaccacttctggaccaatcgcggtgagcctggagtgtcaatataaaacagttgttggctgtggattactgaatgaggataatgacaatctggttcccctcgcaacactaataacgctgccgggactctctgaacgcatgtttttccccatcgttcccctccctcagaacaacagaagtagcaacagcgtagaaaactacccattacactggcaaagaaaaggtattttctatccgttcggtttcagctatgaacgccgctctgtgctgcgttttgaagtagaacgcgaaagcgtccaggagatgattaaacatccgggaacaacatggcgtggtgatgttatcgtcatgtttgatgcggatttgaatgccgggtag

SEQ ID NO: 80932 - DNA, 162 bp, Citrobacter koseri
atgaaaactatattctatatgttttcaggaatcaacgcaggtacagatatggcctttcagatagtggctgatatccatagccataaagaagctcaggatattgccagaaggatggaatatttctggaatgaggatgccagtaatgatccattttccctctga

SEQ ID NO: 80933 - DNA, 1212 bp, Citrobacter koseri
atggcgcgcatcacacgccccctcactaacaacgaaatactcaaagcaaaacctcgcgaaaaagatttcaccctgcatgatggtgatggtctgtttttactcgtcaaaacctccggtaaaaaactctggcgcttccgttatcaacgaccgggaagctgcagccgcacaaatttgagtctcggctcatacccggcccttacactcgcagcagctcgtcagatacgcgaccagcacttgaccaccctcgcgcaaggcacggatccacaacagcaactggaacaagcgtcagaacaacgccagattgagttagacagcattttttcaactgtggcagctaactggttccagattaaaagcagaagcgttacagaagattatgcgaaagatatctggcgttcattagataaagatgtcttccctgctatgggcgcgatacccgttcaggagattaaggccagaacaattgttgaagcattagaatcaatcaaagcgcgtggagctctggagacagttaggcgcttagtacagcgtattaacgagataatgatttacgcggttaataccggcctgattgatgcaaatccggcgtcaggagttggaatggcatttgagaaacctaaaaagcagaatatgcccacgctacgaccagaagagttgcccaagctgatgcgagctctggtcatgtcaaatctgtctgttacgactcgttgtcttctcgagtggcagcttctgaccatagtacgcccttctgaggcttctggtgcgcggtgggtcgagatcgatctcgatgccaaacgctggacgattcccgccgaaagaatgaaggcaaagcgagaacacatagttcccctctcatcacaagcactagatattttgcatgtcatgaagccaattagtggccatcgagagttcatttttcccagcagatgtgacccgaagcaacctatgaacagtcaaacggcgaatgctgctttgaagcgtataggttatgcgggtaaacttgttgcacacgggatgcgctcaatagccagcacggcaatgaatgaatttggattcaaccctgatgtgattgaagctgcacttgctcatattgataagaacgaagttcgacgcgcctacaaccgttcagtttatctcacacagcgtgaagagttgatggaatggtgggggaagcaatgtgtatcgcagttctcatcttttggaaacaagtga

SEQ ID NO: 80934 - DNA, 1104 bp, Citrobacter koseri
atgtacattcaagatattcctaaagattcaaaattttgggtcgttcgctctggtgatggtggcatgttttatgaccactttgttcataactctatagcagctattgggcacattgatgctatggaatttagcaatcagaccctcagcaataaagaggaagtgattaaactcgtttataattacaaaaacactttgcttgagaaaaaggaaacacttgcatctgcatctaataaagccggtcaagttttacgtttcattaacgaaatgtcgattggggatataattatcaccctcgatgcgaagagaataattgtcggtaaaatcacatctaaaccctataaagaaatagaaaatgtaacattactcaatgttgatgggacaacagatgaaaaattgcttaaatttagtcttagacgaaatgttgagtggggaaaaacgcagttccgtgataaactcccgttagccataaacaatagtttcagagctaaccaaactgttttctcagcaaacgaacactggaaagaacttaaccactggttatctgttgcatttatttcagacaatgaagcttatatctcctcacgtattgagcaaacagaaggaattaacaatcttgacattgcgcaatattccataatcataaataaaattgaagccattgctcagacaatcgctgacaatgacaacttagatttcgataataaagaattaatagaactctttgaaaatacatataaagagttacgcaaaaataggacatttacagtaacgacacagcaggtttttctttcccctggagacctttgggcaaaaacgtccgggaatcgtaaaaaaagcctattagttgtctgcacatttcttataatgttcaacattgagccatctttcgcagatgaaaacgacaaactattttttgacaacaattacgattcaatatctttattaattaataaagtaaaagatgatgaaaactttgaggaagtgaaaagcggattagcactaaaagtccctgtacagggactaaacaagaaaaataaacccgcaaatcctcagaaaaaacgctatgatgatgatgtagaacctgatgactttgaaggcatttaa

SEQ ID NO: 80935 - DNA, 648 bp, Citrobacter koseri
atggggttcataaaaaaatggtgggataaccatgataaatctaataattttttatcaggtatccattacatagtcatttcgctagccatcataattggtggcgcttgggctttgtatacctttaatgcattgcaaatggctaacaatgcggaactccaactaaaaaaggccaacgaagaattaaaacaaataaaagagcaaattaagggcaccgactctagcagcattgccattaatgttaccccattaaaaacccaactaggaatgattattaatgtaaccataaaaaacaacggtaaacgcccattatcttttgaaacatctaaaggtgctttaactgtatataaagtgagtgcgaatggcgataaggttgaacaatctcaatcttttacacctaatctttataccgttttgagagataaagaaaactctccagaatccaaaagtaagtcattacccaagactcatgttttgatcggagcagaaaaaactcttagctatatcgttggattaaataagccaggtgtttactatatcacattcagatcaaccccagatgacaattttgatggggatgatttgaaaaacaaaaaacctgtagaatggtttgcttcttcttatgttgaaattacgtcacaaaaacattaa

SEQ ID NO: 80936 - DNA, 147 bp, Citrobacter koseri
atgggtggacgcagctggaactggcgcaaacagcgggtgaaaaccgatgacaaggcgtttgccgatgaagtccaggtgtatgccgaaggcgaagagagccagccgatcatcacgctgcgggttgtcccgccgaaggagcgcaaatga

SEQ ID NO: 80937 - DNA, 1479 bp, Citrobacter koseri
gtggatgaattaagcaaaaatttgtgcagcagcagcttcgcaaaagacaacggtgtgctgctttatcacaacgacgtatatatccgtgaggatgcgcccgcgtttgccctgctggagatgcgtcgcgtgctggggcgtgcctttacgccggtaacattaacgccagaagcgtttgaagagatgctggctaaaatctggcagcagaatagcggtgtttcgcagcagctggttgatgatatggatgccaatatcgatctgatggcgttaaccgaggagatccccgataacgaggatttgctggataacgatgaaaactcgccggttatccgtctgattaacgccattcttggcgaggcggtgaaggatggcgcgtcggatatccatatcgaaacctttgagcgcacgctgagtatccgttttcgcgttgacggtgtgctgcgtcctgtattgcagcccgcgcgtaagctggcgccgctgctggtatcgaggattaaggtgatgtctaaactggatatcgccgaaaaacgcctgccgcaggacggtcgtatctccctgcgcattgggcgtaaagcggtggatgtgcgtgtctcaaccattccgtcgcagtatggcgagcgggtggtcatgcgtctgctggataaaagcaacctgaagccggatatcaataaactggggctgatcgacgaagaactggaacagctcaaaggactgattggccgtccgcacgggattatcctggtgaccgggccgaccgggtccggtaagagcacgacgctttacgccatcctctcggcgctaaacggccatgaacgcaatattcttaccgttgaagatccgatcgaatatgaactggaaggcgtggggcagacgcaggttaacccgcgagtggatatgacgttcgcccgaggcctgcgcgcgatcctccgtcaggacccggatgtggtgatgatcggtgaaattcgtgacggcgaaaccgcgcagattgcggttcaggcgtcgcttaccggccatctggttatgtctacgctgcataccaacagcgcggcgggagcgattacccggttgcgcgatatggggctggagtcgtttttaattggttcatcgctgcttggcgtcattgcccagcgtctggttcgtcggctgtgtcctcactgccgtgccgtcagtccgctggatgataatgaaaaaccgctgttcagctttatggagagcccccccgacgtgatttatcgcgccgtggggtgtgaacagtgccgccagagcggttaccagggacgcgccggtattcatgagtttctactggtggacagcgcgatgcgccgcgctattcatgaagataaagacgaaatgtcgattgaaactcagctgtttaagcaggcctacagcctgcgggaaaatggtttgttgaaggtgatctccggcgtcacttcgctggaggaagtgatgcgtgttaccgccgagcgcggaggtgacgaataa

SEQ ID NO: 80938 - DNA, 630 bp, Citrobacter koseri
atgaataacgttcgtctgtatgccagggcatccaccgccgagcaacacgccgaccgtgccgttcctgcgctggaggatttcgctaatgagcgtggttggtctattgctgcgcgatacatcgagaacgccagcggtgcgcggctggagcgtcctgaactgatgcgcctgctgggtgaggcggaggctggcgacgttctacttgttgaaagcatagacaggctaagccgcctgactcaaaaagaatgggcgacactgaaacagaggattcaggataaggggctggtgatcgtcgccgttgacctgccaacctcatggcagttgctgaacgaaaccgcgtcagagctaaccagtggcatcctgagagccgttaatgcaatgctgatcgacatcctcgctacaatggctcgcgtggactacgagacgcgactgatgcgccagcggcagggcattgaacgagccaaagctgaggggctttaccgtgggagccagaaggatgttgctgcccgcgagactgtccgggaaatgctggggcagggtgtgaaacctgagcgcatcatgaaagctgccgggataagccgtgcaacgttctatcgcatcaagcgagagctggccgccagcgttacggagtga

SEQ ID NO: 80939 - DNA, 1890 bp, Citrobacter koseri
atgccaacaaacctacgccgcctgcttgcgcaggctgctgacgccgaaccgctgaacactgcgattgccgaagctcagcaattggttgcggagaagatcgttatacctcattccaagttatgccctgtcaaacagcgacctgtgaaggctgcgtttaacacggagtccgggcagtatttctacaatgcagatggttccgttatgtcgttccgtgaatggaaagaggcgaacggaatcggacgcaagacacacgcccgccgcgctgatgctgggctacgtcagattatccagcccggcgacgcaattcattgtcaacgcgctgagattgatcaatggctcaacaagaagcctgcccggtacgccgaaccgctgccgccagattttcccggcgttcgcgttgacgatgccgctctgaaaccacgtgagcacgccatcccggaagcgaccacagggcaaaacgcctttcttaaagcctgtcgcgagttcctgatttgcgacgacgccaccctgaaaagaatcagccggggcatgagtcaactggaagcgatgcgccatgcaggctttaccagactgggagacaccccggaatttcgccagttatggtgcggtgagctgaaacccacagatgataaattcaatacgctgaatctgcattgtgacgttgggggcgctgacctgccgccgtccatcccgccgctggttacagcgccgtacaggttccgcgaactggagcaatgcgaccgcccggcgttcgtgccattgccgccgccagatggtggcgactggcgacccggccagcaggacgtagccgccgctgtgtttgcccgtgaccgcgatatgttggccgtgctgcctaccgggtacggcaagacggctgcgttcacctatgccctgcaattcgagtctgatgctggtgacggcctgaccgttatcgttgtgccgacgaacaccatcaagcagcaggtgctacagcagttaagggaggctggcgttcacgcggtggcctttggcgataaactaccgaagcggcgtaatgcgcagcagcttgcggggctggctgctggggcgtttcgggtggttgtcgtttcgcctgagcatctggtgccggggagtcaggtgctggcggcactgatggccgcaggtgtggacagatttatcatcgacgaagttcacaccgttgatgactgggagtttcgctctgctttccccgcgatgaagcacaccttgcaaaatgccttccccgctgcgcagcgttgtgcgttcactgcgaccctgcgaaaaggtgatgagtttgagctgatgaaagagctgggctgtcgtggcgagttcctgaccttccgcgtcagcgctgccagagaaaacatccagcttattcctgttcagcaatgcgaaactcagcgccgggctgccgttggtctggttgatgtccttccggtggatgagaagacgctggttatggtggacagtatcaagatgctttacgcgtacctcgacgagctgggaagccgcgcccggccttatcattccgacacccgccgcctgagccgtgaccagcgacacgctaacgctgagtggtttgccactacgcccggtgcggttctgattgctactaaagccttcgggctgggggctgatatctctggcgtgcgtaacgtaattgtcacttatgttcccgaagacctgcccgatttagttcagatgatcggacgtgccgggcgtgacggtcaacctgcccgtgcttttctgctgtggtcatcgttggctctgtatggcgaccccatcacctatgacgccgactctgccccggtgccgtccggtgtacctgatgagctggcagcgttgtaccgccctgaaaactgcaattggggttacatctcccgcttcctctga

SEQ ID NO: 80940 - DNA, 432 bp, Citrobacter koseri
atgcctgatgaaaccgcgctgcatcgcgcggggcgttctgacgccctgcttaatgcgcagctcgccttcgccctgaacgggtattcatctgacggactggccgaacgtcatcgcaagacccttaatcgtgaagccatccttcgcgatgtatctacaccgctggagcgatattgcctgctgaatgattgcgcaccgtgggagtgtctgtccgccgtgctgaaccgcatgaaaaggccggacggctcgcgcctttggaaagccgcccgcttatcgcgtgaggtattcaatggccgggtgcatccagtgcgcaaaacgcctgatgaagtttatgccgccattgcccgccgcttgttcctgccgaagccagtgcatctggaagtgattcagcacatccgggcgcttggcctgttgccacttaatggagatgactaa

SEQ ID NO: 80941 - DNA, 177 bp, Citrobacter koseri
atgacacccgcagagtttagagcatggtttgcaaccctgtcgccgaactatcagagcgcagcacgagccatgtatgaaagcgcccgcaagacgggaacacataccgcttccagcctgttactcattcgctcgctgattgaagatcaaatcaatttcgatggagattttactctatga

SEQ ID NO: 80942 - DNA, 564 bp, Citrobacter koseri
atgagagttttaaacctgaccgatatccagcgcattaatacccttgtgaagcgcgaccttctcaatgtggaggaggttgtcgctgcaaccggattcgacccggtagatgtggacgcggtgctgagaggcgtctatgtcgccgatcttgcctgccagtggaaggacgacgccgctattacactggaggaatacaacgctatccgtaagcgctggaaaccggggcgcggtcactgggacactgcatacgctattgcacgcgattttctaatccggcctgaaactgtattagctatcgcccattcccgctttagcaatgcccacacccacccgatgccgaaagcagttaaagcaaagcctgagaaaccgcagacgatgcgccgcctgttgagcgccgacctcgatcagatgcacaagctggagcgcttcggctggaaacaaaccgagatcgctggggagcttgggatctctgctgaggctgttgctcatgtcctgcgcctgatgcgtagcaagtggtcttatccagatattttggaagacgttaacacgcgattcggggctaagtga

SEQ ID NO: 80943 - DNA, 234 bp, Citrobacter koseri
atggcagagaacgaatcgctgcaccccgccgttaaccctgatctctacgtgaaccttgacgaacaacgcgaaggatacgcgccgattgaatcacggggttgggatgtgctgacgcagaacctgaccgggaaaggtcgaactgaccccagccaaacacttaaccagaatccgaaacaacgcccgcgcggctccgttggtgagcgtcgttggcttcgtaaacgtggattactttaa

SEQ ID NO: 80944 - DNA, 240 bp, Citrobacter koseri
atgagcaaaactattgtattgctgccgccacgcaagaatacagactgggctgcccaattaaagctgatttctgaatcgcttgaggtgagtcaggcagacctcgcccgtgcatatcaggttgaccgtcaggatatggggaaagcgtatcacggtgtacgcaaactgccggagcgttgtgtgcctgttcatatgcttttgttagcgcaggtacacgactttagagcattatcaggagaataa

SEQ ID NO: 80945 - DNA, 414 bp, Citrobacter koseri
atgagtacctgtaatttccatgccgtggagcgtgtcgctgacgtgcgcccggatttcgccttgccgctgggtagatgcgaccacatttaccctgagcgtgtacagcacgttttcaatccagacgaagcggtttatatcgttgcccggtctgccacgtccgatacccgcacctctgacgttagccgtggtctgtccccggagctgccgccgaagatggccgaaaggctgcgcgaacgtgaacggcacgagaagaatcgagctagaccccgcaaggtaatcactgaggcgatacgcgctgacattatcgttcgctctgcaaaaggccagaagaatcgttacattgcaagcaaggttggcgtgtctgaaacctctgtgcggaaggtgttgaacatggcgcgtatgagtgcgcactaa

SEQ ID NO: 80946 - DNA, 429 bp, Citrobacter koseri
atggttacacggacagaccaactactaagaaaagcgatgcggggctatctggaacacctcggcaacatgccgctggcagaacggattacaaatgctgctgtattcgaagatgtgtatcgcttcctgttgaatggttccgggcggctggagctgcgccgcgctgacgtggctgccgtccgtgtcttcctgtggaattatcaataccgtcgctgtgcggtgacaggtaaaccgctgcgccttgcgtctgccgtgctagatcactgccatcgaaccgggcgcgtgcgtgctgtggtgcatcgctctgctaacgctgctgagggtgggcgatatgttgggcgtacttgtggcgtgaacattataaatttgaaagctatgttggatatctatcgtaagaattatttaggaataaatcttacgtatccaacatag

SEQ ID NO: 80947 - DNA, 1254 bp, Citrobacter koseri
atgttggcatggttactaagtatgttaaaggaagagttttcactttcagaagttgcagacattttgggtgtgtcaaaagaaactttaaggcgttgggacactgctggaaaattagtttctcaacgaaatgacgagaacaactatcgtttttatagaaaagatcaacttaaacattttgaacaggctcagtttttattcaaaagccagtggtctgatgagtctaaaacctgtaataacatttatactgtattagaattatttgctggcgcagggggtatggctttaggtttggaaaaagcaggtttgaaatctgttttactaaatgaaattgattcccatgcttgtaagacgttacgaaaaaatagacctgaatggaatgtggttgaaggcgatgtgagcaaagttgacttcaccccttatagggataccgttgacgtactggctggcggtttcccttgccaagcattctcttatgcaggcaaaaaacttggttttgaagatacacgaggcacccttttctttgagttcgccagagccgttaaagaaatcaatccgaaagttcttttagcagagaatgtacgaggattgctaaatcatgatgatgggcgaactttagaaacaataaaaaatattatcacagacctaggttacactttatttgagcctagggtacttaaggctattttctacaaagtgccacaaaaacgcgagcgtttgattatagtggctgtaagaaatgatcttgctaatggcatcgattatgaatggccgtcttcttacaataaaatattaacacttaaagatgctttaaaaaagggagagctgtacgatagcgacgtgccagagtctgagggacaaaagtatcctaaaagaaaagccgagattctaagcatggttcctcctggtggctactggagagatcttccagaggatattcaaaaagaatacatgctcaagagtttttacttaggcggtggcaaaacaggtatggctcgtcgcttatcgtgggatgagccaagcctaactttaacatgtgccccagcgcagaaacaaacagagcgttgccacccggaagaaacacgaccattaacagtgcgtgagtacgcaagaatacagaccttccccgatgactgggtatttgaaggcccaatgtcagcgaaatataagcaaatagggaatgcggttcctgttaatctgtcatttgccgttggcaaatcagttgtgcatcttttagaaaaaataaataaaagataa

SEQ ID NO: 80948 - DNA, 720 bp, Citrobacter koseri
atggcattacttgaatatatcagtgatgaagacctttttaacgaagttgaaaccttattaattaaagctaaaaagaaaaaagacgccgctgagaagacttttaacagcaatgtgattgacccttttggtgcgctttttgaagctccgggtttctcatcccatgaagagtggcgaaactccgaacttgcacggcaacgtcagaagaccattcagaatcatgttggtacgtttcaccaaaaaatcctcggccatgttgatggatggcaggacatgggaatcgggggtatcgttgatctcctcaacgaagagagaaaaatcattgctgaggtgaagaataaatactcaacggttactggcggggacttagctgataagtataaaggcttagatgaactggtatcacctaaatatagccgatttaaggattactgcgcttactttgttaatataatccctcgcaagcctgttaggtttgatatcccttttaccccctctgataaaggcagcggtactctgtgcctttcgaatcctaacatccgaatcattgatggcgcgagcttctatgagcttgtcacgggcagaccggatgctttgcaggaactttatagtgctcttcctcacgcaattgagtatgttttgaacgagcgtctcggacagaaaggcttctccatccctgataaagatagctttattaagtattttggtctcgcttacggctga

SEQ ID NO: 80949 - DNA, 579 bp, Citrobacter koseri
atgaataagatcaaaataattctggccaatacattaataattaccgtatcggtttactgtattttttttatggccaatgaaaaaagttgtctatgctacaaaaacgcctcacttaaagaagactctcttatcaaaataataaatgaggcagctgaatcaaaagttgttcaatggcgcgaaatggagaatgtatatactatattttttaacgatgaattatacatgattagtgaaaccccagaagagtatcttgtgagcgctattaaaattattttaagtaaagattatgatcaaagccagaaagtttacactattatattaatgcaaaacctacccattaaggagtatatgtgtttcatggatgctgtgaatgaacaatttgaaaaaggtctccttgacaaggaggtagcacgatttgccattttacccgacattaatctttacagtacatcaatttattattggtggctcccagactggcgagaaaggtttaagaaaaatgccaacaacctatttaaacaaaagctgatagatgatgtattaagtggccgatacttcctctatgcgttacgaaaataa

SEQ ID NO: 80950 - DNA, 987 bp, Citrobacter koseri
atgtcttcagaactattagttgtttttaaagattctttgatgggaagtccatcaggattacaatacaaaattactgcaaataacattgagatagacaataacaatgtatctaagcataataactcgttagtttatcattttaccacgaaaggtaatatagttactatttcttcatccggcttgcaaaaagcaatcccacctgcaagtgagtatgaaattaaaatctctattatagataagaaatccgaaaaagaaatagggagtacgatcctgccaaatgggaaaaaagtaacaatggtagtcatatcgccctggaccagggtaccaatcaatgttaatgagtcaggtaataatttttatggcgacttttttgatgttgaatatgaggagaggatatcatcagaaatttctttcggtgagaaaaacactgtaataaaaagtacaaagatagtaataaaagatattccaagaaagataatattaactgccttgaaatataggagctccacaaaatgggccggggaagaggaaaaagactcttaccatcctattctgaaaaaaacatatcattttggatcgaatacgaataaatgtagtgcctttgtaaatgatgtattgcttgaggctggactgactgtaccgtggattgaaactggttatgcacgctatacgccacaatggctttatcaggaacttagacctcccctggcagaagaatgggctgatccaacaaagttaacagaacaatgggattacttcagtacgcccgaacctggagatgtgggtgcctatataaaaaaagaaaaaggagcaacaggacatgtaggaataattattgcagcaggggttacaatttcggcaaacagtaagacaattatagttaacgatgcaggattcagaaataaaaatggtacagccgcaatatcagtatctcatactgagtttgattttaatgtttttagaaggtatcaaggaaagataaaatga

SEQ ID NO: 80951 - DNA, 897 bp, Citrobacter koseri
gtgctgaacaaccgtaccaccgacgtgaaggtggaccacaccgaaaccatcggtaacaaccagaaaatcaccgtgggtctgggacaaacggtcaccgtgggtaaggagaatgccggagggcatgaccagaccatcatggtggcacatgaccggagcatcacggtacgcaacgaccagacgctgaaggtgaagaacgaccggatggtgagcatcagccatgacgacgggctgtacgtggcgaatgaccgcagggtgacggtggacggaaaacaggagcacaccacccgcggagaccatatcagtctggtgaaaggcagccacagtctggaggtgaaaggcgacctcgcgcagaaggtggcgggtgcgctgggcgtcagcgtggagggagatattgtcctggagagcagcagccagataagcctgaaggtgggcggttcgtttgtggtcatccatccgggtggcgtggacattatggggccgaaaatcaacctcaacagcgggggcagtccggggacaccagtagggacgctgcaaccagttgttctggaggcactgacggataatgaagatgtaacgcctgaacagaataatagcgaagacaacaataacgccggggacaataacgattctgaagagcaaaatgaaccaaaagctgatgatgaaaacagaaaaattcagatcatcacaaataaattgagtatctcggaatcacatgtagttgggctggattttaaaatcagaaatgagaatgatgatacattaatcagatctattacatctcaacataatggagaaagtgagttatatccagaagaatttttttcagccgccaattacttatttatcggtaaagaaagtgataagtggcaggtttacatttctgtagatgacttataa

SEQ ID NO: 80952 - DNA, 477 bp, Citrobacter koseri
gtgcttaagcatataggttttattttagctctgatgttatctggtgtagttggttgtgttgcaaccgaacctggcaacattttgttagatggccttaacactattagtttcaacgttggtgaaattgctgatggagagattgctgatttgagacactccacttgcactcttcgtctggccgataataagaaggaggattcctataactatattgaaggggcaatttgccctgttagtggagaagagtgtacatactctgccatcatgaaactgaatgggaatataacaatattgaaacagatatcgtcaaataaaaataactcagtatataaaaataatgatttttctatttccataaaacaaacaccgataacagagtcaaacgatgatgaaggaagcgacgttaaagctactattgtcctcaaaacaaaacacggtgaaaagacatttaatatgactggatactgtggggtttaa

SEQ ID NO: 80953 - DNA, 768 bp, Citrobacter koseri
atgaccgtaacactttggatgtttgcgagaggtaaggatgtaataaacttacaacagttactcaatagaaatggagcctctccaaaactcatagaagatggcaaatttggtagaaatacatacaatgcggtaaaaatttttcagcggcacaatggactgacagatgatggtgttgtcggggcacaaacctggcgaaaactgggagttcaggattctttcaccaatagctcatccaactcttctactgattcaaatggtacgacgactaaaccatcaaccggtacgattgctgagacaagtgagggattttgtttccccttcacaaaacttcctgccctgtcatgggcaaacggaggtcgtcaatttggcgcttcacgtactggaggccgcaaacatgcaggttgtgatttgaagttccccgcaggaactcctatttatgctgttgctgatggagtgttacttcagaaaccatatcccttttactcaggtacttatgctgtggaaatcagacatggaaacctcatcctccgttatggcgaaattgctccaggctcatacacaggcggggcgtctgtcaaaaaaggtcagattattgctaaggtgggaagactgaacagtggttcatccatgttgcatctggaggtttataccaatggagcatcatcggccagtcttacaacacattcaggagatttcagaaggcgttccgatgtaacagatcctgcaccatatctcaatgtatggaaaaataatctacccaaactttga

SEQ ID NO: 80954 - DNA, 834 bp, Citrobacter koseri
atggacgattctaactattttttttcgataaaaatatttattttttgtattcttgtttcatttcagacagcagccaacgatttgatcattattaaacatgagtatggtaaacgaggatgggatggtactaaatatgaaaaggcaagtatttatccattgtctgataaatattttcactattcagcatctgatattgaaaatataatcacaaaaaaaaaccttaacattactcttgacctttttctaaaaaagaaacagaactccatattatcaaccgttatatttaaaaatcatggagataaatcaatttttattcctgagatatccttctcagcgttgagtatgaatttcttaataactacgggtaatataatgctgggatatttaggtgggagatttgattatagaggcgattttgaacgaactgactggattgaagttcttcctggagaaatgatttctcttacacaagtacttaatgacaattatgaattccttcctggtaagcgattttatagtattagctcattggagtatactgtagttaatgaaaaatggtttatagacagatctatatataatagatttatttccataaccgccccaaaaattaatgattgccatattaaaaagaatacatcatatgtattagaaaaaagatggatgtgtatattggatgtcaaggacaaaaatgtatttccaagagatttattagaaaaatttggttttcataacgttaatgatgatagttccttcagaatcagaacgaatcaggtatttgttgaaattgatggtgataaagttagatctttctatgaaagagaattaaattag

SEQ ID NO: 80955 - DNA, 768 bp, Citrobacter koseri
atgaatgataaaacaaaaggtaagccatcaaaaaataaaaccgtcattaatcaatgtaaaataaatgattttaaagtaatgattaaagagacgttagatgctatcaacaaggttttagaacaaagaaagctcgatcttgaaacatggggggagaaggaacaagatgaattttatataatatttggttcaaagggagaacgaatccttgatatagatatgcccataaggggagtttcaaatatacagaaaatgactgcaagagaagtaatgcaagattgcattcgaaggctcatttggataaaaggtcaactgacattggatagttttattaatttaatctacgatccagataatcccaacgatcccactaactctacggttcctcgtgaaccgggaagccccaaaacatttgccgcttatgtcaagccttcgcaacaaactgacttaaaggtttatataggaataaattttacagggagagtaaataacagaaatgtaaggacttgtggtgcagtcatgggagttgattctcgcgtggcaactctttgtcatgaaattagtcattttgaaaagaattttgttgatccgtctttaggaggaatgggaacattagattatgaatctgatggaagtagacctttacccaaccaagataattcgtcttatgaagggcatttggcaggtgcagataaacttgtgaggtctggtgataaaaatgtttttaataacgcttataatattgaaaggtattttcaaatagaagtttga

SEQ ID NO: 80956 - DNA, 408 bp, Citrobacter koseri
atggggccgaaaatcaacctcaacagtgggggcagtccgggaacgccggtggggacactgcaatcgacagtgctgaaaatactgaaagatgatgatgctacgtctgaccaagatgatagcgggggacgtgatggctccagaagtagcagtgactcaggaaagcaagatgagccagaagaaaaaggcaaatcaggagaatatagtatccagtttcattttatggatactgatggtacgccgtaccctaacatgaaatatattgctcattttgctgatggaacacagaaagaaggaataacagacgagcaggggaatactgaactatttatcagagatgacgataaagagattgaggtaaaactgattaatccggattttgatacatgttggggagagaaaaatgaatga

SEQ ID NO: 80957 - DNA, 198 bp, Citrobacter koseri
atgcgccggacagggaaaaaatcgactaacgcaaccggaaaaaaggcgatgccctgcatcgccttaacacttttcgccggatggcggctgtgccttatccgacctacaaaacagtccgtaggcccggtaagcggtagcgccaccgggcgcctgccggatggcggctttgccttatccggcctacaaaatagtccgtag

SEQ ID NO: 80958 - DNA, 123 bp, Citrobacter koseri
atggtcaacgtggccgatggtgccgacgttaacgtgcggttttgtacgttcaaatttttctttagacacggctatattccttactatagtgctctccccttcaggaaagagcacgggacttag

SEQ ID NO: 80959 - DNA, 2481 bp, Citrobacter koseri
atgaaaatcagttaccccatcagggatacagacggaaaagagtttcattcactggatgagataatgcggcttgttgatggcgaagcacacggaacctggctgctgggcgtgaacgggctgtggcacggcgcaatacatatcagtgacgtatcgaatcctttttctgccctgaacctgaatgcgctcaatatcggagaaccggttccccttcagtttatggccgatggcttcatcgtggcataccggttaaacaatgactatctgacagcgccctgcaacggacaggagttgcgttacagcagcagttttgtcctggtgaaatcgcagtgtcagcccgatccgcaaaaagaaaaaagctggctggagttttacagtctgtatatgcatctggctccggtgaaagattatccgtcttccccctgctataaagtcagggccgggcacaatggtatacggttacgaaagtatgtcagcggcaaaaatggcctgccggacggtcaggtgagaggggattatataacgtatcaggttccgccgaagaccggtaaacgccttaacgaaggagaccgctttgtattgtcgcgtaccggacgtttttacgtggcaaaaggcggtccgctgatgacgttcgggctggttcgtctgctgacctgggaaacaacggaaaatgagccatactgggtaaccctggatccggctctgatggagccggatggtgaagtccaggcgctgatgcctgcgtggatgcaaaaagcgaaagccaggggcgcgtttaatacggtggaaaaagggggcgaaacggaagaatggaaagtcagcgccgggacgccggttggatttatgggatgcacggaatcccccggggaagaaagcggacagattgacagcgagtggtatgtccatcttgaagtgctgagtgccgactcgaagatgccgacatttttatcaaacccggaaggcgtggcgggagaaaaaagatccatccaggcagcaaaaggaaaaatgttgtacacccgccaggtggtatcgggacaggagacatttaccgcaacgtcggccgcactgagtgcccggtgcgttctcccgcgggaagctgcaaccccggtcagggatggatcacagaagtggtggtacaacatcaccggaaatcactggttgccacaggatgatgtggaagaagccgggcagtacgacttcctgaaactgggttttcagccgctggaggaaaacggcagcggcgatatggtacacagcccgtatgaggggtgggtgccggaagcgtttggtgcaataagcaactccgcagaacagggagatgaatggcagtacgaccaggtgccacaattttatcgtgacctgatggcagaaatggacagtgatcatgacggaaaagtcacggaagaggaaatcagacaggcactggtggtgcgggatccgctggtcagggacgtggtaaaccggctggtggtaaagcatcacagcgagtggtccggtggtcgttcgacgggacgctgggaagggttttacaaagatctgggctcacaggaagtgaagtactgcgagaaatggcaggcggatctggagtggatgagtaaggtgccgccgtttgatcagggtaaggctgtgtggcattttcatccggtggtatttttggcggctgttcatccaacgactgagtgtgcttgtaacagatatataactttggatgaattaaaaaaagttgccccgacagtagatgaagaaatactgaaaaggtatatctctgatataaacgctggttttacccggtttggcatgaccacttgtagagagaaagctcatttcctcgcacaacttatacatgaaagtggttattttagatacactaaagaaattaatggggaatcagcgtcgtatagtccttggtatggccgtggtttaatacaaattacaggtgaaaataattatactgcttatggagaatatatcaatgaggacgtgatatcttcagattcagcgagagataaacttatctcgtctcctcattgtgtattatcggcattttggtactttaatatatttaagccagtgaatgtatatgcaaaaaatgatgattttaaccatgttacagcattaattaatggtggttacatacattataacgacagattatctctatttaacaaattggttctttctcttaatgctgagcacttgaataataaagaaatagatgaaaatttcacattcgagaatagcagtgtatataataataaagtatattcgtttggttgggggttgtggcatgatcctgatagctccaaacgaggcacagataagagtaaagaggaagcattaaaaggatataaaagagcgaaagaattgattgatttgcatccatttcctcatgaaggaattgagagtagaaggaaaatttacggaatagaaaaaagaaatatatctgaatttgtggtcaggcggataaatgaactggagcaataa

SEQ ID NO: 80960 - DNA, 405 bp, Citrobacter koseri
atgaaacttaaaatgttaattgttgttttatgttttttttcattttcttcgttagctaagaaacaaactactgttggctgttttagttctggtaaaataaatttaaagtttaccgagatactgtatgataatgtttttttaggttatgttgtttataatgggaaatcaaaattcatacctcttgcgttcataaaaaaaacagaaataacttttgatgatagaccttcagagttcacttatacatggagtgaagttgtagatggtaaaatcaatggcttatatgtagttgcctcacaaggtgcgagatttactggtttttattacaaatcaaataacgggagagtaactgaatttgaagaaaaaatagaagcatacaataacgatggttctgattgtatatggtaa

SEQ ID NO: 80961 - DNA, 1227 bp, Citrobacter koseri
atggaggatgagcagtactgggtgacgatggacccggaactgatggagccggatggtgaagtcctggtgctgatgcccgcgtggatgcaaaaagcgaaagtcagaggcgcgtttaatacagtggaaaaagggggcgaaacggaagaatggaaagtcagcgccgggacgccggttggatttatgggatgcacggaatcccccggggaagaaagcggacagattgacagcgagtggtatgtccatcttgaagtgctgagtgccgactcgaagatgccgacatttttatcaaacccggaaggcgtggcgggagaaaaaagatccatccaggcagcaaaaggaaaaatgttgtacacccgccaggtggtatcgggacaggagacatttaccgcaacgtcggccgcactgagtgcccggtgcgttctcccgcgggaagctgcaaccccggccagggatggatcacagaggtggtggtacaacatcaccggaaatcgctggttgccacaggatgatgtggaagaagccgggcagtacgacttcctgaaactgggttttcagccgctggaggaaaacagcggcggcgatatggtacacagcccgtatgaggggcgggtgccggaagcgtttggtgcaataagcaactccgcagaacagggagatgaatggcagtacgaccaggtgccacaattttatcgtgacctgatggcagaaatggacagtgatcatgacggaaaagtcacggaagaggaaatcagacaggcactggtggtgcgggatccgctggtcagggacgtggtaaaccggctggtggtaaagcatcacagcgagtggtccggcggtcgttcgacgggacgctgggaagggttttacaaagatctgggctcacaggaagtgaagtactgcgagaaatggcaggcggatctggagtggatgagtaaggtgccgtcgtttgatcagggtgaggctgtgtggcattttcatccggtggtgtttttgtctacttttaccaaaataagctctgatattattgaattcgaaacgactcttggcacttacaaaatatctaagaagtccgcagattttatattgagggaagagggatatggagcaagtccttatgttcccaagaatagtaatgcaagtggagttaccctagggtatggatatgatttgggtcaacaaacagtagacactatgagagctacgatttctgacttctatacgcaataa

SEQ ID NO: 80962 - DNA, 159 bp, Citrobacter koseri
atgaaaaacatacaggtagatttctcacaaagtaaccttagtgatattcctatgcaaattagaacgatgaaaaaactttgggttgggaaagggttggatggtccaattaagcgaagagaaggcgagacgaaattatttgaggaagggcttgcgcaataa

SEQ ID NO: 80963 - DNA, 342 bp, Citrobacter koseri
atgtgttttattgacccgagcaccatgcatgaaaggttacaatgtcaggtcgtaacaatccgtgtaactagtttatcggtcagttcagcagacactttataccgccgccacgagatcgatgttgtgtcgtttggcaactcgcttcatgacccggattgctactacctgattcacgcctttgacagcgctgaaaacatgactgcggttctcgatgctttttatgctggcgctgactggcgcaacggcccacgtgaagacatcattggcagcacagaaaccagcattaaaacagtgatgaatctaccaccggaaagcgtggaagggctgcgggtgcaatcgtag

SEQ ID NO: 80964 - DNA, 531 bp, Citrobacter koseri
atgaataaaaaggttatttttttgttgctgtccattatctcctctccaggtttcgccgttagcatacctgacccggttccttcagatgcttgccattttctttcaggaatgccattcattaaaactccgtcaacctataaaccatatgctgaaggcagcgaagactatacgtgcggaacaccctattttgagatagaaacgccgaatagtggcgacactatgaacaataacatcgcttactacgtatcaggtaatcaggacaaaacaaagaaattgatgctcatgcttaatatgaataatcaagatccaaatgccgtcaaaattgcccgaggttattttataaacggttcatttgaaataatgaaaaagatgtttcctcattctcccggaaaagttgccgacattgttggtttactcagtgatgggaaagaaggtgaatggagcgtcgatgggtggaaagtctcttcagtaaaaaaagtctggcctactggtagaggttatgaacttcgtttcatcgtgacatctggctga

SEQ ID NO: 80965 - DNA, 552 bp, Citrobacter koseri
atgaacaaagtaatgatgaaaactgttttagcaagtttggttgtatccagtattactgtgttgacaggttgtgttacctcaccagatatggaagcagctaaacaaccgctgggtagtatagtcagtgttgttaacgttcccggggttaaaaaggatgcactttacagcagttccaaaatttgggttgcaaaggccttcactgattctaacagcgtaattcaatatgcagataaagaagaaggttcgattgttggtaaagggaatgttaaatacccatgcgacggttttaatgattgtctggctaatgaagatgttcgatataaattcactatgaaaatcgacacaaaggatgataaagctcgcatcacctttgatgatatccacatttatcgtccggctcatgtaaccagcggaattgcgttccctgccatagattcgccaaacatgactgttggtgggcaaacaaaagccaaaaaagcgttgaatgatattgttgagcaatacaaacgtgagatcgtgactgaaagtagctctgctgcaaaagattggtaa

SEQ ID NO: 80966 - DNA, 573 bp, Citrobacter koseri
atgcccgtatccagttattaccaagcccaaccggatggttatgtgcgctttgattggcatggcaattccatagaaggcgagtttttcagctatgtggagtgtggtcgagatatcgatcccaaatggggatacatccgaccatttgatagagtcatcagacaacaactaatcgataatttgcaagcaactcacgggattgatctccagacattcacctctcaaggcgacctgatcacctgtgatgcttttgtcacccataaagatctgcaggcagcacaccaagttctcgtagagtcctttgatttcgttgatgaatcggagcttacaactgaaagagaacgcatcggtaactgccgggtcgatttactacgacgccaatacattgtcggcagcaaccttaaagaacccaaagagtccttggacaatctcaacgcagagttccttaaatgggtaacgcctttctacacgccgttgcgttacgagcggaaatggttaaccaagcatcgtaaagggttattacgttttggcgcactcgttgctgtcgcagttatggcctatatccactatggctga

SEQ ID NO: 80967 - DNA, 501 bp, Citrobacter koseri
atgaagcgtaggcactggataagcatcgaaacacacaagaagttctatagggctcgcagtgagtttgcggactggacggacagggagtggaaacacccggtttcctgcttttttttgcaggtctggggattcttgatgtttgtttttcttgggctggcctcgctgcttttgggcgttggttcacataaaaatgccttcccggaattatatccgaacgatgaaaagcgcagaccaattcgctttaagtattctttgactttatttgtcagggagaagggatggattttgtctggcatgttcgcgattttgttcgtctcagttgctgacgtattcaacccattctttttaacttcgccccttatttactacgtaatcaatggcgcagcactattcgttggatggtggatcggggtatttgtttgtatgagactgtttagctggatgagagaacgcaccatttggctatcagaatggcagcgtagataccctgacgacaagtag

SEQ ID NO: 80968 - DNA, 561 bp, Citrobacter koseri
atggcgattttcggctacgggcgtgtctctactgctcagcaggatacggagaaccagaggttggagcttgagcaagctggttggacgtttgacttttggtttactgatgtcgttagcggtaaaacccctgctatgcagcgcaaagcattctcagagttgctgggcaaaatcagggacgatgaaacgctggttgtagccaaacttgaccgtttggggcgtgatgctattgatgtgcttcaaacggtccgggtgctatctgatcgcggcatcagggtgatagtccaccaacttgggaatactgatctcacctccgctgccgggaagctgttattgtcaatgctggcggctgtagctgagatggagcgagatttgctgattgagcgcactcaggcggggttaacgcgggctaaagctgaaggcaggaagttgggaagaccctttaaaattgcaccagaagctcgtggagcgattgtagcgaaaaagaatagcggaaccagtgtcagcgcgttagcgcgcgaatatggcgtttccagagcgactatagcggctattgtcgattga

SEQ ID NO: 80969 - DNA, 849 bp, Citrobacter koseri
atggcttacacagcaacggttatccctgtaatgatcgcatcccctggtgatgttactgaagaaagaagaattatccgcgaagtaatccacgaatggaatgatattaattctgccctctcgaaagttatgctaattcctgttgggtgggaaacccacacatcaccggagcttggcatgagacctcaggagttaattaatcagagactgctagttgattgcgatctattgattggtgctttctggacacgacttggctctccgacaggtgatgaagcaagtgggactgttgaagaaattcacaagcatttagacgcgggcaaacctgcaatgatatatttttcatctaaacccgtagtgcttgataccgtggatatggggcaatatgatgccctaaaagcattcaaacaagaatgcatgcaacaaggcttgattgagacctttaatgagtcaactgattttaaacataaattatataaacaattgacgctgacactcacaaataattcatatctgaaaaatatcataaactcttatcgttcagaaggaattgataatttaaaacaagaatctcctaagatgcttctatctgaagatgcaatttttgtcttgaagatggcatgcgaggacgaaagcggtgggatattaatattagagcatctggatggaacagatattcatgttggcggccaaagtctcggtggagaaaatgctagagaggttgctaaatggaaatctgctttagatgaattgaaatccaatgaattaatatcttctcgggattataaaggcgttcaattcgaagtcactcataaaggatggactctttttgaatcattgaagaacaagtaa

SEQ ID NO: 80970 - DNA, 498 bp, Citrobacter koseri
atgacaggagcagactttttattaccgattgcagcgggagccgcgattagctgcgccaattatagtgtagttgcccatgctgtatcaaagcagcacatcagcacgctacgcgcaactgtatggggggctctgggcactctctcattgttgctgggcgtatgcgccttttctgctgtaggtgctgagcatcagacagcacgaaaagatatcgtatgtgcagatgacaacccggaatgctatgcgaaaacgcaccacaacccggtcagggagtgcaagcaggtaatggacaagaaagcgacgtttcgccatgtgtggcaggaaagtgaagcgcagccggtattcaacacctacctctggcatgacgagaacaaacgaactattcaaatgttcggacaacaggctaaggcaattaatagcctggggatgctaacaccacttcaatatttctgtatttttaacgccagcaccggggaagtcatcgcggcttcgtttgagtga

SEQ ID NO: 80971 - DNA, 129 bp, Citrobacter koseri
atggcggcgcaggcgccttatccggcctacggtatggtgctgttggtaggccggatatgcatattacggtgccgggtaggtataaacctggtgtaccgcttcgatctccgccagcacctcttcgcttaa

SEQ ID NO: 80972 - DNA, 1242 bp, Citrobacter koseri
atgagtagatttggtggaagaggatttattgcgttctcagagtatgacggttttgcattaattgaggggcagaaacagaaactcatagctgatatcaatagtcaatccgacaattatattctcaacgtaaataagtttgagtacatagcccacctcataactaagtttacgataagcccaatcgagctacattccgaccagttgaatgtttcaactgaagagcgaatgatccctgccgaaatgcaccctagttcctattacgtccacgatggcaaatcgtattctaaagatgtgtacatgtttcacttaccttttaccggggaggtggcgttgcttaaagttagagcaagtactttcagcatgtccgccccccgaatcgaggttaaaggccaagagattgtttttgaatttattgattttaatgcagacccccaatcaatgaaacgtgaagccgacagggttgtttcacagcttatatctcagaattcgtatttgactaaagaccttactgcgtttaacaactcaattgagttactcgctaatcagacgctggatgctcgaaaagtacaattgcttaagaagaatgacatgttgttggcgttgggtgtacccatcaggaaatcaactaacacaccatccacgttttcgatccccgccaagcgtactcctgcgatccaagcaatacctaagcctattgtttcagagaaggggtacaaacctgagccgaccttggataacgcgatttatcagcaaatattgaagataacacatgaggttggaaaacaatttgaaagattacctagtacatatgtaggaaaagaagaagagcatctacgtgatcattttttgttaattcttgagccaaactttgaaggtagtgcaacaggagaaacttttaacaaaaaaggtaaaacggatattcttcttagatatgatggaaacaatgtgtttatcgctgagttgaaatattggcacggtaagaaggcctatctggaaacgataacacagctcttatcttatttaacttggcgtgattctaaagccgccattattatgtttgtttcgaataaagaattttctccagttttaaatattatcgaaaacgaaacaaaggaacattcaaattatcttggggctgtatcgacacatcatcttggatggtatcagtatcgatttcatattaatggtgataggaacagagaagtgcagctggctatacaagcatttcatctcccatcatag

SEQ ID NO: 80973 - DNA, 696 bp, Citrobacter koseri
atgattgatatgaaacatttttttatagtggagccgttagtagacccagtatccatgaggttaagaggtgtggaaatcctaactcgcttccaagatcaggatggtaagttctttccgccggatactgccattgacagcatgagcaatgaagaaagatgcttgttactcagagagcaagtcaatgctatcagacaaaaaagtgagttcttcacaaagaacaatctgttatgtagcctcaatgttaatagggatatgatcgaatgtattattcgaacaccagagaaggattgcctactaaggggtatggattatgtgcggcttgaaatttctgagagtctagccacatgtgaagttcacacccgtactaagctaatagaaacactatgctttagatttggaaaggtatggctggatgacatgggggcagggtactgtgatataaacatggtcgatacgaatcactatgaactaatcaagattgaccgtgattacttctggcgggaatccaagaaagaacagccctttaaaggtcttgtactctataaaaagaaatgtgacaaaattgtctttgagggcgtagagacagatgaacaacttgaactagcaaggcgtttagaggtgtggggtgtacaaggttacttgtttaactcttgtaaactaatagatattgaaagtctggcacttcgctatgactaa

SEQ ID NO: 80974 - DNA, 468 bp, Citrobacter koseri
atggctaaaaaagaaaagatttataacaatactaagttagaggcagcactaaaacgtgttacttatagtggtctaacatcagaagcaacgattattatcaatcaaactattcaagagtgtaagtctcttggtaagtacaagttacctgtcaaagatgtcttctacatcgtcaaacacgctacagagctttctaaagcacaagtagagcattatctaagcctaacccgtgcagagcagatgaagaagacaacagcaagtgtatcgtctatcgagaagtacaagttggcctgtactgaagtagctaaagcactggataagttcgtagaagagggtggtattttatgtggactcaagaaagctctaccaggtaagccattgaccgatgaacagcagaatacagtactggaactattgaataacaagaagtctgctaaagagttgatagcgtatctacaaaccattgtataa

SEQ ID NO: 80975 - DNA, 762 bp, Citrobacter koseri
atgaaaatccgtttaatgatattctcatgcgtggcaatatttttattgaatggctgcgctcgttcccctgttgatgcaaagaaaaaggatacctacagagcagagagtagcatcagtaaaaataccgtcccccagttgacagacaaagatatcttcggcaacgagactacacttgccgtttcagaagaagagattcaggccgcacttgatggcgaagaattcagcgtaccactaaactccgccgtcattctggtgcagtccggcaatcgagcaccggaaatggctatgcagcaggaaatgagcaggtattaccagatatcaacattctccggcatcccggacagacaaaagaccatttcctgtaataaagtgaagaatgacgaaggggaagccgccaccagcgaaaacatgaattatatgcaggcactacgttatattgcagcaaaaggacagcaaaaggcgatcatcgtttactgggatacgttacaggtgggtaaatataatgctgcaacaaaaaccactgtctggtcggattttcgaaacgaaacgcagtctgattcagtctcgttacgctacctgatgcgtttcgcccttgtggatgtagcgacgggagaatgggcaacctggtctccggttaactacgaagacaatattcttcagccactcacaggaaatacctccgttacggaacaacaaattgctcagttgaaacaaaagaccttctctaccgtagttaaaaacctggtaaatcgctatcagtaa

SEQ ID NO: 80976 - DNA, 675 bp, Citrobacter koseri
atgagactttccatccgctggctgctgcccctgttgctgacggtttcaccggtgtatgccagtgagatggcggatgcgcagaccacgcttaacgagatgtcggcctgccggacagagcctgctgcgctggagcgtctggactgctatgaccgcattctgtcaccggaatccgacaccggttttgccggagcgctggtgaaggcgcgttatgacggtgaggcgcgcaggtgggccgttgaacaggagaagcagcgccaggataactccaccgaactgctgcttatccgcacagagggcgttcgtccgatggtgattatcaccgcacccgccatcggcagcctaccgccgcgtccggtgctgatgttcagctgtgtggacaacatcacccggatgcaggtggcgctcaccgcttcccggcaggaaagcgatatcccggtcacgctgaatacggagaacggtcagttccgctcgcgctggtttgtgcgtgaaaacggctttctgctggaagccagccgggggctagcggggattgatgagattaaacagctttttagcgcgaaaacgttaaccctggtggcagggagcggcaacgctggaaaattgacctttaacattgacggactggcgcagaccatcgcgccgctgcgtgaagcctgccactgggtagggaaataa

SEQ ID NO: 80977 - DNA, 423 bp, Citrobacter koseri
atgattcagattgatatttccacgctggtaaaacggctgaactcgttctctcgtcaggcgctggaaatggccgccacagcttgtatgagccagcagagcaccgaaattactgtcagtcacgttttgatacagatgctggccattccgcgctgtgatttgcgcgtgattatagagaaagcgcaaattggcgtggaagagctggggcaggcgctgacggtagagcattacgccacgatgcggcatatcgacagctatccggccttttcgccattgctggttgagtggctgcgggacggctggctgttggcctcggcggaaatgcagtctggcgagctacgcggcaggtatcctgctgctggcgttgctgcattcggcatcgcgctatgtgccgcctgccgccgttcgtttgctgaccggcattaa

SEQ ID NO: 80978 - DNA, 525 bp, Citrobacter koseri
atgagacgggctttcgtcatgctggcaatcatgctggcgggcgcatcaggtggctgcacgatgactaaaaagattggtcaggttatcgctgatcccaatatccaggtgggggatctaaagcaacaggcctcgaatgtgaccgtcacattgctgaccgagccggattccaatctgaacggtgagggcgatcctgctccggttgatatgcaattggtgtacctgaccgatgactcaaaatttcaggcggcggattacgacctgatggcgtccacgccgctgccggaagcgctggggaaaaactatctcgatcaccaggatttcaccctgctgccggatacgctcaaaacgctgccggatgtgaagcttgacgcaaaaacgcagtttatcggtatcgtcgcttacttttccgacgaccagaccagtgaatggaagcaaatcgtgccggtggaaggatccgggcatcagtaccgcctgctggtgcatgtacgccagaacagtattgaaatgaagacagaggacaaataa

SEQ ID NO: 80979 - DNA, 1035 bp, Citrobacter koseri
atggcagagcaacggccagcacgcgctgatgtagattttccggtggatgtgcgtgatatcagtttttatgtcctgctggagtcactctatcgtcgctatggcgagccgggaagtgaaccgtctctgcgtaccgagccggaagatgaggtggtgttgtttaaatccgatgccagcattgcttttccggggagcgatttaacgtcgctcacgcgcagcgataacgggcagtttacgctgacctcaaaatttctcggtttttcaggtagccagtcgccgctgccgggatattacctggatcggatggcgcgggagtctgcacagaatgaagaggggctgaaagggtttctcgatctgttcagccatcgctggacgcagtttgcgtaccatgtctggcgtaaataccgctattacatctgttttcgcaacggcgggacggatgcattttcacagcgcatgtattcccttgtgggactgggtaaccagagcgtgcgcggtatgcttgccatcaatcacagcaagatgctggcctatgccggggtgctggcgacgccgggtcgttcgcctgatgtgatatgtaatctgatctctcactgttttgatttgccggatgtatccattgagagctggcaattacgctgggtggctattgatccctgtcagcaaaaccaactgggcgtgcgtcatcctaaacataaaacggccgggtatgtggtcggacgctcggtgatcggcgtcaatttcacgctgggaaaacgtattgcggatcgcagcggtaaattcctgttgcggattagcgggctttccatgtcgcgttatctgtcatttttaccggatggagataaccacagggcgttggcggcatttgtctcttttctgctgcgcgaccagttggcctgggatttacgcctggatctggcaccggaacaggctcagggaatgcgactgggtgacagctcctgcacctgtatcggacgtactgcttttataggtcaaccgaaaacgccaccatccgtcatcctccacattagggaataa

SEQ ID NO: 80980 - DNA, 1836 bp, Citrobacter koseri
atggcttttgaagagcgttattatcaggaagagctggactatctgcgtcagctgggcaaacttctggcggaggataaaccgtatctggctcgttttctggctgagaaagaaggtgacccggatgtggagcgtctgctggaagctttcgcttttctgtctggtggcctgcggcaaaaactggaagatgaattcccggaatttacccacgggatcatccggatgttgtggcccaactatctgcgcccggttccggccatgacggtcattaagtacaaacctgaagacaatataaaagcgccagtgcgggttttacgtgatgaactggttagttctggtgtcgtccgggtgtccacgtctgggcgaaaggtcctgggaaatgatgacataataccgctagcgccctgccattttacgctggcccgggatacgtggctacagcctttacagatacaggatgtgcgtaatgccagtagtcttgaagcaggcattattgatattgatttttttgctgaaaacggcatgtcttccgatgcgctggatttaaataaagtgactttctggctgggtaataacgatgattatacccgttaccagttgtatttgtgtttcagtgaacgtctgatggatgctgaactgatcaccggagagcgtcggataccgttacctgacctgtggctgaaggcggccggatttgagcgtgaggatgcgctgctgccatggcctaagaatgttcacaatggctatcgcgtgctacaggagtatttctgctacccggaaagcttttttttcttccatctacgggatgtcgcaccgttgccggaggcgtttcactgtggtgcgtttaccttacgcctgcattttaaccagccattacccgtgaatgcaaaactgcgccaggattccctgcatctcttttgcacgccagcggttaatcttttttcccatcaggcagagcctgtcagcccggatggcagttcgccgcagtatccgttacgggccagccatcagcatccggatgcctatgatattttccgtgtacagtccgtatccagtaaagttgctgcttctggcgagatccccgggcaggttagttccgatccattgcgtttctggccagagtttgaaagttttaatcatcagattgagtacagtcgcaagcgtgaggtgatttactggcaccaccggatcagaacctcattgtttcatcgtggccttgagcacgacattgcctttgttcacgcggacggcagtcttcctgatccttcgaaactgagtagtgaagcgctcagtgtttcgctggtctgcaccaaccggatgctacccacagaacttcacatcggcgatatctgcgtcgcggtgggtaaaaacccggcggtcgcttcttttcgcaatatcactcgtccaacacgcccactgtacccggttacggatggtgatatgcactggtcgctgatttccagtatgaacctgaactacctttccttgctggacagagaggcgctggtgcagatcctgcgtactttcgatttgccgggtattcatcatccgcagcaggcccggttgtcacggcaaaagctggatgccattgagaagatggaaacccgccccattgactggctgtttaaaggcgtgccggtaagagggctgtccaccacgctgtggatcaatcccgcgccgtttgtctgcgagggtgagatctacctgctgggaagtgtactcacgcatttcttcgcactctatgccagcatcaattcatttcatcatctgaagatcatcaacacggaaagccaggagacctgggtatggcagagcaacggccagcacgcgctgatgtag

SEQ ID NO: 80981 - DNA, 951 bp, Citrobacter koseri
atgactcaaaaatctctaattgagcagggactacgctcactaaaaggtgaagtgaatgaattagattctttcgaaaagggaactcgtggttataacgccaatatgaatgaaatggtgcgttctactgctaatactacatctactgttaccgcagcaggtcttgttaaagaacaactatctgattcatatattcgtgaactattggcacgtactgtacttggtcagctacccgttaccgtatttggtggtcttgcaggtcttggcaacttctctattccagttgctaacggtatgactcccgcagcacgtttctatggtgaagatgaagcagtggaagatggtttcgaatcattcaccaaaatcaccctaaaaccaaaaatgtttgcagcgggtatcaagatcactaaagcaatgctactaagcaacgcagctaccgaacgttatgttaccgataaactactacgccagtgtgctgatggccttgaaaaagcagtattcgcacaactatctactaccgttcctgtagttgaaactgaagaggtaggtgtcattaccgaagcagatgtacaggcggcaattgaagcattgggtactgctaacgtggatgtaaaccgttgtgtggctatcgtacatccggcaatgttagcaaaactacgccagtacgctgtacttggtaacaccggtgcggttagtgctgtcgctggtcatcgttatgaaatgtggctatgtgatgaagtcaaagtaattgagtctacttttgttgaccaggatactgtactaattggcgacttctcagagctaattttcgcaaactggaatgacggacaagaattggattttgacgatactacatatcgttcagcacaaactatcgctattcgttccttccagtatttggatactgcgattgcacatgaagaatcatttgtacaaatcaaattaaaagcataa

SEQ ID NO: 80982 - DNA, 537 bp, Citrobacter koseri
gtggaactcgctgatgcattccgtggagacttcacgggtattcgggttaaagggcagggggccgaggggggagacaccggcgacgtcatcacagagcaccagtttttgttccggccccacagggtggaaccagtcaaagaagaaaatgccctcttcagcccacagccgggtgagaaagttgaggtcggtttccccatactgaacgcagaactcccgcgccgggtgaggctcataaaaggaaggcacccatccggtgacgccgttttcagtgagcagggtggcggaaatggcctgaatatcctgctgctgaaagatgcggaagttctggcgcaggccacagcgccagagcgggggagaaagggtcagggtgtaagtcatctgccagttgttgttttccccggtttccatgcccgtaatgatgccgtgaaggtagcgctgcgggatatcacccagccagatggtcagggtggcgtttttctcaaggaaactgacggcggtgaggtcaggcaggctgctggcaatatcgacactgagtaa

SEQ ID NO: 80983 - DNA, 294 bp, Citrobacter koseri
atggggaaaattattgtagttttattggtgctcatcgctttgtatttcaaaatctcaggtggagatgttaagcatgaagcacagcacgaagaaccgtctacccagctcaccaatcaagagttacaggacgctaaggatttcgctcaggctcttatccagcgtgattacacatgcgataaagtcactacgtttagcaatgcgaacttctcaggccgtatagatgtatggtgtgatgatcaataccagtatgagattacaaagcctggtggacgctggcaggtagtagcgaagtaa

SEQ ID NO: 80984 - DNA, 504 bp, Citrobacter koseri
atgtccacgccacccggatgtatcaccacaaacgaaccgcccaccttcaggcttatctggctgctgctctccaggacaatatctccctccacgctgacgcccagcgtacccgccaccttccgtgccaggtcgcctttcacctccagactgtggctgcctttcaccagactgatatggtctccgcgggtggtgtgctcctgttttccgtccaccgtcaccctgcggtcattcgccacgtacagcccgtcgtcatggctgatgctcaccatccggtcgttcttcaccttcagcgtctggtcgttgcgtaccgtgatgctccggtcatgtgccaccgtcacagtctggtcatgccctccggcattctccttacccacggtgaccgtttgtcccagacccacggtgattttctggttgttaccgatggtttcggtgtggtccaccttcacgtcggtggtacggttgttcagcacctccgtatccatgttcttctgcgcatggatataa

SEQ ID NO: 80985 - DNA, 297 bp, Citrobacter koseri
ttgatcaattacattgcgatttgtcttgcctccgcgcgcaaaaaacaggggaaagacgcgctggtggtcggctggaatattcacgataccacccggctgtggctggaaggctgggtcgccagccagcaaggatggcgcgtcgatgtgctggctcactcgctgaaccagcttcgcccggagctgtttgacggcaggacgctgcttatctggtgcggcgagacgcaaacgcccgcgcagcagcagcaactcaatgcctggcgcgcgcaggggcacgatatttacccgctgggcctgtag

SEQ ID NO: 80986 - DNA, 951 bp, Citrobacter koseri
atgatgattgaatttagccatgtcagcaaaaccttcggtgcgcagaaggccgtcaacgacctcaatctgcattttcgcgaaggcagcttttcagtgttgattggcacatcggggtcgggaaaatccaccacgctgaagatgattaaccgcctgatggagcatgacagcggggtgatccgttttgccggggaagagatccgcagcttgccggtgctggaactgcgtcgtcgcatggggtacgccatccagtcgatcggccttttcccgcactggacggtggcgcaaaacattgccaccgtaccgcaactgcaaaagtggtcgcgctcgcgtattgatgaccgcacggaagaactgatggcgctgctggggctggacgtgaatttgcgtcaccgttatccgcaccagctctctggcgggcaacagcagcgcgttggggtggcccgcgcgctggctgccgatccgcaggtattgctgatggatgagccgtttggcgcgctggacccggtgacgcgcggggcgcttcagcaggagatgacccgtattcaccggctgcttggccgcaccatcgtgctggtgacgcacgatatcgacgaggcgctgcgtctggcggagcatctggtgctgatggatggcggcgaagtggtacagcagggcacgccgctggaaatgctgaccgcgccggcgaatgattttgtgcaggcgttttttgggcgcagcgaactgggcgtgcggctgctgtcgctgcgcagcgtgggggattatgtgcgtcgtcatgagcaagtgggcggtgacgcgctggcggaagagatgacgctgcgcgatgcgctgtctgtctttgtggcgcgagggtgcgacgtattgccggtggtggatcagcagggcgctccctgcgggacgctccattttcgcgatctgctttcggaggcgctgcccggtgaaacgactgtctga

SEQ ID NO: 80987 - DNA, 231 bp, Citrobacter koseri
atggacctgatttattttctgattgattttatcctgcacattgacgtgcacctggcggagctggtcgcggaatacggcgtctgggtatatgccattctgttcctgatcctgttttgtgaaaccggactggtggtgacgccgtttctgccgggggattcgttgctgtttgtggcgggcgcgttggcgtcgctggaaaccaacgatctcaacgtacatattatggtgatgtga

SEQ ID NO: 80988 - DNA, 1077 bp, Citrobacter koseri
atgaaaacacttaataacagttatctttcacgattagatcacttgagatttttcgccgcggcgttagtcatagtttatcattgccgtggttttctgaaatacaacaatgaactctcagttccggctgactttcttaaattatggatttctggcggaaacactggggtaagcttatttctagttttgtccggatttcttttctgcgtaatatcaaatgccgggaacaaagatatagcatatgggagcttcataaaaaatagggtgttacgtatagcccccatgactgttctgctatgttttatcgtgattagcgtgaatcgcgcaaattcagaccctatggatatactacgaatattgaccctccaattaaacacaggatatcccagcactggatggggccagcaattttatcccataggtcaaatatggacaattgctgtggaatttcagttttatttaatatttccctttcttgcaatttttatgcgtaatgatggagtaaaaaccattctgggaatgattgttgttatgcttatgattaaatactcactggtagcatttaaaggcgcttcagtgtactggattttctatcatacaatcatcggaagaatggaccagtttctcatagggatgatagctggctacttttatcttagaaagaataaaacgagcttttcaatggctgccgtaattctcgcagtagcggttatcggacttagtgttgttctttatctgaataaaaagtccatctccgactttgtgacgtttagcttcacgctggaagccatactttgggctttattgatttatgcgtattgctctgctcaattctcattaaatcagcgtatagacgctacattggcttatctcggcgggcttagcttctctatgtatctccttcaccttcctgtttattacatcctcctcagaaaagtgatgcctatggatcccaaccccacaatgcatcttattaaggtgatttttgtagtgctacctataacgatcattgcatcagcggtaacgtatgcatacgtggagaaaccgttcctaaaattgcgggttaagtatacaaaataa

SEQ ID NO: 80989 - DNA, 417 bp, Citrobacter koseri
atgggggtggtaatgtattttaataaaataaatctcggattttatgaccctagtgagaaagaattttatggggagaactggcccaatgaaaaagaattgactgtaattgatgatgcaaagtacgaaacattttccagtgagccacctcgcggacatattctgggggtaggtgaagatggtgagcctgtttgggtggaggttcccggacagattaccgaaaacaatatggggataatcgcgtcattaatggctgacgcgtcagtgattatctccccacttcaagatgcagttgatatggaaattgccactgacaaagaaaaagaaaagcttgtagcttggaagctttatcgtgttcagcttaacagaactgatacgtctaaggtcgatatggagttacctacaccgcctgagatgtag

SEQ ID NO: 80990 - DNA, 633 bp, Citrobacter koseri
atggcaacaaataattttaaagcgttcgcgcttgatcctaacgctaacgtcatgtcccaggctgactgggaagcgcttccggcgttgctgtccgggtttactgcaggtaaagcatccagcgcacaggtaaacaaagcaattcgccagtcaactacgattgccgcgctggtggggcaatttattgcgaactctggcgtggacgctctggataatgccgacgttaatgggctggtgacaaaattcacgaatgcgcttaccacaaacctcggtttaggaacagcgtcgaaactgcctgctggcggcggagtattctctggaactggcagggtttggattcctgtgagagatagcaccagcggaaatgtagttaattttttactccaatgggggtcttgtagtaatggaggaagtgggaaagatggttcattaacctatggctcggcttttccaacggcttttggaggaatcgttttctacggaaacgatacgagtaatggcggtttcagcatgacgaaatcttccagcagctcgagcctcaccggaacatcaatcgtgttccgtgacctttcaactaactatccgttcgtcgcttcacgtttattgagtggaggttatatcgcatgggggtggtaa

SEQ ID NO: 80991 - DNA, 222 bp, Citrobacter koseri
atgagcactgattcgcagaccactgatattcaagtcaaatgcctacattgtggggcatggttcccttcagctatatggattggtgatagagagtcccttatggctggcgttttattcggtaataaacagcaatgtcctaagtgtcaccaaatgactgactgcaacaaagaaaacttcaaagccaggtttaaagatggcggttttattggcgtgaaagcataa

SEQ ID NO: 80992 - DNA, 540 bp, Citrobacter koseri
atgactgagctccttttgctgctgaaaaaatactggaagccgctggcagcactactgttggtggcttttttgttatggcgtgctttcagcttcggagtcgattctacaaacattacatggagcctgaaatgggcacagcgcgacctgcaggattcgacggcagcgttgcaccgtgatgttgccgagcgggccgaagagcaacggcggcaggcagcggttaacgaggaacaggaacgtgcagatgcagaactggcgaaagcacaggccgatgctgatgctgctgagcgtgctgctggtggcctgcggtcgcaactcacaaccatacagcggcaactcgcaagaagtgaaaccggccgcctttccgcagttgcagcagcaagcgcggcaaaagcccagaccggaatactgctcgcccagctgctcggcgaagctgacgatctggcgggaaaattcgcaaaagaggctgacgagcgttatgtcgcaggagcctcctgcgaacgaacctacgacaaagtgacaaatcaacccgtgtcacgttag

SEQ ID NO: 80993 - DNA, 612 bp, Citrobacter koseri
atgaacaaatctcaatttcaggcggcagctggcattagtgccgagctagccgcgcgttggtttcagccggtcagtatggcgatgacagaattcggcatcaccacggcagaagaccaggcgatgtttatcgcccaggtcgggcacgaatcaggtggattctcgcgcatcattgaaaacctgaattattccgctgatggtctgctggcgacgttcggtaaatatttcactcctcaaacagcgcagcaatacggtcgcacagttgcccatcccgcagaccaaaaaggcattgcaaataccgtttatgcgaatcgcatgggcaacattgaacaaaacgatggctggaattaccgcggacgtggtctgattcagatcaccggccacgacaattaccgcgattgtggcgcgggtttgaataccgatttgttgcttgttccgcagctgttggaacaggacgaatatgcagcgcgctctgcagcatggttttttagttcgaaaggctgcctgaagcactccggcgacattgtggccgtgacaaaagtcatcaacggcggtactaacgggcttgatgaccgcaaggcacgctacgagaaagcgaaatcggtgctggtatga

SEQ ID NO: 80994 - DNA, 333 bp, Citrobacter koseri
atgaataatactcacgggattcttgaacagacaatgaaatggatcgcgctatatctgccgtcagtttacgccgggttgtgcgctctgggcatctcagcactcatcgacattcgcgccgggaagccaaaactctacaccgccaccggtgcgctgatttgtgggatttttgcccttgccgtttctgcgctgctggaatacctcgggttgcctgccaattcaggcgcgttcgttggtgcgttggtgggttttgttggagcggatcgcctgcgtgacatggctctcgccattgttgcccgcagagcgggtgtcagcagcactgaggaaaagcaatga

SEQ ID NO: 80995 - DNA, 192 bp, Citrobacter koseri
atgaacaggatctactggcggctggtcatcacgctgaccatagcagctctcgtttatggctttcttgtacccgcgctgatttcaatgaaagacaccaccgcggtactcgcgggtgttttcgtcgcgctgacaaccccaccctgcctggtagctatcttcaaaggcatttttactatcaaggataaaaaatga

SEQ ID NO: 80996 - DNA, 828 bp, Citrobacter koseri
atgaagaaaattatttttgccgccttactcgcacttaccgcggttggcctcactggttgcgatcgcgtcgaaccgggtaacgtaggcattaaagtcaataaactcggtgatgataaaggcgttggtgaagtggtcggagtgggccgttactggaccggctggaacacatccatctacattttcccgacgtttaaacagatgaaaacttatgacgacgcttttaacttccagatgagtgatggcacaacaattggctatcacatcggcgttgcgtacaaggtggacccgacaaaagtaacttctgtattccagacttaccgaaaaggtgtggatgacatcactgataccgatctccgacagaagattgccgatgcgctgaaccgactcgccagcaagatgagcacggataaatttattgatggtggaaaatcggagctactggatgcagcgctacgcgacatacaaggggaaatggggccgattggcattcaggtaatcagcctttcttatgtaggaaaaccagagtatccggatacggttgtcgcctccattaacgcaaaagtcaccgccaaccagaaaacgttgcaacgccagcaagaggttcagcagcgtgaggcggaagccaatatgctccgcgcagaagctgatggccaggcagatgcaaaattaaaacttgcgaatgcagaggcgaaatccatcgctattcgcggacaggcattgcgtgaaaaccccgaagtactgcaactcgaagctatcaacaaatggaacggcactctgccacagtacatgacaaacggtgcagcaacgccgtttgtctcagtgaaataa

SEQ ID NO: 80997 - DNA, 441 bp, Citrobacter koseri
atggcttacgacattatcaatggtcaaaaagtgccgcagaccgtaattactgaaaataaggtattaactggcgagcaccgaggtacagttaaagttatcagtggtgaattaacaataatcggctcccttcacggcacattgtcagttgaagctaacgcctcagtaagaattcttgggtcgcagcatggcactattggtatctcttcaggagcaactgttgtaattgaaggtaacgcacatgggacagtctcagtttctcctggtgctacgctggtcatcgaagagcgcggcttacttatgggtactttaaacaataatggggttatggttctccgcggagttttcggcggagcacaaagcggctcccaaaaaattatccttgaaggtaatggctatataaaacaaccccaaattatcgacggggtacattactattactaa

SEQ ID NO: 80998 - DNA, 1062 bp, Citrobacter koseri
atgaacaatacggttttcttgcgcgtcaacgggcgcgaatggggcggctggacgtcggtcaggatcagcgcaggggttgaccgtatcgcccgggattttaacgtggcgattaccagccagtggcccggcagtgaggatggcgcaccccggataaaaaacggggataaagtggaagtgctgattggcgatgacaaggtgatcaccggctgggttgaagcgctgccgctgcgttacgatgccggcagtattacccgtggcattgttggcagaagtaaaaccgcagatctcatcgactgcactgcggcgcccgcgcagcagagcgggaaaaatctgttccgtatcgccagcgcactggcccggccgtttggcgtggaggttgttgatgccggtgcgcctacggcggccgtcattgatgcgcagcctgagcatggcgaaacggtggtggattgccttaaccgcctgctggggcaggttcaggcgctggcgtatgacgatgagcaggggcggctggtgctgggcaaaccggggagcgcgaaagccgttaccgcactggtgctgggggagaatattctgtcatgcgacactgagcacagcgtgcgagaccgattttcagattaccttgtcacagggcaacgtccgggcacggatgatgattttggcgaagcgaccatagcggctatccggcagagtaccaccgatgcaggtgtgacccgctatcgcccccgcacgctccagcagtccggtacggccactactgacagttgcaaatcacgctgtgaatttgaagcgcggcagcgggcagccaaaacgaaggaaaccacctacaccgtacagggctggcggcagggaaacggggaattatggaagcctaaccagtccgtggtggtgtatgacccgctgaacggttttgataatgaaacgctggtgattgccgaggtgacgtacagccaggacaataacggcaccgtcactgaaatcagggtgggtcctgctgatgcttatctgccggaacccgccagaccaaaagcggctaaaaaaacgagcgaggggatcgatttctga

SEQ ID NO: 80999 - DNA, 603 bp, Citrobacter koseri
atgagtgacgatcgggaaatacgctgctacagcggcgaagtcagggccgagcagcacgatcaacagccgacgcgcattatcggttatggctcggtgtttaattcgcgctctgaaccgctatgggggttccgcgagattatcaagccaggcgcgtttgatgatgtgctgggcgacgatgtacgtggcctgttcaaccatgatcctaactttattctggggcgcagcgcgtccggtacgctgacggtttcgaccgatgagcgtggtttgcgttacgacatcgaagcacccgacacacagaccatccgcgatctggtgctggcgccgatgctgcgcggcgacatcaaccagtccagttttgccttccgggtcgcccgggacggcgagcgctggtatgaggatgaagagggcgtggttattcgtgagatttcgcgcttctcgcgtctctttgatgtcagccccgtaacgtatccggcgtaccaggaagctgattccggggttcgctccctgaaagcctggcaggaagcacgcgacagcggcgcgctgaagcttgccattaaccaacgaatggcgcgtgagcgcgtcctgacacttcttaatgcataa

SEQ ID NO: 81000 - DNA, 1227 bp, Citrobacter koseri
atgctgattaatgccatgttcagaagcaactcgcttgaaaatccggctgttccgttgactgctgaagcggccgaaaacgacgggatttttaacggtgacgtgatcgttaaccccaaaacggcgatgaaactggcggcggtgtatgcctgtatttacgtcatttcctctaacgttgcccagatgccgctacacgttatgcggcgaaccgggaagtttgtggagcctgcgcgggatcaccccgttttttatctggttcatgatgagccgaacgactggcaaaccagctataaatggcgcgagctgaaacagcgccatatcctcggctggggaaatggctatacccacgtaaagcgtaatcgccggggtgaagttatccagcttgaagcctgcatgccatgggaaacgacactgctgaatactggcgggcgctacacctacggcatgtacaacgaagagggctcttttgctatcagccctgacgacatgatccacatccgggcgctggggaataaccagaagatggggctgagtccgatactccagcacgccgaaacgatcggtatggggatgagcgggcagaaatataccgagagcttttttagcgggaatgcccgtccggcggggattgtgtcggtaaaaggggagcttaacgacaactcctgggatcgtctcaaaaagatgtggcagaaagcctctgccatgctgcgcagccaggaaaacagaaccatgctgttgccggcagagctggattataaagctctgaccgtctcccctgttgatgcacagctcatcgacatgatgaagcttaaccgttcaatgattgccggaattttcaacgtaccggcgcacatgattaacgacctggaaaaggcgaccttttccaatatctccgagcaggcgatccagtttgtgcgttacacgatgatgccctgggtaacgaactgggagcaggagataaaccgtcgtctgttcacccgcgccgagcgggaggccgggtattacgtccgctttaacctgacaggcctgctgcgcggcacgccgaaagagcgtgctcagttctaccactttgccatcaccgatggctggatgagccgcaacgaggcccgcgcctttgaggatatgaaccctaaagacgggctcgacgagatgctggtgagcgtcaacgctgccgatccggcaaaagattttaaagacgacgataaaacggagggcaattccgatgagtga

SEQ ID NO: 81001 - DNA, 396 bp, Citrobacter koseri
atgattgaaattgcgccaatcaccgatagcctaagcgatgcccttaaaaaaattaaagagacccaagctcagcacgaaagagtgaaaaaagaggctgatgaacaggagttctcttctctcggggcgttacagagggacgggaaaacaagaagcgccctcactttttggttcatgattggtttttttggtctgattggagggtgtttcttttttaccctttggtataacgacaatgctgtgcgatggattgttgatttgcataagcaagggctgcatgaagaagcaaaaaatataacccttttagaacttgataaggttcttgctgtggtaattggggctcttggaacatcattgggctttatcattggttattattttaaagataaatctcaataa

SEQ ID NO: 81002 - DNA, 303 bp, Citrobacter koseri
atggatagtttgtccaacaaacaaatgatagagcatctttctaggttcagggatgccggagataagctgtctgaagacatttataatatctcaatacgcatctttgatctgatatcagagacagaagctcgtgaaaatcgcagtgagggtgaggatctgatgctctctcgtcttaagcaaatgatagacttattgctagcctcatcgaatgattcacacaactacaatgaatcgatgtggaaagactatacaaaagtaatcaaagcccttggtgtaaaagcggtggataagtctaatgattga

SEQ ID NO: 81003 - DNA, 921 bp, Citrobacter koseri
gtgaatcgggttgtcagtggtaaagcggggataattaaaatgttaaatttgttgaatcagcagaaagatcgcgctgacctgaaggcaagacaggaacgcctgaacgaagaattaaatttcacactggagcataaacttccgtggggatatcgcggctgggactcaggaaaaaccgagaccactacctgcgaaaaacatggcgaatttgagcgtttcactctggtgggaaaagattttcgcggaggtgagaattttaaacactcacaatgtccggaatgcctgcgggatgaacttgcggaggttggcgcaaaactgcgtacactgcgcgttactgaattgctggatcgcgctggtattgcccgccgcttcgaggattgtgagttcgataactaccagactgtaactcaggatgcggcgaaaaacctctctgtgtgccggggctatgtcgacaactgggagcactgctttgatgcaggactgggcctgctgatggttggaaaatgtggaaccgggaaaaatcacctggctgttgctatgacaaaaaaccttattcgcaaccacctcgcccgggttgaaattaccgatgtgatgcgcgttatgcgtgccgtaaaaagcacctggcgccataactctgaaatgacagaagacagtgtgctggaccactttgcgtcgctggatctgctgattattgatgaggtcggagttcagctcggcagcgcctcagagctggctatcttgcaggagatcgtcaacgttcgctatgaaagtgtgctgcccaccatcctgattagcaatctgacctttgagcagcttaaggattccattggtgagcgcatcgttgaccgcgtgacaaacggtggacacaaccggctggcattcaactgggaaagcttccgtggcaaagacgggtggtctaaatga

SEQ ID NO: 81004 - DNA, 909 bp, Citrobacter koseri
gtgagtcgtctcctcatcaatgaaaacccccttcaggtgctgcctacgctggcctgcgctatcggtctgaatgaggctgtggtgctccagcaggtgcattactggatgaattcatcgcagcatttctatgatggccgccgctgggtctacaacagcgtagccagctggcaaaaacagttcccgttctggagtgaggcgacaattaaacgcgccctggtgagtcttgagcggcaggggatggtgtcatgcgccaattacaaccgcgatccgagagatcgcagcaagtggtacagcattaattaccctgctctggaggcgctcgaacaacaatccaaaccagtgaacgatgcatttggtcaatttgaccaaatggaaaagtgcaatatgaccaaatgcaatagtgcagattgcgacaatgcacctggtcaggatgacttaatgcaacagagcaatatgaccaaaccattaccagagaatactacagagactactcaagagattactacagagatcaaaaacactaacgttgcatccgctaacgcacctgcaccaactcgctctgtaaaacaggattattcaacggagtttgaaacagcgtggcaggcataccctaagcgcgctggtggaaatcccaagtcggcagcattcaaggcgtggaaagcccgcctgaaagacggggttacccctgaagccatgctggcaggcgttaagcgctacgcggcatactgccgggcgaccggtaataccggcacacagttcgtcaagcaggctgcaacgttcttcggtcccgatcgccacttcgaagagtcctggcagactccgtccgctcccggaggtgggcgtcgcaatgcgctccctgtatccggcttcagcgagcaggactacggtgaatcgggttgtcagtggtaa

SEQ ID NO: 81005 - DNA, 282 bp, Citrobacter koseri
atggctaaccaggataatgcaaacatctttgcggttgagtccgcacacaaagtgccaaatgcaaagcatcgtcggcgtcagtcgaaaatttacagcccggatgaatttcttgcgctgccaatggtacaggagttcataaagaacaaccctaatcaatatttcgtcaatgaagaaaccggcgagcaaatgatggcccaggaactggcagaactttactgctcggtcaataacggcaagaagatgaagaaagcgcttcgtcgcgcctttggatataaagcatga

SEQ ID NO: 81006 - DNA, 342 bp, Citrobacter koseri
atggcgctcattacgaaaaatttccgtctcaatgcgttggcgaaccagtacgccaccgcgctgtataaccatatttcaaccatcagcggtgatcacttcatgatcaatgccaatggtcaaccgatacaggtaaacatcattggtggggttcaaggcgtaagggacttaatcaacggctacgcactggaggcgctcagagacagctatccacagcagtgggaagctatcggaattcagttattgagtaaatgcgttcatggtgacgagttgactacaagtggccgtgaaatctggcaaagcatggtaaatgacatgagtgatacggttgcggggaatatgtga

SEQ ID NO: 81007 - DNA, 237 bp, Citrobacter koseri
gtgattgattatttctttatcggtcttattgccctgctgggtataggtgccctgttctgcatggtaatgatgtggagagtggctcttgtgtacgagtggagaaccaaagcactccgggcaagtcttgaggattatcaggcattgccggattacgacacgatgatgtggatggtctggatatggaaacttgagcgttttccgaggcgcgataatctggggacgaaagtgaataaatga

SEQ ID NO: 81008 - DNA, 303 bp, Citrobacter koseri
atgggtgggacaaaaattagtttgtacaatatgtttgtttgtaaaaagtcattgatcgatgaatactttgaatggcttttcccggtactttttgcgcttgagcaaaaaattgattaccaaaattacgatgcttaccaaaagcgtgtttttggttttatggcagaacgtcttttcaatgtctggcttcatcatcaccgcgagagcttgcgcattaaatatatgccagtagtaaatattgatggcgaaaatcttttactgaaaggcattggattattaaaacgacatttctggggtaaaaaatga

SEQ ID NO: 81009 - DNA, 261 bp, Citrobacter koseri
atggggcattacacaatcagaacaagtgacgacgaagatcaggccattaaaaaggcgcaggaagcaaccggacaggcatcagccagcaaaacctttatgacggctatccttgagcttcagcgtaacagagacgagatggcgcagctacggcgtgaactggcgcaggagcaagctaaaaacaaagagctggttgagtcagtgcagcaattcaggaacagcatgaatgtcatgtttgaactggctggtaacaataaaagttaa

SEQ ID NO: 81010 - DNA, 180 bp, Citrobacter koseri
atgactgaaaaaatcactgacgaggaactggcagatttgttggaggcgctcaaaagagcgcatggtatgggcgtttgttcaaaagcggttaagctggcacagcgttgcgctgatgtgttccctgctattgttgcagagttacaggaatatcggaacgccgctaagcgaacttcagcatga

SEQ ID NO: 81011 - DNA, 255 bp, Citrobacter koseri
atgaaaatagtgaaatttactgttattgctggggctatattacttttatcgggatgcgaggatgttaaatctgccgattggtggcaggaacatcatgcagaggccgaaaaaaaagttgcagagtgtaaagcttccggcagtgatagtgataattgtagaaatgctaaagagggattgtttagatataaacagttacatgccgttgaaccttcctttaaagatgcgtttaaggggattgttaaggataaaaaatag

SEQ ID NO: 81012 - DNA, 282 bp, Citrobacter koseri
atgaatctgaaaatcttcagtgtcacagtcaatagtgatggtatctgcacgataagtttgcaacttgattgcatctgctcctgctgctttagcttcttccataattttgaatgcgcgattaagatcaccattatggttagccgaaagttcagcaataatatagggaggatggtctttaccaatattgcggccatcaattgttataaatttattcattacttcgtctcgctaatatattcgctgggagagattttaataaacccaaggcgttcaaataactga

SEQ ID NO: 81013 - DNA, 1224 bp, Citrobacter koseri
atgagtgcgactgcatcgactgcaacccaacctaaacctctcgagtggcttaatcgcctgcgcgcgaatcccagaattcctctgattgtggcgggatcagccgccgttgccatcatcgttgctatggttttgtgggcgaaagcgccagattatcgcacgctgttcagcaacctttccgatcaggatggcggggccattgtcacgcagctgacccagatgaacatcccttaccgcttcaccgaaggaagcggtgcgattgaagtgcctgccgataaagtgcatgagcttcgcttgcgcctggcgcaacagggattgccaaaaggcggcgctgtcggcttcgagctgttagaccaggaaaaattcggcatcagccagttcagcgagcaggtcaattatcagcgcgcgctggaaggcgaactggcccgcactatcgaaaccctggggccggtaaaacgcgcccgtgtccacctggcgatgccgaaaccttctctgttcgtgcgcgagcagaaatccccttccgcttccgtgacggtcaatcttgaaccaggccgcgcgctggatgaagggcaaatcagcgcggtggtgcatctggtatccagcgccgttgcaggtctgccgccaggtaacgtcacgctggtcgatcagggcggtcatctgttgactcagtccaataccagcagccgcgatctgaacgacgcgcagttgaaatacgccagcgatgtggaaggacgcattcagcgccgtatcgaatcgattctttcgccaatcgtcggcaacggcaacgtccatgctcaggttactgcgcagctggattttgccaacaaagagcaaacggaagagcaataccgtccgaacggcgacgcatcgcaggccgtgctgcgctcacgccagcttaatgaaagcgagcaaatcggctccggctatccgggcggcgtaccgggtgcgctgtcgaatcagcctgcgccggcgaatgctgcgccgatcagcacaccgcctgctaatcagcaaaacgcgcagaacacgcagacgaccaacaatgcgaacagcaatgtgccgcgcaatacgcagcgcaacgaaaccagtaactacgaagtggatcgcaccattcgccacaccaaactgaacgtgggcgatgtgcagcgactctccgtggcggtcgtggtgaactaccgcgccctgccggacggcaaaccgctgccgttaaccacggaacggctttgttga

SEQ ID NO: 81014 - DNA, 540 bp, Citrobacter koseri
atgatccgcaggaaccacactttaacgaaggagtttacccttccaaaaactgaggccggaacggaccgcatcataaaccttattcagccagccattgatgtgctgaagaaccaggctgaaatgaccaggttaggcaagcagtatcaagttgaggtgaaactgcgtgaatacggacgtactgatgtgcatccatgcacgttcgtgttcaacccgcaaatcgtatcgcgcaatggccgggccgggcatcattacgctgtggggtcgatcaaccagtcgtgggaggcggcaatgcgacgagccggaatccgctatcgcagagcataccagtcacgacacacgtatgcatgctggtcattagctgccggagccaacccgaacttcatcgcgaagcaaatgggccacaccgacgcgcaaatggtttaccgggtatacggatcctggatggctgaaaacaaccaggaccaagtactcatcctcaaccagaaattgagtgagtttgccccatccatgccccacgcagtaggatcggataggtattaa

SEQ ID NO: 81015 - DNA, 1278 bp, Citrobacter koseri
atggctaattcatatcagaatatccctgttcctaccccaacacagaaccccgtaccgagtgcagacatccgcgaccatgtgtttgccggttctaaacttgatgagttcgtgacatcaatggggtggacatacacagatcggtttggtggtaaacactacacaattgaggggctgcggtggctggcacagcaagccatctcacagtacggctatataacactggattcgtttgaaactggtaacaccattacgcttcccaatcaagtgcttcgacttgaaacaactggtgaatattaccgttgggacggggctctaccgaaagaagtacctgctggctcaactccagaatcaacggggggagtagggacaggtgcgtggataggcgttggcgatgcctctttgcgacatgatctaaatcctgagtcatttacagggcagaatattgctcaactcgtagcatcaagaaagtctgcgttgtcttctaatactgttagattttgtacatggaatatccaagggtattacatcgtcgcaaacgaaaactctccagaggctggtgatacagttgataccagtcgttttaacagggatgtcgcaagtcttcagcgtatacgtgagcaggtggaatggtttcttcgtatcggtgcagattttgttggaatgcaggaagtatatatgggaatggattgtaaactcccaggaaagactattaacagcgttggtagtatctggggattatacccgtatagaggttcttttatgtcctttgatagctggtctgcggatatggtgcttcaaaatccgggtggaaacctgtcactagcgacgcgccctcttgttaacggaacggagtcattaatggagacatcgacttcaggtatggcgttccgggcagtatcccgtgttgaaatggttgtcaatggggtgactattgctatctacaatacgcacactgatactggaactcctacgattgccaatcaaatttcacacatagcctctcttattgatacagacacctcgacgcatattgttttaatgggggactggaataacaatgatgattctgtatatcaaccatttatagatcgcggattcaccatggttaataagaatggtgaattaggtacatataacggtgggcacaccgagtgggggcaatggtatttagataggatattccatcgtgggttttcttctcagggggattacggagttctaacgccaccgcgagaacttggcgatcacaaaccactatgggttgatttgacaatttaa

SEQ ID NO: 81016 - DNA, 1323 bp, Citrobacter koseri
atgggtaagttaaatattgacgctaatgttcttaacttcaaagccggagattcaatttctgatccaattcatggtggagaaaacgttgataatgcatccttgcaacttgatgtagaacaagcattaatggctatacgacgcttggaatccagaacgaaaataatgcaatttagctcggtagaagatcttgggcttttacctgaaactgttacgcttgatgatctgtataaaagagtgcaggtcaactcagtgatgatgatagcagtttttagaaattcctatccgaacttagagacccctagggatgttgctggtaacactcagtcggggacgctcttgattgacgggaattcatctgcttacgctcgcatgggatttactttttataatgaatatggaatatggcggagatattacaatactgcgtacgcaagtggacattcattaagagactccggttggctttgggggggggggcctggtgagtttttaccaattgatgcggctggtgcgacgaatttaaacaatcttttatcaaatctgttaagaccaggaaaatactttgtttctggcgcagtgttttctacgttaaccgataatccttatggaggaacggctccggcggcttacatcaccgtcgaacgttactcggttttcgggaatttcatccaaacagtcaaagcggccagcactgtaccgggaggatatagacggtatatcacatctgctggtgttgtatcaccatggattcaggagtttgtatcaggaaccacattatcaactactggcactatagattttgctggtggcacagtgtctggtcacttatcccctaataccgccgcgtcaaaaaacctcggtggggcttcactgccatttaataatatctacgttcagaacgctcctgttgtggtttctgacaaaaattacaaaactgacatttctgcaatttcagataaagttttggatgcctgggctactgttgaatattcgcaatggaaattaaaggctgctgtagcagagaagggggaggagtctgctcgtttccatgttggcatcatagctcaggagatcaaagaaaaatttgagcttgcaggtcttgatgcaactcaatacggtattctgatccatgaaaaatgggacgcggctgaagcctctccagcttcttatgatgagaatgggaatctggtatcagaggaagtcctggcaaaggatgctggagagatctggatggtgcgcatggaggagtgcttggcacttgaagctgcattaatgagaagaaggaccatcgaattagaggagagattaacgaaattaatttaa

SEQ ID NO: 81017 - DNA, 1482 bp, Citrobacter koseri
atgatttttaaagatgagaaggataataaaaatttttatatgacgctagtcatatctttcttttacattcttccaataataatatcaaacagatatcaagttgatgatgttggtcggtcccttgacggatacactggatgggctaaaaatggcaggccattggctgacatcatatcttcaacattgagttttggcactccacttcctgattcatcacctcttggattgatacttggagttatcattttatgtctttgcatatctacatatgcaaaagaaaacttcaaggctatagataataatcatagatatgtttttttattcctgtttatagcaaatcctttcctcatagaaaacctatcatttaagtttgatgttttaaccatgtgcttgtccgcagggttaatatttttagtttactctttacctaaaaaaacaatttggtatatatttagtgtgtctttaatatcagcatcattgatgctatatcaggcatctataggtctgtatccaattctagccattatttccatattgcatttcgacaagtgcaagaaaaatattaaagctcaattcagtgaattatcaataagaattattgtattattcattgcatatcttattacccacctattcacatataaatatgttgcaactcacgattattccaaagtacactcagaaataattccgcttggcaaggacggattggagatattaagaaataactacttacgttctatctccataatggatttatacttcaaatcaaccgagaggtggattgttttctcatacgcaatattattttacatattatattcacttcacgcttttaaaatatctaaagatttggcgcggggcttaaccaagaccgcattagtagcattctatatgacgctaccggtttttgtgttctcattttcattcttgcatatagctctattaaagctaccagtatggaatgcaagagttttcatttcattcggtggttttttactatttgttggcgttattacattttcggtaataaaatcaaatatatttagatttgttatcataacacctataatatatttaagcttccttcatgtgtattcttttggaaatgcttcatcggcacaggggaaaaatgatgatgttattatgtcatcgatatcttatgatataaaacatataagagataaaaaaacagaactttcaatttatggatggatgccaagatcaaaacctcttgaaaaaacaatcgaacgattgcctttgattagatcattagtgcctatgtttttagggaccaataatttctggggcggtacaaagttaagacattatgatatcaatcttaaatttatggggttgactgacatggattacacggtcatgtgcagagaaaaaccatcagttatttcggattcttatagtatattcatgaatggtgagaaggttattatatcattcagtaaaccaaactgtaaaaaatag

SEQ ID NO: 81018 - DNA, 447 bp, Citrobacter koseri
atggaaacgtgttttaaagtcctgctgctcaaattcgaccagaagctgtccagccggactatcggactgacactgaatatcagcacctccaccgtctttgaggtactggcacgcttcaaagcatcatcaacgctatggtccctgccggaagcgctgacgccggaggcccttgaatcgcttaacttcccggagaaaaaaacgtctgtgctggcgccggagctgcccgactggcttcacatcaataccgaaatgcggcgaccggggggaggcagcaacttctatggccggaatacagggctcaagccgaaaaacggacaccgggacacgaccagttctgccgccgctaccggggctggaagggaacttccgccgctccatgcgacaggagcaccaggcctgggagcgaataaggcgcagcgatatcgagaccttaatctcccaatctaa

SEQ ID NO: 81019 - DNA, 900 bp, Citrobacter koseri
atgtccagattcagtaaacagctgtgcaaacaacttgtcacacttgctcgtcagggacggggaagttataaaactgtggctgaccgctcaagaattgcagaacgtttttctgaacgtctgtctgaactgaatattcagattagggacgtaaaacatatcaaaacttcccatattgaaaagtatattgagagcaggaaggcagacagtttgtctctcaggactttacagaatgagatgtctgctatccgctctgttttattatcagccggaagaaataaactggccgatcccaatcataccagcctgagtaatcaggctctgggaatttctggtgctaaccgggatggcactaaactccctattacagatgaaaaacttaatgcggttgtgaattttgcgcttaaaaaagatgaaggtgttgcgctcgcagtacaactttcaagatacctcgggttgagaacagaagaaaccgtgcagtccgctaagtcgttaaaaacatggaagcagtcattgattaacaataatgagcgtgtccgtgttgttttcgggacgaaaggcgggcggccgagagaaacaacggttttcaatcgtgaaaaagttttatcaattcttgataaagcaattcattatgtcagtgaacataacggaaagctgattgataaaccctctctgcataccgcaattgatcgttaccgaaatattgtaagagaggcagggatgaatggtaaaaatgcgccgcacagtttacgttatgcttactcacgggatgctgtaaatcatcatattaaaaatggaatgagtcgcgatgaagccgaggcattagtttcaatggacctgggccacggagatggccgggggcgatatatcaaacaggtttattttcgtgaggaaacagaatag

SEQ ID NO: 81020 - DNA, 672 bp, Citrobacter koseri
atgaaagtggttgatatggatattttaaaacaacgccttatgattctgattttcggattatctaactttttattcttttatttattattaacctctattgatctaaatacattcttaatgaccaggcttaatttctcaatattacatttgcagataattaagcctctgatgatgcttttaatttttttatccataactcacttattaaataacacctcactttaccaaggattaacctgggggaaacctaacaagcagtcatttgtttttttcttgctcataattattgcttacactgcttcatactaccttacgccgaaagaacccttcgttacagaatttactaaaggtttgtcacatgaaatggcagctgtaaaaatcgcagccacaattattattttccctctactggaggaactggttttcagaggaattatcctgagttcttttttaaacgccctaggtgaaaaggcgggctatatcatcggtgggctgacagtttctgttttgtttgcagttatacacacacagtattcattgcccaccaaaatccaaatgttttcactttcattaattttctgtggagcaagatatcaaagcagagggcttcttttaccaattctactgcatgctttttgtatcgcgcttggcctatatattgagttaaaataa

SEQ ID NO: 81021 - DNA, 549 bp, Citrobacter koseri
gtgaggagtcttaccgccattttaataattcctgctcttgtcacagcctgtagcatgcaggaaatagcagatacaaataagaaaatcagtgatggtgcttcaggtataatgaactctttgaggggaaactctaacccatcaactaatgttacgacaccaatgcatttacctcagtcattaaaaaaagaatccaagtctaaaaattatactgtagctgttgatgtagatactgctgctgccagaataaaaagacattacaagtttatgtcaagtcaggagctggatagtttacggaatagctctaatgacggggcatggaaagcggccgctgaagatgatgcacatccagtttgggaggcaatacctggtagctattataaaatgggatctgactggaatgataacgatcatttagatgtagaagttgaaaaaaacgggagtgggagtaaactctatataacatattcatcggcatctgcagaaaggctatcgggatctggcgtacagaagttgatgaaggaaattcattccgtggctataggtgagtga

SEQ ID NO: 81022 - DNA, 1272 bp, Citrobacter koseri
atgtttgcgctggtcgatgtgaattctttttatgcttcatgcgaaaccgttttcaggccagacctccgtggcaaacctgtggttgtactatccaataatgatggatgcataatagcccgttcagcagctgcgaagtcacttgggctaaaaatgggtgacccttggttcaaggttggccgcgaggcggaaagaagaggcgttgttgccttttccagtaattacagcctttatgctgacatgtctgacagagtgatgactattttgcagatgttagctccccgcgtagaaatatacagtattgatgaagccttttgcgatcttacgggagtaagtggtcttttatcacttgaggtttttggccatcagatacgtgagcagatcaggcgcaggacacaccttaccgtgggggtggggataggcccaacgaaaactctggctaaactggcccaatatgcaagtaaacgctggccagctacgcgaggagtagttgacctgagcaatatagggcgacagcgaaagttaatggccttggtgccagtcgaagaggtctggggtattggccgtcggctcggtaaaaaattgcagttgatggggattaacaatgcactccagctgtctgagctgtctccttcatttattcgtaagcaattttcagtggttgttgaacgaacagtaagagaactcaacggcacgccctgcctgggccttgaagagtttacagctccaaaggagcaaatcatatgctcccgctcctttggagaaaaacctacagatgaattcagcatccatcaggccgtctgcgctcatgccgaacgtgcagcagaaaagttacgcgcagagcaccaattttgtaaacgagtagcggtattcatcagtaccagtccctttgcagagaatgaatcgttctataaaaatcaggctgtaacggagcttgctgttccggcccgtgattcccgggatatcatcaaggcggctgtaagagctcttgaaacaatattcatcccggggcatcgttatcaacgcgcaggtgtaattctcaccgattttcgcagcgcggcagtatcacaacttaccctgttcgatgaccttcagcctcatcgtaatagcgatgaattaatgacactcatagacagcattaacagctctggtaagggttcagtctggtttgcagggcagggcattaaaagtgatgccacaggctggaagatgcgaagagaaagactttcgcccgcttttacaaccagattggatgatattgtcagagtaaggtaa

SEQ ID NO: 81023 - DNA, 516 bp, Citrobacter koseri
atgccaattcctttagaacagacgatgtgttgggataaaagttcgcagaaaaattcagcaaacacaccggttttgatgatggcggctatcgccagacttacaggtagcaatccatcactggcatgcgttccgttgtttggtgatggggtttcatgtggtttcccttctccagcacaggattatgtcgaaaaacgtctttccctcgatgacctttgcatccgctatccggaaagtacctatctggtgcgagcagagggggattcgatgcttaatgccgggattaaagacggtgatttactaatagtggagtgtattcgtgaggcaaagcacggtgacattgtcattgcagccgtagatggggagtttacctgtaagaggcttcagctattgccatcaccagctctggtcccggctaatccagcttattcttcaatcccccttactgaggatatagaaacagtggtctttggtgtggtacgtcatctcgttcactccttcaaattccgggatgcctga

SEQ ID NO: 81024 - DNA, 402 bp, Citrobacter koseri
atgtatcagtctcaagaaaaacgcgcctgggaacgtggtgttcgtctcgctgcaatatggaagggtatcaaacaaatttttacacgtttagatcagcgctgcgtcatactggctaaacaatacaaactgccgaagtggttaggccacataccgctgcttttagctgttttttgttcgttagttgcacttatagcaggcggtttcttgataagctgcagcgcagttttattatggacttttattgctgccataacacatataggatctagctctaaagatgcttcaataaatagttttaatgaaaagaaagatgaaaataattttcatgatgaatttgtaatgaatagcgccatcaataatgaatatgatggcgctccttacaaatccccgagtgaagattag

SEQ ID NO: 81025 - DNA, 1524 bp, Citrobacter koseri
atgacgacaaacagctatcttgagtattttctcacgctgctcggctgggtgatcaataacggtctgtggaatgtcctgctgagcaccggcctttttgtccttccgctggcgtttaaggtggtgggtatctggctcagggtccgtgaagagggggaggatgaaggcaacaaggggatgctgtcgctgccccgtatcgagaacgcgctgtatgctggcttcctggtgatgattgcctgctgcgtaccgctgattaatgtcagcctcagtacgatgcagtacgacacaacccgggcaaagagctgtggtgtgtggacgcccaaagcgccggatgaaagcggctatgccggcgtggtcaccagtctcaacgaccagacggctgcagcaccggtatggtgggtgctgattcataaactctcaaaaggggtcacccaggcggccgtggcgaccattccctgccgccctgacatgcgtcagatccgctttgaagtgcagcatacgcgtatcgacaacaaagcgctggcgcaggagctgcaggacttcaccaacgactgctattcggtcgcgttgtatctgtggaagcaacaggatcagggccagacaaaggacaaaaccacgctgcgtgatatcgaatggattggcagcagtaccttcctgagccggtattattcttcgctgcagtccaaactgccccgggctgcgttcccgtggaccgacagccgggacagcggccggcccaacaccggaagaggaggctatcccacctgcagcgagtggtggagcagttcggacaccggactgaaagcacgggtgaaggaccaggccgaccccgatatgtggctacgtatctcggccgcaatgaaaatgtcaggctttaacgacagtgactatcaggaagccgtcatccgtcgtctggtcagcccggaaagcctgacggtctcacagaatggtcacgtgtatgccggctatggcggcaacgccgattttaccctggataatgcagcggcacgcgtggcggctattggcgggacatctctcggcagtctggcggcgttcccggcgttcgatgcgatgcgacaggcgctgccaatggtgcaggctatcctgctgatggcaatatatgtcatgctgccgctgattctggcgtttgctgcttacgagttcaagaccgttattacgctgacttttgtaatattcgctctgaacttcctgacgttctggtgggaactggcgcgctggctcgacagctggctcctgacagcgttgtacagttcagatacacatagccgctttaatatggcgggactgcagaacagctcagatgacctcattatgaacctggtgatgggagcgatgtttattgtactgcctgccgtttggctgggagctctttcgtgggcaggggccagcgtgggtgtcgctgttagcgctgcctttcaaaagggtactgaaactgctcagaatacaggcgggaaacttggagaagctgctggtaatgctatcggcagtaaagcaaccaaagggtag

SEQ ID NO: 81026 - DNA, 339 bp, Citrobacter koseri
atgcgtaataaaacgactgtcaggaaagtcctgacccgtgccggcatcttcctcgcctgcatggcgctgttcatggtggtctcactgatgatggctgacaccgccatgaaacatccgactgaagctgctgcattccggagctggatgcagtcgacgcgttacggctggctgatgtggcgactggcgctgtatgcgctggttgcgtggggcctctggaaaatccggcatgcgccgggcttccgggaggcataccggcggccgctgctgcgcatcagtgtggtcagtgtgctttttatcgcgttgtgtgagtacgcgatgtttaccggtccgggagtctga

SEQ ID NO: 81027 - DNA, 1464 bp, Citrobacter koseri
gtgaaaaaaacaccttcattttcagccgttcgcgtaagcctgctgctgaccggctcactgctgactgtcctcccgggcgcgcacgcggccgatgatgacaataccatccttggcatgtccctgccgcaggtgaataacagcgccatcggttacggcaagtccgtcgatggtgcggtgtcggacaagctcttctacaccctcgggggcgggtcggtcatttcccagccggccacgcgcggcaatatgcagaagctggggctgaataccggctggagcagtgacctgatgtgcggcaatttcgacctgaaaaccaccgtcggcaaccagctcaacggcgtcacatccggctttaaaaacctgatgggcgacgtgattcagggagccaccggcgcggtggccagtctgccggcgatggtcattcagcgggccaaccccggtctgtacgacatgctcaccaacggcgttcttcaggccaatgtgtcattcgacaaggcgcagcttaactgccagaacatggcgaaaaagatgatggacttcagcgacagcagtaactggacgcagcaggccatgatggatgaatacaagtctgttgtgaacagcggagatactgacgcggttcgtgcagatgaggcggggcggaaagtcaccggcacgtcgggcaacaactggattggtggtcagaaacgtgggggggcggggcagcccgccatccgtgtcacccatgaccttgtcgctgccggctacaacatgatgaacggtttacctgtcaccgctaattcgactgtcggcgaaagcagctgtaacggtggcgcatgctctaaattcggcagtgctgaagaggcggcggccatgaccgtgaaggtactgggcgatcgctcgatgcgcacctgtgccaacgcgagcgaatgtaccagcggtgatgcggatgaccagcccggtacgaccgttgccggcaccggctttgccccactgctggaagaggcaaccaaagccaacgctgagcagctggtcaggctcgtcaacggtacggaaaagcccacggccgcgaatctggcgaagctgaaaaccggcggactgccggtgacggccggcgtgattaaagccctgcagcgtgatccggataacgcggccctgaccgcccgtcttgccggcgagctggccatgtctgacacggtggaaacggcgctgctgatgcgtcgcatgatggttaccggtatgtcggagccgaatgccgctgcccagccaaaggccattgataccgccggtcagcgtatcgaggcgctggatcgggaaatcgcggcgctgaaaaacgagatggagatgaagcgtgaactgtcacgtaattcagtgctgaccattatcgacagggagaatcagcgcgtcgaaaccaacccgcagacccagtcagatgacaataccgacagtcgcttcaaccagatggcagcgccgcagtcggctgaatga

SEQ ID NO: 81028 - DNA, 993 bp, Citrobacter koseri
gtgaatacaaaaccttcccgcatcagaaccacggtgtgctcgctggcggttgccacggtactgggtacggcaaccgcgccggcagctgttgcagcacttaacacggcgcagattattgccagcgccgtatcgcaaaactgtatcagctggcgtgtcagtggcatctgttactggctgttctgcaccccctttggctgcaaggtgcgcacgtcggtcaaagtcacccacttcattcctcaggccgtcgtttcgacctatgtcgctccgggcggcaacccgtggcaggaaatggcgtttgtcagccagaccgccggcgggctggaaagtgccgtgaccagcgggctttccggtgtttctgccggaggagccaatccggccgacatgaaaaatcccggccagcgcaagtccgcggtgcgtttcaagtatgccgatgcgattggccacccggccacctccctgattggcggcagtattccgggctattcctgtgataccgcagccaccccgttaatgccttacttcctgagtacgctggattcggcggcctggcgcacgggcgtaccggagtccctgtatccggaggcgcttgttcccggccagcgggaaatcggcagtcaggcagcagccaatatgtggggcaacatctatccccgttcggggtttatcagccagaccgatgatgacaaagcctctgccgtggtggcgcagcgtgtggcagacattatcacccgcgccggccagccgcatgtgtatcaggtgcttaagggcaaccgccatgacgggtactggccaccgggcgaggtcacggaaaacaccggcacgcaaaatcacaaatggcagcggctggctccccacatgactcagtcatgtgccgtattcccggacgggagctataccgccgcgagcgataacaatgaagcctttgcgctctggcagccctacagctgctgcaaaaagcgcgggcagaaatttctgggcagcactgatatctga

SEQ ID NO: 81029 - DNA, 399 bp, Citrobacter koseri
atgaaactgacctctcttgttttcctgccggctctgctgccggcatccgtactggccgccacggtcgtcttcactgacagtcagcatctgccggcaaatctgccgtcggacgtgccggtggtccttcttgatggtcctgaccggctgcaggccgacatgttcggggaactgcctgcagacccgcagcaggccgaagcacaggtcaggcaggttatggcatcgcctgcctggcaacaaaaacagctgcagctgaatgattcctatcgccaggtggtccgggcctgggaactgggcattaaaaaagtgccagcagtggtgtttgatgaccgcgatgtggtgtacggcaccacggatgttgacgtggccactttcctgcgtaaccggggaggtggtcagtga

SEQ ID NO: 81030 - DNA, 555 bp, Citrobacter koseri
atgactaacgaagaaattattatggagggccagttgcgggaatgctatggtcgagtcgtctattcacacaaaactcacgaaaaatgtgccgatatactcatgcgcaaccatgagtatatcaagcttgcgcatattggcttttctgtcctgataacgggaggaattgtcacgacacttctaagtgatagtaaggcaggtgtaataattagcgctattctttcaactatagtgttgtttcttaatacctatacaaaaaattatgatttaggagagcttgctcagaagcatcgtcaggcagcagctggtctttgggtaatacgtgaagaatacctttctcttctgacggatgtaagaatttctgacttacctctcgatgttataagagcgcgtagggacgagctgatgaaaaaattacatgcggcatacaccggtgcccccggaacggggctaaaagcatatactgcggcccagaaggcattgcaacaacaggaagatctgacatttacggaagatgaaattgatgcctttttgccaaaggagcttaagcgtaagtag

SEQ ID NO: 81031 - DNA, 1317 bp, Citrobacter koseri
atgagcatatcggatatgttttcagcttttctggataatctggctataactaatgcagagacgattagcctgcgttatggtgaaataactgcatctttgaataaaaagtttcgagagaccgaatcgaaaactgcaaataccttacaggttggttcatttgggcgtaagacaggtataaaaggtatttcagatttggatatgctttacattatgccttcttcaaaatgggatagttataaagatcatgggcagcttaatttactgaaagatgtaaagagtgcgatacttcaacgctacccttctaccaaagttaaagttgacagacttgtcgtaaccgttacctatacagattttcatgttgaggttcagcctgtttttgaagattcagataatgattgttttctttttccagatacaaatgatggaggggtttggaaaaccactaagccaaggcaggaaatggaagcaattgttgagatgcataataaaaagaatcataatttacgtcggctctgtaaaatggttagagcatggaggaataaacatggagttgctatggggggattgttagtcgacacattgtcttataattttctaaactcaaataatgactacgatgaaaaaagctttctttattacgattggatgagtagagatttttttaaatatatatctgagcttgcagagcaggatgactacttagcacccggtagccgtcaaagagttaaagtcaaaaagaaattccagaggaaggcaaaaaaagcatacgaattgtgcttggaggctattgaagctggcgatcaggataatgctcatagcaaatggaaaaaaatttttgggagaccttttcctgcggctgcagttagcgttgaaaacctcgactatgccagcacctccttaacttggaaaaacaccgaagagtttatagaagataaataccctatagatattacagaaattttagaaattgactgcgaagttaagcagaacggttttcgacaatattatttgagagatatgctatctaaacatatcccattgcttaataaaaaggacttaaggtttgaaatatcgaaaatctcagtcgctcaaccctatgagattttttggaaggttctcaatcggggtgatgtagcgcgaaaaaagaattgtgttagggggcagattattaaggataatgggatgatgcagaagattgaatccactaattttcgtggagaccacatagttgaatgttactgtgttaaggacggtgtggttgtagcaaaaagtagaatacatgttcctattgttttggaagggaaacaagatgactaa

SEQ ID NO: 81032 - DNA, 378 bp, Citrobacter koseri
atgatgacactgaagtaccctgaacccgccattcatgagcacagtggcggcgcgcttttcaccctgtcgcctcagggggagcccggcgtgctcccggcgacacatcagcatctggtgaggctgcgggcaatgctcagacagcgcctgaccgggccggtcaaaatgacctgtcacccgcaccgggtgggactcagcagcagcgtggccatctaccttgagggaaagctgaagcaggcggtgaatattcttatcaccgtgacgggacagacgagctggccgcaggaagaggagtatgcgcatccgcgctggtatatcacggtgccggattcggctgatctggtgtatctgatgctgtggatcaacgggcttgacgtataa

SEQ ID NO: 81033 - DNA, 2859 bp, Citrobacter koseri
atgctttcactgtttacgcgtaataaatccaccgaccggcagacgccggttgatgacggccagtccgttcaggcagatgaaaccctgaccgcggccgtgaagggccggcaacccctgaagcgccccgggaaaatgacgcgccaggatgaggagaaggtttatcacgccagtccgtccatcattgactttttgccctgggcagaatttctcgatgaagagcagtgtctcctgcttgatgacggcgtgtcggtgggggccgtttatgatgtgacaccggtggcgaccgaagggcgaaccgaagagcgcctggagcagatccgggactcggttgaggatgcacttcaggacagctttgatgaacatgacgtgaatccctgggtcgtgcagttcttctgccaggacgaggacgacactgacgcttacctggacaggctgcgcgggtatgtcaaaccacatgcacagcgcacggcgtttaccgacgcctggctgggtgaaatggagcgccatattcgcagtatctcccggcctgagggactttttactgactcgctgattaccggccagccgtggcgcgggcagcagcgccgcacccggatggttgtttatcgctggcttgggaaaagccgggatccgatgccgccggtggcgatgctcaatcaggtgtgcgaccgggtcgttaatgccctgggcggggcggggatccgctgcacccggcagaacggcctgcaggtgcatggctggctgctgcggctgttcaatccgtcaccggactgggtggagaaaaccacgctctatcggcaggctgcttacgcagacccgcgcgagacacctgaaggcaccgtaccggtcagcaatgattttgccgaaaccctgtggttcacgccgccggtctccgacccggaaaacggcgtgtggtggattgacaacaagccgcactgcgcggtggcggtggaaaaactgcgcataccgccggagccgggcaccctgaccggcgagaaaagccggggcgaaaagaaaatcaatgccctgatggatatgtttccggaagggaccatggtgtgcatgaccgtggtggtgcagccccaggaccggcttgaagagcagtttaaccggctgtcgaaaaatgcggtcggtgagaataccgagtcgggccgcgtccgccaggatgtgaagacggtcaaagagtatctgggcaaccggcacaagctgtaccgggcggggatcaccttcctgttgcgcggcgatgacatgaccagcctgaagcgcaagcggctggagctgtccaccgtattgctcggggccggtctgcagccggtacggccggagtttgaagaaggtccgctgaacagctggctgcgggcgctgccgatgtgctttaacccggacagcgacaaaaaacactggtacacccgtctgacctgggttcagcacctggccggtcttctgccggtaaccgggcgagaaaccggcacggggcaccccggcttcagctttttcaaccgcggcggggataccctgacattcgatccgctcaacaagctcgaccgcacccagaacgcgcatctgctgttgttcggcccgaccggggcgggcaagtcggccacgctgtgtgccgcgctctcccagctgatggccgtccaccgtccgcggctgtttattgcggaggccgggaactcgttcggcctgctggccgacttctttgacagcctcgggctgacggtgaataaaatcagcgtcaaacccgggagcggcgtcagcctgccgccgtttgctgatgctcacaaactggtggaagaaggcctggccgcccaggccgtggatgagagcgacctgccggatatcgacacggacgacgatggcgaggatgacaagcgtgacgttctcggtgaaatggaaatctccgcgcgcatgatgatcaccggcggcgacccgaaagaagaggctgacctgaagcgtgccgacagggcgatgatacgtgaggcgctgctgatggcggcacatgccacgtataaggaagggcggcagatgctgccgtctgacctgcagaaggcgctgtacgacattgcctctgacaacgatgagggcgtcatcaatgtccgcaatgcccagcgcaaggcgaaagcggcggaaatggcggaatccctgggcatgttcactcaggccgggagctttgaagcggagctgttcaaccgcgaaggggagctgtggccggaagctgacgtgacgctggtcgacctggggcatctggcgcgtgagggctacgaggcgcagatggccctgaccatggtctcaatgaccaacatgattaacaacatcgcggagcgtgaccagttcctgggccgggatattgtcttcacggtggatgaggcgcatatcgtgacggtcaacccgctgctgtcgccgtatatgaccaaggtggtcaagatgtggcgtaagctcggtgcctggctgtggctggccacccagaaccttaaagactacccggatattgccgaaaaaatgctgaacatggcggaatggtggatttgtctgaccatgcccccggaggaggtcaaagatatcagccgtttccgcgcgctcacgccggagcaggaatcggtgctgctttccgccagtaaactgtcgggttgttatacggaaggcgtggtgctggcgaaacggatcgaagcgctgtttcgtgccgtgccgcccagtctcttcctggcactgggcatgacggaaaaagaagagaaagccgaacgccgggcgctgatgaatgaatttaactgcagcgaactggaagcggcaaaacgcgtcgcgcagaatctggaccgtctgcgcggtctgacggagaaacaacaggagcctgccacggtatga

SEQ ID NO: 81034 - DNA, 411 bp, Citrobacter koseri
atgtacagaacggttttcattctggccctgagctgtgtaatgctcagcggctgctcaacctccaaagaggaaatgctgccggcgggcgataacaccatgcttgaactgtggaacggggcggacggtggcggcagtacttcccgccagtctgcggcggcccgcgacacgctgcgacggccgctgacgggcagcgaaacgcaggcggacgcgcaggccgaccgcagctacagccgtactcaggaaagcgaaatcacccagcagtttccccggctgcccaaccccgacatggtgatgtatctgtatccccacctggcagacggtaacacgccggtgccgggttacagcactgtgttcccgttctacagccagacgcagtatgccatgcctggcgagcgcacggaggccctgtaa

SEQ ID NO: 81035 - DNA, 369 bp, Citrobacter koseri
atggcgggacagataacgtttttccctctttcatccgtgtgctggacgttcagcgacggggcaggctggcatattgacgtgatccctgcgtcttctgcggttctgttgctgcgacccgtagcgctgttgcctgccggcgcacctttactgcgctggcgcgatggccagcttttactggatatcggcaggttctccctgccgctcagtgcccgggagtgtgccgtttcgtggcgcagcccgaaaatcccgcgccggctttactgcccgcgtatgacattacgggagctggggcacctgctgaatgtcagtgcgttcgtttttatctgcggcggttacgatccggccgcctcacaaaggagataccggtaa

SEQ ID NO: 81036 - DNA, 1500 bp, Citrobacter koseri
atgcagattaaatctaatgccctggtgaagtttatcgtgccggccgtggtgattgccgggctggccgtggggctcaaaagctgcaaaaacgaaccggcagaacaacctcaggcaaaacaaagcggctccctgaaaaacctctcgccggatgaactgaaggcgctgggtgtggaaggcgacacgccggaggacaccctgcgcacgctcattggccggctgaatgatgtgcgtgaccgccagaaaacgctggataagcagaacgcggatttggtgaaagaaaacgagcggttgcgccggcgcaatcaggacgtatcagggcaggtgaatgaggccgttaatggtctgcgcgagcagtacgacaaacgtcaggcgcagcttcagaacgaacaactgagcctgacggcgaaaatccaggagctgactgacaaactcaaaaagcctgacaccgagaaaaaaacggcggacagtgatatcccgctggggctgggcctggacggcatgggcagcagcaccggggggagcgcttctcagggcagcgacggcatgatgtgggtcgcgccgacggaccagaaagagacggatccgcgggatgcggccagcggcaaagcctcacctcagttcccgacctcttttctgggggaaaatgagctgacccgccagaaagccgcttatgaagagaaagtgaagggacgtaccaatgaaaaaggggcggaagagagcgccgagccggtttacactctgccggaaaattccacgctggtcggcagccgcgccatgacggcactgcttggccgtgtgcccatcaacggcaccgtgaccgatccttatccgttcaaggtgcttattggtaaggataacctgacggcgaacggcatcgagctgccggacgtcgaaggggcgattgtttccgggacggccagcggtgactggacgctgtcctgcgtacgcgggcaggttaacagcgtcacctttgttttttccgacggtacggtgcgcaccctccccagaccagacaccagtaacaacgccggcgggcagaataataacgctcaggctaaacaggataccggcaccagtggcggtatcggctggatttcggatgaaaacgggatcccgtgcattggcggcgaacgtaagtccaatgcctccacctacctgcccaccatctttggcctgtcggctgccggtgcggcgggtgaagcgatgagtcaggggcagtacacgacgcagaacaacgtgaatggcatttccgccaccatgaccggcgacgccggacaggcggcgctggggaaagccatttccggcggtatgtctgaaaccaccgactggatcaaacagcgttacgggatgacgtttgatgccatttatgtgccgcccggtgcccgtcttgccgtgcatatcacccgtcagctggccattgattatgaagataagggccgtaaggtgcgctacgacttcaccctgccgggtggcgtcagtgacaacggcggactggactga

SEQ ID NO: 81037 - DNA, 951 bp, Citrobacter koseri
atgagtaaaaaaccccactaccgcgccgggctgatggcgctgtccttcgtcctgctgcccctggtgacactggtatcacgtcctgccggcgcagatgagctgatgaaatgggagcgtattccgctgcagatccccctgaaggtggggcaggagcgggtggtctttgtggacaaaaacgtccgcgttggttttccgccggcgcttaacggcaaacttcgggtgcagagcaccggcggggccgtctacctgaaagccgacagcgcctttccgcagacgcgggtgcagctgcaggatgtggaaagcggcgaggttctgctgtttgatatcgctgccggtgaaaaagggccgactgagccggtccggctggtcaacagcggtgatgtcagcacgctgagtcacgccggcgatgcggccggtcagccaggtggtgcagaccgggctgcttccggatcaggctcatctgctcccaccggcagcgatgacggcacccaggcaaagcgtaaaaaaatccgctacagcgcccccatcccggtgctgctgacccgctatgccgctcaaagcctttatgctccggcacgtacggtcgaggcggtcccgggtattcatccggtcaacccgcatctgccccgacgcgtcagcacgctgtatccctctgaaccattaacggtcacgccgctggctggctggggcgtggcaaaccgcagcgtggtggcactaaggctcacgaacaccggcagccgtaaagtcgttctggatccgcgtgcgctgcagggacaatttgtgtccgccaccttccagcaccgctgggtcggtccggccggcacgccggaagacaccaccacggtgtatgtggtgaccgccggtcgtccggagagcgcatttattgctgagccgtctgcgctgcgtaaagcggcccgtgcggtaaaacaggaggcccgccatgcagattaa

SEQ ID NO: 81038 - DNA, 660 bp, Citrobacter koseri
atgagccgttttcgccatgcggtaaaagaccgcgaccagcatattcagacgctgcgcatcgcctgcgccgtgctcgcctttttccttttattcacctgtgccggctggatgctggcacccagcaagctgaccgtgcataacccgccggatttacgtaccggcagcacgcggccctggtgggaagtgccacccccgacggtctactcctttgcgttctacatttttcagcagctcaatgcctggccgaaaaatggcgaggtggactattccgccaaaatcaatgcgttgtcgccgtatctgacgccgtcctgtcaggatttcctgaaagcggatgcaaagaaacgcggtgacgccggggagctcaccgaccgcgtgcgcgtggtgtatgaagtgcccggtcgcggttaccagtcacagagcgtgaccgtacaggatcgcgatcactggattgcccgcctggacgtggtggccgatgaatatttccatgccgagccggtcaaacgcgccctggtgcgttacccgctgaaagtggtgcgctgggaaggtgatgcggagcgcaacccgttcggtctggcgctggactgttatgccggtgtgccccagcgtctggaggcggcaccgcctgcacctaaaccggagaagtcaggagtgtttcagtga

SEQ ID NO: 81039 - DNA, 357 bp, Citrobacter koseri
atgcagaccattcgttttttacctgaccgtctcaacagtgagcccgtggtgtttcgcgggtttaccacccatgagatggggctggctgcccttgccggcgcgggtgcaggtctgctcctgtcactgccgtttatcccgcttgccggctgggttgttgttcccaccggcctgctggtcatgccgctgctgctcgtctggttcggcggccgctggatggccaggctcaagcgtggtaagcctgagaactggctctggcagcgactggagacgaaaaaacgccggctggggatgggcaatccgaaactgatagtggatgcccggggctggtcagtgaaacgtaacaggagagcctcatga

SEQ ID NO: 81040 - DNA, 387 bp, Citrobacter koseri
atgcaccattctgagtctgttgttgcccgcctgcgccgtttcgccagtcgtacgctgacccgcgccggtacgcttgccctcctgggctggctcacctgcaaaccggcctttgcggacttgccaagcgttgaagcgcctgagtccggaggcggaagcgggctgtccggacaaatcaagggctacctgcaggacggcattgttatcggggggctggtcgtggcggccgttgcctttatcaacgttgccattgccgccctgcacaccttcaccgaagtccgcaatgagaaagccacctggaccaaattcggggccattgtggtggtgggtgtggttctgctggttgccgttatctggctgctcggcaagtctgccgacattctgctgtag

SEQ ID NO: 81041 - DNA, 243 bp, Citrobacter koseri
atgtccatgacatccgaacaaacgaacgcgtttaaagccggctccggcagtcttgatgtgaacatccttcatctgctctgcatcggagcactgctggcgtttctttttttatgggccgcgtgggcgctgtcggatgtctggaccggctggagtaacaccaaagtgcgggacgcggccctggggcgttttgccgtccgcaccgtgctgctgttgcttgtgtgtatctggatgtttgccagttaa

SEQ ID NO: 81042 - DNA, 348 bp, Citrobacter koseri
atgaactcacatcgtccggccatgcggcgcaaccgtcgtgtcccgggcatcactggcctgatattgctgacctttctggcatcagctgctgcacaggcatccgagaaagacgagcttgcgtctgttcagcgtcagctggaccaggttcaggcgtcgcttgaacgggcccgcgtggcggctgcacaggccgacccggctgaccgtggccgctttttctttgattaccgtcaggccacatccgatctcaacaccatccgcagcggcattgaccgctatctggaaccctcccgcgcgcaaccgcgtgacccgtcttatgtggccggtaattaccggcgggagcggccctga

SEQ ID NO: 81043 - DNA, 348 bp, Citrobacter koseri
atgatgaagactgttctgaaggccacgttaatcactgcactgattaccggccctgttcttgcggccgacggtactggcaaagtccagctttcagacctgcatttcgccacagcagcaaatggtttgcagcaaattgaaggcacgggaacaaacgtgtcaggtgggcctgtgaagactgtaattgtcaaattcaacttgcttcagaatggggcagtaataggaaatacggcagcgatggctgaaaatctggagccgggtcagcaatggaagctacaggccccctacgacagcataaccaacaagccagacagcttcaaagtgacagaactgacggtatttaataactga

SEQ ID NO: 81044 - DNA, 759 bp, Citrobacter koseri
atggctgaggtaaaacgtcccccacagcagcagacgctgccggagcgcaaacatggcatcctgtataacctgctctggggctggccgtgggccctgataggcgtggtgctgtcctcgctgctgctgagcctgctgattgaatatatcggcatcgccttcttctggccggaagccggggcggcgcacagtgaagcggttatgaacaccgagctggggtggctgtccacggagttcacccgcagcctgctgctgtctgagccatcggtgacggttgtgcgctgggtgagcaccgcctatcagtgggcctttgtggacagtggcttcctggactgggtccggcagcagtatgcgcatcagatgcacagtgacaatgccgtcacccgggaaatcaacagctggagcggctggcttgccggctatctgcgtgaatacctgctggccacggtatggataagcattatcaccctggtacgcgtcaccatcctggtgctgtccgtcccgctgtttgtgctggtcgtggtggtggcgctggttgaggggctggggcggcgtgatctgcggcgttatggggccgggtatgaaagttcttttgtctatcaccatgccaaaaagctggtcaaaccggccgctgtggtgcccgccatgctgtacctttcctggcccacggcagtctaccccaacctgctgttgttgccggcggctgtcctgctgggtatcgccgtgaccgtgaccactgcctcattcaagaagtatctttaa

SEQ ID NO: 81045 - DNA, 2100 bp, Citrobacter koseri
atgagtaaccgttatgtcattgaggccctgctgcgtccggccgttgagctgaataccgccgtggtatcgggcatggcggcgtatgtctgtgtgcaggcaccctgggctgtcgctctggctccgtctgtcagctatgtcaccgcagccgggtttgcggcgctggccgtcacccgcacgcatcaggggatgaagattattcgttaccgccggaatctccgccgcctgccgcgctatgtcatgagcactaaacagatccccgtcagtcatcgtcgcctgtttctcggccgggggttccgctggacgcagaaacacacccagcgcctgcaggatacgctgcgccctgaagtggcccgttacctgcagccaaaccgcttttacctgggggcgcgtcagctcgaattgctgacagagcaccgtctgccctggctgggcaagctgctgagtgccgatacgccgctgaacccggtgcggccattaccaccggtgggcgggaatccggcgctgcacggcatcgagcccgatgaaaaagacgtcaccctggccctgggggagcgcgttggccatacggtggtgtatggcaccacgcgcgtcgggaagacccggctggcagagctgctggtcactcaggatatccggcggggtgaagtcaccatcgtgtttgatccgaaaggcgacgcagacctgatgaaacgcgtctgggcagaggcccaccgggccgggcgcggggatgagctgtatatctttcatctcggctggcctgaaatttcagcccgttataatgccgtcgggcgttttggtcgcgtgtcagaggtggcgtcccgcgtggccggtcagctttcaggggacggcaataatgccgcctttcgtgaatttgcctggcggttcgtcaacattattgcccgtgcgctggttgccctgggtgaacgccctgactatacgctgattatgcgctacgtgaacaatatcgccgatctctatatccgctatgcggaaaaaatcatccaggcgcagctgccggctctgcagacgcagattgagaataatcagcaggtgctgggagaggacgacgtgccccgtaacatgcagggtcagccggatgccttacgtatctgggccattgaggttgccctgagttcagaagagggaaaaaaactctacgatcccatccttgacgggctgcggtcagcggtacgttatgaccgtacttactttgacaaaatcgtggcgtcgctgctaccgctgctggaaaaactgactaccggcaaaaccgctgaactgctggctcctgactatctcgatatggatgactcacggcccatatttgactgggagcaaatcattcgtaaaaaggccgtggtctatgtggggctcgatgcgctcagtgacagtatggtagcgagcgcggtgggcaattccatgttcgccgatctggtgagcgtggccggccatatctacaaacacggtatcaatgcgggcctgccgggcgggaaagaagggaagtccctgattaacctgcactgcgatgagtttaacgagctgatgggcgatgagtttatccctctcatcaacaaaggtggcggtgccggcatgcaggtgacggcctatacccagacgtcttctgatattgaggcacgcatcgggaatgcggccaagacggcccaggtacagggtaactttaacaacctgattatgctgcgcgtcagggagaaccgcaccgccgagctgctgaccacgcagctgccgcaggtggagatttacaccaaaacgctggtctccgggcaccaggacacggcagatgtcaatgcagaccaggactttacttccagcacccaggaccgcgtcgggacggtaaaagtcccgctgctggagccggccgatatcgtgacgctgccgaaagggcaggcgtttgccctgctggaaggcgggcaactgtggaaaatccgcatgccgctgcctgccggggacgctgatgatgtgctgatgccggaaagcatcgagaaaatagcggaggagatgcggcgcagttatcacagcggcgaaacctggtggcgggacggtccggccctgaacgtgccggtcgcaggaggggagaatggctga

SEQ ID NO: 81046 - DNA, 489 bp, Citrobacter koseri
atgcacatcatcctgaacagcctgcgctgcgctttgtggcttgtgttctgtttattccgtcatgccgttttcgtgcctgcggctttcggcggtgtctgcctgctcgcctggtttgttttcggccatccggtcagtgacctgaacgaccagttgcagaaggaggcaacggcatggcgcaccgcgccgcccggacattacatgtgcgaggaatgcccggtgcctgataatgcggctccgcctgaggcaaagccggcagcctgcaccgtcactgccgtctccacagaaaccgcggcgaacaattacctgctgtcattgcgggccgtatggatcatttttttcattctgtcgaatgtcctgtatgtgctctggcgcttactggcggatgccctgcgttatcactctcagccctgcagggaagccggctccgcaaaggggacgtataccctcagggccgacggtaaaatcataaaggaggcagacgatgagtaa

SEQ ID NO: 81047 - DNA, 573 bp, Citrobacter koseri
atgagcgcgccatatatcaacggtctgctgatggcgcacccttacgtggcggtcatactggtcgtcctgttcctggtggtgatggcctttctgaacctgcgcgggcgggagaaagccagcacccgccgtcaccggcgataccgggcaacggcgcggcgggtactgaataagcttaacagcctgccgggagacgggcagcgcctgacttatctgcgcaaaatcagcccctatgtctttgaagagctgttgctgtctgcctttgaacgtcaggggctgaccgtggtgcgcaatgcctcctacagcggtgacggcggccttgatggccaggtcatcatcgacggcgagcactggcttatccaggccaaacggtacagccgtgctgtttcccccgcacatgttgaggactttgaccggcttctcctgcagaccggccgccgcggtatgtttgtccacacgggccgcaccggaaagatgagccgcgccattcgcacggcgtcaccgcgcctgcgcatcatcagcgggcaacgcctgctgaccattctcgccgggcaggacgtccggcagtatctctga

SEQ ID NO: 81048 - DNA, 522 bp, Citrobacter koseri
atgaaaacgctgtccttactgctgtttaccctccttcccctgaccggccatgctgaactgaacgtgattgctgatctgggcggtgaagatgctgcgccgtattttgaggccgttaataaacagcccggtatgagcacgggaaacgacaccacatcttcacccccgtcacccgtgctgcagggcgaggccgccatgctgccggtattcacgccggagttgcgcccggggagcattgccgaccggccgctgcagctgcccggcatcggggcgttgtttctggtcggggatgatgccctgtcccgtgactggctgaaggctaatgccggtgagctggctgaacagcatgcggccgggatgatagtcaacgtcacggacatggctgccgtgcgtgagctgcgcgagctggcacccggtgtcagtctggccccggcttccggcagcgagctggcccgtcgcctgcagattgcgcattatccggtactcatcaccgataccggcctgacgcagcaggttaagccgtaa

SEQ ID NO: 81049 - DNA, 636 bp, Citrobacter koseri
atgggcaatcgcagcattctgaccggcgcgctggcgctgggcttactgatggcggccgtccctgacggccatgctgaccagacggtgccggagggttacgtccgcgtggccatggcgcacggcgtgcccccggaagcgctttactcggtctcactgagcgagtcttcgcgcagacttccccgcggcgtgcgtccatggccctggaccatcaatgtggcaggcaaagggtatcgctatgagacgcgtctgcaggcctggcaggcgctgcaggtctttatgaagcgtcacccgcttaagcgcatcgatgtcggtattgcccaggtcaatctgggctggaacggtcatcattttgcctcgacgtgggaggcgtttgacccttacaccaacctgaacgccgccgccaccattctgcgtgagtgctgggcgcgtaagcccggcagctggctggatgcggccggctgctaccaccatcccgcaggtggtcagcctgctgcacgttaccgcaccattgtgagagggcatctggcaaaaatcagccctgcaccccgcatttctgcgccggcagctgaagcgccccgttcggttgctgcgctcacccccgatccaggcttcgtctggactgaacccgggagataa

SEQ ID NO: 81050 - DNA, 723 bp, Citrobacter koseri
atgaaactgaaacatacctttttagccgccatgctgctgagtcccctgaccctggccgcgaccacatcaggacagacggatgtcagccgacaggaatcaacacaacgggcggactccgcacagcaaaacctgcagcagcaggccggtcagtggggactcagtgccgacgattatcagcgttatcagcagctgatgaagggaccccggggtatccagtcgccgggtctcgatccgctttccaccctcggtatcgaggcgcagacgccggtagagcgccgtaagtttgctgaaaagtgggtcaaggaagagtttgcccgcacccagaaagagcttgatttccagcgtgaggtgaacgcggcctggcagcgcctgtatccgggcacactgccggtcaatatggggaacgcctccggcgtggcgcacgacagtggtggccggctggcgctgttcgtcaggtcagaggactgcgccacctgcgacgcgaaactgtctgccgtgctggctgacaaccggccggtggacatctatctggtcgacagccagggcagtgatgatgcgcttcgcagctgggcgcgggaccatcacattcccgtggaaaaggtccgcaagcgccagatcacgcttaaccacgacggcggacggtggatgcgctttggtaacggtctgatgccggttttactgcagcaggcgggagacggtaaatgggcaatcgcagcattctga

SEQ ID NO: 81051 - DNA, 759 bp, Citrobacter koseri
atgagcgaacagcaaccattccatactgaccccgcgccggcccgtaaaagattcagctggcgtccacgccgccgcctcatctggggcgctgccgcaggtgtggcgctggctggcattctggcgctgggctacaccgccttcagtctgggcatatcgaaccttgatgaacgccttacacgccttgaatctcagggcagtacagcggccactgctgagacggtcgcggccctgcagtcagatgtgaccatgctcagagccggtctgcaggacacccggaaaacactgggtgagatgcagcaggagctgagcgcagcagcgaaacaggccggcagcgacgatgccgtgcgtcagtcattgcgaactcttcaggaggcacagcaggggctggaaacccgcctgagtgcgctgactgagcagctgacagcgctgaaatcacagccggcacccgcacccgccgcacctgtcgccgcaccggtcaaaaaaaacgcgcctgctgcaaaaaagccccgtcccgctgacacacgtcgtgctgctccgtcccttcgcctggcccgcaatgcgccttttgtgctgacgggtgtggagaagcggggggcagagtcctgggctgccatcgcgccccggggctacagcagcctgtcgcaggtggccctggtcggagagggcgaaaccgttgccggctggacgctggtcagtgccggttatggtgaggcgacgtttcgggttaacggccgcctgaccgtgctcagagcagaataa

SEQ ID NO: 81052 - DNA, 666 bp, Citrobacter koseri
atgaaacgtaacacctctcacaacgtattttcaccaggcaggcttgccactgttcttcctctgctgctccttgcgggctgtgtttcccagccgcaaaagttgcagcaacgtgcgcctgcggacccggcacccggcaccaccgtcacccgcaacgttcagccggtctctccggacgagtatgcgcggacgccggaagtggtgcgctacgatcgttatctgctggtcagtaccgatccgcaggcggcccagcgtgaccctctctcgcagattattgatattcgcatcccgtcatccctgcatcctactgtggcggatgcgctgcgttacgccctgcgccagtcaggttattccctttgcgcgaccggctccgccaacggcgtgctttaccgccaggcattgccggcagtccagtaccagctgggcccgatgcgcctgcgtactgccctgcaggtccttgccggtccggcctggcagcttgaggtggatgatgtacaacgtgtggtctgccacagcctgcgcgacggctaccagctgccggtctcccagcttccgccgccggtcagcagctggtccacgcctgcgccgtcagccgtgtcacaaccggccatcagcgcccctcagtccgtccccgttaaacctgtcagcggagggtttctgagaaaatga

SEQ ID NO: 81053 - DNA, 249 bp, Citrobacter koseri
atgactatttcagctaaacgggtcagcttcgatgaggccacgatgtgggttgaactcaacgacgcccgtaccatcggtgtgccgctggcatggtttccacgcctgttgcatgcttcaactgaacagcttaacagctatgaactgagtccccgtggtatccactgggacgcgctggacgaagacatttctattgcgggtttgcttgaaggccgcggcgatgtgacccatcgtccccataaagtagcctga

SEQ ID NO: 81054 - DNA, 243 bp, Citrobacter koseri
atgcctgttatactgaggatcaacggtttccggttctttttttattctaatgaaggtaacccgctcgaacctgcacacattcacgtaatgaaagcaggtagtgaagccaaattctggttaacgccatcagtggtactggccagtaacgatgggtttaattcacgggtattaaaagaactgacggggatcgttgaagataaccaagcattgtttctggaggcctggaatgactatttcagctaa

SEQ ID NO: 81055 - DNA, 537 bp, Citrobacter koseri
atgtcctcacgcggcgttaacaaggttattcttgtcggaaacctcggccaggatcctgaagttcgttatattcctaacggcagcgcagttgccaccctttcgctggccacgtctgagagctggcgcgataagcagtccggtgaacagaaagaagtgaccgaatggcatcgggtggttattttcggcaagctggcagaaattgcgggtgaatatctgcgtaaaggctcccaggtttacatcgagggccagctgcgcacacgcaaatggaccgatcaggccggccaggataaatacaccacagaggtggtggtcaatattggtggcaccatgcagatgcttggcggtcggcagtccggcagcggtcagaatacgtcttcccggaatgactggggccagcctcagcaaccttccggaccgactcacagtggccaggcttccggcagcagtgccggtgcgccaccgatggacttcgatgacgatataccgttcattggattcgggtatggagtaccaaaatcggcaatccatgcactctga

SEQ ID NO: 81056 - DNA, 471 bp, Citrobacter koseri
atgtctgcaaacaacacttctgcatctgcaaaatctgagtacttcaacctgactatcaaaggcatcgggtatctcagcaacattcgccaggttaaccatcagaatggctcgttcctcagctgcgtaatcaatgcactgagtggtccgactgataatccggcctacgtccgttttgacatttctgtcgcaggtaaagaggcaaccagccttatcgcccgctgccagaaagccgtcgatgaagacaagaaagtcctgttgggctttaacctgagtaacccgtccacggacatatttacgctgaacaagggcgaccatgccggcgaacagcgcgtcagtctgaaagcccgcctgataaaggtggactggatcaaaataggccaggaaatggtttacaagactgaaaaatctgactccgtgccgccgcagaatggctctgccgcacaacaaaactacgcagaaaactcattctga

SEQ ID NO: 81057 - DNA, 2010 bp, Citrobacter koseri
atgcaactctttctgtgtgaaaaaccctcccaggcaaaggatattgcccgcgtactgggtatcagcaagcgtgagcagggatttatcagcggcggtaacatcgttgtgacctgggcggtcggccatttactcgaaactgccagccctgaagcctatggcgagcagtatggcaggccatggcgtgccgatgttctgcctgtgctgcctgaggactggaaaatggtcgtcaaagagcagacaaaatcgcagttcaccgttatcagtaagctgctcaaaaaggcgtctgaggtggtcatcgccaccgatgccgaccgcgagggagaagttatcgcgcgtgagctgctggaatactgccgctacagtggcgcggtacgccggctctggttgtcagccctggatgaggccagtgtgaaggaagcactgggcaatatccttcccggggaaaaaacagccctgctgtatgatgccggcaagggccggagccaggctgactggctcatcggtatgaacctgactcgcctttataccctcaaagcccgtgactcaggggtgtcagaagtgctgtccgtcgggcgggtacagacgccgacgcttgccatggtggttaaccgggataatgaaatcacgtccttcgtgccaaagccctggtggcaggtacatgcgcttattgaaaaagagggcgtccggttccgggctggctgggtgcccgttgagcagtactgtgacgaggaaaagcgttgcatcaatcctcaggcagcccgggcggtgggacagctttgtcagcagcagggcagggctacggtactggaggtgacccagaagcgggagaaaacggcggcacccctctgttttgacctgggcacccttcagcaggtctgttcccgaaaattcggcatgggcgcaaatgatgtgctcgccattgctcagtcactttacgaaacccacaaagcgaccacctacccccggacagactgtggttttctgccaacctccatgcagcaggaaattcccgacgtgctggcagcagtggcgaaatccgatcccgctgtggccccggtactgaatcagctggacaggcagtttgtctcgcgcgtctggaatgacaagaaaatcaccgcgcaccatgccatcattcccacccggcaggcatttgatttgtcgcgcctcagcgccgatgagctgaaggtctaccagctgattcgccagcattatttcgcccagttccttccgctgcaggaatctgacgtgactgaggcgtcgttcaatatcggtggccagctgttccgtacacgcgggaaagtcggtgtggtgacgggctggaagtcattgttccaggctgaaaaagatgacgatgaagaggacgtcgacggtgacagtatggcgctgccggcgctggcaaaaggggatatttgcgctgtcaccggttctgaggttaaggatatgaaaaccagtccgcccaaaccgttcacggaggggacgctgattgctgccatgaagaacgcggccagtttcgtcagtgacccgaagctgaagaaagtgctgcgtgataacgcaggtctgggcacagaggcgacgcgtgcggcagtactcgaaaccctcttcaaacgacactatctggagaaaaaagggaagcacatccactcaacgcagatggcccgggagctgattgcggccctgccggaaacgctgacgagcccgggcatgaccgcattatgggagcaggcactggatgatatttcgcaggggaaaatgtcgcttgcggtctttatgcaaaagcagctgcagtggacccgtcaccttgtcgaaaaaggccgccaggacagtgtgaaaatcaccgctcccgtcacgcctccctgcccgttatgcaaagggcccacacgtaaacgtaaaggtaaaaatggtgatttctgggggtgcatacgctatccggactgtgagggaattatcagtacaggtaagaagaaagcagcgaagcgtaaaaaaacatcggttaaggctaaaacagaataa

SEQ ID NO: 81058 - DNA, 555 bp, Citrobacter koseri
atgattccccctgtgttcctcctcacctccttctttttactgagcggatgcgcaacaacggactgggctgcgattaataaacaggtcagtgacacagccgcaaacctgacaaaaacgttgggcggcaacagcagcggagaaagtggcgggatgccgctgatgagcccggcggggcaacaggccctgcagtccgtcgataaaacgttctccgtgccggtcgatgtggataccgcggcggcccgcctgaagcgccattacaaatttatctccacgcaggagcttgaggcactgcggcaggccgcaaatgacggggactggaaagcggcggctgaagatgatgcgcatcccgtctgggatgccatgccgggcagctactacaaaatgggctccgactggaacggacgtgatcacctggatatcgaaatcgagaaaaacgggtccggcagcaggctctatgttgtctatcgctcatcatcagcacagcgtctggccgggtccggcgtcacgaagctgatgaatgatgtccgcgctgttgcggcgggtgaaaaacgctga

SEQ ID NO: 81059 - DNA, 726 bp, Citrobacter koseri
atgtctgatggtaaaacaaagggcggaacaaccgcttcacgagcgggggccctacagtcctctgttaatatcctgctccatacacattatgcaatccggctttgggagggcaggaaacgtgatgctccggacgagacaggggtgaaaaaaaagaggcctgaaataatcagcatgccgcaagccattgcgcgagctggtaatgcttcccgagactcagcggcagataatccctatgccgatatggctctggtacggctcgaagaagccctgcaacgagcaacacttaaaattaatgaaaacgtcagttcactggatgccatattgtcagccgtacccaaaggggtaacgctttcggaagttgaatcagccgatccgttaaatgtcagcgttttcagccgttcaccgttaggataccggtgcgtatggcttctggttggatatgatcagttagcaatgaaagctttccaggcttttcattacggactgatttcgcgttcgcaacgtgacgctatcctggacaatggtggccatgctgttcgtcaggtctatggcgtgattcagccttaccgaacacttgcagtgactcgccgtgatattgcagaaaaaaccacgcaagggcttgttgccattgagcgaaatggcgaacctgatccggatgtgttacgcggtaaaaaacgttcttcgttctcacctccgcttaaaaacaccatagcagaggaggaatga

SEQ ID NO: 81060 - DNA, 318 bp, Citrobacter koseri
atgaacaacttaaaaccagatcgtcaccgttacaaatttgcagaaccttcatctcttttatggcgaagaagtattgcctggctttcaaccagtgttgccactggcaacagtgctcgctttttagacagtgttgccactggcaacagcgcttactttttagacagtgttgccactggcaacagcgcttactttttagacagtgttgccactggcaacagcgcttactttttagacagtgttgccactggcaacagcgctcactttttagccagcattttgctggcaaaagtgcaagacttcatgctccgctgcctgtaa

SEQ ID NO: 81061 - DNA, 1239 bp, Citrobacter koseri
atgagtctgcctgcagaaagcctgattgcttatacgctggataaaatgaatgcccgccttgcggccagtccccggcgggatgatggcaggatacgtaacggcctgctgtttaccggaaatgtgcatgattccattccccgccggctgttgctcgacacgcggttgtcaccactggacaagatgggctggatgatgatccggctgtatgcacaaaataatgagggggcggttttccccagctatgacgaactgcagttgcagcttgcctcacccggaaaggggaaagcctcaagggaaacggtaagccgcgtcctgctgatgctgcgaataaccggctggctcagcctctgtaaacgcgtgcgggatgataaagggcgggtgcgggggaatatctatgctcagcacgatgagcccctgacgttcagcgatgcggaaatgctcgacccccgcttccttgatgtggtggcggatgcctgcctgagtaaaaaccggactatcagccagaccgcccgcgaagtgctcgacgatataaaaaacgaccccaccatgcgccattatcgcagccatcttgcactgatcgaatcgcgtctggacagcccacagactcccagccagatggcgaaacatcatcaccgaataccctgtcccgcaccgggttcggaaacagaactcagtcataaacggccaggaatcgtcgctaaaaaacagggttcggataccgaactcagtccagaaaggtacaacaattcactgagttcggaatccgtactgccagtaaaaacaagcagttatgaccgggttcggaaaccgaaccattacgtacgtagtatcacacacagtgtgaataaaaatacgtacgtaccgggtaaacctgtgcttcccgacagtctgcatgaacttgtgccggcagaagatattgccatgctgaccgcccagctgcaggcgctgcctgaagaacaggcaaaacttgtgctgctcagcctgcaaaaggtgatggcacgccagcagctcagcaacccggttggctggttgctggccgtgatgaagaaggcacgtgagggcaggttatacgcgccccgtcagggtggcgatatatctgacagtgtcgggcaaaaaacagttcagcgtcccgaacagcaacaatggaaacccgaaccacgcgcctctgcccgcccggtatcggaggaaaatatcagggatctggtgaagaaaattcgggaaaaaatcataaattcatga

SEQ ID NO: 81062 - DNA, 249 bp, Citrobacter koseri
atgaaatacaggatggttgcgccgggcctgcgggctccccatggtacgccgccgcaatgctgtcaaaaggcgttacgtcaggttcgccgtttccggcagggggcgcgtaattacacccggctcgatgagaaaggctgcggttactacaaaatcgatctcggcccgttctggcgtctgctgagtcgcaacgaaggccggacatggcttcttctcagccacgaacgctataacagcgccatacggaaatag

SEQ ID NO: 81063 - DNA, 591 bp, Citrobacter koseri
atgatgaacagtttatctcaggctgcaaacggattattgatgcagctggttatggatctcagaagtggctatctccgccgctgcgaatcgctgggactgaaccgcgaggaaatgcagatgctgcaggggctctcgctcgaagagcttcactacctttccggcagtgaggtgtcgatcatcagtgtgggcatcaatcacggcaatctggtgcgcatgctacagcaggcccggacggaacagaaacgactccagcgtatcgatcgggcgctggcgctgggcggctccattgaactgatggccaattacttcgggctctccagtacggacgtggcggcccgccgtcgcattgccggtatcgatgtccggccggggcgcggtaacgcactgggtgatgaggaaaacgccgccctgtggcgtcagtggcaaaagtccggcgttgaagacgcggaaagtgctgacgggctggacgtgatgatgctggctgcagaacagatgaacgtctcgctgacgtcggtctggcatgccgtccgcggctggcacaagacccggcagccttctccggcccgaacgccggtaaggaagacggcatga

SEQ ID NO: 81064 - DNA, 711 bp, Citrobacter koseri
atgaataactcacagcgacagttgcgactgctgaatcttgtcaggaaactgctgaagctgggccgcagcaacagtaatgcccatgaggcaggactggccctgcagcgtgcccagaagctgatggccagatacggtatcagcgagcttgatgccggccttacatccgtgcgcgaagcgtcttcccgcacggccccttcggatgctgaaaaagttccggaatggatggtgacccttgtccggggcgtctgtcatgcctttggctgccgcgcttattactcatggcgtcagacctctgccgggtatcgccgttcggtaaccttttacggattcagtgaaaaacctgagatagcagcctatgcctttgatgtgctgacgcgccagctgaaagatgccacaaattcttatctcaaaacccagagtaagcggctgaaactggccacacgccgggcgagagcggagcagttccgtgacggctgggtatgtggggtgcgtgaggtgatatcggcaactgacatcagcagcgaggagcagcaggtaatgagccactggctggaaagccgcagtatgaaaacagtcacaacccgtgaactgaaagcctgccgcggggcggatacagcacgttatcaggggtatgaagccggacaaaatgcccgtcttcatcagggtgtcagcggccggggtccggcagccattggttaccgtcaggattaa

SEQ ID NO: 81065 - DNA, 1701 bp, Citrobacter koseri
atgagccgtaaaagttctaatgtgggggctgccatgctgcagcccggacgccagtcgcaggcggccggcaatatcagcgtcatgccggcggctgaaatgcccatggtcctgacgctcgaccagttaagcccgaatcctgataatccgcgaacatcacgcaatccgcgttatgacgatatcaaggcttccatccgttcgcgcgggctggacaccgtgcccaaagtcacccgtgacccggatggtgagcccgatatgtacatcttcagcgacgggggtaatacacgttatcagatcctgtcagaactgtggcaggaaaccggagaagaccagtttttccgcgtccatgtgttgttcaagccgtggccgggacggctgcagtgtgttattggccatctggcagagaatgaagtgcgcggggagctgagttttattgaaaaagcgcaggggatccacaaagcccgctctatatatgaagagcagatgggaaagacggtttcgttgcgtcagttgtcagagctactgacccatgaaggtttgccagtccattactcaacagtcagccgtatggaagatgcgctgaaatatctttatccgtggatcccagacctgcttgagtccgggcttggcaggccacaaataacgtcactgctggcgctccggcatgatgcggaacgcgtgtgggatgagttttgcctgatttcagacacaggcgacaaatccttcagcgacgtttttggccagtgttgtggccgtttcaactccccggaactgtggtctctggagatgtttcgcgatgaatttattggtgatttactgcaggcgttaccccatccggaactggactatgaccgctggatgatggaactcgatcctaaagaacgcaaccgcagacatcactttggcgagccggagacggttgcctttcccgccgcaaacaagcctgttaatgctgatcacgccctgcataccacaggctcagatgagagtgaaggcgtcccgctacctgtctccagttcacgtcctgaggtctcaggaggggctgtaacgcccgttccgggtaatgcgtcttctccttctgaaacaccgattaatgagcccccccggcatgaggttcagccagatatgtacggtgccgcgccggttatttcaggtgagagcggggatgttagcgggctggttaccctctccgatgggtacagagaagagaatggcggagaagaggacaatggggaggatggcctgctttctcttttaacaccagaacctgaagttgtcctgcaggatgacgcgccggtgagtaatgacagcatctggcatgtgccggcccatcaggacgatatcgaacacctgcagaataccgcttttcgtctggcctgggagctgggtgaggtccttggctgcgaagatgaaattcttcctcaacgcgacaacgacatgtctgccggttacgtcggggcaggtgaggtgcgttctgaagccgccgcatttctgctgggcctgaccggcgaagcgcctgcgctgcatcctgcggcaggagtgtgtggcctgccggagcttttcaccggcggcccgggtgagggggaagcacctgccctgacagatgaagatgctctgaaactgctccgcctgatgcgcgttatgcgccgtctccgggagctgcaacgcggtctgaagtacggggaggataacagtgatgaataa

SEQ ID NO: 81066 - DNA, 1371 bp, Citrobacter koseri
atgtctgagatgatgatgccctgctcttatgaggctgagcaggccgtactgggcggactgatgcttgataacgaccggtgggatgaggtgatactgcaaatctccccggaagatttgttttcccggccgcaccgtatggtcttccgcgtcatggccgagctggccggagaagggctaccgctcgatctcatcactattacggaacggctggagaacagaggcgaccttgaacagtgtggcggctttgcttatctggctgaaatgagtaaaaacacgccgtctgcagccaatatcctggcttacgccggggtggtggcggagaaaagccgcctgcggcagctgatgactgtgggtaacagtcttctttccgatgtgcaggccccgaaagcgagctcggcgggcattcttgagtcggccgaaggtaagttgtttaacattgccgaacagggagccatgcagctcaacagtgagaccggtgttaacgaggcgctggataaactgctgacgcagctggaaagcatgtccgccagtgacggcctcaccgggacaccgacagggttcagtgaactggacgcgatgacctgtggtctccagcccggcgatctggccctgctggccgcccgtccttccatggggaaaacgtcgctggccatggccgcctgcacagcggccgtgagcgcaaaacctgacgatcacgtctttgtgttcagtcttgaaatgccctcagagcagctgatgatgcgcctgctggcgatggaaggccgggtggaactgtcccggcttcgcagcggcaacatggatgatgaagactgggctcgcgtgtccgaggcaaccggtcgcattattgagtggaaaaaccgtctgatcattgatgataccagttaccagaccccggccacactgcgcgcccgcgcccgacgctatgtccgcaaatacggcagaccctctctcatcatgctggactatctgcagcttgtccgctcccccgagcaggaaaaccgcacgcaggaaatagcggaaatttcccgctcgcttaaggcgctcggtaaagagctgggctgtccggtactggcgctttcccagctcaaccgcctggtggagcagcgggccgataaacgccccaataatggtgacctgcgtgactccggtgcgctggagcaggatgcggacctcatcatgtttatttaccgggatgaggtttataaccccggcacccctgatgccggggtggctgagatcattgtcggcaagcagcggcaggggccaaccggcacggtaaaagtcaaatttgacgggcgttacaccctcttttcggagtttcaggaaggcagctatgacttcggttaccgcagcgggaggaaacaggcatga

SEQ ID NO: 81067 - DNA, 876 bp, Citrobacter koseri
atgaaaatacttcccgttatctctcccaaaggtggagaaggcaaatccacgtttgctgcttaccttgccggttttcttgccgatgctggcctgaatacccttcttgtggatgcagactattcccagcccacagccagcagtatcttcgcgctggagcatgaatcccctttcggtctctatgaattgttgatgcagatggtcagtgaccatatgcaatgcatttcgcagaccgccataaaaaatctcgatgtcatctactctaacgacccggacgaactgttgccgaccgcgatgctccacgctgcagatggccgtcttcgcctgcgtaacatacttcagcatcctttctttaaccgttatgacgtcattattgtggattcgaaaggcgcaacaggcgtcatgaccgaactttccctcctttcctctaccggtaatgtgatgggcgttgttaaacccatccttccggatgtccgcgaatttatccgcggctcccttcacatgcttaaccgcctgaaaacctatgaaaattacggtatccgccttcctgatatttccattctcgtcaactgtatcgaaaacaccctgcttgaccgtgaagcaatggacggtcttgccgccatcattaacgaaaaacattacgacgcctctgcgctgggcaaccgtgacgtttatcgtttactcaatacccgtatcgaggcgctggatattttcaaactggggcacgtaaagcagcagcccgtgcatcgtctggaatacaaaacacgccgcaaaggtccggccgcagccatcaccatgcacgacctcgcgtgtgaactgttccctgagtggcagagccatttcagtgacgttctgacccgggaggtgcgtcatgtctga

SEQ ID NO: 81068 - DNA, 2130 bp, Citrobacter koseri
atgacaactaacatatcccctcttgaattgggtcagtatctaacactagtccgtgaacgtgctggaattaagcaagctgaactagcccgcagggtaacgtggagtgcagctgtattatcacgcattgagagtggagatcgctcggtggaatcgggtgaactatcaatgctattggaagcaattgatacaccagaggctctgcgtcttcgtacaattcttgaacgcgactggcagataatcgaacgtccaagccttgaccatcccgatcaggatcttttgtggtcagcagaagaaattgccaagcagcttatggagttggctcaaaaacccgacacaaaaaatgccttcgaacgccgtctatctacctacgtgggtgaattgaaggcttcggcaaacttgttactcaaacgtgagcatcaagtagcatttattggcagtattggtataggtaaatccactgcaatctgcagacttaccggtcttgaggtctccatcacggacactcacctcttggctccagtacttgaggcgggggctggtggtattacagtttgtgaagtacaccttcgtcagggccctagctacggtcttcttatcgaaccatgtctagatgacgttattcgcgctcatgtcaccgattttgcagaatatattcgtggggcaggcatccaagggggaagcggagaagattcgcagggaatttcaaaagaaattgagagagctatccgtaatctttcaggactgcgcatcagcaaaagcaaaggagtggacggaaaaaatgtccgtcacgatgaagctaaagagctggcaaataaatacaacagcacccgcgaagttgttgtcgaaattctgtctagaatggaacttcctcgacgtgaccgccgtgatgtttggtatgacgccagcacaggaaaacaacctcttaactggttaaaaaacacatttgaggaagtcaataatggtcgtcatccagaatttacacttcctgcacgtattgaagtaattgtaccggaacacctgcttccgattgataatctgtcagtacgatttatagataccaaaggtattgatcgtacagcagctcgagcagacctcgaatgcctcctcgatgatcctcatacgctagctatcctttgttctggttttaacaacgcaccagcagcagaggctagactactactagagcgagccaaagatgcaggtgttcgcagtcttatccaaaaggcagcattactagtactccctcgctcaggtgaagctcttgaagtaaaagatgagatggggatgagagttgaaaatgcggaagaaggttatgaactgaagcatgaacaaatatctatgagtctggctcctcttggtttatctgaattagcagtcggcttttttgactctcgccaggatgaccctacattgttccaagcatttctgtcagaacggctggataatgttcgcctgtcatttcgccatcagttgaatcaaataatcagtaacgccaacgcgctactgcaaaactatgaactagcacaaactcaagaagtcattcgtcaagctgcacagcaactacgaacttggatccaccgacatcgttcgcttgaacctttaaatattcatgttcaggatagcctaattgagcagtttggctacgcctacgctgcaactgtcagagcctctgtaaatcgtgaaggggactggtacaactttaatttcggtcatcaccttggatatggtgcaagaaaaattgcggttcaatcacttagttcaacagtcttgggttttactgagatttgccagaatatggcagaaacacctgagcttgaagaagcaaacgaattactcgggcaatcccaacgtttacttcagacagcctatgacgagctattatctaaaattcagcttctgggccaaacatccttccgcgacgaactaaagcaggatagaaatttctggattagttgccagagagaatgggggcaaggtagtggctacaaaggtagggttgctgcccatagtcgagactggtttaacaacccggacaaaaagcggcttgaagatgaactgtggtcaatgattcaacgcgaatgggatttggcgctaactcgggttgaatcgttactggttaccgatgaataa

SEQ ID NO: 81069 - DNA, 705 bp, Citrobacter koseri
atggaaaaaatcaaagctccctgcccatattgtaaaggtgaaaaaaactgccacacaataggccataaaaaaagagaatggcgtgaagatgatggagacaactacttttgggctgaaagtgaatataaattattagaatgcttagggtgcgacggaatattcacatatataaaatcccgtcacagtgaagattacgacttagtaagggatgactcaggctatgattgtatggtacataactatcatatatcaacatatcctacacaggagcaagaagaaattaggcccgtttggcttggtgagatattaagcaaggactatcaactgcatgtaataatgaacgaaatgtacattgcatttcaaaataaatcactcatcttagcagcaattgggctcaggactatttttgacagaaccactgaaattctaaatatacatcccgggcatacattaggcaaaaaagttgacattctcaaagaagaaggttttattggggaaactgaaatgagtcaacttaaaattgtaaccgaagctggcaactcagctgcacatagagcatggtcaccgaacgaatctgaatttaaatcgctattggtaattatagaaaattttgtaaggcgaacaatactaaaagatgaaggtatatttaaacttgtagaaaaattacctgaaaaacatccaagacctcccaaaaagcaagagtaa

SEQ ID NO: 81070 - DNA, 1197 bp, Citrobacter koseri
atgtccacaccacgctgttttaagttcactcaccgcctcattgatggcctgccctctaatgaagctaatgccccttcccgtgaagccgagtacagcgataccgaaatcagcgggctgaaatgtctggtaggcaaaggagaaggcaaaaagaaatttctcctgcgctatctctggcagggccgcaaacgcgccatcagtattggtcactggccggaaattgatgtcatcaccgccagaaagattgccacggagatgaaacgccagatagccaccggcaccgatccgcgttatgagcgggacaaatgccgggccattcccacccttcaggaagttttcagtcagtattatttcccgtgggcgaaactgcataaaaagagctggaacaaagatgaacagcgcttccgtgaccatattgccccggtgatgggaaatctgttgctcaatgaaataacgcctcggcacgtcacgcatcttcagtcatcactgtgcgaaacctgccagcccgcaaccaataaccgggtcattgccctgctgaaagcccttctcaggtggtcactgcgccatgagatggtaacggtgaacccggcggcaaacattcctctgctgcgtgagaataacgcccgtcagcggtatttctcggaaaccgaaatcagacgcatattcgaggctgccagtgaggacagcagtcgcgtgatcgggatttatattcgtttactgctgctaaccgggttgcgtcgtgatgaactgcggctggcaaaatgggcgcattacagtatgcagcaaggaacgctgtggctgccggaaaccaagaatggctcgggcagactagtgcatctcaacgactgggcggtaaagctggttgatgaactgcctcgcttcggggggaatatctggatgtttggtggcaaaattccgggtaaaccggtctgcaatgtcacgaaagctttcaggcgtattatccggcgggcgggcatttacgatgacgaggtctgcattcacacctgtcggcactcggttgcggcattaatcgtttcccggggaggcaccctgtatgacgttcaggcccagctcggacaccgcagcattcagtcatcccagcgttatgctcacctgcacccgcagcggctgaaggccaccggtcagctgattgagcaacatattggtaatgcactggcattttccgggtcatctgattaa

SEQ ID NO: 81071 - DNA, 1770 bp, Citrobacter koseri
atgtctgacattaataaaaaaagtaaattttgtttcccggaaggctttgttgaagagaatggtaaattgtatttttgttctgaagatgacgagaagaaaaagattgtgtcaagtcattcgttgatcccagtggcaaaggcttgtaatcgttctcgtaatgggaattggcacattattttaaaatgctctaatcatagtggtgcagaggttaaaatggtcatctgtatgaaaaaggctaaaaagagcgctgattctatcattagccagcttgccgggaagggggtctatgtcgaagacagtaagttgtttctgatgttcctgcagcagtccagtgaaatggacttgccagtctatcgcattgcgttccgaccgggcttccagcctgaggaactggtattccagtttggcccgtatcccatttttgtggctgaaagggaggggatccaggatgtaataccaggcgaaaacatgatgattaaccatggtattgccgtctcaggttcactagagcaatggcaggaacagattgctcaaaaggtatgcggtatggcaccgaaactgtccattctggtcggactgagctcatccctgcttccattgctcggagaaagtggtgccattttccatctctgtggtgacagctctacaggtaagaccgctgcgatccaggcaggagccagtgtgaatggccttgccgctgagcccggaagcggtagcccgactcaaattcagcgctggaactcaacctcaaatgggctggaattgctgatggtgatgaataatggcaccacattatgcctggacgagctcgggtccttcaccggtaaattttttgctgaaacattgtatgacatcgtttctggtgttacgaagtccaggatggacggcgagacccttggaatggcgcggcaatcgacgtgggttcaaaacgtactttctaccggtgagttaacgattgtagacagaattcgcctggaaaaatctcaagtgatggatgggatgttacatcgcgccctgtccatccccgtcgtagcggaagactcccgcagcgagaatgaagacattgatgtagccagacagcgtataagtgatatcaagaccagtctgttgacctgccatggtagtgccggttatgaattcattcattgcctgacaggcatgaccgatgcgaacggaatgcattttgactggaaagccacctctgattttctgaaggcagatctggatgtcgtcttggatgagatgaagcggcgtttacatgcaggcctgatcactcttaattctgttgagagcagggcactccagcgttttgcaatcctctaccttacgggcgctctggcatcagaatggcagatactgccgtgggaaagagaagagatcgccgatgtggtttatgtcgcctttgaccgctggttgcagaactatcgctcggatgcaggccgtaagcagagtatcctgataaccattcagaacttcattgcagtgaaccggtcaaaatttattgacgtgaaaatgccttcttttgcgtcccgtaagactgatactgccggatatatcctgaatgacggaagctatttgatactgccggacacccttgagaagctgggtatgaaccagggcctgtctgcaaaaaaactggcccgtttgatcgacgaagaaggttacctggttcgcccggaaggtgatcgtctgacaacacggcggaccatacaaaaagcgaacgtgacgggatactgtttatcctctgaatttgccacagccagtttctga

SEQ ID NO: 81072 - DNA, 855 bp, Citrobacter koseri
atgaagcttgctgaactgttcttgcggtatctggaatattccagaatacacaaaaaatctttttcctcagaccagtcaaaagtcaacaactactttttgccgaaactggggcatattgacctagatatgataagcaggcgtgatattgctgattatatccaggggcttaatggcctgaagctctcgacgcgaaatcgtcacatttcgctactcaaggccgtttttacctggagcgtggagtttaattatatttcatcgtctccggtcgccgggtttaaaacgttcagagaaccggcatcattacggcgggctatggagccgctacaattttctgcctttatgcatgtgctggatgttgaaattaagcaagagccccgtgacacgcttttaattctggcttttcttggactgaccggcatgaggcttggtgaggcacgttctgctgatattaagtgtattaacatgagcaagaaaacactgtttctcaatgacacaaaatcaggggattcgcgacttgttcccttatgccagagagcaatggatattgttctgatgcagatgaacaagtatggcattaaagggctgctttttcgctcagaagccggtggcagggtcagtgagccccgccgacttatgacggcaatatgtgaaagggctgggattgagaggttcactatccatgagcttcgctataccgccggaagtgcaatgctggccgcgacccgggacgtttatgccgttaagcggtttcttggtcacaagtgtgtcagcacgacaaccctatatgcccagtactttggtgtacaacagcacgatgatgtcgaacgtgcgatggcgctgatgctgaatcactga

SEQ ID NO: 81073 - DNA, 1176 bp, Citrobacter koseri
atgagtctggataaggaactgaatgattttctggcaaaactgagaaagcatcaggatatacgttatcttcagggtgtcacgcctgcgaccttgttccgttttttaaatggcagcgtccatcttagtcacatcgcggaaccggccaaaaattccgtgctgaacgttctgcaggacccggaccaggctgattttatctcttcctttttttccgatttacgttaccgggggaaggggctaaaaacacaggccttcagggatagcctgatgtggagttatatccggctgtatcacccgcagcaccttaaggtgaatatttatcatgatgcttatgtttttaatcagataaatgcactggagacattctttgatacttattgttcaggcaccagcggcgtttattttccggcaatggataatctttatgcaaatggcagcctgtcttttttccccactatcaggggcctttcacattctccctttgaccgtcgcacgtgtaatgatgccctgaagaccatccgaaagacggggatggactctctgtatgtgctggataaggatttaatgaaggtactgagtttttccgcccaggacgggatacagcaggttatgcagctctgccagccggaggatccggcatcggcgacagcgattattgaatatgcgctgcagctgtaccgggaatgcagaaaggatgctgatgattttgcaaataacttttctttcagtgattacaatgaaaaaagaaaggtgctggaaaagaaaatcgcctttgataccgttttcctctatgtgctgttgaccgacttttgtgatgcaggcgggtttggggcctttgacaaaaaggcgctgaacacgattaagcctgtccggccaacactttcctatataaaaaaccgtttcggtttatccagcgataacgttctttccctgcaaaaaaacattgtcgtgaaggcggtgctttatgctgtgctgaaaagaatgcaggcagacagcagtacgcaatatacccggctacgttttctccgggagattgataaacattatgcctggctggatgcaaatacttctcgccggaatgaggatataaacaagctgatagacagtgacacccatgagcattgtatcaaagcgctgtggaatgtcagaacgtctgttgaactcttcactgtcgggtag

SEQ ID NO: 81074 - DNA, 375 bp, Citrobacter koseri
atgcacattgtacagtctccggcagacgctttctgcctgcccgtgtcaccggttcagcaattgcagctggttaacgaactcactgaatgcaccgacagcagcctcactgcggcaacgacgctgtgggaggaaactcaaacccaactgctgtatctgcttcccggcgaggagaagcacctttctgaacaactgaccacttacctgcaccatctggcatgcaatgccgaatacgtcatccgtctggatgattcgctgtttcttgccctgaccattctcagcgactcagggcagggcttttatctgctgtttccaccgtcagcgacctttaccgggactgctgaacttatcgctatggctgaaccttcaggatattaa

SEQ ID NO: 81075 - DNA, 438 bp, Citrobacter koseri
atgaaaaagaccaaacccgctccagcctccactgctgaaacccaaaacgacctctgcgttcttactggtgaggccgagaaaattaatccgcattccactggcctgctgcactgggagatgactgaaaatctggatggggaacggggattgcgcattacctccaacgacagtggcggcttgttctcccgggaatggattgccctgagcaccatatccggggttctgaaaacacatgaagcctgtgatttcacctccacggcccttcgcccgctatttaccagcgccagccgtaacaatgcaggttttctcgccgccattcttcgctgtgctgatatctgtctcaccgaagaaggttcaggcggggcgttcagccatcgctgttaccccgactgggaaaagcgactggaaaagcttttagcattatccccttctgcctga

SEQ ID NO: 81076 - DNA, 432 bp, Citrobacter koseri
gtgaccccttactcacccacactgcatcagcccacgcttgaccttcccctgaataacgagtttatcgcgctgatagttacccatctcgcgccactgcctgacacctgtcagggtgtcgtgctgaactttcgtgacccggagtacagcgccgaaagcggcggctggcatccggtagaaattcgcctcatccgcagcgagcggcctgaaatatggcagctggattacctcactgacttcagttggcagggtcgtgtctggcccgaactggcaaaggaattcgatatcagctggtcacagcgctatgcctggcactgccttatcggggagctgcctgtaaaccgcgaattaaacgagttctggacgctctggcaggataattttgtggcgtactgcgcgatggatgtcttcaccgtcaccgtttccccggactga

SEQ ID NO: 81077 - DNA, 492 bp, Citrobacter koseri
atgctgttcacgctcatttcccggctggtgatataccggcctctgttcagtctggcggaaagcttcgccgacaatgttattcgtgaaacggtggatgaaccggcaagaggcggtatcgtctggtgtgagctggcaggtggctatgtcactcacagcggtatctacaccggcaacaaccggattgtgcatttgtccggtgatggtgaagtgctttgcagcgaccgcaaagggtttatggccagactgaatggcctgaaccctgccatgtcggtctataccgattgtcaggggcgcttgcccgtgggaaatattgccgcagccggtcgggcattacgggcgctgggctccagacgtcagtaccacctgctgaaggagaactgccaccgtttcacagcggagtgcctgaccggaagaccggataacgccgtggtcctgcatcgccagctgaaacggctacaacgcggcaatacctggcgcgtatgggaggactga

SEQ ID NO: 81078 - DNA, 219 bp, Citrobacter koseri
atggcccgcgctgaaaaacttgctgagcgcctctgtcactgcgtcattttgctctgtcaggggaaaacgctttccgtccgcgtactcacccagctattcgggatctcaccccgcacggcccgccgtgaccttgcccgtatgggctgcatcatggagcccgcctcacccggttgctggcgactctcagcactacttcgacgagccttcatccatcgctga

SEQ ID NO: 81079 - DNA, 327 bp, Citrobacter koseri
atgaacaagatttttactgcactgtttatttcgctcatcccgcttgtcagcgctcatgccgggctggttcaggttgaaaaccgggtgagatgttatctggcgctaaagggtagtgaaaccctgatggagtccagtggacgtgacatcgctttcaccaaaagctggctgcacaacgaactggcccgccacggcgttgaccaggaatccattaatgaaaacttcactgcgctggaaaatgaactgccccgggcataccagcaggccgctttcgcagataaatgcgtcacttattacagcagcgccgccaaccgcaaaggcgatgaatag

SEQ ID NO: 81080 - DNA, 393 bp, Citrobacter koseri
atgaaaaacatcattctcaccaccttcattctggcggtatctgcttcagcatccgccgctcaaatttcactggacactgcgggccgttgctatgaagccacccgtcagtcaacacaaatggccatgctgctggaccctgatgcaaaggaatacaaaaatattggcgacagcaacaaggagctgtttggcacgctctccggtggcgtgggcgaaaaggactcaaagaaaatacgcgatgtgtggaaagccattctggataatgcgggcatggagggaaaaatggcgaaatcagacgggtatcgtgcaatgaatatgtatccgcacgatgtcattatgcaggaagctaacaagtgtgtccggctggcgctaaaaagtggcatcgtcaaactgtga

SEQ ID NO: 81081 - DNA, 435 bp, Citrobacter koseri
atgaataacgaaacaactttatacgacgataatgacgtggaaaacgcttttgaggcgcttgcagtggacttactcagtgggttgctgggggcgcatgataatgcgcaaaatgccgagctgaaagactggctggacagtcctttccccgttcagccagaggttttactcaaacatgccgaatttatctgtgagcgatttcaggcgggggacgacagccacttgctgatgcacggcattgatgaacaactggcggcgatgacactttcccgtaaggaacgcttcagcccgatgaataaagggatggttggatattctgctcctcgtgacctggagaaagtgaatgcgttactgaaagtcattatcacctggtacgagtgcgaaatcgtccggctgaagatgaagtatggcgagattactccaccggggaaaaaataa

SEQ ID NO: 81082 - DNA, 912 bp, Citrobacter koseri
atggaccgacacgacaaacttggataccgacttggattaatactgactcgcctcaacaatggcgagtcactgaccgtcagaggcctggctgacgaatttaacgtctgcgaaaaaacaatacgacgcgatctgactgagcgcctggcttacctgaacctgctccgacaaggaaagcagtaccgcctgcctaaagggattctgggacaacgcagcaacacggatttgcgccgttttacccgcattcttggcattgaaggattatttccgcgctgggaagaccgcctgctgaacgtattgctgggtgataccgaaaacaatcccttcctgattaagcaacgcccttatgagaattgcggtgccttcatgtccactcttaatgctatttccggggcgattcaggcatcccagaagattgcgtttacctataaagacaagacgttttcggcaaccgaaccttatcgtgttgtgaatgacagaggactctggtatctggccgcccggcacgaaggaacgttgaagagttttgcagtttccacgatgacgcatgtgcaggtcagcaatatgcgattcagtcctgatccctttgtcagtcagcaggtggaacttgcggaaagcatctggtatggcgatgaactcaccgaagtgctgatctctgtctcagcccgcgcggcatcctatttctctcgccgcaacctttatcccggtcaggaaattatccatacaacgccagccggtgatttgctcgttatttcccgtgtggcgcacccccggcagattattcctctaatcaaatactggttgcctgaggtggaagttattaagccagcgtccatccgcaatcagattattgatgacatgcgcagtgcgctcacccgatatgatgaaatgaatggagaaacatcatatgaataa

SEQ ID NO: 81083 - DNA, 357 bp, Citrobacter koseri
atggctaaaccacctgcgattcaaccagtggcctctacaggcctgaccccagcagaatccaatatgctgatgccagataacatttcagtcagcataagaaatggaaagcgcaccgtagaaggttataataaaaacggggaaaaagttgttatacagacaactgttatgaatgtaacccccagccaaaataatggatttcgtagtcaaacgatgactgtttgtgatcaactctcagttgaggaacgccgtgctgtagttcagcggatgaaaaaagaggaaaaactctctcaagttgagatagcccgacgtcttggagtctctcaaaaaaccatatcaaatgacttaaacgccaaataa

SEQ ID NO: 81084 - DNA, 213 bp, Citrobacter koseri
atgagtattggaagtagtggccgcattgtcattgaggtagaaccagaacttaaacgcgagctttactcgtatcttgctcgtgatggccttacactcaaagaatggtttctacatgaagcgcgccattacatgaccgcgaccatgcagttaaacttagagctatccgagcattcggttgatgagacaaagtataggcaagtaattaaaaaatga

SEQ ID NO: 81085 - DNA, 1188 bp, Citrobacter koseri
atgattgatgttcaagttatagatttgtttagcggctgcggtggggtgtcttgcggcttcaaactggcagatacctcgaacgtttcatataagctacttggagggcttgatgtagaccctcacgcaaacgctacctattcgaggatgctagagcggcctgcacttaatataagtgcacgtgacctacttgaaccagctaatctgcaaacagctttaaatacttggggttacgtaaagagtaagccgctagttttgattggctgtgccccctgccagggatttagttcgcaccggaagaaagattcgcgaaacgatgagcgcaatgatcttgttgaggtatttggggaaatcgcagcaaagcttcgtcctgacctagttgttatggagaacgtccctgaacttctacacaaaaagcattgggcgcattttgtggcatttaaaaaaacacttgaaaccgcgggctataccgtaagagctagattgcacaatgctgccaaattcggtgtacctcaagaacggtttagagctttagtcatcgcttctcttgatccgttaaaggctcacatgcctaaatcaacgcactcggttgacaacttcagaacggttcgagacgcaataggattcttacctgcacttgaagctggttcggtcaatgaatcagatccaatgcacctaacctccaaacaccgtcctagtaccattgctctacttagcgcaattcctcctgatggtggcagtagatcagcattaccaccggagatggttagaaattgtcataagtctgtcgatggttttcgagatgtctacggacgcttatggtgggacagaccttctgtttcgataactgcacgctgtcggaccccttcatgtggacgcttcacccaccccgaacaacatcgagggctttctgttcgagaagctgctttactacaaagttttcctgctgattggatcttcgaggggccatttgacgacaaatacaagcaaattggtaacgccgtccccccactttttgcaaaagcgatcgcagaaacaatcgaccgaaactggtctgatggatcgatgccaacagaggaaatgctatctagggatatcactgcaccaattggccactctatatcctcatcaattgctgcgtggaaaaagcaagcccgtaaccaaacagcacaggcagagacattaccatga

SEQ ID NO: 81086 - DNA, 1119 bp, Citrobacter koseri
atgactaaatatcgagttgccgacctattttcaggagcaggaggcctctctcttggttttcaacaagcagggtttaacattacttttgctgccgataatgatcgagatgctttagatacgtatatccataactttggcccacatgcctacacgcttgatctcacggaaggtagcccagaaacaatcgcggcacatattctgaatactgcaggtgaaatagacctcctcattggaggtcctccctgccaaggtttttcaattcagcggaggggagcaaaagatgaccaacgaaatcatttgttgctgaagcatgtgcaaattggtttggcccttagcgcaaaagcaatcttgatcgaaaatgttcctacgatcttaggaaatcgaggattagagcaattgaatgaggtatttagcctcttaagcaatgcttcctatagcgtaacaaccaaggttttgctagccgctgactatggtgtgccgcaactccggagacgtgcctttatcgttgcctttagaaaagatttccctcatgattttcaatttgagcaaccgtcatactcgccacaaaattacatgacagtacgtcaagcaattagcgatttgccagctttgccatcagaccattcagctcatcctgatatagccaaccatcaacgtaggaatatttcagaaatcaatttaaagcgcttatcttacgtgccagaaggaggagggcggttagatatacctgaagaactacgattaccatgccacatgaaggacaacggtcaccgacaccttgatgtttacgggcgtatgttttgggataaaccggcaccgactatcaccgcgatgtttgataatttcacgagaggtcgattcgctcatccgtcagagaccagaaatatatcaaatcgagaaggagctcgtcttcaatctttccctgacagctttatattccttggaaatcagaagtcggtagcaagacaaatcgggaatgcagtgcctccgatacttgctgaagctgttgcccgctcaattttatgccatctcgattcaaaaattctcggacagcagaagtccctcaagagatctcactgcggggtcaaatgcattgaccgagaggtaacacgcgaataa

SEQ ID NO: 81087 - DNA, 1224 bp, Citrobacter koseri
atgcaaactaagctctgcatcagcttgagggagcgaggtacccctcagatagtcacgtttgcggaatgggaacgatcaaatagcgcgattgttgcgaatgaactcgctaggatgggcgtagtaaaggttcaaaatgctggtgaatatatcgttgtagaacctaaaacgttagttggcgtgtttaattctcctcagttaaggctagaggtctgtgccaagtcaccacaactggtgaatagtctgttgccacaacttgacgggtggcggaagtttcttaatgttcaagattcgaaaatagagggaacgaatactggaattgaggggatatggaacaccttcgaaactttactaaccagagttcaccaagagggattgccgtgggaatatgtgagggtgacgaaaattacctcaaccccgcgagggagagtgaattttcacgagacgaactcaaagattacctctaagggaattaatcataaagttgctgtaagccagcagattagaaattacctccagaatttctctccagcccttgatgcagtaagacgtaggctctccagccttgaatttgatgactatttaagacgctctagagtaattcggctaatagatttagctggtgatttttcgatgcagctcaacaatgcagaggctaaaggagtatttaatgtactctcagaacttgaggggcgaccagcattagttgctctatgcaatttctgcaatcaaatattgacgggtgaagatagcataagaatatcacggcgagtgggatctggtgttgcagaattcgtcgatatggaaaaactatgggagagtgctgtgcagttactatttactaatcagcatcaactgcaggatgagcaggttgtccttcaccctctgagaggttccagacgaactttgtttgacgacggggggcctgctattgatcctgatattatattttataagggactaaaggcgttggcagtaattgacgcaaagtattctatagtcagcagcccttcggctgctgatgtctatcagttagcatcctatgtttctaggttgaaatgcaatattggtgtgcttgcatacgttgctgatagttacgatacaagcatcaaaaagatcgggacattagatgacgggcgtgttttattcgcgtgttacctctcggtcaatgcatttgaccccgcagtgagatctcttgagggacttctgctgtccgagaatttttga

SEQ ID NO: 81088 - DNA, 1719 bp, Citrobacter koseri
atgacttggagcaccgctaaccacgaagtgatccctgagcaggagttcctgctcccagacagcacgatgcacccatatttgtgggcatttcttcagagtgacggagagccatttaaagagtcttctaatgattatgaagctgttcggagaaatttagctactgcaatttcaaaatttcatggacgcccggttaagggacgagcccctacggaagatgttaaggcttcccgactaagaacatggaagccactcttcgagcgtgcaggattgctcactgtaaataaggacggaacactacatgtttcgccttttggaagagcagttaaagatctgtttgacgacttagcaaatcgtatctctggggcaaatgaacatctctctcaatgggctattactgtcttaggccgttacccactcttgaatccgcttgaaaatatgggaagtaaggatagttcctaccctgatgatagcgatttgttgccattcagagcaatttggcaagcagcacgccaattaggtaaccaacttcattggcaggaactaaatcgtggcctcatgctaatacattatcaacgagatgtagatgctgttattgatcgcattagaaaggctcgagcagcagggggagatgattatttcaaagatcctgtaccctggcttggtactgacgtcgcagttgatgatggaggacagacaaggcgtcgagttacaccttggctcagccgcgcaagctttgggggacttcttgctgaagaagatgaggaaactggcttatgggtacttcggctggatcgcctggcgctgatcgatgaggctttacgtgagaatgtcgtaatcccgaatgatgtacgagttgatagagcaaactttgttcgctggctctccgagccaatatcaagatcgtcacccagatcgacggatcctgaagaccttgcattactaaaaaaagctgttgagtcggcaaataagtttggtcattcaaaaattgtgtgtctttcaggtatgcctggaacgggcaagtccagacttacaaagctggttgccgatgaattgaccgatggagatccatatagatcagtagagattcaattccatgagagcattgcttacgaggattttgttgaagggtttgttcctagacctgatggcacggggttccggctagtggacaagacacttagaatgatttgccgaagggctgcatctgatcccagcggtaagcactatgttctagtaattgaagaatttacacgtgcaaatgttcacgcggttttgggcgaattgcttacttatattgagcatcgaggaaggcggtttagatatgcgatatctcaagaagaagcagcaataccaccaaatcttataataattgcaacaatgaatcctcgtgatcgttcggcaactcagttagatgcagcagtgagaaggaggcttcattacgttgacgtacctccttcagtcagagctcttgagtcgatgctgaaacacaccgtatcaccaaatattctcacatctctggtcgaatggtacacaaaatggtatacacgccttccttttgggcacggtgttttttctgaggttactgatgatgaaagtatcagttctgtgtggactggtacctgtttacggttacttgagaacgctcttggtgagattgacgagaattatacggaagcagtggaggactttccatgcaaactaagctctgcatcagcttga

SEQ ID NO: 81089 - DNA, 483 bp, Citrobacter koseri
atgatctgggcgttcgtcaaatcgtactggaaacagttgtttatcgtggtgatgcttgctgcgctcattttcggcggcgtggttgcctggaatgtccacggcagccgtcagtacgacgcggggtatgcacaagcaaaggcagatcgcaaagccgaagatgagaaagctcgtcagcatgacgaacaggagaaggcgaccaatgaacgtgaagcgcagcagaggatcgaccaggcgcgcaatgatgctcttgatgctgccgctcgcgctggcaggttgcagcaacagctcgttgccatccgtgagcagctcaggcagtataacgccactgtcggcgctggggcgtcagccgcagataccggagttttgcttgccgacgtgctcagcaaatctctcgagcgaaaccgacaactggcagagtacgctgatcgggccgccgaagccggaagagtctgtgaaaagcagtacgactcactgaccaggtga

SEQ ID NO: 81090 - DNA, 918 bp, Citrobacter koseri
atgaaaatctctctgatcgttccggtcttcaatgaagaggccacgataccgattttctacaaaacggttcgggaattcgacgaattaaaacagtatgaagttgagatagtattcatcaacgatggcagcaaagacgcaacagaatcaattatcaatgcgcttgctgtttccgatccgctcgtaatgccgttgtcatttacccgtaattttggcaaggaaccggctttgtttgctgggcttgaccacgcaacaggtgatgctgttataccgattgacgtcgatttacaggacccgattgaggttattcctcacttaatcgagaaatggcaggctggcgctgatatggttctggctaaacgaaccgaccgttcgaccgatgggagactgaagcgcaaatcagctgagtggttttataagctgcacaacaaaatcagcaacccgcagattgaggagaacgttggcgactttcggcttatgtcccgtgaggttgtggaaaatataaagctgatgccagagcgtaacttgttcatgaagggcgttcttagctgggttggcggcaagactgacgttgtggaatatgcccgcgccgaacgagtggccggtgactctaaattcaatggctggaaactatggaacctggcacttgaggggatcacctctttctcaacgttcccattacgcatgtggacctacatcggactctttgtcgccggattgtcattcctgtatggtgcatggatgatcgttgacaagttgttattcggaaatcaggttccaggatacccgtcattacttgtgtctattctgtttttgggcggcatacagctgattgggatcggcgttcttggtgagtatattggtaggatatattttgagacgaagggccgcccgcgatacattattaagagagaaaaataa

SEQ ID NO: 81091 - DNA, 1434 bp, Citrobacter koseri
atgtttaaaaagaatcttaaattttcattgggcttaatgtttgtttactttttgctatttacaatgattgataaggggtatagagacgactactatcgtataatggaaggtcattttgcatgggacacagatggcaggcctctagcctatttattggtttacattattaacttcggcgggatattaacagacatatcacctcgctcttatgttatatctgcgatactggctgcactatgttgtgcggtaattggatcgaagatactcaaatctacgccagcaataaatgcaatatcgtcatctcttattttcttcagcccttttttcttacaaaatatggcgtataaatttgacgtagtgacaatgtgcgcatcaatattattgtgttgcattccatatatttacaatgacaaaaatagatggatttcatttttaatttcaacaacctgcctgatagcgtcgctatcaacatatcaagcatcggccgcatttttcctgatgttaaacaccctgcatcttatatctaaagagtttgataaagaaacatgcaagaactctattttgaggttgatatcattttctttttcccttgtgttttacaagtttataattgcaaaaatatatctatccaatgagcatgccaaatattattccgagatatctctgccagttaatcatgatgcagtaaatcttcttataaaaaacatcaaagatttatttgaagtgctagggcttgtatataatgcaggtaactatttggtttttttgcctgctataattatagccttattttgcttattaaaaatcctgttaaaaaaaagcacctctaaactcggtgttgtagtgttccttgtaacatctttagctgcaatatcagcttgcttcctgttttttattgtcaagcatccgtcatacgaagtaagagcaatgattgggtttggtagttttgctttcgttattgcatcaataccagtgattctaatcaagaaaaataattgggtgacgtatattgcattcatcccaccagtaatattttatacatcaattactaatgactatattgttgcggcaaaatcacaattcaaatatgaaaaacaaatcattgaattaacgtatcacgactatagaaaacttggtggagaaggacagatgaaaatatttggatcattccctttctcaaagcaggccagaatcgcattcagcaaatacccgatattaaagaaattcatgaattccgacattcagtggtggtctggtaaatatttcgcctatacagaataccctctatcagaaaatattgacataatcactgactggagattctcgcgcgctgacaagttaacttgtgacatgaaagccatcagctacaatggcatatacacaacctttagagagaataaaaatatagtatttgtgttttctaaaaagtgttaa

SEQ ID NO: 81092 - DNA, 1332 bp, Citrobacter koseri
atgtccaaagttattgttgacgcgaatgttttaaatttaaaaggcggcgttgttcactctgacccaatccacggcggcgagcatcctgataatgcatccttgcaacttgatgcagcgcaagcaatgaagggtgttgagcgtttatacggtcgaacccaaatcatgcagttaaaatcagtgggttctttggggttacaagcttccactgtaacaatgggtgatatttttaaacgtataccacaaaatgccgtgttgatgacggctgtcattgctagcgaataccctatgctagaagtaccggtgcatgtatctggctcccgacaatcaggtactcttgttgtagagggtaataatattgcccagggtcgagttggcatgcgctattacaatgagtatggttgctggcgatactattataatactggctatgcatcaggtaatatcctgagagatgcaggttggcgctgggaaggtggccctagtgagtatttaccaattgatgcagcaggtgctacgaatttaagtaatttgctctctaacctaacaacacctggacagtattttgtttccggtgctgtgtttgccactttaacggataatccttatggcggaacagcccccgctgccttcatcactgtagaaagtttcccagtcaatggaaatttcatccaaacagtcaaagctgccagcactgtacctggagggtacagacgatatattacagcggctggtgttgtatctccgtggattcaagagtttgtttcaggaactacattaactactaccggtacgattaattttgctggtggcacagtgtctggtcacttatccccgaatacaactgcgtcaaaaaatcttggcggcgcaagcgtggcatggaataacctgtacgttcagaatgctcctgttgttgtgtctgatcgtgaagcaaaaatgaagatttcttctattcctgatgatgtgcttgatgcctgggctactgttgaatattcgcaatggaaattaaaggctgctgtagcagagaagggagaggcgtctactcgtttccatattggaatcattgctcaggatattaaagaaaaatttgagcttgcaggtcttgatgcaactcaatacggtattctgatccatgaagaatgggatgctgccgaagcatccacggcttcttatgatgaggacgggaatttagtatcagaagaagttctggcaaaggatgctggagagatctggatggtacgaatggaagagtgtcttgcgcttgaggctgcgttaatgcgccgatcacaaaaagagctaaataaaaaaattgattcattatttgggggctcttaa

SEQ ID NO: 81093 - DNA, 972 bp, Citrobacter koseri
atgagcaaagtacgtgtagatcagctgtctccgactgatgattcattaactgttaatgtcaaagatttgcaactggtaaatgacctggtaacagaatctgcaaatctccctgatggaatgattaatatttcccaggcggtttcagaaaggattgcagcactgtcatcaaatacagtgcgattctgtacctggaatattcagggctattacatcgttgcaaacgaaaactccccggaggctggtgatacagtggataccagtcgctttcagctagatgttagttctgcacaacgtattcgagagcagattgagtggattcttcgtatcggtgctgattttattggcatgcaagaaatatatgttggggttgactctattgtatacgggaaaggcattaatagctgtgggagtatttgggaaatgtatccctatattagctcatatctaggcattgactcgtatttgcaagacagtctttacagtggaaaccctggcggaaacttgagcttaagtacaaggcccttagtgaacgcaacagaaacgctaatgccaggctctggtatcccaggccactctgcctataacaatgtttcccgtgttgaaattactgttaatggtgtaatcattgctgtctacaacactcatctaagcattgatttcccaacaatagatttgcagatcgctcagattgctgcgcttattgatgcggataccgcgacgcatattgttttaatgggggactggaataacaatgatgattctgtatatcaaccatttatagatcgcgggttcacaatggttaataagaatggcgaattgggtacatataacggtgggcacgcagaatgggggcagtggtatttagatcggatattccatcgtggattctctgcccaaggtaactatggtgttctcacaccccctcgcgagcttggggatcataagcctttgtttgttgacctgaccatctaa

SEQ ID NO: 81094 - DNA, 900 bp, Citrobacter koseri
atgacggtctcaaccgaagttgaccacaacgattacacagggaacggtgtcacgacatcattcccctatacgttccgaatttttcagaagtctgatttggtggtgcaggttgttgaccttgatgaaaacatcactgaactgattctggataccgattacaccgttaccggtgccggtggatatgctggtggtagcgttattctttccaatccgttgaaaaatggatatcagatttccatatcgcgtgagcttcccgtgacgcaggaaaccgacctgcgtaatcagggtaagttctttgctgaagtgcatgaagacgcttttgacaagttgacgatgctgattcaacaggcttttggctggctgcgtctttcgcttcgcaaaccatcatttgtggcaaagtattatgatgcactgaataactatattcgtaaccttcgcgacccggtcaggccacaggatgcggcaacaaaaaaatatgtcgactcgcaggacgctgactttgattcgcagatcaaacagtgggctgatgaccgattttataatgtggccggagataccctggccgggccaatgcaggtggcaaacaacacgatcaccggcttaccgttcccgccaacttctacgtcaccggtgcgcaagattgacctcgatgcagaggccgctgctcgccaggctggtgacgcgtcattgcaggcacagatcaatggcacaaacccaccagccggaagtgcattctctgttatcagttggcatgaccaggttgtgccaaacagtattgtcattccaccaaacaagaacgcctggagcttcggacccacaatcactattgctccggggcaaagtgtcactgtaggcgccggttcgttctggactatcgcgaatggccaggttaagccttaa

SEQ ID NO: 81095 - DNA, 147 bp, Citrobacter koseri
atgttccttttcatgttggttgttatagtgcttgtggcgttaggaataatgaaccgcaagggaattattgatgatggtgagttttccgtaacggttgtcgtgatcctatttggtgtggctggatatttaggcgtatcgcagtattag

SEQ ID NO: 81096 - DNA, 2475 bp, Citrobacter koseri
atgagacaggaatgtattcaggcggtacaacaggctgcgcagcgcacgcttacggcgcgggaaatacagaacatcgaagaccgcatttaccgcaatatgcgatctatagcccgtgacgatcctatgtcatggcgtcaacttaacgatgctgaacggctgcgccgggccgggcaactggcggctgaagaattgcagcgagaagcggcactgaaaaaacgacgtgtcgcgcttaccatcgccgctcgccagcgccttgacaacttcattaacagttatcagggagctgatggaaagctgggggcgctgaaccgtacgatcgcattcaatgcagacggtaaatcaaactttctgtctgttgagtctcgcacgaaagcgacccgtgattacgcgttaagccagttgcaggaagcattcgaagctgttgaccctcgtttctttggtctgtttgaagatgaagcaggcgtgcgcgatctggtattcgagatgcgcgggcaggataccggcaatgcgaaggccagaaaaggggcaaaagcctggggagaagtgacagaactgctgcgccgtcggttcaatgatgctggtggtgatatcggataccttgaaaactggggtatacctcagcaccactcgatggagaaagtaggtaaggtatcgcgggataaatgggtgagtgacgttatcgggaaacttgatcgcaaatattacacccgagccgacgaccagctaatgaacgatacagagttgtctgcattccttggcgaagcttacaacaccatcgccactggcggcctgaataagcttaccgacaccggtatgcgtatttccggtgcgcgggccaaccgtggcaacgcgtcacgccagatccactttaaagacgctgactcataccttcagtaccagcaactctatggcgaccgatcgctgtgggaaatcatggttggtcatctggaggggatcagcaaagatattgcgctggtggagacatacgggccaaacccggatcacgtgttccgctctctgcttgatcagacgaaatcagagacagccacggctaacccgcagaacacgggcaaaatagaacggcaggcgaacaacacagagaacctctataacttcatctcaggtaaaactcagccggtagccaacccgcatgtcgcccgctggtctgacaatatccgcaactggatggttgccagccgtctcggttctgcgttgctcgcatcgttctccgatcttggcaccatgtacctgtcggcgaaggttaccaatctcccgatgaaccagttattccgtaaccagctagaggcaatgaatccggcgaaccgcacggaactggcgcgggcccgtcgcgctggtctggcgatggaatcattacttggcagcgtaaaccgctgggcgatggacaatatggggccgtccgtctcccgctgggcagcgacggcagtaatgcgcgcaagcgggctgacagcgtggtcagatgcgcacaagcgcgcctacggcgtcaccatgatggggagtcttggcgaagttgtcaccagaacgccggatctgaaaagcctgtctaatgacgatttccgtatactaaaaagcaaaggaatcacagaaacggactggagcgtgtggaaactggcgcagcaggaagactggggtaaaggcaacgatacgatgctgacgccggaaagcatcatgcgtattcctgattctgctgtccagcacctcggcgcgccggagcgtgtgaagttcgaagcgacgcgtaaactgttgggggccgtgactgaagaagttgacatggcggtgattacgccgggtgcccgtgagcagatggttaccggttcaggcatccagcgcgggacatggaagggagaattaacccgtagtgtattcctgtttaagtcgtttccgatctccgttgtcatgcgtcactggtcgcgcgctatgggcatgccgtctgccggtggtcgtgcggcatacatcgcgacgtttatcgccagtacaaccatccttggcgcgctgtctcagcaactcaacgacatggcgtccggcaggaacccgcgtgatatgaccgggaaggatgccgcaaagttctggattggtgcattactgaaaggtgggggattgggactgtatggtgatttcctgctttccgatcacaccagatacggcagcggtgcgctggcgtctatgcttggacctgttgctggtcttgttgacgatgtggttaagattgcccaaggcattccgcttaatgccgttgaaggcaagagcgagcagactggcggtgatctggttaaacttgggaagggactgactcctggtgcgaacatctggtatctcaaggcagccatagatcacatgatcttcaaccagatgcaggagtatttttcgcctggctatttgcgtaagatggagcaacgttcgaagaaagagtttaaccagacatactggtggcggccacaggacgttacgcctcaatag

SEQ ID NO: 81097 - DNA, 1809 bp, Citrobacter koseri
atgagttatttcggccttaaccaggtaaaccagaaccagcagcttgacgaggcagcgtcaaaccctgctggctttaacagtgacgtcgggttcttcgataactcggttggcgcggcggcgtctgggctgtactccggcctggtggcgaaacctgaccagttgctgtgggccgggatggataaaatcgtatctccgatcgctcagttcgttaacgagaatacgcccatcaccatcaatgacacttcagcttcatacattgccgaacaacgcaaactcgcagagcagcaggttaagcggttgactcctgacgctgcgacaaccggcactgccgggcaggtgctttatggactgttcgatatgggcggccaggcggttgttggtacaatgctcggtggtccggtcggcggcgcagcggctgttacttctctacagggactctctgaatttgaacgactgacagcgcagggtgttgatttcagaacggcacaggaagctggtctggtgcagggcattactgctggcgccggaacactgatcccgatgagcctggggttgcgtgccggtggtgcgctggcggaaggtgtcggcgcacaactggcaagaaccggggaaagcgcagtgcgcagcgctgcggcgacagcagcacgcgctgcgcctgacattgcctatgcagccgggacgaacatcgcgtttggcatggcgcagcgcgggctgactgcaaagacgctgcgtgatggcggttataacgaaatggctaaccagtacgatgtttttgatcggcaggctatcgccattgatgctgtacttggcgtggcgttcggcggtgtgggtagattcatcaactcccgcggtgaagcagccagtgtcccggaattttcacctgctgatgtcgatgcggcactggcggcaaatgcagcccatcatgctgagattgatattgctcccggcgtgccggttaacgttctttcgcgtgacgcgcatattcaggcgctgcaaaaagcaatgtctgatgtcagccagggtagaccggttgatgtggccagtattgcagaaccggcttcattcactgaattacccgggcgcagaaacctgatttctcaggcgatcgatgaaacgctgtatcgtacagaggaaggtagcactcagattgcagttgacaccagagtgcttgagcagcaagcggcgcagactttagacgttgagcaggttaatcagttgcagacggatatcgctggcatcgagagagccattgaaactctcaaccaggaacgctctggaatgctgaacgaacaaccttcaggcagcgggcgtgagttgtctcgcgcacgcacagcgcgtcaggaaagactgcgtgatattgaccagcgtatcaatgatgagtctgtccggttgcagacggcaaaagataatctggcggccaatgttgatggcggcattaactttgaagcgcgggcggaattaaccagacgccagcaggcagaaagtgatctcaatgctcaggctgtttcattctacaaaacggcagaggtcagaacgcctgacgagtccgcaccttttgaaccaggggccgtgttgcgacaggcagaaaaaaggccaacggcagagcaggctggtgatatggatctgcgtatcgccgaggattcccttgctgagtcaccggacatggtgatcactattctcgatgatgacggaaacccgcagtcgcgcagcgcgcgggaagttctggacgaagcaagcagagagagcgaacaggcgatacaggattcaggtctgtttgatgtggctgtagcgtgtttcttgagaggataa

SEQ ID NO: 81098 - DNA, 2514 bp, Citrobacter koseri
atgccagttgtaccaactactaccggtcgtcaggttcagagcaggggcgtatccactcagggattttccacgtttcagacgccgaatgtcgctgaggttattggcaatgttgctgaacaatatgcaggtgtttatgcccaggcaaagcaacgcgccaatgttgcaatggcgcaggacgcatcactgagcttaagccagattagcagcgatcttctgaataaccctgatacaggattgcttaacctgaaagggaaaaatgcgatcggcaaagggcaggagtacacgcagcaatttgattcgcaggtcgaacaactggcgatgatgctgcctgatgaacaggctcgcaatgcgtttatgcaacaggctcagcagcagcgtattcagttcaccacgcaggccgggcggcatgaaatagggcagatcaacgcatatgaagaaggccagttccaggccacgctactgaacaacggaaagaatgccgctgcgatgtacggcgacaatgccgcgtatgtatcggctaaccagcaaacattccagcagatcgatgagtatggcgctgcgcatggatggagcgatgagcagattcaggccaagaaagtcgaatttaaagagaaggtggcagatgctgctctctcccagtggtcggcgaataatgcgacagcattcattcagagtaatggtgagttaagcgatacggttaccggttcgcgccgggctgtagcagatggcgcatccgctggtggtgtgcgtggtatccgtaacaataacccaggaaacctcgagtacagcaaaagtaatccgtgggttgggcagactggagacgatggtcgttttgctaaattcgaaacgccggagcacggtattcgcgctcttggccgtaaccttatgtcataccaacggcagggtattgataccgtcagcgagatcattaatcgatgggcgccgcctactgacaataatgacacaaccgcgtatatcaaagcagtatgcgaacagttaggtgtttcggctgatgaacctcttgattcatcaaaccctgatacccttaaggcgctttgcgctgcgatcattcatcatgagaacggtagtcagccgtacagtgatcagcagttaaccagcggcgtcagcgcggcgcttgggctgtcatcaattccaaccaataccaaacgctataccggcaatgcggcgttcgatgcggcatcaccagaagcgcaggccagcttcatgcgacaggcagatcagatgcgccgtcagcagcaggccgagtacaaaacgacgattgacagtcaggtgcgtgatgcaacagcggcatatatgcgtggtgttgagttcccaaatccgcctgatgaggctgctttcatggcggcttatggtgtccgtgagggtaaccttcggtacaccgaatttaaaaatacgcagatcgccggacagtacatcggttcgtttcgcaatatgcccaccagcagcatcaccgcatacgtcgatcagttacgccctgataccggtgaaaccggcgaaggctacgcgtcacgcgctgcgctttatgacaatgtggttaccgctgcaaatcaggtaatcaaacagcgccaggctgaccccgtgcagttctctttggctgccgggcagacgaagcctattgatatgtcgaaccagaataacttcggccagagtattgcgctgcgtgcggcgcaggccgcagatctggcaaaagcatacggcacgccgctgacgttcttttccaaagaagaagctaatcagattggtactttcttccgtgatgcgccggtttcccagcagtctgcgtatctggacactatccgtcagagtactggcggcggtcaggtgtatatgtcagcactccagcagatcagcgccaatgcgccatcggcagcggttgccggaattctgatggataaaccaggtggcgtggtggccgagaaaaactggttcaatcctgacgtgtcagtatcaccagaaacagcagcgcaaaccattctctcaggcgcagcagcgcgcaaaggctctgatgatgcgaaaggtataccgatgccgaaggataccgatctgcgcctcgagttctctgacatggtgaaggacgcatttgccggtgacgcgcagggtgcatcaatggcctatgagatagcaaaggactattacgccggggtaatggcgaagaagggcgtggtgtccggtgaaattgacagtgacacctggaaacaggctgttaacgtagctactggcggcgtgcacgattataacggaatgggcaatgtactgttgccgtggggcatgtcatcagagcaattcgataagcaggttgatcaggcatggaaagcacaggttactggcgcaggaattaaagcaccgccaggccagtacggtctgcaaagttatggtgacagccagtacctggtaaaactcggcaccggttatctgctgaaggatgacggtacgcctgtcgttatcgatctcacacagcagcgccagcgcttctcaggagatatcccgcaatga

SEQ ID NO: 81099 - DNA, 336 bp, Citrobacter koseri
atgaaaccagtaaatctcaaaatcggcactgatactttcgaaggcgaggatggtaagcccgaaacccgcgatcagtatccatggggattatgcatcaccctgaacaatgacacgctaacccgcctgggcgttgaaagtaactcattgccaggcgtcggtgacatggttgccatcatcggtattgctaaggtgcgcagcatttcatctcacacagatgacgaaaacgagcagagcaacagtgtcgatctgcaaataaccgatctcgcattggccccaccaaagcgtgatgaagcgaaagagttgaaggatgcattttatccggcagggggtgagtga

SEQ ID NO: 81100 - DNA, 282 bp, Citrobacter koseri
atgtctaaataccgcgtgaaagagcgctcatttatcaacggtaaactctacgaacctggcgacatcgtggagttttccggcagcgctggtaagaacctggtgccgtataaagacgatgacaaggtagaaaacgaggtgctgccgacgaacgaagaacttcaggatcttgaagaccttcgtaacgtttatgaagaaatgttcggtgaggccccgcataaaaacaccagcgccaaaactctcaaagagaagattgacgcgcggcgaaaagagttgggcgtttga

SEQ ID NO: 81101 - DNA, 393 bp, Citrobacter koseri
atgttgctcgatcagcaggctttattctccgcggctcaggccattacggccaccgcggcatccaccaacgtcattgataccggatccagcaaggatgtcggtaaatatggcgatatcccgctgctgattcaggttgttgaggcgttcaatacgctgaccagcctgacagtaacggttcagacagacgataactcctcattcagctcagccaccgatgtcatttctatggtgatcccgctggcatcgctgactgtgggttataaaacgccggtcatcactctgccgatgaagcttgaacgctacatccggctgaactacacggtaaccggtactgagccaaccactggcaaagtaaccgccggtatcgttggtggggtgcagaccaatgtctaa

SEQ ID NO: 81102 - DNA, 1008 bp, Citrobacter koseri
atggctttaattggtcaaactctgccatcgttgcttgacatctacaatcgtactgacaagaacgggcgaatcgcacgcatcgtggagcagttggcgaaaaccaacgatgtgctcaccgacgcgatctatgtaccgtgtaacgacggttctaaacacaaaaccaccatccgtgctggtatccctgagccggtatggcgccgttataaccagggtgttcagcccaccaaaacgcagaccgtaccggttactgataccaccggtatgctgtatgacctcggatttgtcgataaagacctggcagatcgctcaaacaatgcagaggcattccgtgtctctgaaaacatgggcaaactgcaaggtttcaataacaaagtgtcccgctataccttctacggtaacactgatgccgagcctgaagcattcatgggtcttgctccgcgtttcaacacgctcagcactagcaaagctgcgagcgcagaaaaagtgttcagcgctggtggctccggttcaactaacacatccatctggtttatgtcgtggggtgaaaataccgcgcacatgatttatccggaaggcatggtggctggtttccagcattcagatcttggcgatgatcttgtgtctgatggtaacaatggtcaataccgtgcttatcgggatgagttcaaatggcatctcggtctgagtgtccgagactggcgttcaatctcccgcatttgcaacatcgatgtcactactctgaccaaagatgcggccacaggtgcagacctgatcagcatgatgatcgatgcatactacgcgcgcgatgttgcgatgctgggtgacggtaaagaagtcatttactgcaacaaaacgattcacgcgtggctgcataaacaggctatgtcagctaaaaacgtcaacctgaccattgaagagtacgccggtaagaaaattgtttctttccttggtattccgatccgtcgcgctgacgctctgctcaacactgaatcagccgtaacggcgtaa

SEQ ID NO: 81103 - DNA, 726 bp, Citrobacter koseri
atgaatttatttgagcgtttgctgtatcgccgcctttgcaatgagcaatcaaccgagggtgggcaagcggatacagcttcaaccagcaccactgaaaccactcagggatcaggtgaaatgcaacagcaaacccaggagcaaacgcagacgcaggatgacgcgcagggtactgattctgataaaggttctgaatatcagaaaactgaggaagagattgccgcagagaaagcaaaaaccgaagaggcggaaaaggacaagaaacccgaaggtgctccggagaaatacgagtttcaggccgctgaaggcgtcgaactggacagcgaagcgctgaaggacttcgagccggtagcacgcgatctgaacctgactaatgagcaggcgcaaaagctggttgatgcttatccgaaaattctggccggtgtgcagcagcgccaggccgaagcctggcagcagactactgagcagtgggcggcagacgtgaaggccgacaaagagattggcggcgacaagttgacatccaaccttagcgccgcgcagcgcgctctggaccagttcggaacgcctgaactgaaagaatacctgaacaccaccgggctgggtaatcaccctgatctggtgaaggcgttcgtgaaaatcggtaaggccatgtctgaagacaaggttgtatccggtgggcatgacagcggcggcagtgatttagtttccgccttctatccaaaaaagtga

SEQ ID NO: 81104 - DNA, 594 bp, Citrobacter koseri
atggcagcggaaccaaagccacataaacgcaagtcaacgcaatataagcctcttacagcgatgcaggaggcttactgccagtcctacattaagtcacctgaaaaccagactcaggcggcgattgatgcgggattttcgccaaatacggcacatgtcaaagccagtgtgatgatgcgagatgaacgcatccagaaacgaatcgctgagctgatggaagagcgtaataagcgaaaccgcgtcagcgctgattacgtccttcttcgcctggtggaaatcgatcagatggatgtgctggatattctgaacgacgacggcagcctgaggcctatccgcgagtggccgaagatatggcgtaccatgctcagcgggttcgacctgtcgtctaccatcatgaacatgaacgaggattcgatagaaaccatcctcaaaaaaataaaatggcctgacaaggtgaagaacctcgaactgattggcaaacacgtcgatgtcaacgccttcaaagagcgactggaagtttccggcaccgtcaccattgccgacaagatagcaaaagcacgtcgccgcgttaaagaacaggctggcggtgaagaatga

SEQ ID NO: 81105 - DNA, 597 bp, Citrobacter koseri
atgagcaataaaattcaagtgctgaaagcgtaccacgtacagggtgatgagtacggggtaatccgatttgctaaaagtaacgtggtcgctcgccgtgaaggagcgaacgaactgggagaggaattcaactgcgtatcatgcacacgcatgccagaagctgataagtacgcagaacttgggcgtattcctgctcgcgatctggttgaagagtttggtttttggcaagagtgcgtctattgcagctgtcacgttgatgatgagacagagggtcgcgtgtgggaaggtgatactgcgtattgcgatattgagtgcgaggcgcgctggattaatcatcgccttgattgcgaagcagagcgcaagcgcacgtatgaggcagagcaagcagccattgcggaagcgaaagcaaggttccctggaattaccgatgtaacggcctacatcggccacaagaaagatatcaccgtttactttcgattccctggtggattagccaaggcctcatggactgttggcgacaatcatgcggggatcagtcgcgatgatggcgaggcgttcaaaacgtacatcgactcaattcgccaggaggccgcccaatga

SEQ ID NO: 81106 - DNA, 591 bp, Citrobacter koseri
atgaaaccgagttatgaagaactggaagagcaactgaacagatctcgacgtctctgtgatgctgcgctggctagtgagcgggtctgggaaacaaccatgatggaggcctgcggtgaagatggtccgaagtcagtagctgataagtttgcggaacttgaagcaagatgcgcagcgctgtcggcaaagttcagcatgattaacggcctcatggatgcagctgaacaggccaacaaacttgcgcaggaagcaacggaaaaactggtacaggagcgtgacgcgctggctgcggagaatgcggggctgattcgtagctctgaaattttgctacatgaagcgagcgaggtgtaccgatcttataacaaaacacaactgccggatggcaaccttgttgacgagcaatccttgcaagaggtgtatgacgccatcaacgcaactccggccaccgacgctttcctggctgaagtgcgggcgcagggtgtggagatgctaaacactcaattcaagaagtgtactggaatgctgtacgcagatagcgtcgtatctactgccgaacacttcgccgcccagcttcgcaatgggggcgcgcaatga

SEQ ID NO: 81107 - DNA, 669 bp, Citrobacter koseri
atggccggtgactggataaagatgcgtgcagatttgcacacacatccgaaagttgtccgcatggcgtccgcattgaaagcggacagattgcggatagttggcggactacattccgcatggtgtctttttgatgtccactctgttgacggttttcttgacggttacagcgcggaaactctcgacgacctgatcggcttcccgggattttcacgggcaatgatggccgtaggatggcttgaagaaaatggagaaagcctagtaatgccgcgctttgaagcccataacggacagtctgcaaagcgtcgtgcacaggatgctgacaggaagagaaatgtccgcaaaacgtccgcatcggaagcggacaaaaagcggaccagagaagagaagagaagagaagatattaaaccccatataaaccccactcataacgcgcgcgaagaaaaatctgtggataactttcctggagaacaattcgccatgtttgatggatggaatcctgatccagactttttagaaaaatcgaaggaatggggtacacctgttgaaagaggggtgagagaaactgaacttacatcgtttatcgacttctggatttgcgaagacgataaactgaaccagtttcaatggcagcagaagctggcaagacacatatgtaacatcaggaagtaa

SEQ ID NO: 81108 - DNA, 792 bp, Citrobacter koseri
atgtcacacctgacgatctgcgaggattcactcagtgccacttcttcgccggaattggcgtctggtctcattccctccgcctcgcaggatggcctgacgatcgtccggtctggaccggctcctgcccgtgccagcctttcagcgcggcaggcaaaggagatgggtttgctgatgagcggcacctatggcctcacttcttccatctcatcagcgagcgcagacctgagcatgtctttggcgaacaggttgcagctggtaacgcaaacgcatggttcgaccttgtacaagctgacatggaaggaatgggatacgccttcgggcttgtgccgtttacgtcagcgggcatcggtgctccgcacatcagagagcgaacttactgggtggccgagtccgctggcgagcaacatcaaaaactgttaccaggactggaaaaaggtaatggcgaggaaggaggctggtcgccagccaaacctacaggactttgcagttctggcggcatgggtaacgccaacgtcacgagactggaaggactcggcgggaatgacagcgcagcgggatgggaaggaacgactggaccaactgccgcgccaggcttacacatgcgggcccttgaggttaacggtttttggcgagatgcggactggctcttatgtcgagatggcaaatggcgtccagttgaaccctgcacattcccgctggttgatggggctgccgcgcgcctgggacgagtcgagtccgtggtggcaagcagcaaccgtgtcggtcgactcaaaggctacggcaacgccataa

SEQ ID NO: 81109 - DNA, 150 bp, Citrobacter koseri
atgcagtggaaaatcattaacggttggtactgcgttacagcttgcgggctgatgagctggaaattccgcacgctgggagaagcaatcagctgggcgtttaccagcaaagttgcagtgaaaacagaaatggatatgggggtgagcaagtga

SEQ ID NO: 81110 - DNA, 1302 bp, Citrobacter koseri
gtgagcgaattagcaattatcgaaattgcgccagatatggcgccaagcatttacgtagaaaacggtctggaaaagttcctcgaacagatccgcgaaagcgttaaggaagttcctgacctgagtactgccaaaggtcgtgcccgcattgcatctctggcagcacaggtttctcgcagcaaaacagcagttgaaaagccagggcgtgattaccttcgtcatctgaaagaagccgtcaaacctgctgaggctgaacttcgtcgatttgtatcagcttgcgatgagatgcgcgatgaggttcgtcgcccacttaccgaatgggaagccgaacaggagcgcatcaaggctgaagaagccatgaatgcgctgcacgccgaagcgctggagataaacatcaagttcgaccaggagcgggctgccaagttcgaagcagatcacgagatggccctgcttatgaatgacgcattcgaccgagaagagaaggcgaaagcagaagaagcagaacgccagcgcattgctcatgaagaagagttgaagcgccaggcagaagaaaaggccaggcgtgaagcagaagagaaaatcgagcgcgaacgcgctgagtctgcgcgtcgtgaggctgaattaaagttcaaagttgagcaggcagagcgtgaacgtattgccgcagagcaaaaagctgaagcagagaagaaggaagacgcagatcgtgccgagcgcgaaaagcaggaagctatcgcagctgagcaacgcaaggcgcaggaagaagccgatcgaatcaagcgtgaagcagaagcaaaagatgctgctcgcctggctgaagaaaagcgaatcgctgatgaagcggcagcacgcgctgctgatgtagagcaccgtcgggccattaatgctgctgcggtccaagcgctcattgaccaggtattcctgatgactgggcgaaggcatgtgttgtcgccatcgctcgcgggaaagtcccagcaacaaccatcaactactgaggtggctatgcacatccagcaaatcaataacctgaaaaaaatagtcgctcagtttgacagcgactaccagctgtcgtctgaactgtacgaccgccacgttgagctgatcgacgccaccagcggttcagggctggatgaatctttcgatcgttcgcttctccgggctggtgttcgccgtgaaattctggaggcggcaaaagaaagctgcgagtacgaagaaacaatgtcggcgttcaagcgcgagctaaccggcatcatcgccaggatggatatggcggacaaaatcgacagcgcgaggacggcggcatga

SEQ ID NO: 81111 - DNA, 270 bp, Citrobacter koseri
atgagcaaacaaacaggcggaccagctttcccggttgccgatggcgccgcacatcggatagcaatgcaggtggctggtgacgatgaagctaaatacattgccgaatcagcaaaagcactctcaggaatgacgttgcgcgattatttcgcagcgaaggcgatgcagggtatttgtactcactcagacacatggggcgaatccgttggtggcattgcgagaacagcttacacgctagccgatgaaatgctgaaagctcgggagaaaacatga

SEQ ID NO: 81112 - DNA, 252 bp, Citrobacter koseri
atgaaaggtgcattaggcaagaaggaactcctggcggtggtgccactgtcatggagcacgatagagcgactggaggcagctggtgagtttccgaaacgttggtatatcactgacaggcgttgtgcctggacacaggaggaagttgaacagtggcttgataaacgaaaagctgaaagcccggaggaatataatggaaaaaagccgccagtgcatttgagaaagtacaggccaataaatcagagcacagcgtag

SEQ ID NO: 81113 - DNA, 318 bp, Citrobacter koseri
atgtgtagaaatatagatttgaataataaaagagcacttgaaaagtgtcaccataattacgccactttaacagttattcaaaagtgtatagctattaccccagcggcgatggagatcgaaaagcgcgctatcgccagagagaaaaagggacacttccgtgtcgctgctcgcttgtggcttctgtgtatggatgcagcaaggggtgaagttgagcgcgcacgcatcgctgtacgccgtgatcagtgcattacgaaaagcaacggtctgcgttgcggtgattacagcggaatactcagtcgtggggtgatctatgactaa

SEQ ID NO: 81114 - DNA, 552 bp, Citrobacter koseri
atgattggttacacaggaagtaaaactccagcggatcagcgtgatctgtggtgtaccccaccggctcttttcgccgcactggatgccgaattttgcttccaacttgatgccgccgctgcgtcgcataactcgctgtgccgcaagttcattaccgccgagcagaacacgctggaaacgccctgggctgattacctgaatgtgcctggctacgtctggctaaacccgccttacagcgacatcacaccattcgtgaagaaggcagcagcagagagcaccaatcagatcggcacggtcatgctggtaccggctgacacttccgtcggctggttcaaggaggctatccagaccgcaagtgaggttcgcttcatcaccgccgggcggctggcattcatcaacccgctcaccagtaagccggtaagcggcaacaacaaagggtcgatgctcattatctggagaccgtacccgcgtacgcactgccatttcgcaactgtggaccgggatgagttgatggatttcggggctaaacttcttgctcgacgtgaggcagcatga

SEQ ID NO: 81115 - DNA, 171 bp, Citrobacter koseri
atgttcaacgaggcggagttaatccgccaactggaagagcagcgcgctgtgattgtacagcgcgacgatgagattaaccggttgcgcggtgatgttgaaatgctaacggcaacattaaaaaaaataccgccgacaccggcaggaagtgattaccttggaaaaaagaaataa

SEQ ID NO: 81116 - DNA, 825 bp, Citrobacter koseri
atggcaaataattcagaatcttttgcaactatagaacaaattacatcccgccctaatttttcatctaatttagaaattactgttgaaaactttcactcgcttataggacgctatcatctgagtgagagtgtaaaatgccaagtaaaaaccgagcatggtatctgtggtcaaaaacatcagcgtggatacgtcggcgttgatgacgctggtcatgaaggcctaatcggtggtatttgtggtgataagtactttagtgagcatactcactatattcaggaaagaaaacgtattgatgctgaaattgatagacgtgaaaacattgaaaaactgaatgcttataaggataattttttatttgtatctaatacacatggaaaattgttaaaacaaactcaacatataaaaaacaaaataggccatttacataaaggttttcccgacatagtactaacttatctttaccaagctcaacgaactcaaaattgggatttatatattgacgtcttgcgtcatactcggggtgagaaggggatgacaagcaattggtacattgaaaaactctgtacctttccaccgttaccaacacagcaagaaatttcaagtttaataggacgtattgaagatctacaatcgattttcagcgaggcatgttcaacaaaaattgatgaactcggcacgcctaaattaaaacattatgtgaaaagcatctcagaattttcagaattagagaacgcttctaacaagcatcacaaaaacacagaagacttcctacaaaaagacattatatactgtctcttatacacatctccgagcccacgagactaa

SEQ ID NO: 81117 - DNA, 831 bp, Citrobacter koseri
atggactatcaggtaatcgcccttgatctggacggcactttattgacgccagaaaaaactatcttaccagcctcattaactgccctaaagaatgcccgtaaatcaggggcaaaggttgtcatagttaccggacggcactttgtagccatccatcctttttatcaggcattaacccttaatacaccagctatctgttgtaacggtgctttattgtacgattacagcaataaaacagtactaaccgctgatccactgttgccagaacaatctagacagttagttgatctgttggatagttacaatgttcatagcttaatgtatgccgatgatgccatgtactaccaagtaccaaccggacatatcacccgtacagaaaattgggctaaatccctacctgaagcacaacgcccaacttttaccaaagtaccctcactacgtagggctgtagaagatgttaattctatctggaagtttgccctgactgataccgatacactgaaattacaggcattcacaaaggtagtggaaagagaactagccctaacttgtgaatggtcttggcacgaccaagtagacatagcacaagccggaaacagtaagggtaaacgattggcacaatgggtagaatcgcaaggtttatctatgagccaggttatagcctttggtgataatttcaacgatctaagtatgttggagactgctggcttgagtgttgctatgggtaacgctgttgatgaagtaaaagcgtgtgctgatttagtaataggtaacaacacggagactggaattgctgatgtagtagaccagtactttgtcagtgtacccgcataa

SEQ ID NO: 81118 - DNA, 222 bp, Citrobacter koseri
atgaccgctcgtgtgattgccctggatttagacggcaccttactgacgccgaaaaaaacattgctcccctcctcgcttgaggcgctctctcgcgccagagaggcaggctaccaacttatcatcgtcactggccgtcatcacgttgcgattcatcctttttatcaggcactggcgctggatacacctgcaatttgctgtaacggcacttacttgagtgtgtga

SEQ ID NO: 81119 - DNA, 255 bp, Citrobacter koseri
atgaataaccaacaaacaatgctctatcaaggtatgcaaattccccggcctgtcctgaccgtggatctgcatgtcatgcctgatttcaccggacgggtcgttctctatatcgaaaacggaaaagtgaagtgtgatcgtcagctttttgacgatgagcatatttgctcactggcgacgtttattgaaatggcgcgcgatgtggagctgagaatcaaggaggtttcagttggcactaacagcaatccggattcctga

SEQ ID NO: 81120 - DNA, 414 bp, Citrobacter koseri
atgcttcagcacatttattgttttggtgtgaggcagaggaaaaacgtcgtgaatagtttaataaatatatatcgccgccgaattctcaaggcagctttattacgccaccagcgtaaaactggcagcacctgccttgtaattacccagccaaaaggaggaattaccacaatcgaattaacagagattcttctggatggattattacgaaaatttgaaaggctcgcgatcagtgagtacggaaatgttgaaggcgtaaaagctattaagggaatttacagcagttctgttgatgtgaatggcagcggtgaatttctcacagaaagcgggaaggtgttaatcgacgatctcatttctgagctggtcgaattcgtcaaaaaacaaaaatcagttaccacggaggtcagccatgaataa

SEQ ID NO: 81121 - DNA, 192 bp, Citrobacter koseri
atgtggaacccaaaaacggctggaatagatgaaatccttttagaggcagagaaccttaacacccttctggaaatagttacaagcaataatgggatcagcgcaaaacaaaaggattctttgctaggcatggctcttaatgcttcagcacatttattgttttggtgtgaggcagaggaaaaacgtcgtgaatag

SEQ ID NO: 81122 - DNA, 297 bp, Citrobacter koseri
atgacatgccagatgggcggtgattccatgcaaccaaccatccagccatgtgaactgattgctttcgctgactgtgcggggaagatatttaccccgggaatttatgtgtttacccgcgatgtgtttggtcgtagatgcgtcttcattaagcgtgttgagccgatggctgatggagctttaagaatcatatctgacaatcaccgctacgaaacttttacgcttgatatagatgaacaaagcgatatgcaggttcatggccgcgttattgcatcaatgactatgaggcgctttgtatga

SEQ ID NO: 81123 - DNA, 294 bp, Citrobacter koseri
atgaacaactccccccaacccaaaaaagccaagaatgattttgatattcacgcaaagcttaagtcatccaatacgcattggtcttatctgcatgcagcacaacctaatcagaatggcattaattacgagttttgcaccacatttattgacgatattgagttcgctatttacgagcgtatcggtaattattttgttctggttgatttcttcaagtcatacgatgaagcctgttgtgacgcaaaaaaaatcattaataatcatcctgatattaaaagaatgttcaccgccagttaa

SEQ ID NO: 81124 - DNA, 624 bp, Citrobacter koseri
atgtctgaagtagggattacgcaagcccaactgtcagaggagttaggtgttacccaaggtgctttgagccactggcttaatggcaggagatcggcttcgctaactgaaataggttcgatttttcgaatacttggcattgcaggggcgaccctcaacatagacggctcctttacgatcgggtcaaaccagttttccgcgccaccaaaaccccactttgaataccctgtgttctctcatgttcaggctggtatgttttcgcccgagttccgtactttcacggaacgtgacgcggaaggatgggtaagcacaacgaagaaagctagtgatgcctcattctggcttgaagtggacgggcattccatgactgcaccaacaggttcgcgcccaagctttcctgaaggaatgttgatactggttgacccagaggaacctgttgacccgggggacttctgcatcgctcgccttggtggcgacgaattcacttttaagaagttgatcaaggatagcggacaggtcttccttcagccgcttaaccctcaatttccgatgattccttgcaacgaacattgcaggatagtaggtaaggttgtcgcatcacaatggcctgaagaaactttcggctaa

SEQ ID NO: 81125 - DNA, 219 bp, Citrobacter koseri
atgagtaatctaaaaaagatacgtgttgccaatgggttaacacaatgcgccttggcaaagagcataggtcacacacaaagctccatttgccactatgaatctggccgaagaattcctgacattgaaacatgccatctaatcgcttccgccctgagtacgtctgagcgaaaggtgctcatcgaagaaattttcccccatccatcttctgatgaggtgtga

SEQ ID NO: 81126 - DNA, 609 bp, Citrobacter koseri
atgaatgccaccattaaaacgttcgactttaagtctgatgctggtgatctgctggcttcggttcgtactgtgcagattgatctctctccgtggtttttcgctgttgatgtgtgtgaggcgttgggcctgagcgataccaacaaagcgcttttgtcggtagacgaagaggataaatgtgaacacgaacagtattcgggttcgggtcgtaaaccaatgttggttaatgaatccgggctttacacgctcattcttaaaagtcgcaaaaaacaggctaaacacttcaagcgctgggtcacttccgatgtgctgccatctaaggggaaactggaagcccgctgtcgctgcggtggcaaaggggaggtgctcgatcgcaaggctacgaaagagcatggggcgccggtgttcaaaatctgtgagcgttgtggtggtgaagggtattcgagagtgtcttcggcgaccgtccaccgcgctatcctcaaacgtctaccggacctccatcagtcgtcgtggtcccgcaactggaagcaattctatgaaatgctggtggatatgttgcacaagggggagagacacgctgcgttagagtttgagaaggcgaccagttattga

SEQ ID NO: 81127 - DNA, 1047 bp, Citrobacter koseri
atgcatcgaattgatacagccacggctcaggttgataaatttgggccggggaaaaatggttttacgaacggagacccggcaaccggccgccgcgcgacggatcttaacagtgacatgtgggatgccgtacaggaagagatttgcagtgtcgtggaaggtgctggtgagacccttgaaaaagggaaacatacccagttatttgaggcgatacagttgctggtagggagtggtgtgggtaatgccttgttaaaagcgcaaaaccttgcagatctccaggataaagcaaaggcaagaagtaatctggcattaggggaactggcgacgcttgggttaaatgatgtttaccccgttggcgcgccaattccgtggccgtctgattcaaatccatctggattatatgctcttatgcaggggcagacgtttgataaaacgaagtatcccaaattagcgcttgcctatccctcggggataattcctgatatgcgtgggcaaaccatcaagggtaaacctgccagcggtcgtgccgtgttgtccttcgagcaggacggcattaagtcgcacaaccactcagcttccgcagcaaacactgaccttgggacaaaggcgacaacatcattcgattacggtacaaaacaaacagtatcattcgattatggtactaaatcgacagtatcattcgatcacggtactaaaacgaccaataacactggagcgcatagccataccactatttcagcgccaccgagcgggaatacatggggaacaggggcaacgcccggtaatgttcaaatggcgggcgatcattggaactacaactcacaaggtatgaacacatcctcaaatggtgcgcatgctcataccgtcggtataggagcccatgcccataacgttggcattggtgctcatgcccataatgtggttttaggggcacatacgcataatatggtgttgggggctcataatcacactattactgttgctgcggcaggtaatgtagaaaacaccgtaaaaaacattgcgcttaactatatcgtgagacttgcatga

SEQ ID NO: 81128 - DNA, 612 bp, Citrobacter koseri
atgattaaattaattctttctgcccctgttcctgaaatcgcggaggcatttgagcgtcttttttctgatgatgaaaatgtagaaattatcagtaagccgtttgaaacaattccagattttgattgcatggtcagcgcggctaactcttttggcttgatggatggtggtgtcgatgccgccattaccgcgttttttggcacgcaactgatgaccagagttcagcagcgcatcgttaatgaatatttgggagagcagcctgttggctcggcttttgtcattgagagcggagattctaaacacccttggctggtacatgctccgacgatgcgtgttcctttgattatcagtggcactgacgctgtttaccttgctacgcgggcagcactgcttgctgtatatcaccacaacaagacacatcctgaacacagtaaaattcggcgcgttgtgttccctgctatgggggcgggatgcgggcaagtatcagctggcagcgtagcagcacaaatgaaactggcgtggcgcagtattgtaactccgccctccagcattaactggcagtatgctctaggaaggcagcatgttgttcactcatcctgcgatggagttttataa

SEQ ID NO: 81129 - DNA, 579 bp, Citrobacter koseri
atgacttttgaaatgacagactcagaccgaattattacgatttataatctttccgctgacagtggtgaatttatcgggaaaggtgatggttttattcctgcgcatacaggtttacccgcatggagcacagatattgcccctcccgatactcctgctggtcatgttgctgtttttaataataacgatcagaaatggtctgtggttgaagatcatcgtggtaaaactgtctatgacatccagactggacaggctatttctatcgaatcactgggatcattgcctgataacgtagtttcagttgcaccggatggctcatatgaaaaatgggatggcaaaaaatgggtgaaggatgaagaagcggaaaaagccgccaacatcaccgacgctcaaaacactaaagccagcctgatgcaggaggcaaataacacaattgctatgcttcaggatgctgtcgatctcgatatggcgaccgatgacgatgtgaagttgctgaccgcctggaaaaaataccgtgtgctacttagtcgggtaaaaccggaagatgcgccggacattaactggccggaacaaccagcctaa

SEQ ID NO: 81130 - DNA, 1005 bp, Citrobacter koseri
atgaaacgtgcgtctctcattgcagttacacttttcggcgcttacagcgcattgcaggcggcctgggcagtggattaccccttgccgccagcaaacagtcgccttgtcgggcagaatcaaacctataccgtgcaagcgggggataaaaacttacaggcgattgcccggcgttttgatactgccgcaatgctgatcctggaggcaaataataccatcgcgccggtccctaaaccggggacgccgattatcattccatctcaactgttattacccgatgcgccgcgtgaaggcattattgtgaacctggcggagttacgactctattatttcccgccgggtgaaaatagtgttcaggtttaccctatcggtattggtttagaggggctggaaacgccggtaatggcgacgcgcgtcgggcaaaaaatcccgaatccgacctggacgccgacggcaggtatccgcaaacgctcgcttgaacgcggcattacgctgccgccggtggtgcccgccgggccaaataacccgttaggacgcttcgccctgcgcctggcatacggcaacggtgagtatctcattcacggcaccaatgccccggacagcgtcgggttacgcgtcagttccggctgtattcggatgaatgcgccggacattaaggcgctgtttgcgcaggtcagaacgggaacgccggtacgggtgattaacgaaccggtgaaattcgccgtggaaccaaatggaatgcgttacgttgaagtacatcgcccgctgtcgcctgaagaggagcaaaacgtacagacgatgccgtatgtgttgccagcaggctttacgcagtttaaggcgactcaggaggtggatgaacgcctggtggaaaacgcgctgtatcgccgggcgggatatccggttgccgttacatcagggctggcgccgatagcttctggtcgctctgtggtggagtccgcgcaaaacagccaacccgaaagcggcgttgaaacccgggcaacgcagtag

SEQ ID NO: 81131 - DNA, 330 bp, Citrobacter koseri
atgaatactctacctgcaacaactttgcgggcggctaaaccacgcccgtcacctgttattgcctggcaaatactactttcgcgcctgttggagcagcactatggcctgacactgaatgacacaccattcagtgatgaaacggttattaaggaacatatcgatgccggtatcaccatggccgatgcagtcaactttctggtggataagtacgaactggtccgtatcgatcgcaaagggtttaactgtcaggagcaatcaccttaccttcggactgtagatattctgcgagtaagcagatctgcaggcttgctaaaaactaacgtgaaatga

SEQ ID NO: 81132 - DNA, 321 bp, Citrobacter koseri
atgaggagtaacgctacatggggactgcaaagggatattacgccgcgtctgggagcccgtctggtgcaggagggcaaccggctacactatctggctgaccgggcaagtatcaccggtaagtttagtgacgtcgaatgcctgaagttggatgtcacatttccgcattttataagccaaatggagtcgatgctgaccactggtgaaatgaatccccgacatgcccacagtattactgtgtaccacgacggtttcacctgtgaggccgatacccttggtagttgcggctacgtatacatcgccgtttatcccactcaacgctaa

SEQ ID NO: 81133 - DNA, 219 bp, Citrobacter koseri
atgtccttcaccagcatcaggttcaaagtaccacacccgccagaccattcgaccttcagagtcacgaaccaccaggcggaagtggctaccctggtcgtcttcaatgctgatgttgtgataccggcgggtaaccgcttaagcctgctgtcgggtgaaaggtcccggtggcagcatgtgagattcagacattcgatgtaccttaaaagcaaaagcccctga

SEQ ID NO: 81134 - DNA, 1173 bp, Citrobacter koseri
atgggaaaatttacaagcttgaatgattatgctggtccgtatttcatactgcgtcatgacagtctccgtcccggagatattattctggagcgggggtatgaaatgcactcagatataatctgccagcagaccggcagccactactctcatgcaatgatatatgttggcgggacgattattgaagccacaagggacggaggcgtattcagtcgtattccaaaccgatcggcggtaagggccatatctgatttcaaagtccttaggctggccaaagatccgggacaagaattaacaacaattgcgtgcaatcaggcccgttaccttgtgggcagccagtattcagttgctgaagccattttagtgaaaggccctgaatttacgaggcaattccgtgaaaacagcagaaaacagttttgttcacgcttagtggcgcaatgctttaaaaaagcaggcataaatcttgtcagtgatgcaaacttctgctcgccggctgatcttgaacggtgcgggcttctggtgacagtccctgatatggtccgtcgtgcttccgaacaagaggccgcattcgcgcttgaggtttcgccgcacgccagtcatgctaaaaacacggttcgttttgtggaagcggcactcggtattttaaaaaatcacggtatcaaaaccgtgggggactcagacggagaagtgactgtcacgacgttaaacgacattactcaggccgtattcgaaaacagaacttctcccgggcttgacggggaaatgacggaggccatgcaagcatcgggctacctggaccatattgaaatggacaggcaacagaatccctttcgctacgattttgacctgttcagtgcccggattggccaggatgctgacgataatgaaatttctgagaggctttggggggagatcaacaaagaagctcaggttcttattccccgcctgcagtcatacataaatggcaaacataatcttgtatgggatctggagtattttaaagtcgaattttctatatacgaaggcctattgcaggcgctgtatgaccgtaccgtgatcatagaacagtactcagtcttaaaaaaagatattccgtttttcagtgaaatttatgagctaagtaatgctattttaaaagaaataagggagcatgcaccggagattgctatttcctga

SEQ ID NO: 81135 - DNA, 3840 bp, Citrobacter koseri
atgagagtgttgagttgggcaatagacctgtgcgggaaaatggaagcgtggctggttaagctccaggcaaaagatcagctacagagcgcagagcaggggttgagtctgatggaagaagaattaggtgatcgctatgacaccttagcgccgaaaaccatcaatgatgccagtatgcgagagtatttcattgccctgaaatacgccttgtctcagaaagacgtaagaaacattgccattacagggagctatggcgcagggaaaagtacagttatttcatcatttatgaaatatcattgcggtgataaatacatcaatgtatctcttgcgggattcgatatgacggaaaatgaagcaaccgtcagcccaactcaccaagaggttgaactcagtatcctgcaacaaattctttataaagagaatagagagaaacttcccgattcaaggatagacagaataatcgacaggggccctcactatgtcagaggaacttatcgggccttacttaaagccattgcacccattgcggtagccgcatttattatctatttcaaaacaatttcagagtttctaagccttccgccatcctggatcgaggtattaaatgcacactacatcataaaaggcattatattagttttgctggcttttaccgcgctgtactttataactgccagcgcatctagaatcggtatttttgataagaaacttaagctgagcaagatcgcccttttaagcggagatgtagaggcaagcgaccaagagacgccatccttactgaataactgccttgacgagatcgtgtattttttcaccaagctggaatataaggtggttatctttgaagatcttgacaggctaggaacgcctgagattttcgttaagctgcgtgaaattaacaaaatagttaataacaatattgttgatggtaatccggttaggtttgtttatgcggtaagagacgacttatttctaggtgctgatgctagaactaaattctttgatttcattcttcccgtcattccatttatggacagcagaaacgcgtttacgttattaaagagaaaaatgtcgctcgacacgcataacgatagctatctgagagacatttcgtcatatataaatgacatgcgcagcctgcagaatttagtcaatgagtaccatgtgttcagcaaaatcgttgataacggcaaagataagatcaaactgttatcgctagtgttttataaaaacatctacgccttagactatttccttaccgataagaaaacaggggttttatattcatttattcgcgactatcgaacccgcaaacttcatcgcaatcatttcgactctctggaaaaaaaactagaacttttacagactgaaatagaacatcttaatcatgaacctatgtatgaccacaagggaatcagagaggatatagtgtgccgatatattcccaaaatgctctgggatggcgtttattttggtacgggaaatggatacaatgatttttatcatcagcccaccttggttttaattgatgatgagaatagttttttagaatttttatcgcgaaaggaaaatttatatataggttacttctttaattatcaaataaaatcactctcactttttgatagagcattaagagaacaattaaaagaagaatacctgaaacgaaaaaccaaaatgggtaaagataaaaactcggcttttagtgaactgcaaataaaaataaaggaacttaaagagtcaataaaattaaaaaatgccctttcgctgcaagaacttacgctaatcatcgggcgtgaaaaatttgcagagattgcgcaggagtatcttgaggcgatggagggtcatgacttcgtctctgaaccgcagcttcatgccttgtgtgccgagatgcgcaatggcggcttagacgctttgtatctgctgctgtccgatggcctggtgatgcaagacttcatggcctaccgctctattttccatgaaggatcgatgaccgtaaatgataacgactttctgaaagccgtcggtcaggatcttagctgcacaacctcaaacggtgaatattttatcgatgacgagaacagagtcatcagtgaactggttgaacataaccgtatttatgccgatggcgcgcttcatcatcaactggtggctcatctgattgataacgaagatgaacatctggtgggcatgttcgcttcgctattcagcaagtccgatgaacacatccttactgtttttactgaactttatagccgatttggcaaacccgagaccttcgataagttaatcgttactgcactgcaaaaaaatgattatcttgacagaatggttgccgttctcgcgggacagccgggtgaaaaattcaccaacgatattactatcagcgtgatagcctgcgtatcgcctgaacatgcgctagataaaccgcaataccgccagcttattcattcgctgggctgtcgcatcatctctcagctcaccgaggagaatcaggaagcgttcatgcgtcatgtacaacaggcggatgcatgctatgacgagctgttcgaaccaataacgccaacggagcggtattgtctgcagtttattgcgcaaaacagtctttatcagttaacccgacacaatgttagcattgccatttcgtgtcttattgacaacataacgcctgaagaggcagtaaggaaaccctggacgctcgcctatgagcataaactcagtgaggtttctgactacttcagtcaaaatatcgatatattcgtcagggatgtgtttatctactccgctgaggatgccgactgtacccgctacgttctgacccgcacctctctaagtgacgattccaaaggcgatatcgtcagaaacatgaccttctcgtttgccgacctgtccgggatatcagctaaagcagagtttaccgaagaccagctaacgatttcctatcacgacctgttttaccgatatgaccgcgtcgcaccgggatggggggcgctgatagactatatctgcgaagattgcgacatggggatactgacggattatgtgacaaagcatgcgcctgtattggggcaatcatccccggaagtttatgatggcgaccgctatgacctgctgtatatgaaaattatctgcaacgatgacctggaagaacaggtttatcagaacctagttgcacagattgagattaacatgcgggaaattgatgagcagcttagcgcgcgtcatttctgcaccctggtagccatgcagaagctgcctctcgacgcggatgtgtatgaaaaaattgcggctcaatatgcggttcaagatgaaaatatcagtgatgccttcgtctattggttcagccagtacaaaagtgagtttttgacgcagcccgagttctatctaagaaaagaaaaagacgcgcgcttctttaacgtcatgctcacaaaagtcataacctacgcgcactttaccgtgcaagagagagcggatctggtgtcgctattcattgattatttcattgcgtctgatatcgctgaccttaattaccctcatgatgtcctgctgcaggtttttaacagtaccagtaatgaagaattcaaggtcatgctgtttacacgatttattgtgacaggcctgaataaacatcaactggccgggctatgtcatcaattgggcgaagatgaattgaggaatgtattcatcaatcgaacccaggcaacaattgctgttgcaaacagggaacgcgtgatatcaattcttgaacatctgcaagcagtacgcatcgtcagaggttttcaggagcgtaagggtgggaaaatctccgtctttatcgaacccgatctggaggatgaatattag

SEQ ID NO: 81136 - DNA, 672 bp, Citrobacter koseri
atgggacgttcggccgattacaccatccaagggtttctgtatcagttcaatatgacgctttctgaactgcttaaagcggcagacgaggcggaaattacaattgaaggaattgtggaagatattgaggtggctacattttcaggtactaaagccatacaatgtaaataccatgaggcgcagtctaagtattccataagcatactttatgatcctttgcttcagatgatgaaacactttaagtcaaatccaactgcaaaaataaaatatcatctcttcgcgcacttcccaaacaaccccactgtgactataaccaatgttgagcttaaaagtgctctgaattcaagtaatcaaaacttaaaaacacttatagctgatgcaaaaggtgttgatattaaaaagtttcttgacgtattctccatcacgattacaccaaagtatgacgatttgatggaagagaacacaaaactccttgttggtctgggattcagtgagagcgaggtcgaaacgttattttatccgaatgctattcagataattggtgacagaagcatcaaacatgacgaaaagtctaggaaaatcactagaaagttgtttcttgaagaattgcgtcgtattagatctacagctgtttcacaatggacacttgcattaaaaacgggctttgttgaataa

SEQ ID NO: 81137 - DNA, 360 bp, Citrobacter koseri
atgaccttcggctgtgttgccggtccggcaaacaattcattctgcggatatatagacttttcattgcgccccggaactccggaacggcttaaggagggcctggtgatgcttgacgaacagttttatgaatatctcactcaggccatgccggagggggaaatccgcactcagggtatgaaatatgctcaaagcattctgcgctggaacctttctccattagaaattcgtggtgaatcttactcaaaagtgaacctgacgtttgacgcgctggaagagaacggtgccgcatgggccatcgaacatgtttgttactttctgacaaaagtatacccatctttaactcctgtgaagacagcatga

SEQ ID NO: 81138 - DNA, 171 bp, Citrobacter koseri
atgtctggactgatcaaccctaacgaatcacctgaagaatccgcttatgcattactgattgagttgataagggcacaaagggttcctgtttatgcggccggaaatatatccggtttactggatatttatgatcaagcagtacagcacttcaaaaaagaagagaataactaa

SEQ ID NO: 81139 - DNA, 630 bp, Citrobacter koseri
atgaatcaacaacaatttcaacaggcggctggtataagcgtcggactggccgcgcgctggtttcagcatatcgacgcggcaatgaatgaattcggcatcactgcgccgctcgatcaggcgatgttcatcgcgcagatggggcatgagtccggcgggtatgaaaagctggtggaaagcctgaactacgcagccgatcgtcttgttcccgtgttcggcaagcaccgtatcacggcacagcaggccgccgcgctcggcagaacggcaacgcaaccagcaaatcagaaagcgattgctaacctggtttacggcggtgagtggggcaaaaagaacctgggcaatcaggttaccggtgacgggtggaaatatcgcgggcgcgggctgaagcaaatcacagggttaagcaactatcgcaaatgcggcatggcgctaaaactggatctggtcacgcagccggaattgctggaacaggacgaaaatgcagcgcgttccgcagcatggttctttgccaccagcggatgccttgtgtattccggcgatgtggaacgcgtcacccagatcatcaacggtgggcagaacggcattaaagaccgccgtgaacgttacgccaaagcgaaagccgcactggtgtga

SEQ ID NO: 81140 - DNA, 387 bp, Citrobacter koseri
atgtccgatccgatttccggtactgggctggctggtggtgtcctgactggggccagcgtctatggatttctgtccggaaccgattacggcgtggtgtttggcgcatttgccggagctgtgttttacattgcaaccgccgcggacctgagtgcagcgcgccggctggcatattttctggtgtcgtatatcgcggggatcctttgttccgggctggtgggttcaaagctggctcaggctaccggctacagtgataaaccactggatgccattggcgccgtaatcgtttctgctttagccgtcaaaatcctgacgttcctgaataatcaggatgtcggctcgctggtggcgctgataacgcgccggggaggttcaggtggtacaaaatga

SEQ ID NO: 81141 - DNA, 1053 bp, Citrobacter koseri
atgaaaaatactgtaaaaataaacagtgttgagttagtcaacgctgacagcctgcattatgtcgccactcttcctgataactccattgatcttatagttacggatccgccgtacttcaaagtgaagcccaacggatgggacaaccaatggaaaggggatgaggactacttacgctggcttgatagctgcctggctgagtatgctcgcgttcttaaacctgctggcagcatctacctgttttgcggtcaccgactggcctcagacatagagattatgatgcgtgcccggtttaacgttttgaatcacattatttgggcaaaaccatcgggccgctggaatggttgtaacaaagaaagcctgcgcgcgtactttccatctacggaacggattttgtttgctgagcactatttggggccgtacacaggtaaagaggatgtttacgaaaggaaaagtacagagctaaagcagcacattatgacgccactgattgactacttccgtaatgcccgtgaatcactgggtgtcagctcgaaagaaatagctgaggcaaccggaaagaaaaacatggtgtcacactggtttggcgcgagccaatggcaacttccgaatgaagtggactatagaaaattgcaggaactgttcacgcggatcgctatcgataagcacattcagcagaagcttgaacatcctcaccacctgctggtggctacctaccagtcattaaaccgcaagtattcagaattgctggaggaatacaaaacccttcggcgctgcttctctgtttccgctcttgttccgtataccgacgtatggacgcataagcctgttcagttttatccaggcaaacatccatgcgaaaaacctgccgacatgctgaagcagatcattagcgccagcagcagaccgggggatatcgttgccgatttctttatgggctctggttcaaccgtgaaagctgcaatagaacttggccgtcgggcgatcggcgtagaactggaagcagacaggtttattcagaccaccgaagaggtggaaaagctgaacaaaacataa

SEQ ID NO: 81142 - DNA, 123 bp, Citrobacter koseri
atggggctttctgctgtggaaatgggcggctggtgggtgttagcgcacccggccagccatcagctcatgctttcaggtcacaagctaaccaaggcccactgctttagcgcaaaagcaacgtga

SEQ ID NO: 81143 - DNA, 192 bp, Citrobacter koseri
atgctaaatcaggaagatatgacagaaacggcaaaggctgttttcaatgaattaagcgataaaccagcaacggctggcgagattgcacagaatacccacctcagccgtgaacgttgccagctcatacttacacagttggtgatggcggggttatctgattaccagttcggatgttataaacgcctccagtaa

SEQ ID NO: 81144 - DNA, 690 bp, Citrobacter koseri
atgaatcaacaagacctgaattttgtaagaatagaattgcgccgcgcgctacctgacctctctgggggcacgaaagggcagcttgaggctttcagtgaacacccaccagcagacaaaaatgccaccccgcgccgtggcattcatctcgtcgaactcgagggagagaaggggcctcgctttgttaactcgctggccgcgccactgtatgtgctggaaacgcgcagccgccgcaggccaatgccgccgataaaagatgcggaatttgagtccgcgccgtggcgccgggcagtttccgcgcttagtggataccagcaggcctggctgcggtactgctacggctttgacctgagctataaacaccaggtgatgatgtgtgaatacgtctggaagacttatcagaaatgcctgggtgaaacctcgcttcaggagcgcgtagtaaagaaactgataggcctggtatggcttgcagggcaggaaattgctgcaacccgaaacaatgaaacctataaagactacgctggcgcggcgctggcccgtatggttagcgttgaccgttcgacgtggttgcgcgtctattcagggcactgggctgggttaaaggccgcttttactcagcttgatgagtctgcgctgactatggctcttgaatactatgaggatgaagaagccctcaaagtggcagaaatgtga

SEQ ID NO: 81145 - DNA, 885 bp, Citrobacter koseri
atgactgagaataaatattgccaggtgctggcagaactgcgcaaccgcagggcgcattatctgaaagatgttggcgatcaatggcgatctccagatttactggtctggggtatcaacgccatgttcggtccgctggtgctggatctgtttgcagacgatgacaatacaaagtgcccggcatggtacacagccgaagataacgcgctgacgcaggactggtcagatcgtcttgcagaactcggtggcgccgcatttgccaatccaccttacagccgctcgcaataccacgaaaaacaggcggtcaccggcatgactcatatcatggcccatacactggctatgcgtgaaaagggtgggcgctatgtgttcctcatcaaagcggcgacaagtgaaacatggtggccggaggatgccgatcacattgtattcattcgcgggcgtattgggttcgatctgcctgtgtggtttgtccctgccgacgataagcagaagcccacaggtgctttcttcgcgggtgccatcgctgttttcgataagtcatggcgtggcgagcggttcagctatatcagtcgtacggaactggaagcgaaagggcgggcgtttatggcgctggctcaatttgccgcgacaaaggtggcgccgtcagctccggcggaagaggttacttctgctgttgtggatctgccagaagtggaatcgcgtatctggcctcttgaggttggcctggtgtttaaccaggttgaaggcgctgacgcgctgagtgagatccagcagaacaagctaaaagcaaatatcaatcagctctggcttgagcgcatgcccaccagcgaaataatcactgtggccagtgaacagattggcagtatgcaacgggaggttgcgtga

SEQ ID NO: 81146 - DNA, 861 bp, Citrobacter koseri
gtgagcactaaattaactggctatgtttgggatgcctgtgcagcgtcggggatgaagttatccagcgtggctatcatggcgcgtttggccgactttagtaatgacgagggcgtttgctggccatccatcgaaaccattgcgcgccagcttggggcgggtgttagtacagtcagaaccgcgatagcaaaactggaggcggatggttggttatcgcgtaaggctcgccgtcaagggaaccgtaacgcgtccaatgtttatcagcttaatgtggcaaaacttcaggcggctgcattctctcacctgtcagattctgacccgtcaaaatctgacgcatcaaaatctgacccgtcaaaatttgaggcatcaaaatccggtaaaaataacggttttgacccgtcagaatctggcggggatccgtcagtaaaatcaaaacaagatccacaagtaaattcaaaaccctcttgtcaggttgctgtgcaacccgaccctgctgtggtgatcaccgatcaggcgaaacaagttttatcacacctgaacaagaccacaggatcacgatatcaggtctgtaagtcgtctctggaaaacatccgtgctcgcctggcggaagggtttacgcctgacgagctggtgctggtggttgattacagcgtcgagaagtgggccgaggatctgaaaatgtctgaatatctgcgccccgcgacgctgtttattccctccaagtttcctggttaccttcagtccgcaactcgctgggatgctgccgggcgtccgaatcgcaaggactggggacgaaagcgacaacatgacccaatgaagttcggacctgtagataccaaaattccagaggggttcaggggatga

SEQ ID NO: 81147 - DNA, 840 bp, Citrobacter koseri
gtgacaatcctcattattgctttcaacaattccgggcgctacactgctctggcagcggcaaaatccgttgccgggattggcgtcctggaattcaaaacagcgcataaccgcgctttggcggtttttttatgcgcaatgcactgctacaccaaaattatggtggggcgtgcaggggcggagcaatccgcgccgggttctgttttgaccggttacgccaaccctgtacgtctcaccacctctgcgattggcgtctcatgtggtgagttatcaatactcaaaacagaggttgccactatggcttcgacccccgctattgctcaacctgaaatcgccgtcatcaacggtcaggctgttacttcttctctggctgttgccgactacttcaccaagcatcacaaagatgtgcttcgaaaaattgaatctctcgaatgctcgcctgagttcactgagcgcaatttttcgctgagtgaatacaccgacgctactggccgcaaacttccctgctaccaaatcacccgtgatggcttcgcgttcctggctatgggcttcactggtaagcgtgctgcgcagtttaaagagtcgtacatcactgctttcaaccagatggagaaagcattatctggatcggctgatacttcctgcgctgcgcacaatgcccataccgtatatctctacatgtctgaaatccatcgcgtctggttggctcagatctatccgatgctggtctcagctcaatccccgatcgcaagcagtctgtatgactacatcaatgattgtgtatccgttgctgggttggtggacgctgaattgaatcaaaagcacagggaggtagggaagtga

SEQ ID NO: 81148 - DNA, 552 bp, Citrobacter koseri
gtgggtaatgaaccgcagtggaaagttgaacgtcagccagcttggctggtggccgcgatcagaaagacgatcgctgctctacccggtggatacgccgaagctgctgagattctggataccacccaggacgcgatttttaaccggctgcgcgctggtggagatcagatcttcccgatgggatgggcgatggtcctgcaaaaggccgctggcgttagctacatagcagatgtcttctctcgcgaaacggataacggaatacatgtgtccggcgctgttcatgaggatgagaacgaagagattggcttgaagttggcagagctggtgggtcagcttggcgaactggttagcgcctatcgggaatatatcgatgatggggtggttacacacggagagtggcagagcctgaatgatatcgcctaccagttccgggtcacgctgatgacgtttctcaatctgatttcccgagtttattgcctaccagaaaagagtgacgcccgcgagtgtgcagctccgggcgccttggcgaacaactcttcgagtatggagaaataa

SEQ ID NO: 81149 - DNA, 264 bp, Citrobacter koseri
atgcaatcaccgttaagaaatttgcgaaaatcgcaatgtctaacactctcatatgtcgccaatttggtgggcattgatcctgccaacttaagccgaattgaacggggacagcaaatcgcttctctcgatgtagctgagaggctggtgaagttttattcgggccagatagacgaactccagattttgtacccgcagcgttatgtaaaccctacaggggatagcgttaaagttgcaccacagaaaaaaggggatagtcgtgggtaa

SEQ ID NO: 81150 - DNA, 435 bp, Citrobacter koseri
gtgtttagagtcgaaatgcttgatgtcagtgctagcgctggcatgggttttatacagggtagtgatatcatcgatgtaatcagatcgattgaatacaacagcgaacgggcggctgccctgtttggtggaagaacgccagatgccgttaaagtgatcaacgttcgcggtgatagtatggctgatactatagagccaggtgacctgatatttgttgatgtttcaattaacgaatttgatggtgatggcatttatgtgtttggttttgacgataaaatttatgtcaaacggttacagatgattcccgataaaattctggtgatatctgataatcccaaatacagagaatggtcagttgaccaatctaacgaagaacgtttttatgtgtttgggaaagtgatgcttagccaatcacaagcaatgaaaagacacggataa

SEQ ID NO: 81151 - DNA, 255 bp, Citrobacter koseri
atgcgcggagtcgtcgttcatcatgagcaccgtatcggttatatcgttatccgtgaccctatgggggagttcacggttgcagagcttctcggcggatatgatgtcgagaaagggcacgtcatatccggtgatctccatagcctcggaggcgaaacatttttgaatgagactgaggatgaagatattgatgttttcgttcagggttatggcatgtctgaacagcaatcaattcttatgatccgaagtactcgctaa

SEQ ID NO: 81152 - DNA, 189 bp, Citrobacter koseri
atgagcaagaaagcaggatgggccagaccgattaacgccagtaaacatcattatttcgcagaggatgaagccacaagtatctgcggtcgctggatgtacttcggacatgaccgtgaaccagacactttcgaaagccctgacgactgtgttgcatgtcgccggaagctgaataaggagcgtgcagcatga

SEQ ID NO: 81153 - DNA, 402 bp, Citrobacter koseri
atgacaactaacaaccacccggcgaacggtcctgtatcactcgctcgcctgcaccagatacgcgaaacactcagcaaagcagcagcgcaaagtggtggcggtaatctcggttacgcaatgtctgatgctgtgaaagcgattgatgaattgttagcagggaggaaggcggagccggtggcgaaggttgagactgttggggtttgttggtacgcagataacggcgtacctcgcaaacctgctgttggtacagagctatacgccgccccgccagcgccggtagtgcctacattcgatgagtggctggaagttcgtggtaacaagccactaggctgggtaaaagatgcgatgcgtgaatcgtatgacgcctgccgctccgccatgctcaacggaggtaaatcgtga

SEQ ID NO: 81154 - DNA, 573 bp, Citrobacter koseri
gtgaacaatttaatgatcgaccttgaaactatggggaataaacctaatgcccctatcgtctccatcggtgctgtgtttttcgatccgcaaagtggtgaattggggccggagttctataacgcagttaacatcgaaagttctatggagcaaggagcagtcccggatggtgacactattctgtggtggctgaaacaaagtgctgaagcgcgggcagcaatttgtgttgatgatgcaatgccgatcatggacgctctgtctgaattaagccatttcattaaccgtcacgccgacaatccaaagtatttaaaggtctggggtaacggtgccaacttcgataacgtaatcttgcgtggcgcatatgagcgtgccagccaagtttgcccgtgggcattctggaacgatcatgatgtgcgcacaatcgttaccctcggccgcaccataggtttcgatcctaaacgagacatgccttttgatggcgatatgcataacgcccttgctgatgcgcgccaccaggcaaaatacgtgtccgcaatatggcagaaactgatccctaccaccagcaacgatatttaa

SEQ ID NO: 81155 - DNA, 1182 bp, Citrobacter koseri
atggcagcaaggccacgaaaaaaagaataccgccaccttccagattatcttttttttgataaagatcgtggcgtgtataagttctcgcttattactggaaaaaagaaaactctcggttcggatcgagtaatggctatcgccattgcccgagaatataacctgaggatgcgcccagaaaatacaccttcgatagattcattaattcgggaatcgggagggctgaatggtgaagccaacccgttttcagagcatgttgatcgcataatggagagagcgatcaaagatgagcagccgtctaaaagcacacttgacgattggaataatgatgccatcagggttaaagaattttttaataacatacccgcatgcgacattgagcttgagcacgtaaatgcctacatacgaaattatcattctgaatcgtcggccaatgttcagaaccgaaaagttagcttcctgaaaaagctattctcttatgctgtggatgaatcgctaatgatggataaccctgcaacacggaaaaaaatgcggcgtgtcgataaaaaggtccgccggcgacttactttggaacagttcctggccatacatgcagccgctgaaccttggctgaagactgcaatggatcttgcattacaaactacgcaagcgcgcctggaagtgtcccggatccgatactcaatcaaggagcctaaagaaggggtttgcggctgtgtatggttcgatcaggaagaagcaggcatattcggaacgctttacattcatcggcaaaaagttcagcacaaagaggcctcgcacgttgctattccgatcggtagggccttgaaagagatcatcgacaacagcagggacaatgtggccagtccttatgtggttcaccggcttctagaaaagagaagcaatcctataagcaaggaagttaaccacccaacacaggtggcccctgattatttgagtagggcattttcagagctgcgggaccggataggtgtagcggcagagttacctatcaaagaaagaccaactttccacgagattagagctctggcagctcatattttcgaaaaacaaggtatcgatccgcaggcaaggatggcccatagtgatgcaaaatcgacaaaaatttatacccaaaaccatgttgaatgggtagaagtaccccatgcagaaataaaaatggcttag

SEQ ID NO: 81156 - DNA, 150 bp, Citrobacter koseri
atgggtttgaaatcaatcgtttcaaaagcggcaccaaaagggttccgttgggttttctgccgttaccgcaaggtgcgtggaaaatccgccaaagtccttgatgctcatgattatgggtatgaggcgtgggcgttcttagttcgttgctaa

SEQ ID NO: 81157 - DNA, 522 bp, Citrobacter koseri
ttgagcggacaagattatcgtgtacccccgcagaatcgcgaatcaatacgttctatcgtcagatctctgcggggaaccttcggtattacaggtctgatgtttcctgttatggaggtgattgagttcgcattgcctcaggtgatccctgattttgaactccatatcggtgggatgaaagaaatgggtgagactcatggcctcacctacccgcaggaacatttactgattctgcgcgaagacatctacgaaggtgctttgaatggggtgggtcgtgacaggatgacggccgcgcatgaactgggtcatctactcatgcacagaaacattgcttttgcgcgttctgctcctggggtaaaaatccgcccttttgagagtagtgagtggcaagcaaaatgtttcagtggtgagcttttagtaccagctattcatgccaatgttctaaaaggtatgagtgcggaaagtgttgctgaagcatgcggagtatcattagtggctgcacgttatcagttagaaaaaatgtaa

SEQ ID NO: 81158 - DNA, 357 bp, Citrobacter koseri
atgttaacgccgtttggtaagacagtaagaaaaatgcgcatagacctggggcttacgcttaaaagcatggccgaggctatgggcatgacctcgtcttatctttcagcaatcgaaactggtaaaagggcggtcactaaacccgtgcttgatagcatcattggctatcttaatgcggatgaaaaacaaaaagaaaagcttatcagtgcagctcgtgactctcagcaatcagtagagatcagcttgtcaggtaagaacgaccatgctcgtgaagtcgcaattgcgttcgctcgtagttttgatgagttaagtgaagaagacttccggaatttacgtcagattttgaatcgaaaacagtag

SEQ ID NO: 81159 - DNA, 1191 bp, Citrobacter koseri
atgtcccttaatgcacgtcaggtagatacatccaaacccagagaaaaaatctataagctagcggatggcggtggattgtatctccaagtcaatcctaacggttcaaagtactggcgtatgaaatatcgattctccgggaaagagaaaaagttgtcatttgggatctatccagacatatcacttgcagaagctcgcactaaacgagatgaagctagaaaggtattggcaagtgataaggatcccggtgaggtcaaaaaagccgagctgttagctaaaaagctctcgattactaacacctttgaagcaatagctctcgagtggtacgacgcaaaagtatctggctggtcaaaaaattatgcagactacgttaagcgagcttttaataataatgtcttcccctatctaggcccccagccagtgaatgaaattaagccgctggagcttttgtctgtattgcaacgaatggaaaagcgaggagcagcagagcttgctagcaaagtgcgccagcgttgtagtgaggtttttcgctacgcgattgttactggtcgtgccgaatacaacccagcggctgatcttggtagcgctttgcaaagccatgagaaacagcactatccatttcttaacgccgcagaactgcctgattttttgcacaagctatcaaattactctggaagtcttattacacttctcgctacccggctgctcatgctgacagggttaagaacagtagagttacgtctggctgaatggaaagaaatcgacttcgataatcgaatctgggaaatacccaaaaccagaatgaaaatgaaacgtcctcatgttgtcccattatcaactcaatccttgagagcccttcgtcaattgggagaactaacagggaactatcagcttatttttgcaggacgaaacgatgttaacaaagcgatgagtgaagccagcatcaatatggttataaaaaggattggttacgataagagagcaaccgggcatggttttcgccacaccatgagtaccattttgcatgaacagggctttaatactgcgtggatcgaaactcaacttgcccacgtggataagaacagtattcgcgggacttacaaccatgcgcaataccttgatggcaggcgtgaaatgatgcagtggtatggagattttattgatagcctaaaaagtgcaaatacaacagcataa

SEQ ID NO: 81160 - DNA, 477 bp, Citrobacter koseri
atgcttagcggtaaagatttgggccgagccatcgagcaggccatcgataagaagattgcaatggggtctgccaaaagtaaggcggaagttgcacgtcattttaaaatcaagcccccatcaatccatgactggatcaataagggatcgatatcaaaggaaaaattgccagagctatggaattacttttctgatgttgtaggctctgaacattggggattgaaaggatatcctatcagttgcgatcaccatcagataacagaggtatctgatgaaattggctcccttgacaaactttacagtaaagcttcttcggaaaagcaggctattgttgatttcatcttacttgaagaagggaaagaagcccccggctgggctgatagcgacgcacgtgcatatgttgactcactagaactgaaggtaaggagatggtcagaacaaagtgataacgggaaaaagccgaagaaagccagagcttag

SEQ ID NO: 81161 - DNA, 1155 bp, Citrobacter koseri
atggaaaactttaaaacacgccttaaaaaccatattgagcatgttaaaaaggttagagagcattgcactactgaagagacaacaaagcaggctttaattttaccttttttagatatattggggtttaatgcttacgacccacaaaaagtaaaagctgaatatggtgcagactttcctggcgtaaaatctggagagcgtgttgattatgccttgttttgccaaggcgttccggtcatgttcattgaagcaaaaagttgtaaagaaaaaattgacaaccattgcccgcaattatcccgatattttaattccacccccgaagttacaatttcggctataaccaatggtgttgaatggcgttttttcacggaccttaatgaaaaaaacataatggattcaacaccattcttgcggataatgatggatgacattaaagattccgatgcagagcagctatttagatttcggcacgataagtttaagcctgaagctctaagaacgcttgcggaagagagtgtctacatatctgcttttgtgaaagtcgttagcaccagtctcagggaagttgaccatgagtttgtaaggtatgttgccggacgtgcaaacattggacgtcaattaaaccagagatttatcgaaactattacaccattagtcaggcaggccgttgaacggtcagtaagtgaaatggtcgtgtctgggctgtcatcaagaaccccttaccctagcgtagctccatctaataatgatgttgaaagcatcaccgttgatgaacatgcggacatcgttgattcagaaaaccccaatatagtaacaacttacaatgaacggattttattagagaaaataacctcaatcactgggcctgagtacgatctgcaagctaaggatacagagtcatactattctattcttttccaaggtaaaactaaccgttggttgattcgttattacgataagaagaatcgttcttcaattcaattacctattgatataagcgaaatagcgggtaatgaaataaagagggcgggactagaatatgataacaacaggatttttatagataatccagaagatgtgttaagaatttcaggcttaattcttgattccttgctgtatgtacaaaacgacgaaaactttagaaaacgacgcacctaa

SEQ ID NO: 81162 - DNA, 1590 bp, Citrobacter koseri
atggaaagccgactggaagttgcaaatagactgatgaagccaagcacactgatatccgtcgccattgatgatgaagaagtctcgcctttgcgcttgttaatgaataacctgtttccaaaggaggcaggcgttggagtggtaaaagttaatccacaaagcagaaaaacaaagggtaaattttcgcctgtccatgaatatgctcttttttatggcaactcaagcgattcgcaaccggcatcaatcggctatgacgaagcaaagctcgatcgttatcctcttgaggatgatcaaggccgatatgcttggatgaactttattcgtgcaggaagtaatgacaagcgttccgataggccgaagctttactaccctatcgtggtaaccgaaagaggccagatacgcgtacccaaaatggcttggaatgatttaaatcaatgctatgacgttcttgaggatatagcagccggagaagttttagtatatccagataagtttgaagatggcgtcaaaattgagaaaaactggcaaagagggaatgtcagagttgcgacggaatataacgaatatcgtgtccgcaagaacaatgagggtgaaattagtattgacttcaaaacaaggatggatgctaacgcacttcctacaacttggtgggataagaaagaatacgcttcagcgaactttggtgctgctcagcttaaagatttatttggtgaaaaaaactttgacttcccgaaggcaaaaggtctcgtcaagaatgccattcttgcgtgcatcggaaaagagcatgatgaaaaagttgtccttgattttttcgctggctcaggaacgacagcacacgctgtttctgagataagacgagaaattaaccctgaggccaaattcattattgttgatcagggagagtatttcgatacgctgataaaaccgagggtgcaaaaagtcaatttttgttcttcttggaagaatggaaagcctgttaattccagtgacggtctctcaagtatttttgaagttattaaactcgaaagttatgaggatgctttaaataatctcgaactcaataatccgaaggctgatctgtttgaaaataatcccgaattcaaagacgactacctgcttaactacatgctcgacgtagaaagccgtggttcactgctttccactgacgactttaaaaagcccttcgactacaccatgaaaattgcggtggattccgccggtgccttcaaagagcaaaaaatcgatttagtggaaacctttaactacctagtcggcttaaccgtaaagcatatggatgcgcagcctgagcgtggttttgtgacggtaactggcaccctgcccaacggtgaaacctgtttggtcttatggcgcgactgcgagaagatcgattacgaaggcctcaacaaactatgcgataagctggcgctaaacccggcagacaatgagtttgatgtcgtctacatcaatggcgatcataatattcccacggtgctgtctcaaacagccgacgaaggtggcgagacgcgcgtattaaaactgcgccagattgaaccggagtttttggaacgtatgtttgccgaggaggaaatttaa

SEQ ID NO: 81163 - DNA, 3363 bp, Citrobacter koseri
atggccctcccaaaaacagcagcaaagacaaagcttaagaaacggagctttcatcaagagttagtgctcaaccgttggatgatgcgattttttaaaggcaatgaacttgccgcactaaaacttcgcttgggtgatgacctgcacgaaggcattgatgaagacggtcaaaccctgttctttcatgaactgacgcgcaacctgtttgaagtggaccggatttccgaggccgatttacgccgctacgatttgcatattgttgagcactggcaggctattaccaaacaccgtaatcaactggaaggccatgtgctgaacatgaagtactttcagtatttatcgttgttgttcactgaaatatatctggactggtacttttccaagccacaagcattgcttgatggcctgaacgaagagctggcatcgtatagtaaagagcaaggcgcagaaacctttcagacctatatcgccagcgacttgaataagatcgcgttctggaatgccacgggcagcggtaaaaccctgctattacatgtaaatatcaaacagtatttacattattttcaggctggcaatagcaatctgtacccggacaaaatcattctgctgacaccgaacgaaggcttatctaagcagcatctggaggaattagagctttcaggtttcagtttcagtcgtttcttcgataaaaaccgaaccaacacctttaaaggcaccatcgagattatcgacatcaacaagctcggtgacagtatgggcgataaaacggttgccgttgaagcctttgaaggcaataacctggtactggtcgacgaaggccaccgtggcaccggtacagccgcaggtgcctggatgcaacgccgtgatgcattggtacgaggtggttttgcctttgaatactcggcgacttttggtcaggctgtggcgaagggtaatactgtcgtcaaagccgaagaagagctcttgaaaaagaaagccaaaacgctgtttgagacaacggcattaaagaagctggatgacgcacaactcgcacagctagtcttaacacaagcggagcaacgccaggcccgcgtgacagctacccgagagatctatgcgaagtgcattctgtttgactattcctacaaatatttctacgacgatggctatggcaaagaatcactcattttaaatatgaatggtgaggcctacgaacaagccgataatgcacaaaagtattttactgcttgtttattaagtttttatcagcaaacctggctttggcaaacccatcaaggcaagttgaatgactttaatattgaaaaacctctatgggtttttgtgggtaatacggtgtccggagaggattccgacattctcgaagtcgtgcagtttttaagtttcttccttaatgatgagcaaaccataaaaacttggcttaaagagttggtcgatgacaaggcgcaactgctcgatgccaaaggcaacaatattttccaggggcggtttaactctttaatggggttcagcaacaatatcgatggtctgtacgccgacattttgcacaagttgttcaatgccaatacccgccagcgtttaaagctggtgaacatcaagaacagtaaaggcgagctggcactgcgtgtgggcgatgccgaaccttttggcctgatctcgattggtgatgatagtggcttttataaaaccgcagaggaactggatagcttcgacagtgaagccgacgattttggcggtgccctgttcggtacactgaacaacaaagacagcaaattgaatgtgctgattggctctcgcaaatttactgaaggctggagcagctggcgtgtatccaccatgggattgctgaatatgggccaaggagaaggttcacaaattattcagttgtttggtcgtggcgtgcgccttaagggcaaagacttctcgctgaagcgtacagagccacatcagcgcccgaaaggcctgtacttggataagctggaaaccctgaacatatttggcgtgcgcgccagctatatggccgcctttaaggattatctgaaggaggaaggtattaccccaagcgatgaaatcatcgaactggacttcccgactcaaccaaacttgccgaccaaaaagttaaagactctggcgctaaaggatggttatagagacaaccaaaagttgggctttaaacggacccactatccttggttgtatgtaatcccggcagagtttgacggcaagatcaaaaccccgcatatcactttggatttgtatcctagactagaggcgatcagtaccacagaaggcagcgctgcactgcaattgaatgtgcgccatgaaggaaaactcaaccaggcacattttgcattttttgattttgaccgaatttacctagcgctgcaggcattcaagcaacagcgtaactggagcaacttgcgtttagacaagcaacggttgatcgatttctgcttgggggaacatagctggtatacgctgtatatgcccaaaccagaatttgaggcgaaaagctttgctgacattaaacggttggaagatattctgatccgtttattgtgtgactatacggaacggttctacaaagcactgaaaatcggttatgaaggtcagttttatgaagtgatccccatgcatgatgagcacggatccatgctcaagctctaccacttcgaaattgatgacagcgatgatggtcatgaatatttaaagaaactagaagcgcttaaagctctggtttctaagggtgacttgggggaggccagcaagtggaatgcaccgcacatggtcgcaataagctttgatcggcatttgttctatccactgttgtctttggaagataaagacgcggtgccattaaaaatgcgcccactggcgtttgatgcgccaagcgaaattcaatttattgaagatttgcaggcattttatagctcgtcagtaggacgcaaggcgattggtacgcgaagcctgtatttactgcgtaatgcggattcaaagaacaagggaattgggtttgcaacggcaggtaacttttacccggacttcttgctttggctggttgatgatgcaagcggtgagcagtggctttcgtttgttgatccaaaaggtttaaagcacatggatctgaaccatccgaaattggggctttataccgaaatcaaaaagattgaggcagacttaaccaagcaggcagcagctggcgagcccgcactaacgctcaatgcttttgtgctttcaccaacaaaatatgctgatttattgaacgtcggcgataaagtgaaaaagcaagagctggaagacaagcacattttattcatggaagatggtgggagcagctaccttaaaaaaatgtttgaccggattaattaa

SEQ ID NO: 81164 - DNA, 1269 bp, Citrobacter koseri
atggctctgagtgatgtgaaggttcgttcggctaagcctgaagcaaaagcctataaactaactgacggtgaaggcatggttttgctggttcaccctaacggttccaaatattggcggcttcgctatcgcttcggcggcaaagagaagatgctagcgttagggaaataccccgaagtatcgttggcggatgccagggcacgccgggatgaagcccgtaagctgttagcaatcagcatcgatcccagtgagaacaagaaagccgttaaggtagagcaggagcaagaggcgataacgtttgaagtggtagccagagagtggcacgccagcaatcagaagtggtctgcatcgcatagcgctcgtgtattgaaaagcctcgaagataatctctttgctgctatcggtaagcggaacattgctgagcttaaaacgcgagatctacttattccaattaaagccgtagagatgtctggacgtcttgaagtcgcggctcgtcttcagcagcgcactacggctatcatgcgctttgctgtgcagagtggactgatagattataacccggcgcaggaaatggccggggctgttgcttccggaaacaggcaacatcgaccggcactggaattaaagcgtattcctgaactacttcagaaagtagataattatactggtagaccattaacccgctgggcaacggaactgactctgcttatctttattcgctccagtgaattacggtttgcccgttggtcagaaattgattttgaaacatcaatgtggacgatcccgccggaacgagagcccattcccggcgtcaaacattctcaccggggatcaaagatgcgtacgccgcatttggtgccgctttcaaagcaggcactggcgatcctgaaacagattaaacagttttgtggagaacaggagctgatttttattggcgatcatgacccacgtaaaccgatgagtgaaaacacagtgaataaggcgcttcgggtaatgggctatgacacgaaagtcgaagtctgtggtcatggttttcgcacaatggcgtgtagttcgttgatagagtcagggctgtggtcgagggatgcggtagaacggcagatgagccatatggagcgtaactctgtgcgggcagcctatgtccataaggcagagtttatcgatgaacgtaagttgatgctgcaatggtgggcggactttctggatgcgaatcgggagagagcgattacgccgtttgactatgcgaagatcaatcggggtaatggcgtgtga

SEQ ID NO: 81165 - DNA, 333 bp, Citrobacter koseri
atgaataacttaattgcattggttaaaggtataaacgtaaatgactcatttttgtgttgggaagaattaaagaaacaaaacaaagagcacgtattcaatgtggatgttaattccatcattcgcgcattgcacaatcagtatttcgtcccatcagaaatgggatatctgttttatcttgcttccaatccaacaagccgcgcgcctgtgcaaggtgctgtttctctcacggcacgcggcatcgacaaaatcataagacgcatttggcgcgaccagatgcgagagcatcgcgagcgtatgcgctcaggttattttgatgatgaaattctattctga

SEQ ID NO: 81166 - DNA, 276 bp, Citrobacter koseri
atgagtaagccgattgtcagcactaccgacgccgtcccttaccaagagtttgctcggctgattgggaaatctactgccgcagtgaggggaatgattgagaaaggcaaattgcctgttgttgaaatgactgacccaaattctacgtctggccgtgccggtgagtattgggtttatcttccagcatggaacaacggtatgaaacttgcctatgagagtcgcccgaaagaaattcgcgatggctggctgatgtggttgggtctcggtgagccgagataa

SEQ ID NO: 81167 - DNA, 1014 bp, Citrobacter koseri
atgacaatcaaaaaactcgatgatggtcgatatgaagtggacataagaccaacggggcgtaacggaaagcgtatccgtcggaaatttgacaaaaaaagcgaagctgtcgcttttgagaagcacacacagtacaaccaccacaacaaagagtggctgtctaaaccaacagataagcggcgtctgtctgaattaactcaagtctggtgggagctgaaaggcaagcatgaggagcatggaaaatccaacctcggcaagattgaaatctttaccagaatcacggatgacccctgcgcatttcagataacgaaatcactcattagccagtactgcgcaacacgaagaagtcagggcattaagtcgtcaagcattaatcgtgacttgacctgtattagcgggatgttcactgccctgattgaagccgaattattctttggtgagcaccccatcaggggcaccaaaaggctaaaagaagaaaagccagaaaccggctatctgactcaggaggaaattaccttgttacttgccgctcttgatggggataacaaaaaaattgcgattctttgcctgagcactggcgctcgatggggagaagcggcacgcctgaaagctgaaaacatcattcataaccgcgtcacgttcgtaaaaaccaaaacgaacaagccgcgtaccgttcccatctccggggaagtggtcaaaatgattgccagcaataaacgaggctttttattccctgatgctgattacccgcttttcaggcgaaccattaaagacataaagccagatttaccaatggggcaagcgacacatgcgctaagacacagtttcgctacacattttatgattaacggagggagtatcataaccttgcagaggatactcggtcactcacgcatagagcagacaatggtttatgcgcattttgcccccgagtatttacaggatgccgtttcactcaatccgctgaggggaggaactgaggtcgcaagcgtccacacaatgtccacacctgagtag

SEQ ID NO: 81168 - DNA, 849 bp, Citrobacter koseri
atgtcagactttaccctcaccgaacctgaagttttgaccggccatacagatgtgatttgctccaccagcattgaacgcatcgtcagcggacgtaacgccgcgcttacgcagattgaatccctcattcagcaactggacgatatctcgacgctgacccgcagtatcggcggtaaaacggcgctggactgggccatgaagcaggaattccgctgtggttgctggctgatggaaaaaccagaaacagcgatgaaagccattacccgtaatctcgatcgtggtatatggcgcgatttaatgaaaaagtcagggatgcttgcgctcatggacgagcaggcccgtgatgagtggtacaacagtctggagaaagacgacatcccggcgatctctgaagccaacatattgaacacgtttgagcaactgcatcagagcaaaggtgaggtttttgagcgtggcgtaattaacgtgttcaaaggtctgagctgggactttaaaacgaactcgccctgcaagtttggtgcgaaaattattgtgacgggactggtcaaatgtgaccgatggggatttgggcttaactggggccggcagcgcgatcgattagctgaccttgagcggatgctgatgcttctggatggcaagcctgtccccgacaaccgcgctgacgttacccgtcgtctcagcgatcatatccatgagaacaggcatagcaactattacgaggacgagatgtttgcgatcaaatactttcagaagggaacggcacatatctcttttaagcgatcggaactggtcgataagctgaatgacatcatagccagacattatccaagggcgttgcccactaaacagtaa

SEQ ID NO: 81169 - DNA, 204 bp, Citrobacter koseri
atgccggaattaaccaccgaagcggctctcaacattctgattggctggctgcaggacaacatcgattgcgacagcgagataattttcgacaacgacgaagataacaccgattcagcaacactgctgccctggattgagcaggcgcttaaagacgttcgcgatctccgtcatcttcagcgtctgcaacaggccagtacaaattag

SEQ ID NO: 81170 - DNA, 492 bp, Citrobacter koseri
atgaagctgtccctcaccgtagaagccggcaccatcaacgttctggccctgaatgcgggccggatcgctgtggatattgacggcattgaactggctgcgctgctcgatgtggtctgtgacaacggttattcccttcgcgttgctgacgagcccggaaaactggttgtcgaagatcctcttccgcccgtcgcccgcgttaacggcattcagtgcagcaccgcacatatcacggaagaggacaattcactgctgtttaccctttcacaccagcatgaagactttggtgagtctgaatggattagttataccggctcgggttatctgttccacctgggggcgtggtcgtttccggtcttacgcctcaaacgcctcggtctgtcaaaagcctgccgccagttagtggtgacgcttatccgtcgctactctgctggcatcattcatctggatgcctttggcgaagtgctgccgggcttcgctacgtttgactggtag

SEQ ID NO: 81171 - DNA, 378 bp, Citrobacter koseri
atgcaaacacaacctgttcccccgacacgggaggtttcaccacgcccgtcacccgtggcgatatggcagcgccttctgagccacctgctggatcgtcactacggccttacgctcagcgatacgccgtttggcaatgatggcgtgattcaggagcatatcgacgctggtatatcactgtgcgacgccgtgaattttattgtggaaaaatacgatttggttcgcacagatcgtcagggcttcagtgcagaaacacagtcgccgcttcttagaagtatcgatattctccgcgcccggaaagcgacagggttaatgacccgcaacagctacaaagtggtgaccgacatcaccaccggcaaataccgtgaggtgcagccatga

SEQ ID NO: 81172 - DNA, 360 bp, Citrobacter koseri
ttgtcgaagaaaaccacgataacaacgaatgatgtcagcgaaccatggtgggggctcagacgcagcatctccccgtgctttggtgcccgtctggtccaggaggccaattgcctgcactatctcgccgaccgcaccagtatcaccgggcagttcagcgacgctgatttgtgccatctcgatcaggcgtttccactgctgttgaaacaactggaactcatgctcaccagcggtgaactcactccccgctatcagcatcgcgtcacgctccacgcaaaaggactgacctgcgaggcggataccctcggcagttgtggttatctctatatcgcgatttacccgacacctgcaataaccgaataa

SEQ ID NO: 81173 - DNA, 222 bp, Citrobacter koseri
atgaaaatcatcagcaaacgtcaggcaatgacgatttaccgccagcatccgcaggcacggttgtttcgcttctgcacgggtaaatacaaatggtccggcagcgtctgccactacgcaggacgggaagtgcaggatatcagcggtgtactggccgtattcgcagagcgccgccaggaccgcaacggcccgtatgtcgtattacgcagcgtaagcctgaattaa

SEQ ID NO: 81174 - DNA, 480 bp, Citrobacter koseri
atggaaacacaattaccgctgtttgccgccgaattgccggcatccgcacagcacaccatccgggaggcgctcaccctgctggaacgtcagttacgtgaacccggggtgtcattcacgtccagccacgccgtccgggactggctgcgcctgcagcttgccacactggaacgggaagagtttaccgcgctcttccttgataaccagcaccggctgattgcgcacgaaaccctctttaccggcaccatcagccatacgcaggtccatccccgcgaagtggttaaggccggtctgaagcataacgcggcggcgattattgtcgctcactgccatccgtcagggcacgctgagcccagcaatgctgatcgtcaggtcactacgcgtattcagcaagcgctggatctggtagatattcgcctgctggatcacctggttatcggtggcctggaaatcgtctcgttttccgagagaggctggctttaa

SEQ ID NO: 81175 - DNA, 486 bp, Citrobacter koseri
atgaccgacattatcaaccttaacgataccctccagttacagccacaatcaaccgatgctggttctgcgccttcactgaccgccatgccggtcccggacgaacagcgcgctgacttctggccacagcactttggcaacataccgcaatggataatccttgaacccaccatcttcgcgtggatggaccgctactgcgcggactacaacgggggcatctggcagttttacacaatgagcaacggcggtgcctttatgatcccggaagcgaatgaggataccgatgaaaaatggtctctgtttaacagtatgaacggtaactgtgcggagatgagcgcagaggccgcgggcatagccggctgtctgataacttacagccaccacgccatgcgtaccgaatgcgacgccatgacggaacactattaccgtctgcgggactacgcgcttaaccacgcggaatccagcgctatcatgcacatcatcgactga

SEQ ID NO: 81176 - DNA, 534 bp, Citrobacter koseri
atgagcgattcaactatttcatctttaaaagaaaagctgaacaccccaacatggcatctggtattactggcagctgccacatatggaatataccccctgatgtggctgtataaaaatcaggacaccattatggatgaagttgggcaacgtttctcatccggaacatttattgtctggatggcggtatgctccggcgtttccgtcatgcttaatctgctttttccggttcaggttgatcaatatggatacgcctatgacagttccgcacaaatgatggccggacttgcctttctaatctcgctggcctggattgtactgaccattgtctgggcatttaaagccagagcttcactgcaacagtacgcgctgacgcagtttcgttttgaattaagaatgaatcctgcatggacaattctgttccatgttttctacattaactattgcatcaacacaatgccggaagccctggcaaagcatcagataattcacggtaaacccgatgtagcaacaacaacctctgatgctgaaaaatag

SEQ ID NO: 81177 - DNA, 1296 bp, Citrobacter koseri
atgttaaccaccagaaagttaagaccacagatattccggcattctctgatcatcgttgcggcaataaccacgcttaccgggtgcgattacttttccgataactgggaaattgaaagtggaaagtgtcaggccctcagcagcggacaaaacgaaatcgcgattgtgtctgaaggcagcgtgggatttctgaaaatggagaaaggctgtccggataacctggatatcctgggctctcgttttactgatattgagattaacggaaacccttataaggccacactgctgtgcagtgacgcgacgggtaatcgcagggtgaccatgctcggtaccagtgaaaactcagcatcgacgctgtccgctcaggcgatgagagaattcaccgggttcatgggcgcgaaggtcactatcgaaggggagtcctcccgcttttataaaggcaatttcaccaaaatctgccagcggttcctgccacgccagacggccagtgcaccttccccgtcttctgataattcatccctgacattaggtgatttgctgagtggcgggagaaaaaatgaacccgctccggagcctgccgcagaccctcaggcgcagatgatggctcaggcgggatatgaaaagattgacggtgaatggaggaaaaaatcccgtcaccccctggctgtgacggagcaggatcgcgccgcaactgaacgcatccagtctcagactcgccatcagtatcagggaaatggtaatgacatgcccgtctctgcatacgggcataatgccggggaaaaaagcactccggaaacggagagttctgacaccccggccccaacgccatccgtaccggaaaacccgcagccctcagtatcacacacggacgcaccagcaacggtagtcgcagactgtaagctcacgaatggtaaagctctgtcggtgcttgctcaggacggctttccatacacctataacctctttaaaaaagatggtacccaggagctggagttaaaagaagggatgtctggtgtcaaagcctttcactactaccgtgaactcaatcgcggtaaaggtgagctgaagtatctgcgttttaataaagggaaatatgactatgttgttgtacaacgctatgacggtgaaacccctgccttcgatggcattatcgtattcaacaatggtacgaagattgccacacttgcctgtaaaggagcgttcaataatctgttctccgttgaacaactaccaaaaaatagccatgaagacagtgaagatatagctgactttattattggctatacagtgagagattaa

SEQ ID NO: 81178 - DNA, 684 bp, Citrobacter koseri
atgcctgacaacagctcacgacacgatcggctggctgttcgcttatcactgatcatcagtcgcctgatggcgggggagtctctgtcactgaaagcgctgtctgacgagtttggtgttaccgaacgtaccctgcagcgtgatttccaccagcggctgatccatcttgatttagaaaatgatgagggccgctacaggctaaaagccggtgtcagccaggcattcacaccggaaatgctttcctttatacgcaatacgggtattgcccagatacttccggatcagaacccccggctaatgtcctgtctgacaggggatcaggatccttttccctgccttatctggttttcacctttaactacaactaccgcgctgccggactgtttttcacggctgatccaggctatcaggcaacagctttgcatttccctgttatcggacggacgacggcattcgcccctggagccctatcgtctcatctattacggatgcgactggtacctggtggcttcacaaaaaggggagatccgggtgtttcttctggcaaagatcagcacggtcaccctgacatcagcgcggtttgagcggagagaagatatcagcagcctgacggctgaagagaacttcatttctgcgctgccgcatttccccttcatcaataaccttataaacagctttcgaccgtga

SEQ ID NO: 81179 - DNA, 882 bp, Citrobacter koseri
atgtccacactacatcccgcgctgcaaaaactgcgcacgcatcttactttcctgcctgaaaatatccttcaacagcttcttgagcatcttcatcagaccatccactataaacccgttattggcatcatgggcaagagcggcacgggtaaaagcagcctctgcaatgccctgtttcagtccccgctttgcgccacgcatcccctgacaggctgtacccgcgacgctcagcgcctgactctggagattggtgagcggcagatgactcttgtggatttacccggggtcggagaaacaccggagtatgaccgggaatacagaatgttatatcaaagcctgctgcctgaacttgatttgattatctgggtactgagggcggatgaacgggcttatgccgctgacatctccatgcaccgttttttgctgggtgaaggggctgatccctcacggtttctgtttgtgctgagccaggccgatcgcatttcgccagcccatgagtgggatgcgcagcatttatcgccctcccgccagcagcaactttcgctggcggctaccagcgccagagtggccggattatttccttcctcctttccggttctgcccgttgccgctccggcaggatggaatctcccggcatttgtctctctgatgatccatgcgctgcctgctcatgccaccagcgccgtgttcagccattgtcgtcaggagaattgctcggagcaggatcagcagcaggcccgggaagattttggtgaaacaatgggagacagcttcgatcggattatcgatactttttccctgccctcctggcttattgcacttcttcgcagggccagacaaaaaatcatcgggttgcttgtctcgctctgggataaatttttctga

SEQ ID NO: 81180 - DNA, 882 bp, Citrobacter koseri
atgtctgaaaatggtagtaacagcaggcaggtgtttttgcaaaagattcgaacacaggcccgtattgaggagatactgtacagtaaagcctgggttaatacgcagagaacactcaagaggagtgggctgatatgtgtaaaggaacaggaggacggaaaatttgaatatggtcaaggaacctttagttttcatactgtcagatacctgtatatgctccatactgccgctggattaatcaatcaacataaacattttccgggtaaggttgaagtcgcaaaactttatggctttagcagtaatatcattccaccatatataattgttcctctttctgtcaggcgtaaggctgaaggtttccgacaaatgacagaaaaacagattacagataatgttgataaagaaccagaatttagtggaagcctctatgccttgctatgtgatgtgtataaaaaagatatggaaaaacttaataagatgattattgatttgcctgttaccagagaagaaatacatgcagcacctgagctcagtattgacatatatcgaaaagtccattcgcagtacgttactgttttcagacttttttgttatgaatgcaggcgcctcggctattttcatgatctcgaacaaccaatgaaggcaatgataagaataataaacagtgaggaaacagagaaatttcataaattatcctgcgcattattcttcatgttaatgtattgggataaagatgattcgctttcttcttttttttactggttgtttattcctgaagctaaaaacttccactctaaatatatgaataaaaaaacggatgatttcattgctcttgtgtataaaaaatatctctcacccgcaactaaacgtcgtaaaaaaaagtaa

SEQ ID NO: 81181 - DNA, 780 bp, Citrobacter koseri
atgggtaatgataaatctgattcaatagggagaccttttgtcagacgcaccagagaaatatcaggtgaggcatggtcgaatctgaaagtgaaaaaagatacaaaacctgactgggttaatggtgaacgtataattttctggtgctggctttttattcttagagccgattgctcaacccttaatattgttattgatggcaatgataatacagaaccactttataactatctccagttaggcaaggcccctacttcgcatgaagaacgtgtgttcgctgtgaaatcatggtttaatatgttaagtaaaaaaatatcagagcatgactttaaccgtgttgtttcagatatgcgtgatgaatgggcttacttatctgataaaataaaagatctttcatggctaccaaagacagaaaaagcaacaaaatgggcatgggaattcataaagaaaaagaatccttttgattcccgtagttttatttacaattactatccgtataacacaaccgagcgttaccatgctattgttgcagccatagatgaaatatatttaaaagaatatgagaaactggatggtattattctaattagaaataactttattacttttttccataacgcctataaaaataaatttataaacaaaaaagatgatagcattacacaaattacagtgaaaataagtttagtggcgaaaaagaaactggataaacttgtcaaagagagaaaaacaacacagcgcgctttaattgaacagataatccttaatagtaaactcgattga

SEQ ID NO: 81182 - DNA, 243 bp, Citrobacter koseri
atgacaacgaaaacagaatcctttatttccagtaaacccgttaacacttctctcctgaacgatcaacttgttgatatggcatttatcacggagtttaccggtatgacagacaagtggttttataaactcatctctgaagggaaattcccaaaaccgattaagcctggacgtagttctcactggaaagtgagcgaagtggaaatctggatgcaggagagcgttatggaatcaggagggaagtga

SEQ ID NO: 81183 - DNA, 615 bp, Citrobacter koseri
atgatgaatgaaaagaaatataacccgcactatctcgacaaaataacccatgtgattgataaggcactcggagaacatccccggactctggctgtccggattgatttacacttatcacccgactggtatgataacgagatgataacttgctatcctaacctctcagaaaacgtaatggcgcgttttacccgctcactaaaagcgaagattgagcactatcgctacaggattagtaaagaagggaaacgagctcatccgtgtacactgagatatttctgggtaaaagaaataaacgatgcagtgtttccgcattaccatgttgtaatctttctgaacaaagatctgttctggaaactgggtaatgtcactggcgataaacaatgcctctggacaatgatatctgatgcctggttaagcgcattagacgtatccgcttacaacgagtattaccgactggttcatttccctcagcaaggagtatatatcctggactataacagttctgaatatttaatacagttcgataagttgttttcacgattaagttatctggcaaaagagcgtaccaagatttacagcccggataagcgttcaatgggatgcagccagaagtaa

SEQ ID NO: 81184 - DNA, 585 bp, Citrobacter koseri
atgcattatccactttgctttaacacacggtttgaacccttttatcctccctaccaggacaagatcatcgctgtcatcgcacaggctcaaagaacgcatccgcgaacgctggctgtcagactaaaactctggctgtcgctggagacgctgacggagcgccgtcactggttgtctgctgattttatcgacgcgctgcggacctcgctggcgtcttacagcagggagcacaacacgccggaaagtcagctcagctatctgtggacacgggatgaaagccgaccctgctaccatgcggtgctcttcatgaatcaggacaccttcgacgcggatacagccaggaccagccgtgcagatagtctggatcaactgctcagccgtacctggaggaacgtgcagggtttttccgggctctcaacggcatcaccgttctgtgagagagtcaatgatgtttatctgctggatccgaaccattgtgattaccgggaggaactgaaccggttgatctggcatatcagtgatatggcccgcgatcgtgcccgggtgacaaatccggaagccagagcgctggagagcagtgcctggtag

SEQ ID NO: 81185 - DNA, 237 bp, Citrobacter koseri
atgaccaccacaacgcataccgggagcaccacgcagcagttactccgtgcggaagatccgcttatcgatatgacgttcatcactacatacaccggcatgaccgacaagtggttttataaactaataagcgacgggttgtttccgaaacccgtcaaacttggccgcagttcccgctggttcaggagtgaagtggaacactggatgcagcagcgcattgctgattcacgggggacctga

SEQ ID NO: 81186 - DNA, 348 bp, Citrobacter koseri
atggcatccattacatcggtcgggcagactgggggcggcgcatcgccgttgcgcttggcaccgaagctgctcatcattgatgaaataggctatctgccgttcagtcaggaagaggcaaagctgttcttccaggtcatcgctaaacgttacgaaaagagcgcgatgatcctgacatccaatctgccgttcgggcagagggatcagacgttcgccggggatgcagcactgacatcggcgatgctggaccggatcttacaccactcacacgttgttcaaataaaaggagagagctatcgactgaaacagaaacgaaaggccggggttatcgcagaagctaatcctgagtaa

SEQ ID NO: 81187 - DNA, 2421 bp, Citrobacter koseri
atgaaatttacagctatcgtcggaaccacatcaccaaagtcctataaccggacactgcttcaatttatgcaagcgcattttaaagacaaagcagaaattgaattattggaaatcaacgaaatacccatgtttaaccaggacaacccatctaacagcccacagctcctgaaaattaatgaaaaaatcatggcaagtgatggcgtcattcttgcgacgccagaatataaccattctattccctctagcctgaagagcctactggaatggctaagctacgagcttcatcctctggatggcaagccggttatgatcctgggcgcttccattgactctcagggctcatcacgtgctcagttgcatcttcgtcagatattggatgcacccggagtcaatgccaatgttatgcctggatacgaattcttacttggcaatgcccacaaggcctttgatgacaatggtcagctgaacagcgaaggtacaatcgactttttggaaatctgcttcttaaggttcatgcgttttgccaagatctcgaaccaattaaatgaagaagaggatttcgccttcaatcccggcacctatgaagtcaaggccttaggtcatggtggcgaccttccaataaaggtatcctttagcgagaagaaaatcgaaagcattaatattgacaccggcggtgagacagaaggtctagctgacgttgtgtttataaggatccctgacaagatcattgaggggcaaacccttaatgtggatgccctatcaggcgcatctgagacaagtcatgcggttattgatggtgttgccaaagcggttaaactagctggtgttaatcctgatatcttgaaaaggcgtccgaaaccagccagcagtctgaatcgtggcgatgaagagtatacctgtgatgtcgttgtcattggcggcggcggagcaggattaagtgcggcagcaaccgtcttgcaagaaggcaagagtgctatcgtactagaaaaatacccagccgttggaggtaatactatccgtactggtggccctattaatgccgctaaccctgagtggcagagatctttccaggaaaatccgggtgaaagacataccattgaagtcctattaaacacagatgaaagtaatattcacgaagagtatctggctgacttcagagcgctgaaacaggaattcgctgtctaccaaaaacagttcggcgatgaaaaaggttatttatttgattctccgcttcttcacagaatgcagacctatttcggtggcaagcgtacggatctcgaaggaaacaacatctatggtcaatacgatctggttaagatcttaacagacagagctctggagagtattaaatggctcgaggaaattggtgttgagtatcataaagacatcgtctttgcccctgttggtgcactatggcgtcgtgggcataaacccgtcaaaaaatatggtacagcctttattcttgccttaagaaaatatattgaagacatgtttggaaccattattaccgatagcccagcgaaagagctcttaattgaagatggggaaatcaaaggggttattgccgtaggtgttaacggtcagaagattaccattcgttccaaagcagttgttctggccagcggtggttttggtgccaataccaggatgctaaaacaatacaatacatactggagccacattgctgacgatattaagacaacgaactcctacgcaatgacaggtgacggaatccttctgggtcaatccgtgggtgccggattaacggggatgggtttcactcagttgatgccagtagcagaccctaatacgggcgagctctttagtgggcttcaggtaccgccagagaacttcgtgattgtgaataaacaagggaaacgttttgtcaatgaattcgccggccgagacgtattgacaaaagctgcactggcagaaggtggcctcttttatctgattgctgatgatgagataaagaaaaccgccgccaatacaagtcaggagaaaattgatcgtcaagttgaagagggtactctctttagagccgatactcttgaagcgttggctgttaaagttggaatggatcccgctgtgctagtggatacagttgacaagtataatagctatgtagagtcaggtatcgaccctgaattccacaaggacacctttagcttgaaggtcgaaaaagcacctttctatgcaaccccgagacagccagccgttcaccatacgatgggcggacttaagatcgatacagccactcgggttctggatgaaaataaccaccctatcaataacttatatgcggctggtgaagtagcgggggggatccatgcaggtaaccgcttagggggaaatgcactggcagatatctttacttttggccgcattgctgggaaaactgcggttgacgaaatgaactaa

SEQ ID NO: 81188 - DNA, 609 bp, Citrobacter koseri
atgaactatttagcaattgttggcaccaattccaatgtgtcaacaaaccgcatgttactgcaattcatgaaggcacattttgaaaaagaagtccagatagaactttttgagatcaaagaattacctgctttttatgaagcagaagatgaccaggtgcctcaagaagttgaagcattgtccactaaaatccgtcaggctgatggcgttattattgctaccccggagtacgatcacgcgattcccgcggttttaaagaacgctctggaatggatcagctatacaagtcaggctctcactgataagccagccttgattgtgggcgcttcccatggcgcattaggctcttctcgcgcgcagggacaccttcgccaaattcttgattctcctgaattggccgcacgaattatgcccagcagcgaattccttctgggaaaatcacaaaccgcctttaatgctgggggcgcgttgctctatgaagacaagctggctgaacttgatgagatttttagagaatttgttctgtttaccgagcttattgtaaagctcatatcagagagggctgcgccccaaaaagataaaaaattcgcatggcagactcaggaggcataa

SEQ ID NO: 81189 - DNA, 957 bp, Citrobacter koseri
atgtcaacatacaaacgtcaaaatattttacattatattgactctttgctttatttcagcaattacagcaaggctgctgaattccttaatatatctcaaccttatttaacacaggtcattaagcgtattgaaaatgagctgaattgtcagattatcaaccgcagtaagttgccctaccgtttaacagaaccgggcaagatttactatgattatctaagttcactcgaggcagtttacgtcaatatgcgcaggaaaataactacgataacggacacggataagacggccataaaaattggtatcttagccagtatcggtacctaccttatcccactttttttacccaagtttctagctatctatcccgaatgtcaaatagagctggtggaagacataccgggaaacaatgagcaaagactgttaaagagtgaggtggacttttggattgggcagaattcaagcagcattgcgccggcgctttgtgcagtttcttggggaaaacatagatattatgccgtaatacccagatcttgtgagttatatcaaaaagacacagccaccattgcacaaggcagtattgcgatggaagaccttttgcggcaaaggcttgtgctaacatccaaaggttcagccattagaatgcaagtcgatcacttgttgggcatttataaaataaaggccaatatcattctggaaagcagtgaaatagatactgtgaaaaatcttgccatggccgacgtgggcttgacctttgtccctgaaagtttggcattagagccttgccccgcgaaatacaacatttatgaactgcctattgatcaattgaacttagattacttcatcgctcatagtagaaagagaggactgtccgccatcgataaaggcctacttgatgcatttctgcgttataaagataccgaacagtactcctactaccatgaagagaagaataaatga

SEQ ID NO: 81190 - DNA, 942 bp, Citrobacter koseri
atgactgacgccaataaagtgatagacctcatgggaaccaagattcgtctttattttaaggggtatcaggctgaaaagtgtctaacggaagcgagtgcgatgttaaggcattatgagcacatctttagcgccaacagggagcaatctcaattgtctgctctgaaaacaaaagcagcccgtgaaccggtcgctgtagatccggatttgtatgaattaatcaaggtaggcagagcgcatagtcttgaacccaatagttttttaaacattgccattggccctttgattaagctttggcgtattggctttaaagaagcgaggattcccagcaaagaagagatcagccaggccctggagcgcttaaatcctgccaatattgtcttggacgatgagaaaaattcggtgttttttgctaaagaaggtcttgaaatagatttgggtgccattgcaaaagggtatttcagtgacaagatcatggatttcttcaaagaaaaggagccgcattctgccatgattgatattggcggaaacctgcttgtttatggagaatcgccaaagaaaagcttggattgggatgttggtatacagcacccttttctaccaagaggccacagcgtcgccaagataaagatcagaaatcagtcagtcgtgacttcaggtatctatgaaagaacctttgagcacaatggaaataagtaccatcacattttcgatagtcacagcggctaccctgccgataacaatgtggcatccctaacaattatctctgataaatcattggattgcgacatctatactacgaaactgtttggattggaaccgagaaaaattttagttgaagtcaataaaatagaagggatggaagccattgtgattaccgttgatgggcaactcgccattactgataaacttaaggataagataacgattgcatcgcagacatag

SEQ ID NO: 81191 - DNA, 1083 bp, Citrobacter koseri
atgacaaaggcaaaactcgttcatttatcgcctgtcgttggtggcgttgatacgcataaagatttacatgttgctgctgtggttgatcaaaataatcgggtcttaggtagtgagtttttcacgacaacacgtcagggataccgtcagatgctggcctggatagcatctttcggaactgttaaacgcatcggagttgaatgcacaggttcctacggtgcaggtttattgcgttatctccagagtaccggagtggaagttctggaggtcacagcaccagataaaatggaacgccgtaagcgaggtaaaagcgataccatcgatgcagaaagtgctgctcacgcagctttttcacgcatacgaaccgtcacaccaaaaactcgtagcggaatgattgaagagttgcgtgtcctgaaagtctgctgcaaaacggctgttgctgcgcgacgtattgcacttcaaatgatccagatgaatatcgtttctgccccggatgagctacgtgaccagatacgtcacctcacgaggatgcagttgatccgtaccctggcttcgtggcggcccgacgttaccgcctatcgtaatgtccaggatgcttaccgtattgcgctgaaatccctggctcgcagatatcttgaactgcatgatgaaatagcagatctggacatcatgataacgtcaatagtcgatgaactggccccggaacttatcaaatgtaaagcagtggggtatgaatgtgcttcgcaactgttgattacggctggcgataatcctcagcgtctgaactcggagtctggcttcgcggctctatgtggcgtcagtcctgttccagtctcttccgggaaaacaaaccgtcacaggcttaaccgtggtggtgatcgtgcggccaatagtgccctgcacattattgccattggccgattacgcacggacacgagaacacaggagtatgtggcaaaacgggtagctgaaggacactcgaaaatggaagcactgcgttgccttaaacgttatatctcacgtgaagtctacacgcttctacgtaatcaaaaccgactaatcaacagtactcaaataacaacttga

SEQ ID NO: 81192 - DNA, 231 bp, Citrobacter koseri
atgagccgtcgcggtaactgtcacgataatgcggttgcagggagctttttccagctactgaaacgcgaacggataaagaaaaagatttacggaacgcgtaaagaagcccgtagcgatatttttgattatatcgaaatgttttataacagtatgcgtcggtatggctcgagcgatcagatgtcaccggctgaatatgaaaaccagtattatcaacggatcgcaagtgtctag

SEQ ID NO: 81193 - DNA, 813 bp, Citrobacter koseri
atgctgatcacgcgagaggatttacgcaactggcgggttggtgcggtgatgtaccgctggtttctgcgccgttttcctgagggcggcaactacgccgatgtccatcgggcgttgagtcgcgaaggttatctcgactgggcgaacagcctggtggaatacgcctggtcgcgctggctgaatgaagaaaatttcgcccgccaggatatctccgccatgtcgcgactggcgcggccggatgcgtcgctgggcgatcagcaggtggcgaatgcgggtgataacgcgaatctgggctgtgcgggtgataacatgaagatcgccagctcaggctatgcgtcacaaattgccagtgcgggctactgcgtgcgcattggcagcgttggctataacagccatatcagcagttccggggatcgcgcgcgactggctgccgcaggaaactcgacgcgaatcagtagcgccggtaacggaacgcggatcgccagctgcgggatgcgtgtgcgggtgagttcgctgggtgaaagaaaccatgtcgccagtaacggcgacctgagccagatagtgagctttggcgcaaatgcgaaaatcgccaacagcggcgataatgtgcatatcatctgcaacggcgacaacgcgatcgttgccagtaccggggttgtggatttcatcgtgctgggaccgggcggcggctgcgcggcgctggcgtatcacgacggtgaacgcatgcgattcgccgtcgcggttgaaggtgaagcggggatccgcgccggcgtgaaataccgactcgacgacgcgcaccagtttgttgagtgctga

SEQ ID NO: 81194 - DNA, 786 bp, Citrobacter koseri
atgaacgcgtcgcagaatgctgaacagttccaggcccaactggcaaattatgtgccggtcttttcccccgagtattggcccgtctggctggtgatcgccggacttctgctggtggcgatggggctggtgcagggggtacacgcctggcttcgctttcgcgcggccaacaaggccgccgccgggcatggtgagaaggtttacctgtattctcgtgcggtacgcctgtggcactggtcgaatgccttgctgtttctgctcctgctcggcagcgggcttatcaaccatttctcgctggtcagcgcagcggtgatcaaaagcctgctgacggtgcacgaagtctgcggatttttgctgctggcgtgctgggtcggtttcgtgctgatcaatgcgttgggcgggaacggtcatcattatattatccgtccccagggctgggtggcgcgagcgatgaaacagacccgtttctatctgtttggcattatgcagggggaagcgcatccgttcccggcaatgccgcgttcgaagtttaatccgttacagcaggcggcctatgtcggtgtgatgtacggattgttgccattgctgctgctgagcggattgttggcgctctatccgcaggtcgtgggcgacgtattccccggcgtacgctactggttgctgcaggcacatttcgcgctggcaatcatcagtctgttctttatttttggtcacctctacctgtgcaccacgggccgcacgcctggcgagacgttccgctgcatggtcgacggttatcaccggcattaa

SEQ ID NO: 81195 - DNA, 258 bp, Citrobacter koseri
gtgcgctacctgaatccgatcaccaaagtggcggacaaatgcgatttttgcgcccagtcccggctggcaaaaggttttccgcccatttgcgtgacctcctgcccggaacatgcgctgctgtttggtcgcgaagacagcccggacatccagcgttggctacaggaaaataactattaccagtatcaacttccgggggcgggtcagccccatctgtatcgtcggttcggtcaacatttgattaaaaaggataatgtatga

SEQ ID NO: 81196 - DNA, 288 bp, Citrobacter koseri
atgtccttcactcgacgaaaatttgtgcttggcatgggaacggtcattttcttcagcggacccggccagacgctgctgacgaagacaacagccagcgaccccgttcgttacgtcatgatccatgatgaatcgcgatgtaatggctgtaacatctgtacccgtgcctgtcgcaaaacgaatcatgttcccgcgcagggaagtcgcctgtcgattgcgcatattcccgtttcagataataacaacgagacgctgtatcactacttccgccagtcctgtcagcactgctga

SEQ ID NO: 81197 - DNA, 651 bp, Citrobacter koseri
atgagccatccagaggatatgagtcaacccgctatgccctacgtcgatctcgaaaagcggcagtggctgcaggggcgacatgagccggtagcctgcgcggatgaacaggcggtggcagaaagtcccgctgagattatggcggattttatccgccagcattcggcgaacggccagctcgtcgcgcgcgaactgttcctgcagccgccttattcggtggacgaggcggagctcacacctctactagaaacgctcagagaggggcttgccggggatgatatcgcccgggtgcagggctctcaggatgaatattactactcaacccggaccatgaccgccaactatgccgacatgtgcgttcaggtggtggagaaggatacctgtcgggcaatcgcacaggcagtgcgctttgactgccagacctatccacatccgtacaaggtcgccatgctcgaacaatcgccttacggtttcgcgcctgagcagatagacgccgcactggccgcgattgaaacgcatcccgactatgccgatattcgcccggtctcgtcgtcgaccgacgtgccctatttattcagcgaacgctttatgagttacggcaaagcatacggtttgtgcgaatggctggaagttgagcagtttcagaatccctga

SEQ ID NO: 81198 - DNA, 342 bp, Citrobacter koseri
gtgaccggtgatgaaaccactcaggccagtctcgatttagccgcagaacgcatcttcacgctacatcgcgcctacacggtgaaactgatgcagaacaacgatatgcgcaatgcgcacgacctgatctgttcgtgggtatttgataaggatccgaagattccggtctttagcgaaggtaccgacaagatggaccgcgacgacatgcgtgaatctctgacgctgttttatgaagagatgggctggcaccctgagttgggctgcccgactcgcgagacgttgaatcgactcggcctggaagatgtcgctgacgatctggccgcgcagaatctgttaccggcttaa

SEQ ID NO: 81199 - DNA, 858 bp, Citrobacter koseri
atggttaatgagatggtccccaccccctgtgagcagtacccttgcagggtgtttttctttctggagaaggccatcatgcaaaacattacgcttattggtatcgatctcggcaagcattcctttcacatccactgccaggataagtcaggcaaggcattgctgcgtaaaaagtttacccgcaccaaacttattgagtttctggcaggctgcgcatcgtctactgttgtgatggaagcatgcgccggagcccattttatggctcgccggattgctgatttaggccatgacgcaaaattgatttctccgcagttcgttcgcccttttgttaagagcaacaagaacgattttgtcgatgcagaggccatatgtgaagcggcatctcgtccctccatgcgatttgtgcaaccaagaacagaagctcagcaggccatgcgggcgcttcatcgggtcagggaatcactggtcagagataaagtcaaaacgaccaatcagatgcatgcttttttgctggaatttggcatcagtatgccgacaggagtcgtagtggtaaaacgactttcaacagtacttgcagagaacgaacttcctccctatctggtgcagttactgatgcgcttaccactccagcgggaagtggccgcggaactgtttggctcaccagacgcctatgatgaaaccaaaaattacacgccaatcaacgcggcaaaaattaaatatgccaaatggacgctgctgaaagtgtgcctgcataacgccgtcacgctgtgtaactgggtctggccgatgaccgtgtcgccgctgaaaagtcgcaactatgcggggatctcgatctggaagcgaagttcttccaggccgtga

SEQ ID NO: 81200 - DNA, 390 bp, Citrobacter koseri
atggcccgtcggtcgaagaactggcaggatcgtcgacgcaagcgcaagtctgatgatactgaagcgctggaccgtatctatagtgttatcggcgatctgccaacgtatggttatcgtcgggtatgggcactgctgcgtagacaatcagaaactgacgacatggcggtgatcaatgccaaacgagtgtaccgaatcatgcgtcagaatgcgctgctgctcgagcggaaacctgcaataccgccctcgaaacgggcgaatacaggaaaagtggcggttaatgaaagtaaccagagatggtgctctgacgggttcgagttccgctgtgacaatggcgaaaaactgcgagtcgcgttcgcgctggactgctgcgatcgtgaagcactgcactag

SEQ ID NO: 81201 - DNA, 381 bp, Citrobacter koseri
atgctgggagctgtggagcgtcgcttcggcagcggccttcctgcgtcgccagtggagtggttgacggataacggttcagcgtaccgctctcgtcagacgcgtcagttcgcgagaatggtaggactggagcctaaacatacggcggtacgcagtcaggaaagcaacgggatggcagagatcttcgtgaaaacgatgaagcgcgactacatcagtattatgccgaaaccagacgggttaacggcagcaaaaaaccttgaggaagcgttcgaacactataacgaatggcatccgcatagtgcgcttggttatcgctcgccacgggaatatctgcggcgtcggaccagcactgggttaagtgataaaaagtgtatggaaatatag

SEQ ID NO: 81202 - DNA, 1179 bp, Citrobacter koseri
atgccagaaaaattccaccaaggaaccgaggccatctggggcggagagcaggatgcctttgcagaaggagcgatttgcgttccggtttttaattctgtgaccttcaattatgatgatatggatgaatggttcgcggtcgcccagggaaaaaaagaaggccatatttattcccgaaataccaacccgaccgtcagaccactggaggaaaaaattgccctgcttgatggcggcgaggatgcaaccagtttttccaccggcatggcggcgatcagtaacaccttattcgccctgttaaagtcgcacgatcgtctcatcgctattaaagacacctacggcggcagcaataaaatttttattgagtttcttccccgccaggatattgatgtttgcctgtgcgataccacggacttttctgctattgaggaagaaataaaaaaaggctgcaaggttctgtatctcgaatcaccgactaacccgacgctaaaaattgttgatatccagcgtctggcgcaagttgctcatcagcaaggggcgattgttattgtcgacaacaccttctcgacgccgatcaatcaacgtccgttgacccttggcgccgatttagtcgtttacagcgccacgaaatatctgaatggccattcggatgtcatgggcgggctggtggtcggcaaaaaatcgctgatccgcaccatctttcattatcgggaaattaccggtgccacgctccacgcccattcggcctatatgatcctgcgcggcatgaaaacgctggaattacgtatgcagagacataacgaaaacggcatgaagatcgccagctggctgtcggcgcatccgaaagtcgaacaggtcttttatcctggactgccgacgcacccgcattatgatatcgcgaaaaagcagatgcgcggttttggcgggatgatgagcttctctcttaaagggggatttcccgccgtgattaccgttctggaaaacatgaagctggctcataaagccgccagtcttggctcggttggcacgctggttggccctccctgtacaaccagtcacgtggaattaacggccgaggaacgggctaacgcaggcattcccgagggattgatccgctattccgccgggattgaaaatctcgaagacttgattgaggatctgcgtcaggcactggatcgggtttag

SEQ ID NO: 81203 - DNA, 999 bp, Citrobacter koseri
atgttagcgaaaaatccaatctcttcgaccatcgattttgctgctgatggggttcatcatggttacttaaagctgccctactcctgtgattcatcagcctggggggcgattatgatccctgtcaccgttatcaaaaacggcaacggcagaacggcattattgaccggggcgaatcatggcgatgaatatgaaggcccggtagccttgagcaagttgaccagtacaattaacgttgctgatgttcatggtcggatcattattgtgccatttatgaatactccggcgtttatggctggcacccgcacatcgccgattgaccatggcaatatgaaccgcagtttccccggcgcccctgacgggacggtaacgcaaaaaattgccgactatttccagcgtacgttattaccgctgtcggatattgtcgttgatatccactccggtgggaaaacgctcgattttctgccgttcgctgccagccatattctgcagaataaagtgctgcagcaagaaaccgagcaattggttgcggctttttccgctccttattcggtacagatgctggaactggactctgtggggatgtttgacaccgcagttgaagccgccgggaaactctttgtcaccaccgaactgggcggcggcggttccagttccgcgaaaagcatcgccatcgccgaacgcggcgtgactaatgttctgattcgcgccggtattctcgatggcgaattacagttatctaccagcatatgtttaacacagcaaaatagtgactgttttattacctgtgagcacgatggcctgtttgaaatttgttatgatcttggcgccatggtcaataaaggcgatatcgttgcccgcgtccatgatatgaaacgtaccggcgtcaagccgacagaatatgctgcaaaatgttcaggaatcgtcaccgccagacatttccccggggtgatccatagtggcgacaatatgttagtgatcagtgaagtcgttaacgcatga

SEQ ID NO: 81204 - DNA, 1188 bp, Citrobacter koseri
atggcggcagcgaatacccatcttccttttaccagtgaagaatatcaattgcgcttatccaaaacccgtacggcgatgcaggagaaaggcattgaactcctgctggtgaccgacccatcgaatatggcctggctcaccggctatgacggatggagtttctacgtccaccagtgcgtcattctgccgatggatggagatccctattggttcggacgcgcccaggatgttaatggggcaaaacgtaccgtcttcatgcaggaagaaaacctgattggctatcccgatttctatgtccagtcgccgattcgccacccgatggattacctggctaaagacgttatccaggcccatggctgggaaaacatggctatcggcgtggaaatggataactactatttcagcgctaaagccttctcctccctgcagacgcatttgccgactgcccgctttattgatgcgacggtgctggtcaactggcagcgagccattaaatcagcacaggaaatagaatacatgcggatcgccgcccgtattgtcgagaatatacataaccggatttatgagcgcatcgagccaggtatgcgtaaatgcgaccttgtcgcggaaatctatgacagcgggatccgcggcgttgacaatttcggcggcgactatccggctatcgtcccgctattaccatcgggaaaagatgccgctgccccgcatctgacctgggatgactcgccgttacagaataataccagcaccttttttgagattgccggctgttataagcgttaccactgtccgatgtcgcgaacgatctatctaggtaagccgccgcagtttttccttgatgccgaaaaagcgattctggaaggaaccgaacgcgcgcttgatgtcgcccggccaggcaataccaccggcgatattgcgcgaaccttcttcgccatcttagagaaatatggcatccataaagataaccgttgtggttatcccatcgggattagctaccccccggactggggcgagagaaccatgagtctgcgcaccgatgatcataccgaactgcaggcgggaatgacttttcattttatgaccgggctgtggatggatagctggggattagaaattaccgaaagtatcttaattaccaataccggcgtcgagactttttgtcattatcccagaaaattatttgttaaataa

SEQ ID NO: 81205 - DNA, 1410 bp, Citrobacter koseri
atgaaatcatggggtacggcactcaacaaaattcgtccgggcgagttcaaattcaaggtgcttgtcgacacgattattcatgagattgagacggggaaactggtcgacggacaacgtcttcccccgcaaagaaaagtggcagatgatctgaatatcggtattcagacagtgacgaatgtctataaggaattgaaaagaaaaggattaataagaggggaaacaggaagaggcagttttgtgacccggcgagctaccgataatgtcaattacgatattttggatcaacaacagcaaaccatgctggacttctcgaatgcctgtcttatccgcaacgcggaacaggaaaaagcctggcaggagacctgtctgaaactcagtcaggaaccgtctcaaccctggatccacgcgtttagaccgatagctggtcttgaatcccatcgccaggccgccgcccactggttaaaagagaaaacgggccttgacgcagaaaccaaatccattctcatcaccaacggctgcgccgaagctatcaatctggcgctgtcatcgctggcgggaccgaacgatctcgtcctgtgcgaaaagctgaccgatcatggcgtgatcggcctgtcacaagtgttggggtttaaattaaaaggtctggagatcgatcaacacggcattattcccgaccattttgaagaattgtgcgacgatcaaaaggtcaccgctctggtatgcactcccaacctgaacaaccctaccggggcgataatgccggagcaccgcaggcgacagattgccgaaatcgctgcgcgttaccatgtttatattatcgaagacgacgtctacggcgcgctattaagccaacagcaacgtccccgaccgatcgcttcctgggcgcccgatctgaccttctactgcaccagttttaccaaaaccgtgctcaccggtttacgcattggctacctcataatgccaccgagactggcattacgtaccgagagcatactgcgggtaaccagctggatggcctcgccgatactcgccgaaatcgcttcgcgctgggtcatggacggtacagccagccatctgattgaaatacaaaaaaaactcatcagaaaacggcaagaactggtgaaaaaatattttgataactacttatccggcggcaaccgtcaggcattaagttgctggctcaacattcctgaacactggcagcccgacaatctcacaacggagctaagaaaaaggcacattgccgtctcttcttcatcgcctttttctaccgataagacagccataacccatgccatccgggtttgcatcggcgcagattgcaacgacgcgcaatttgagcaggggctgttgacgatttatgacctgttaaaccagtacccacagatacaacctaccgatgttgtataa

SEQ ID NO: 81206 - DNA, 855 bp, Citrobacter koseri
atgaaaaaatggcgtaatatgacacaacggaccgcctgggggattggggcgctggccttattggtcaacttttcctgtcacgcggatacggcgctggagaagctaaataaaacaggtgaaatttcgattggttattccaatgaggagccatttgcctatgcggacgcctcagggaaggttaccggagagtcgccggaaatcgcgaggatcattttcaaaaaactgggcgtcaaaaaagtcaatgccgtgctgacggaatggggtgcgctgatcccgggcttgcaggccggccgtttcgatgtaattgccgccgggatgtacatcaccccggaacgctgtaaacaggtattgtttaccgatccgcaatatcagctcagcgacagtttattggttaaggccggcaatccccaaaaattgcacagctacgccgattttgcgaaaaattccgccttacgtcttgctgtgacctccggcacggttgaactgaaatatgcccgcgatagcggcattcccgacgatcagattatccaggtacctaataccatcgcgcaattacaggcggtcagagccggcagggcggatgcggcggtcgggacagcattgaccatgcgagatctggcgaaaaaaggggggggtggtgttgaggcaattagcgatttcgtcgatgacccgtctcataccggctatggcgcgctggcgttccgtccgcaggacaaagggttaagggataaagtgaatgccgaactgaaaaagtggctgggttcagaagagcatctgcgtacgattgcgccatttggttttgataaaagcaacattacccataaaactgccgctgaaatttgtagaggtgcataa

SEQ ID NO: 81207 - DNA, 660 bp, Citrobacter koseri
atgcgtgaattattgcctttgctatgggatggcacgttagtcactttgcaaatcaccgtgctgggatcgctactggcgatggtggtggcgctggttgcggcattaggcaaactctcccgctggactggagtgaagtggattgctattgggtttatcgagctgtttcgcgggacgtctttgttggtccagttgttctggctgttttatgttttaccgctgccgccgtttaatatcaccttgacgccgtatgtggtagctgtgattggtctcggtttgcatattggcgcgtacggtgcggaaattctccgcggggcgatcctttctgtccccaaaggtcagacagaggcggcattatcgctgaatatttccccgctaaagtgctttacccatgtcatcttaccgcaggcgatcgtccatgcgatcccgcccggtaccaatctgttgattgagttattaaaaaatacatctctggtttcattaattacgctgtcagatctcacttttcgcgccgggcagctcgatcaatttaccggcaatactctggagattatgggcttgaccctcctgttctattttgtgatggcgcaaatgctggtggcggtgatgcgattgattgagcgccggtttcatcgtggacgtcaaaagaggagcgcggcatga

SEQ ID NO: 81208 - DNA, 657 bp, Citrobacter koseri
atgagtttatttgactggcactacgctggcgaaattttccccctcctgatgcagtcgtcgatcaagacgatctttatcactgtggttggttatgcaatcgctttagtgatcggcttattgctggcgatggcccggcgtagtccctcccgctggctggctcacccggcaacatggttgattgaatttattcgcagcacaccgttattaatccaggtctattttatattctatgtgctgccgaactatggttttaatatatccgcgacccaggccgggatttttggtatcgctctgcattatgcctgttataccgcagaagtttaccgttcaggatttaatagtatcccgcaaggtcagtgggaggcgatcaaagcgttgaatatacctggccgcgcggcatatttcgatattattttcccacaggttatcaggccgatggtgccggcattgggaaactattttattgctatgtttaaagataccccggtgttatctgcgataacagtagtggaaattatgcaggaagctaaaaatatcggttcagagcattttcgctacctcgaaccgatcaccctggtgggctgtttcttcctgactattagtattgttctggcaattctgtttaataaaatagaaaaaaagattgccttaccatga

SEQ ID NO: 81209 - DNA, 783 bp, Citrobacter koseri
atgaatgttcaacaacagaccaacggccagccgttagttcgctttaatcatgttgataagtactatggcaaactaagggtattgcatgatcttaatctggacatcccggcgttcgaaaaactggcgattattgggccgagtggttccgggaagtcgacggtattacgtacgctaatgactctggagcaaatagactccggcaccattgaggtcgagggagaattattgagtcatgttcatcgcaacggtcatcttattgctgcgccggacaagcatattcgtcagataagaaaaaagattggtatggtttttcagaattttaatttgtttccgcatatgacggtcatgaaaaatgttatcgaagcaccgatcaaagcgttggggttatcgaaagcagaggctgaggaacgcgccgtcagcctgttgcaaatggtgggattgatggataaatcagacttatatccgtcacagctttccggcggtcaacaacagcgggtggcgattgccagggcgctggtcatgcggccgaagatcatgttgtttgatgaggtgacttcggcgcttgatccttcattatgcaatgaagtgttgcaggtgattcgccagttaggcgaacagcataagttgacgatgattatggtgacgcaccagatggggtttattaaagagtttgccgaccgggtgtgttttttctgtcatggcaatattctggaacagggcgctcccgctgacatattaaatcatccacaaactgagcgcttgcagcaatttttaaatggttaa

SEQ ID NO: 81210 - DNA, 759 bp, Citrobacter koseri
atgttggtggataatcaggaaaataaattctctattgttgatattcgcaacttacataaacgttttgcggacaatagcgtgctcaacggcgtggatttgcagatctcgcgtggcgaaattgtcaccatcattggacagagtggttcagggaaaagtactttattgcgctgtatcaatggactggagagttatcaatccggcgaactgcgggtggaaagcgaactggtggattgtaccaacaaacgatctctgcaacaattgcgtagtaacgtcggtatgattttccagaattttaatctctttccccatctcactgtggcggaaaatattatgctggcgccgcggttggctaactttttgactaaagaaaaagcgcaacaacaggcctcacggctattacaacgaatgagtctcgtagacaaattcgatgactatcccgagcaactctcgggagggcagaaacagcgcgtggcgattgccagagcattagcgatgaatcctgaaattctattgtgcgatgaaattacttccgccctcgaccctgaactggtcggcgaggttttgtcagtgattgaggaattagctaaagagggaatgacgattattatggtcacccatgagatggcttttgccagaaaaattagtcataaaattgtttttatgcataacggcaaagtgcatgagatgggaagtccggaagggttattcaatcgtccggcgacggttgaactacaacgtttcctgtcgacggtgttttaa

SEQ ID NO: 81211 - DNA, 1020 bp, Citrobacter koseri
atgtcaaataatattccttcagctatgaatattgctgaattttattctgccagagcgcgcatctatccgttggcaacggtgagcccattgatttattcccgcagtttatccgaactgttttctgcggatatttatttaaaatgcgagcaattccaggctacggggtcattcaaaattcgcggcgccgccaacatgatcatttccgctttgaaaaaagatgaggataagctcagaaagtatggcgtggtgaccgcctctaccggtaatcacgggcgggcagtttcttatgtggcgaaaaaactggggatcccggcgacggtctatctttcctcgctggtgccggaaaacaaggtccgtagtattgagcaggagggcagccgggtggtccgcatcggcaacagccaggatgatgccatgcagggagtcaaaagcgcagtggcggaatcagggatgatagaaatcccgccttttgatcatccggcgattattgccggtcagggaacgatcgcgtttgagcttaatgagcaactgaaagatatcgatgatattttttgcggtctttccggcggcgggttgctcagcggtattggtctggcaatgaaatatcttgccgggcaaacgaaaatcgtcggcgtcagcctgtctcatggtgccgccatgtgggaaagcctgcaggccggcaaaccggtgagggttgaagaaacccccagcgtggcggattcgctgggaggcggcattggcacggataatcgctggacgctgccggcggtaaaacgcgtgatggatcagcattttcaggtgagcgaaagtgatatcgccgctgcgctgctgttgctttttgaaaaagagaaaatactcgtcgagggagccgcagcggtggggctggcggcgctcttacaacatcatccggacattagaggccggagaattgtcctgattttaagcggcaacagtatatcaacttgcgcgttgcccgcattaagacaacgggcagcgagcctgcatgaggtattgccatga

SEQ ID NO: 81212 - DNA, 945 bp, Citrobacter koseri
atgaagttatttgaactccctgaaatcgcccatgccgtgaagatcgatcatgctgcaaccgagagtatcgaatatgcgctggcggcgttaggcactggctccgtcattcagccgggcattctttcaatgaattttccgcagcaaaatggtgaagtcgatattaaaaccgcctggatccatggcagtaaaaattttgccgttaaaatcagcaccgggttttttaataatcatacgtatggtctgcctagcctgagtgggataatgatcgtgttcgacgctgaaacgggccgtgcggaggctattctggctgataatggctatctgacggccgtcagaacggcgttatccggccttatcgccgcgaaatatctggcccgtgccgacagcacacgggttgccgtcatcggttccggggaacaggcccggctgcaggtcagagcattaaaactgctatttccgcttgaacaggttaatgtctggtcgcgcaacgatgaccatgctgtggaatatgcgcaggagatgcaggatgcggcccctcaggtacgggcatacgagaagatagaagatgcctgtcgcgatgttgatattattgtcacgaccacgccggcgatcgagccggtgttactggcggagcacgtgagtcgcggcagccatattacggcgatcggatcggataatgaattcaaacgggaaattagtagcgagttgctcactatggtggatatcttttgctgcgacctgcagtcgcaaagcgaaagccatggcgaactgaaatatttcaaaaacagacatcaggaaacaccctggccggtatacgaaattggcaaaatcattgccggggaaatcgcctgccagagaaaaccaacggatatatcattgtgctgcttatccggcactggcgtattagatagcgctattgcggaatatgcgctttcacgactttga

SEQ ID NO: 81213 - DNA, 420 bp, Citrobacter koseri
ttgctgatattgcgcctcgtcggtgttcatattgcagataatcaccgcgcgtttccctttcagcgtacgggtaaccccctcggcctacacgatatgctgggcaacatctctgagatgatgttcaccccgttctatctcaacaaaatcaacagacttcacggccaggctggtggttttgtggttcgcggaggcagcgtcatctcgaatgaatcagagatccgtagcgcgacccgtaaagaaattaactactacgatgaagcccatcctttcaccagcaaaaccaccggcctgcgtctggtgctggtctctccgaccattacatcaacaggccgcgtgaaacagctggagaaaaattgggctagccgggtagcacaggaagatgctgaaggcgatcgtattatcgacttaatcaataagtaa

SEQ ID NO: 81214 - DNA, 582 bp, Citrobacter koseri
atgtgcaatactcattcacctttcttcacagaggactggtttctctcttcattactcaaccagcatatcgacgaaatggttaatcgctattcctgcttactggcattgcgaatggatttattttaccaacgggatactgacagttttatgcaactggatcactgcagacttgaatatgatataagaagccttatgaacgagttcggggcgttaaaagcttctgtgggttatttctgggttatcgaatggacggagaaacacggatatcatgctcatgtcgtgttctggctggatcgtcagaaaacgcagaccacgtatccaggttttgaatggatatcaaaacgatggcgggaaataacgaacagtaacggcggtgtgcaccgatgtgaatatcaggaacattaccctgcggatatcaatatccccgttcgttatgatgactctgccagtattttaaatatccgtcgcgtgcttggctatctggcgaaagaagaacaaaaaaaggaattatgtgaatacagttgtaacgaagtgccccctcgtccagcatccggacgtccgcgtcaacagcctataatctaa

SEQ ID NO: 81215 - DNA, 174 bp, Citrobacter koseri
atggatagtctcaccgttatattcaacttcaacgcccagccactggcgattcgatttatccagagtgacgaatgtcagcacttctgtcctggctacgagtatgagccggcgtggcaactgtcgggatactcagaagagcaggaacagaaaatggaatcgactttcgatacctag

SEQ ID NO: 81216 - DNA, 126 bp, Citrobacter koseri
atgaatctcttttggcgctgcctgaccgccctgctgctgctcatgctgatgtcgatacccgccatttctgacggcattgcgctaggtatcgaaagtcgattccattttctgttcctgctcttctga

SEQ ID NO: 81217 - DNA, 1449 bp, Citrobacter koseri
atgagcgccatagattcccaacttccctcaccgtcggggcaaggccgcgccaccgatgaggtcgaccgtatattatcgcctggcaagctggtcgtactcggtctgcaacatgtgctggtcatgtacgcgggcgcggtcgctgtaccgctgatgattggcgacagactcggcctcagcaaagaagccattgcgctgttaatcagctcggatctattctgctgcgggatcgttaccctgctgcaatgtattggcatcggccgctttatggggattcgcctgcccgtgattatgtcggtgacgtttgccgcggtgacgccgatgattgcgattggcatcaatccggatatcggtctgttgggcatttttggctcaaccattgccgctggcgtgatcaccacactcttagcaccgcttgtcggtcgcctgatgcccttatttccaccgctggtaacgggtgtggtaatcacttcgattggtctgagcattattcaggtgggcgttgactgggctgctggcgggaaaggcaatcctgagtatggaaatccggtctatttagggatttcatttgcggtcttaatctttattttattaatcacccgatttgccaaaggcttcatgtccaacgtcgcggtcctgctggggatcatctttggctttgcgttgtcatggatgatgaatgaagtgaatttgtcaggcctgcacgatgcctcgtggttcgcgattgtcacaccaatggccttcggcacccccgtctttgatccagtgtcgattctgacaatgacggccgtgctaatcattgtgtttattgaatcgatgggcatgtttctggcactcggcgaaatcgtcggtcgcaaactctcatcgcaagatatcattcgcggcctgcgcgtggatggcgtcgggacaatgattggcgggctgttcaacagctttccccatacctcattttcccaaaacgttggcctggtcagcgtcacgcgcgtgcacagtcgatgggtctgcattgcctcaggcgtcatcttaattttgtttgggatggtgccgaaaatggcggttctggtcgcctccattcctcaattcgtcctcggcggcgcaggtctggtgatgtttggcatggtactggcaaccgggattcgcattctctcgcgctgcaattacaccacgaaccgcaacaacctctacattgtggccatcagcctgggggtcgggatgacgccgacgttatcgcatgactttttctctcgcctgccagccgttctccagccgttactacacagcggcatcatgctggccaccttcagcgctgttgtactgaatctgtttttcaatggctaccaccatcataccgggctggtacaggaatccatctccgataaaaacctgaaggtcagaacggtgagaatgtggttgctgatgcgcaagctgaaaaaaaatcagcaggatgaatag

SEQ ID NO: 81218 - DNA, 1368 bp, Citrobacter koseri
atgtctggagatattctgcaaacccccggcgcgtcgaaaccacgcagcgcgctggataattacttcaagattacggcgcgtggcagtaccgtgcgtcaggaaatactggccgggttgaccacctttctggcgatggtctattcagtcattgttgtgcccggaatgttgggaaaagcgggattcccgcccgccgccgtctttgtcgccacctgtctcgtcgcaggcttcggctcgctgttgatggggctgtgggccaacctgccgatggcgatcggctgcgccatttcgctgaccgccttcaccgcattcagcctggtgctagggcaacacatttcgattcctgtcgccctcggcgcggtatttctgatgggggtgatctttaccgccatctcggttaccggggtccggacctggatcctgcgaaacttacccatgggcatcgcgcatggcacagggattggcattgggttgttcctgttactgatcgcggcaaacggcgtcggtatggtgattaaaaacccgctggaagggcttccggtggcactcggcgcatttacctcttttccggttctgatgagtctgctggggctggcggtcatcttcgggctggagaaatgccgggttcccggcgggatcctgctggtgattatcgccatctcgattatcggtttgatatttgaccctgccgtcaaatatcacggtctggtcgccatgcccagcctgagcggtgaagatggtaagtctctgatttttagccttgatatcatgggagccttacagcctgtggtgctgcccagcgtactggcgctggtgatgacggcggtatttgatgccaccggtactatccgcgccgtcgccggacaagcgaatctgctggataaagacaaccagatcatcaacggtggtaaagcgttgaccagcgactccatcagctccgtattctccggactggtgggcgcagcgccggccgccgtctatattgaatccgctgcgggtaccgccgccggaggaaaaacaggactgaccgccaccatcgtcggctgtttgttcctgcttatcctgttcctgtctcctctctcctacctgattccaggctatgcaacggcgcctgcgctgatgtacgtcggtttactgatgctcagtaacgtctcaaaactggatttcgatgacttcatcgatgcgatggccggtctggtgtgcgcggtctttatcgtcctgacctgcaatattgtcaccggcattatgctcggttttgtgacgctggttgttggtcgcgtttttgcccgggaatggcagaagctgaacatcggtaccgtcatcattaccgtcgcgctggtggcgttctacgccggcggatgggctatttaa

SEQ ID NO: 81219 - DNA, 1317 bp, Citrobacter koseri
atgtctggagaacacacgttgaaagcggtgcgcggcagctttattgatgtcacccgcaccgtcgaaaacccggaagagatcgcctcagcgctgcgatttttggaagacggattgctgctgattcgccagggaaaagtcgaatggtttggtgagtgggaagcgggaaaacaccggatccctgacgccatccgtgtccgtgactatcgcggaaaactggtcgtgccgggattcgttgatacgcatatccactacccccagagcgaaatggtcggtgcctatggcgagcagttgctggaatggctgaataagcacaccttcccgaccgaaagacgctatgaggatctggaatacgcgcgcgagatgtcggcttttttcatcaagcaactgttgcgtaacggcaccaccagcgcgctggtttttggcacggtgcatccgcagtccgtggatgcgctatttgaagccgccagccatatcaatatgcgcatgatcgccggcaaagtgatgatggaccgtaacgcgccggattaccttctggacgacgccgagagcagctacctgcaaagtaaggcattgattgagcgctggcataaaaatgggcgcctgctgtatgccattacgccgcgctttgccccgacctcctctccgcagcagatggcgatggcgcagcgtctgcgagaagaatatcccgatacctgggtccatacccatctctgtgaaaacaaagatgaaattgcctgggttaaggcgctctatccggaacatgacggttatctggatgtgtatcaccagtacggactgaccggaaaaaactgcgtcttcgcccactgtgtacatctggaagagaaagagtgggatcgcctgagcgaaacccactccagcatcgccttttgtccgacctcaaacctctacctcggcagcggtttgttcaatctgcaaaaagcctggaggaagaagatcagcgtcggtatggggaccgatatcggcgccggtaccaccttcaacatgctgcaaacgctgaacgaagcctacaaagtggtgcaactacagggttaccgactctcggcatacgaagccttttacctggcgacgctcggcggtgcgaaggcgctgggcctcgacaatctgattggtaactttatgccgggcaaagaggcggattttgtggtgctggaaccgacagcgacgccgctgcaacaactgcgctatgacaactcaacatccctggtcgacaaattgttcgtgatgatgacgctgggcgacgatcgctctatttaccgcacttacgtcgacgggcgtctggtgtacgaacggacctga

SEQ ID NO: 81220 - DNA, 1401 bp, Citrobacter koseri
atgtctgatatatcacgtgcaggctcagatctgatttacgaactggaggatcgccctccctttcatcagtctattatcggcgcgatcacccacctgctggccatctttgtccccatggtcacgcccgcattaattgtcggcaccgcgctacagctgtcagcggaaaccaccgcctatctggtctcaatggcgatgattgcctctggcatcggcacctggctgcaggtcaatcgctatggcatggtcggttccggcttactctcgattcagtcggtcaatttttcgtttgtcacggtgatgattgccctgggcagcgggatgaaaaacgacggattccatgaagagttgatcatgtcatcgctgctcggcgtttcatttgtcggggcatttctggtggtgggatcgtctttcattttgccttacttgcgcagagtcatcactccgaccgtcagcggcattgtggtgctaatgattggcctgagcctgattaaagtcgggatcatcgattttggcggcggctttgcggcgaaaagcagcggcacctacggaaactacgagaacatcggcgtcgggttgctggtgctgatcgtggtgatcggttttaactgctgccgcagtccgttactgagaatgggcggcatcgcgatcgggctgtgtgtgggctatatcgtctctctgtgccttggcatggtggatttcagcagtatgcgcaatctgccgtgggtcaccatcccgaccccttttaagtacggtttccagttcaactttcatcactttctggtggttgggaccatttatctgctcagcgtgctggaagccgtcggcgacattaccgcgaccgcgatggtgtccagacgccccattcagggggatgaataccagtcacgcctgaagggcggcgtactggccgatgggctggtctccgtcattgcctctgcagtgggttcactgccattgacgacctttgcgcaaaacaacggcgttatccagatgaccggcgtcgcctctcgctatatcggccgcaccatcgccgtcatgctggtgctgcttggactgtttccaatgattggcggcttctttaccaccattccttcggcggtgctggggggcgcgatgacgctaatgttctcaatgatcgcaatcgccgggatccgcatcatcatcaccaacgggcttaagcgccgtgaaacgttgattgtcgccacctcgttgggactgggcctgggcgtctcctatgacccggaaattttcaaaatcctgcctgcctcaatttatgtgttggtggaaaaccccatctgcgcgggcggtctgaccgccattctactgaatatcattctccctggaggctaccggcctgaagaagtgctgccgggcatcatctccccggaggaaacggattaa

SEQ ID NO: 81221 - DNA, 2871 bp, Citrobacter koseri
atgatgattcacttcacattgaacggcatggtccgtgaaatgaagattaacccgggcgaaaacgtacagacgctgctgtttaacctgggcatgcactccgtgcgcaacagtgacgacggattcggtttcgccggttcggacgcgattctctacaacggtcgcatcgtcaatgcctcattactgattgccgcacagttggatcacgcggagatccgcaccagcgaatcactcggtaaatggaatgcgttgagcctggtacaacaggcgatggtggatgtcggtgttgtgcagtccggttataacgatccggctgccgcattgatcatcaccgatctgctggaacgtatcgcgattcctgaccgtgaagagattgacgatgcgttgtccggtctgttcagtcgtgatgccggctggcagcaatattatcaggtgatcgaactggcggtggcgcgcaaaaacgatccgcaagcccgtatgactgtcgctcccacgttccgcgacgatctcgcggtgattggtaaaccctggccaaaaaccgatgccgccaaaatggtccaggccaaaccctgctatgtggaagaccgtatcacccctgacgcctgcgtcattaaaatgctgcgcagtccgcacgcccatgcgttgataactcatcttgacgtcagcaaagccgaagcgttgcccggcgtggttcacgtgatcacccaccgcaactgtcccgacatctactatacgcccggcggacaaagtgcgccggaaccctccccgctcgaccgtcgcatgttcggtaagaaactgcgtcacgtcggcgatcgtgttgccgccgtggttgcagagagcgaagagattgcgctggccgcgctcgaactcatcgatgtgaaatatgatgtgcttaagccggtattgtcgattgacgaagccatggcggacgatgcgcccgtcgtacacgatgaaccggtggtgtacgtcgctggcgcgccggagacgctggaagaagacaaccgccatgccgctcaacgtggcgaacacatgatcatcaacttcccgattggttcacgcccgcgaaaaaatatcgccgccagcattcatggtcatatcggcgatatggagaaagggtttgccgaagcggatgtgatcatcgagcgtacttatcactccacacaggcgcagcagtgcccggcagagcctcatatctgctttacccgcatggacggcgatcgcctgatcattcacgcctcaacgcaggtaccgtggcacttgcgccgccaggttgcccgcctcgttggcatgaagcagcataaggtccacgtcattaaggagcgcgtcggcggcggctttggttctaaacaggacatcctgctggaagaagtctgcgcatgggcgacctgcgtgaccggacgcccggtctatttccgctatacccgtgaagaggagtttattgccaatacctcccgtcacgtggcaaaagtcacggtcaaacttggcgcgaagaaagatggtcgcctgacagcggtcaaaatggacttccgcgccaatactggcccttacggtaatcattcattaaccgtgccgagcaacggcccggcgctctcgctaccgctatacccttgcgacaatgtcgatttccaggtcacaacgtactacagcaatatctgcccgacaggggcatatcagggctatggcgcgccgaaaggcacctttgcgatgacaatggcgttagccgagcttgccgaacagctgcaaattgaccaactggagatcatcgaacgcaatcgggttcacgaaggacaggaactgaaaatactcggcgcgatcggtgaagggaaagcgccaacctccgttccctccgcggccagttgcgcactggaagagatcctgcgtcaggggcggaagatgatcgactggtcgtcgcccaaaccacaggacggtgactggcgtaccggtcgtggggtcgccattattatgcagaaatcagggatcccggacatcgatcaggcgaactgtatgatcaaactggagtccgatggcaccttcatcgtccactccggcggcgcagatatcggtactgggctggatacggttgtcactaaactgacggcggaagtactgcactgtgcgccagaagaggtgcatgtcatctccggcgatactgaccatgcgctcttcgacaaaggcgcttacgcctcatccggcacctgcttctcggggaacgcggcgcgtaaagcagcagaaaacctgcgtgaaaaaatcctctttcacggtgcgcagatgctgggcgaacccgttgctgacgttcaactggcgtcacctggcgttgtacgcggcaagcagggcgaagtgagttacgctgagatcgcgcacaaagcggagacgggaaccggttttggcacgctggtcgccacggccagttacatcaccgcagacttcgcattcccgtatggggcgaacttcgccgaggtcgcggtgaacacccgaaccggtgaaatccgtctcgacaagttctacgcgctgctggactgcggcacaccggtcaacccggaactcgcactggggcaaatttacggtgcgtcgatgcgggccatcggccatagcctgagcgaagagatcctctatgatgccgaaggccatccgctgacccgcgatctgcgcagttacggtgcgcccaaaattggcgacatcccccgggattttcgtgccgtgctggtgcctagcgacgataaggttggcccctttggcgctaaatcgatctctgaaattggcgttaacggcgcggcgcctgccattgccaccgccattcatgatgcctgtggcgtatggttacgcgaatggcatttcacaccggagaaaatactgaccgcgctggaaaaaatgtaa

SEQ ID NO: 81222 - DNA, 786 bp, Citrobacter koseri
atgatgatgattgaacaatttttcaggcccgactccgttgaccaggcgctggaactcaagcgccgctatcaggaggacgccgtctggtttgccgggggcagcaaactcaacgcgacgccaacgcgtacccacaagcagattgccatttcactgcaggatctggagctggagtggatcgactgggacaatggcgcattgcgtattggggcgatgactcgcctgcaaccgttgcacgacgcccgctatcttccggcggcactgcgggaggcgatcggctttatctactcccgccatctacgcaaccagtctaccctcggcggcgagattgccgcacaacagcaagagtccgtgttactccccgtcctgctggcgctggacgctcagttggtgtttggtgatggcgaaaccctgtcactggaaagctatctcgccgatccacgcgatcgcctgctcaccgaaattatcattaaagatcccttccgcccttgcgccacccgcaaagtgagccgttcacaggccggattaaccgtcgtgaccgcagcggtcgcgttaacagaacacggtggcatttgcatcgcgctggacggcgtggcggacaaagcactgcgcctgcatgatgtggaaacacaaacgcgcgaagggacggaactggaacaggcggtctcaaacgccatattcccacaggatgatattcggggcagcgcggcctataagcgctatatcaccggcgtggtcgtagccgatctgtatgccgactgtctgatggccggggaggacgttgtatga

SEQ ID NO: 81223 - DNA, 1329 bp, Citrobacter koseri
atgttgattctgaaaaatgtcaccgctgtacaacttcatccggccagcgtgcgtgaaggggtggatattgcgatcgacaaagacgttattgttgaggtgggtgacgccctgacgcagcgctacccgcaggcgcaatggaaagagatgcatggacgaatcgtgatgccggggctggtctgcgcgcataaccacttttactccggtttatcgcgcgggatccaggccaatatcgcccccagtccggactttatctcaacgttgaaaaacctgtggtggcgcctggaccgggctctggacgaagagtcgctctactacagcggactgatttgctcactggaggcgattaagagcggatgttctgcagttatcgatcaccatgcttcacctggctacatacagagttcgctctctacgctgcgttcagcctttttaaaagtcggcctgcgggcaatgacctgctttgaaaccaccgaccgtaacgagggaatcaaagagctacaggcaggcgtcgaagagaatatccgcttcgctcgtcagatagaccatgcacgggagagcggtagcgagccgtatctggtggaagcgcacattggcgcgcatgccccctttaccgtgcctgacgccggtctggagatgctacgcgaggccatcaacgctaccgggcgtgggctgcatatccatgcggcggaagacagttacgatgtctcccacagtcatcatctgtacggtaaagacctgctggtcaggttggcggaacatgggctcatcgaccgtaaaacgctggtcgcacacggcctgtacctgtctgcggaagatatcgcgctgctgaatcagcaagatgccttcctggtacacaatgcccgctccaacatgaataaccatgtgggctataaccaccaccttacccatattcgcaatctggcgctggggacggacggcatcggctccgacatgcttgaagagatgaaatttgccttcttcaaacatcgcgacgcgggcggtcctctgtggcctgacagctttgcgaaagcactggcgaacggcaacgaactgttgcaccgcaacttcggagaaaactttggccaactgcaagccggttataaagccgatttaaccctcctcgactattcgtcgccgacgccgctgatcgctgaaaactttgccgggcatatcgctttcggtctcggttcaggcagcgtgcacagcgtgatggtgaatggcgtgatggtgtatgaagaccgtcagttcactttcgataccgattccatttatgcgcaggcccgaaaagccgccgccaacatgtggcggcgaatggatgcgctggcatag

SEQ ID NO: 81224 - DNA, 3105 bp, Citrobacter koseri
atgggggatataatgcgtccgattccgtttgaggaacttttgacgcgcctatttgatgaatatcagcagcagcgctcgatctttggtattcctgagcagcagttctattcaccggataaaggcaaatcgataagcgtattcggtgaaacctgtgccacccccgtcggccccgccgccggcccgcacactcagcttgcacaaaatatcatcacctcctggctaactggtggtcggtttattgaactcaaaacggtccagattcttgatcggctggagctggcaaaaccctgtattgatgcggaagatgagtgcttcaataccgaatggtcgactgaatttacgctgctgaaagcgtgggatgagtaccttaaagcctggttcgccctgcatttactggagcaactgctgcaaccttcgggagccgataccggtaagtcgttcatttttaatatgagcgtcggctataaccttgacggcatcaagcaaccgcctatgcagcagttcatcgacaacatgatggacgcgtcagcgcatcctaagttcgcacagtatcgtgacacgctacagcagtggctacacgatgagacgttcctggcgcgccacgggttgaacgaacatcgggaacgtctacaggcgttgccggcgcgcattcccgcaaaactggtgcagggcgtcacgctgtccaccatgcacggctgcccgccgcacgaaatcgaagccatctgccgctacatgctggaagaaaaagggctgaatacctttgtgaagctgaatccgacactgctgggctatcctcgggtgcgtgaaattctggacaactgcggcttcggttatgtcggcttaaaagaagagtcatttgagcacgatcttaagcttacccaagcgctggaaatgttgcagcgcctgatggcgctggcaaaagaaaagtcgctgggttttggcgtcaaactcactaacacccttggcaccattaataacaaaggtgcgcttcccggcgaagagatgtatatgtccggccgggcgctgttcccgctctcaatcaacgtggcggccgtgctttcccggacgttcgacggccaattgcccatctcctattccggcggcgccagccagttaaccatccgcgatatctttgacaccggcattcgtccgatcaccatggcgactgacctgttaaaaccaggcggttacctgcgactcagcgcctgtatgcgtgaactggagtcctcggatgcgtggggaatggagcatgtcgatgtcgaacgtctgaatcgactggcggaagaggccgtcacgatggcctacacccagaaacactggaaacctgaagagcgcattgaagtggccgacggcttgccgctgaccgactgctacgtcgccccttgtattacggcctgcgccatcaaacaggacattccggagtatattcgcctgctgggcgagcagcgttatgccgacgcgctggagctgatttatcagcgaaacgccctccccgcaatcaccggtcatatctgcgatcatcagtgccagtacaactgtacccgtctggactatgacagcgccctgaacatccgtgaactgaaaaaagtggcgctggaaaaagggtgggatgaatacaaacagcgctggcacaaacccgcaggctcgggctcacgtcatccggttgcgatcatcggcgcgggtcctgccgggcttgctgccggttatttccttgcccgggcaggacacccggtgacgctatttgaacgcgaagccaacgcgggcggcgtagtgaaaaatatcattccccagttccgtattccggcagagctcatccagcacgatatcgattttgtcgccgatcatggcgtgaagttcgaatatagctgtgcgccagatctgaccgtacagggcctgaaagatcaggggttccactatgttctgatcgcaaccggtacggataaaaacagcggcgtgaaactcgatggcgacaaccccaacatctggaaatcgcttcccttcctgcgtgaatacaaccagggaactgcattgacgctcggtaagcatgtggcgatcgtcggcgcgggtaacacggcgatggactgcgcccgtgcggcattgcgcgtaccgggtgtggaaaaagtcaccgtggtctaccgtcgttcgctgcaggagatgcccgcctggcgtgaagagtatgaagaggccctgcacgatggggttgagttccgtttcctcaacaatccagaacgctttgatgcggatggcacactcaccctgcgcgtcatgatgctcggggagccggatgagaaaggacgtcgccgtccggtggaaaccgacgaaacgctgactctgcacatcgatagtctgattaccgccattggtgaacagcaggataccgaagcgctgaacgcaatgggtgttccgctggacagcaaaggctggccagaggtgaacaacaatggcgaaacccgcctcactgacgtgttcatgattggcgacgtccagcgtggtccgtcatccattgttgccgccatcggctctgcgcgtcgggccacggataccatcctctggcgggaaaatatccgctcccaccatggtgataagcgctggaataacgttagccccgctgaaatctatcagcgtaaaggcgagattgcggtcgcgagggtcgataaagacgaccgtgacgcctttgtcgcccaggaagcggcccgctgccttgaatgcaactatgtctgcagcaaatgcgtggatgtctgtccgaaccgcgccaatgtgtcaattcccgtgccgggattccagaaccgcttccagacgctgcacctggacgcttactgcaacgaatgcggtaactgcgctcaattctgtccgtggcagggcaagccatataaagacaaagtcacgctctttagcctgccgcaggatttcgacaacagcagcaacccgggtttcctggtggaagacgatcgggtcagagtccggctgaatgaccaaagctgggtgttaaacatcagccatgatgggcagttcgccagcatcccgccggaactggatgatatgtgccgcgtcatcagctatgtccaccagcatcaccattacctgttaggccgcgtggaggtgtaa

SEQ ID NO: 81225 - DNA, 510 bp, Citrobacter koseri
atgatgttaccctggcacgaaggaacaattcttgatgcaagtatcaaaaacgcgctgcaattttgtaacagggtaatattagtttctggttaccgcgcaactgagatacataatcgctatgcgaatcagcccaatatcattattacgtacaatccggattatgctcagggcttatttacgtcaattaaggtgggcgctgtcgccgtgcacagcgagcactgcttcatcacgcacggtgacatgcctgaactgaacagcgatatttttcgtaaaatctgggctttacgcaacgataacgcacttatcccttgctatcagagccagcctggtcatcctatattactttcccaaaaatgcctgttgcaggctatctcacaaccggatgtcagcagtatgcgtcaggcattgctgcgcggaaaacataatatcattgaaataaacgatgcccgaatcactctggatattgatactccagaggattttatcaatgcgcaacgtcgacacagataa

SEQ ID NO: 81226 - DNA, 768 bp, Citrobacter koseri
atgagtatatcggggcatgcttctttattctttgatttaggtgcacagaaacggccaacggttatttcaattgtcggtgctggtgggaaaaccagtactcttttctggcttgctcatctctttcaattatcaggtcgacgggtatttatcaccacgacgacgcatatgtttctgcctgaccaggcctggccgacccttttctgtcgggagcccgccgggctgccgtatcaggtgttaatgcaacccatcataacctgctttcggtcgtggaaagcgccattgggaaaagcgcgtggtttctcacccgacgccatcgatgctctggccaggcgttcggaatgtgacgtggttctcgtcgaggcagatggcgcccgtggaatgccgcttaaagcgccagatgagcacgaaccttgcatacctgaaagcagttgctgcgtgattgccgttatgggtggacaccttctggggaaaagtgtgggggcagagcaggtacatcgctggccgcagttcgccgggataacaggcctgacggagggatcccccttatcgctgaaggcgcttatccgcctggttcagcacccacagggggctttcaaaaatgccccgccagccagtcgacgcgtctggtttctcaatcgtttttctcaatctgagaatgccattgatgaacgcgagctcatccagccgttatcagacggtgatgtgcaggctatctggctggggaatgcactggaaacgcctgcaatcgcgcgcagatttgtgagatag

SEQ ID NO: 81227 - DNA, 1626 bp, Citrobacter koseri
atgaatattttcacagaggctgcaaaacttgaagagcaaaaccgcccatttgcgctggcgcagattgtcgatagccggggttccacgccccgccattcggcacagatgctggtacatcaggatgggtctatcgtcgggactatcggcggtggcatggtggagcgcaaggtgatcgccgaggcgctgctggcgttacaggagagaaagccgcgtatgtttcatggccggatggcccgcaacggcgctgatgccgtcggctcggactgcggcggcgcaatgtcggtctttattagcgtacacggcctgcgcccgcgactggtgttaatcggcggcgggcatgtgaaccgggcgattgcccagggggcggcgctgttagggtttgatattgccgtggcggatgtttatcgcgagagtgttaatccggaggctttccctccatcggtacagttgttacatgccgattcttttaccgcagcagtggatgcgctggagatccgtccggacaactttgtgcttatcgcaacgaataatcaggatcgggaagcgctggacaaattgatcgagcaacccgtcgcgtggttgggtttgctggcaagccgccgcaaagtgcagttattcatgcgtcagttgcgggaaaagggtgtcggtgaagagcacattgcccgcctgcatgcgcctgtgggttacaacattggcgccgaaacgccgcaggaaattgcggtcagcgtgctggcggagatcttacaggtcaaaaataatgcgcctggcggactgatgatgcgcgccgcgcatccgtccggccatcagcgcgtggtgattcgcggtgcaggggatattgccagtggcgtagcgctgcgattgttccatgccggtttcaaagtgatcatgctggaagtggaaaaaccgaccgtcattcgccgtagtgtcgcctttgcgcaagccgtctttgatggtgagatgatcgtggaaggcgtgacggcacggctggccacctcgtcggcagaagcggcggcgttagccgaacgcggttttatcccgattctggtcgatcccgcaggttcgttgatcgatgcgctgaaacccgtctgcgtagtggatgcgattctggcgaaacaaaatctgggtacgcgaaaagagatggctcccgtgaccattgcgttggggcctgggtttactgcgggcgaagactgccatgcggtgattgaaacgaatcgtggacactggctggggcaggtgatttacgccggttgcgcgcaggaaaataccgggatacccggcaatatcatggggcataccgcacggcgtgtgatccgtgcgcccgccgcaggcatcatgcgcgccagggtgaaactaggcgatctggtggaagagggggacgtcattgcctggattggggagcatgaaatcaaagcgccgctgtcggggatggtgcgcggcctgctgagcgacggtctggcggtggtgggaggatttaagatcggcgatatcgatccacgcggcgagacggccgattttaccagcgtctccgataaggcgagagcgataggcggcggtgtgctggaggcgctcatgatgctgatgcatcagggcgtgaagtccacgaatgaggtgcttgaagtagcgtaa

SEQ ID NO: 81228 - DNA, 933 bp, Citrobacter koseri
atgaggaagaaaattgttctcgcactgggtggtaacgcgctgggtgaggatctggccggacagatgcaagccgtcaaaatcaccgcgcaggccattgtggatctcattgcgcagggtcatgaggttatcgtgactcacggtaatgggccgcaggtgggtatgattaaccaggcattcgaagccgcggcaaaaacagaggcgcactcgccaatgctgccgatgtccgtctgcgtggcattgagccagggctatatcggttacgatctgcaaaacgcactacgcgaagaattgctctcacgcgggatgcacaaaccggtcgccacgctggtgacgcaggtagaagtcgatgcccacgatcctgcgttcctgaatcccactaaacccatcggttcattcttcacgcagcaggaagctgaacagctggagaaacaaggttatacactcaaagaagatgccggtcgcggttatcgtcgtgttgtggcttcgcctaagccggtggacatcattgagaaagagaccgtcaacgcgctggttgaggccggacaggtggtcattaccgtgggcggagggggaattcccgtgattcgcgaaggcaaccatctgcgtggcgccagtgcggtgatcgacaaggactgggccagcgctcgcctggcagagatgatcgatgcggatatgcttattatcctgacggcggtcgaaaaagtggccattaacttcggtaaagaaaatgagcaatggctggatcgcctgtcgttgagtgatgcggaacgctttatcagcgaggggcatttcgccaaaggttctatgttgccgaaagttgaggccgcagcgtcgttcgctcgctcccgtcccggtcgggaagccctgattacggtgctcagtaaagcgaaagaagggattgagggaaaaactggaactgtgatctgccagtag

SEQ ID NO: 81229 - DNA, 1407 bp, Citrobacter koseri
atgcgtgtattgattaaaaatggcattgtcgttaacgccgacggacaggcaaaacaggacctgctgattgagagcggcattgttcgtcaactggacgcggagattacgccgcccccctcgtgcgaagtgattgacgctgcgggatgctatgtttttcccggcggcgttgatgtacatacgcatttcaatatcgacaccggactcgcccgtagctgtgatgatttttttaccggtacccgcgccgctgcgtgtggcggtacaacaaccattatcgaccatatgggatttggtccgacgggctgtcgcttgcgtcatcaactggaggtctaccaggggtacgccgcgcacaaagcggcgatcgactacagcttccacggcgtcattcagcacgtcaatcatgccatcctcgacgagatcccgatgatggtggaagaaggcatcagcagctttaagctctatctgacctaccagtacaaactcaacgatgatgaaaccttgcaggtgctgcgtcgtttgcacaagtccggcgcgctgaccaccgtccacccggaaaacgacgccgccatcgccagtaaacgggccgaattcattgccgctggcttaacgtcgccacgctatcacgccctgagcagaccgctggaatgtgaagccgaagccatcgcccggatgattaaccttgcgcagatcgcggggaacgcgccgttgtacatcgtccacttatccaacggtctggggctggactatttacgcctggcgaaagcgaatcaccagcccgtgtggatagagacctgtccacaatatctgctgctggatgaacgtcgttatgacggggaagacggcctgaacttcattctcagcccgccgttacgcaatgtacgtgagcaggacaagctctggtgcggtatcagtgacggcgccattgacgtcgtggcgactgaccactgcaccttctcaatggcgcagcgccagcagatctcaggcggcgatttcagccgctgcccgaatggtttgcccggcgtcgaaaaccgcctgcaactgctcttttccgaaggcgtgatgagcgggcgaattacccctgagcgctttgttgcgttaaccagtgcgatgcctgccaggctgttcggtttgtggcctcagaaggggctactggcaccaggctctgatggcgatgtggtgattatcgatcctcgccagagccagacgatccatcatgcccacctgcacgataacgccgattattcgccctgggaggggttccgctgtcagggtgcgattgtcagaacgctgtcgcgtggcgaaacgatcttctgcgatggcgtctttacagggaaagcaggccggggccgcttcttacgacgtaagccgtttaccccacccggcgcttgtgaaacagacaactgtgtatga

SEQ ID NO: 81230 - DNA, 1212 bp, Citrobacter koseri
atggctaagcacattccttttaaactgattcttgaaaaagcaaacgactacaaagaagacatgacgcgtttcctgcgcgacatggtcgccattcccagcgaaagctgcgatgaaaaacgtgttatccatcgcatcaaacaagaaatggagaaagtcggtttcgataaagtcgagatcgatccgatgggtaatattctggggtacatcggccatggtccgcgcctggtcgcaatggacgcgcatatcgacacggtcggtatcggcaacatcaacaactggaatttcgatccctatgaagggatggagaccgacgaactgatcggcggacgcggcacgtctgaccaggaaggcggcatggcgtccatggtttacgccgggaagatcataaaagatctcggcctggaagatgagtacacgctgctggtcaccggtacggtacaggaagaggactgcgatggtctgtgctggcagtacatcatcgagcaatccggtatccgtccggaatttgtcgtcagcaccgaaccgaccgattgccaggtttatcgtggacagcgcggacgcatggaaatacgcattgatgtgcagggagttagctgccacggttccgccccggaacgcggtgataatgccatcttcaaaatgggcccaatcctcaacgagttgcaggaattgtcacaacatctggcctgggatgatttcctcggtaaagggaccttaaccgtttccgaaatcttcttcacctcacccagccgctgcgccgtggcggacagttgcgctgtctctatcgaccgtcgtctgacctggggtgaaacctgggaaggcgcgctggaagagatccgcgccctgccggcagtgaaaaaagccaatgcggtggtctcgatgtacaactatgaccgcccctcctggaccgggctggtttacccgactgaatgctacttcccaacctggaaagtggaagaagatcacttcaccgtcaaagcgctggtcaatgcctatgaaggcctgttcggcaaagcgccggtggtcgacaagtggacgttctccaccaacggcgtatcgattatgggacgtcacggtattccggtgatcggttttggtccgggtaaagaacccgaagcccacgcgccaaacgaaaaaacctggaaatcacatctggtgacctgcgccgcgatgtacgctgccattccactgtcctggctggcaacgaaataa

SEQ ID NO: 81231 - DNA, 1197 bp, Citrobacter koseri
atgtccgttttctcattgaagatcgatattgccgacaatcgcttttataacggtgaaacgtcgccccttttttcgcaaaaacaggccaaagccgctcgtcagtttcatcaaaagatcgctggctaccacccaacgccgctctgtgcgctggatgaccttgcctgcctgttcggcgtgaagaaaattctcgtcaaagatgaatcaaaacgcttcggactgaacgcgttcaagatgctcggcggagcctgggccatcgcctgcctgctgtgcgagaaatatcatcttgatattgagacgctctctttcgagcaactcaaaaacgccatcggcgaaaaaatgacgtttgccaccaccaccgacggtaatcacggtcgcggtattgcctgggcggcacaacagctcggacaacatgcggtgatttacatgccgaaaggctcggcgcaagagcgcgtggacgccattctcaacctcggcgcagagtgcatcgtcaccgacatgaactatgacgataccgtccgtctgaccatgcagcacgcccaacaaaacggctgggaagtggtgcaggacaccgcctgggaaggttacaccaaaatccctacctggattatgcagggctacgccacgctggccgatgaggccgttgagcaaatgcgtgccctgggcgtcacgccgacccacgtgctgttacaggctggcgtgggtgccatggcgggcggcgtgctgggctacctggtcgacgtctatggcccgcaaaacctgcacagcattatcgtcgaacccgacaaagcggactgcatttatcgttccggcgtgaaaggcgacatcgtcaacgtcgggggcgatatggcgaccatcatggccggtctggcctgtggtgaacctaacccgctcggctgggaaattctgcgcaactgcgccacccaatttatctcctgccaggacagcgtcgccgcgctgggcatgcgcgtgctgggtaatccttttggcagcgacccacgcgtgatctccggagagtccggcgccgtagggttgggcgttctggctgccgtccatcatcacccgcagcgccaggccctaatggacaaactggcgttagataaagatgccgttgtgctggtcatcagtactgaaggcgataccgatgtgaagcactaccgagaagtggtctgggaaggcaaacatccggtcgcactgtaa

SEQ ID NO: 81232 - DNA, 1188 bp, Citrobacter koseri
atgaaaactgttaatgagctgataaaggatatcaattcgctgacctcacaccttcacgagaaggattttttgctaacgtgggaacagacgccggatgaactgaaacaagtcctggacgtcgctgctgcgctgaagatgctgcgtgccgaaaacatcgcgaccaaagtcttcaatagtggattagggatttccgttttccgcgataactccacccgtacccgcttctcttatgcgtccgcccttaatctgctcggcctggctcagcaggatctggacgaaggaaaatcacaaatcgcgcacggcgaaaccgtccgcgaaacggccaatatgatctccttctgcgccgacgccattggtattcgcgacgacatgtatcttggtgcgggcaacgcctatatgcgtgaagttggtgccgcgctggatgacggctacaaacagggcgtgctgccgcagcgtccggcgttagttaacctgcaatgcgatatcgaccacccgacgcaggcgatggcggatctggcctggctgcgtgaacattttggttcgctggaaaaccttaagggtaaaaaaatcgccatgacctgggcctactcacccagctacggcaaacccctctccgtgccacaaggtattatcggtctgatgacccgcttcggtatggacgtcaccctggcacatccggaaggatatgacctgattccggacgtgattgaagtggcgaaaaacaacgcgaacgcgtccggcggcagcttccgccaggtcaccagcatggaagaagccttcaaagatgccgacatcgtctatccgaaatcatgggcaccttacaaagtgatggaagagcgtaccgaacttctgcgcgccaatgaccacgcagccctgaaagagctggaaagacagtgccttgagcagaacgcgaagcataaaaactggcactgcactgaagaaatgatgcaactcacccgcgacggcgaagcgctgtatatgcactgtctgccagcggatatcagcggcgtctcctgcaaagaaggggaagtcaccgacgccgtattcgaaaaataccgcatcgcgacgtacaaagaagccagctggaagccctacatcatcgccgcgatgatcctctcccgcaaatatccgaagcctggcgtgctgctggagcagttgttgaaagaagcgcaaccgcgcgtgaaataa

SEQ ID NO: 81233 - DNA, 1779 bp, Citrobacter koseri
atggtgcttgcaacaacgcagtccgttttgatgcagattcaacctacaattcagcgtttcgccagaatgcttgccagcgttttgcaactcgaagttgagatcgtcgatgataacctctgccgcgttgcgggaaccggcgcttacgggaaatacctcggacgcccgttgagcggtaactccagactgttgcgctatgtactggaaagtaaaaaagaaaaagtcgtgacgcattcccgctttgacccgttgtgcgaaggctgtgatagcaaagataattgtcgcgagaaggcttttctgggaacaccggtcattctgcaggaccgctgtgtaggcgtgatcagtttgattgccgtaacgcatgaacagcaggaacatatcaatgacaacctgcgtgagttttcagattatgttcgccatatatccaccatttttgtttcaaaacttcttgaagaccagagtagcagcgacaacatcagtaaaatattttcgacaatgatcgagaatatggatcaaggtgtattggtcattgatgaagataaccgtgtacagttcgcgaatcaaaccgcgttaaaaatttttggcgcggcgcagaataatatggtgggaaagtcggtcaggtttcggccattaacgtttgaaagtaatttcactcacggacatatgcagcatatcgtctcctgggatgataaaagtgaactgatcattggtcagttgcatcatgtgcagggacggcaattattcctgatggccttccatcagtcgcataccagttcctctgtatcgattgccaccgatgaaccgcatattgaacaactggtgggtgaatgccgggtcatgcgccagcttaagcggctgatcggtcgtattgcccccagtccgtccagcgtcatgattgtgggggaaagcggtaccggaaaagaggtggtcgcgcgcgccattcacaaactgagtgaacgacgcaataaaccgtttatcgccatcaactgcgcggcgataccggaaccgttgctggaaagtgaactgtttggctatgtcaaaggcgcatttaccggcgcttccgccaatgggaaaacgggcctgattcaggcggcaaacagtggaacgctatttctcgatgaaattggcgatatgcccctgatgctacaggctaaactgctcagggcaattgaggcgagagaggtgttgccgcttggcgcgagcagtccggttcaggtcgatatccgcattatttccgccaccaatcagaaccttgggcagtttatcgccgaaggcaaattccgcgaagatctgttctatcgactgaacgtcatcccactgaccctgccaccgctacgtgaacgacaggacgatattgaactactggtgcactatttcctgcatctgcatactcgccgtttagggctggtctatccgggaattgcaccggatgtggtgaccctgctcagacaccatcaatggccaggaaatctgcgtgaattaagcaacctgatggaatacctggtcaacgtggttccttctggcgaggtgatcgacagtacgcttttaccgccaaacctgatcaacaacggtaaagcgccagaatccgttggcgcggtcgctcatgcggcgcagttgctgtctgaggacaccggcggaaccgcgctggaagagatggaaaagcagatgattcgcgaagcgctatcccgccactccaacaaaaaacaggtggcggatgagttaggcatcggcattgctacgctttatcgcaagatcaaaaagtatgagctgttgaacgcgtaa

SEQ ID NO: 81234 - DNA, 480 bp, Citrobacter koseri
atgaatgacacgaaccgaatcacgctggaatgcgtcattaatgatcacccttttcagctcagcatcatgccggggatgccgctctctgaactcctgcgtgaacaaggattgctgagtgtcaaacagggatgcggtgtcggtgaatgcggggcctgtacggtgctggttgatggcacggccatcgacagttgcctgtaccttgccgcgtgggcaacaggaaaacagatccgtacactggaaggtgaatcggctggcagtcagctctcgcgtgttcagatggcgtatgcgacatccggcgccgtgcagtgtggcttctgcacgccgggtctgattatggcgaccaccgcattgctggcaaagccgcgggaaaaaccattaaccattctggagatccgtcgcggcctggcgggaaatctgtgccgttgcaccggttatcagatgattgtcgataccgtccagcgctgcacagagcctgaataa

SEQ ID NO: 81235 - DNA, 879 bp, Citrobacter koseri
atgtttgactttgcttcttatcatcgcgcttcagacattgccgaggcgatcagcctgctggcgcgctatccgcaggcgaaactgctcgctggcggaaccgacgtattgatccagctccatcatcataatgcgcgttaccatcatatcgttgatattcatgatctgcccgaattacaaggcattaccctgacgaaggaagaggggctgcgtatcggttccgccaccacctttagcgagattattgagcatcccgtcgcgcaacgacatctgccagccctgtgtgcggcagccacctccatcgccggaccgcaaatccgtaatgtcgccacctacggcgggaatatctgcaatggcgcaaccagcgcagactcggcgacgccaacgctgatttatgacgccacgcttgagatcacctcgccagagggggtgcgttttaccagcatcaacggttttcacaccggccccggaaaagtcgctcttgagcaagatgaaatccttgttgcctttcatttcccagcgcagcccaggacggataccggcagcgcgcattttaaatatgccatgcgcgatgcgatggatatctcgaccattggttgtgcagcacgatgccagttggataacggcagcgtcagagaacttcgcctggcgttcggcgttgcggctcccacacccgtccgctgtcagcatgcggagagcgcggcgcaaaatgcgccattgacccaccagacgctggacgcgatcgccgaatccgttctgcaggatgtcgccccacgctcttcctggcgggcaagtaaggaatttcgtctgcatctcatccagacgatgacccggaaggttgttactgaggccgttgtcgcggccggaggaaaactgcaatga

SEQ ID NO: 81236 - DNA, 2298 bp, Citrobacter koseri
atggatgcacgggaagcaaccgctaccggtgagtcatgtatgcgcgtggatgccattgctaaagtgaccgggcgggctcgatatactgatgattacatgatggctggcatgtgttatgccaaatacgttcgcagcccgattgcccatggttacgccaccagcatcaactgtgacgaggcgaaaagcctgcccggggtactggctgtgtttacctgggaagatgtgccggatattcccttcgccacggcaggacacgcctggacgctggatgagaacaaacgcgacaccgccgaccgttttctgttgacccgtcacgtacgccatcatggcgatgcggtcgcgattgtcgtggcaagagatgagttaaccgcagagaaagcagccctgctggtaaatgtggaatgggaaaaactcccggtgattaccacgccagaagcagccctgacgcaggacgccgtctccattcaccctggcggcaatctgctcaatcgcagtgaaatgtccacggggaatgtccagcaggccattgatgctgcggattatcaactccaggggcattaccagacgccggtgattcaacattgccatatggaaagcgtcacctcatttgcctggatggaagatgactcgcgaatatccatcgtctccagcacgcagatcccacatatcgtacgacgggtcgtgggccaggcgctggacattccgtggtcatgcgtgcgggttatcaaaccgtacgtcggcggcggatttggcaacaaacaggatgtgctggaagaaccgatggccgccttcctgacccgtaaactgggcggaataccggtaaaagtctctctcagccgtgaagagtgttttctcgcgtcccgtacccgtcatgcgttcacgattgatggactgatggggctcaatcgcgacggtacgttgaaaggctatcgtctggatgttctgtccaataccggcgcttatgcctcacacgggcactcgatcgcctcggcgggcggcaacaaagtggcctatctctatccccgtagcgcatacgcttaccgttccacaacctgctataccaatcttccttctgctggcgcgatgcgtggctacggcgcgccgcaggtgatctttgctgtggaatcgatgctggatgacgccgcgacggcgctgggtctcgacccgcttgaggttcgactgcgtaatgcggcctgcgaaggcgacacgaatccgattaccggcaaacagatctacagcgcggggctcccggaatgtctgcaaaaaggccgcgcgctgtttgagtgggacgcccgtcacgctgaatgtctgcaccagcaaggcaacatccgccggggcattggcgtcgcctgctttagctatacctccaacacctggccggtcggcgtggagatcgccggtgcccgcctgcttatgaatcaggatgggacaatcaacgttcagagcggagccacggaaatcggtcagggggcagataccgtcttctcacagatggtggcggagacactcggcgtgccggtcagcgatgtgcacgtcatttcaacccaggataccgatattaccccgttcgaccctggcgcatttgcctctcgccagagctatgtcgccgcgccagcgctgcgtaaggcggcaatacaactgcgcgataagatcctccatcacgctgccgacatgctgcatcagtccgtcatgagtctgacgttgacggcaggccacatcgtccttaccgatcgaccagactctccgttgctgtcattaaaagagctggcgatggatgcgttttaccatccggaacgcggcggccaactgtcagcggaatgctcggtgaaaaccaccactaacccaccggcgtttggctgcacgtttgtcgatctgagcgtcgatatcgcactgtgcaaggtcacgatcaaccgtatcctcaatgtccacgattcaggccatattctgaacccacaactggcggaaggtcaggtgcacggcgggatgggaatgggcattggctggtcactgtttgaagagatgatcatcgatgcggaaagtggtctggtgcgtaacccgaatctccttgattacaaaatgccgaccatgcctgacctgccgcaactggagagcgcattcgttgaaacgcaggagccgcaatcggcgtatgggcataaatccctcggcgagccgcccattattcctgttgctgcagccattcgtaacgcggtgaaaatggccacaggcgttgcgattgatacgctgccactgacgccaaaacggttgtatgcggagttccaccaggctggcttgatttga

SEQ ID NO: 81237 - DNA, 495 bp, Citrobacter koseri
gtgcctgtaccctcgttccgtcgtccggaacgccttaaacagcagacccgcaataaacggtatcagcgctggacggaagtgatggccctgcataataagggatgtgtgttcagggaaatatcccgcatcaccggcttatcacgagtgacagtcagtcgcggggtacagtcaggtgcattccctgaaatgtcgatccggcttccaaagcgaggccttcttgacccatggagagagtggttagaagagcaacgtgaaaggggtaattataatgcaagccggatatggcgtgaaatggtggcgaggggatttacaggcagtgaaaccatcgtcagggacgccattgccagatggcgtcaaggctggatacctccggttactgccaccgcccgacttccttccgcttcccgtgtaagccaatggttgatgccatggcgaataataggggctgaagaaaattatgcatcccgctttatcagtctgatgtgtgaaaaatag

SEQ ID NO: 81238 - DNA, 333 bp, Citrobacter koseri
atgaagaaagcgttacgctacattgacgcgcatttatcggacgatcttcgccttgaggatgtcgcttctcacgtctacctcagcccgtactactttagtaagttattcaagaaatatcagggaatcggttttaatgcctgggtaaaccaacagcgcatggccagcgccagagagctgctttgtcacagtgactggagtatcgccagcattgcacgtaatttaggcttttctcaaaccagttatttttgcaaagtgttccgtcagacctatcagatcacgccacaggctttccgtcagcaaataaatgataattcgtccgccgagtccgcataa

SEQ ID NO: 81239 - DNA, 705 bp, Citrobacter koseri
atgattataaaaaaatgcagtggtcgccaggtgtggtgctgcctggcgagcgttatcgtctgtgcaattttcactaacacagcatatgcctggcaacaagaatatatcgctgatgccgtatcgggtcatacgacagaacgctatacatgggacagcgatcaccaaccaagttacaacgatattctggcggagcggattcggtccagccagaatgcgcctggccctgtgctgagcctggccgatcaaacgccactggatgcgaccagcggcatgagcatgggctggaattttccgcttgccgggcgcgtgacgaccgggccggtcgccagcctgcattacgacggctcaaccacctcgatgtttaatgaatttggcgacagcgtgacggcgcaggcgctgaccggccctctgtggcatgccagcgtcagtacgttgggctggcgggtgaattcgcagtttggcgatatccgtccctgggcgcaaatcagctataaccagcaatacggcgagaacatctggaaagcgcagtcggggctgagtcgaatgacggcggcggatcagaatggcaactggctggatgtgacggtgggggcggatatgctactgaacccgcatatcgcggcgtatgcggcgctctctcaggcagataacagcgcaagcaatagcgactatctgtacaccctgggcgttagcgccagattttaa

SEQ ID NO: 81240 - DNA, 399 bp, Citrobacter koseri
atgctcaacttcaaagcggcaattgcaaccgtcgccattcttctgtctatcagcgcccacgcccaaacgaataacgtaaaaactttgcaaaaacaactaaagttatggcaaccgattgaaataaaagaaagtaataatgtcgtgactatcgttcttgacgcaaaccaagttacacctgaaatttatgatgcagtcgtaagctcaggaatttgtatggatgtttggacaaaaaatgtaccgaacggctatatgaaaaaaaccaaagaattgcacgtactgaacaaacacaaagcaatggggtatgtcctcgaaaaaccattagcaacatgtaacgaaatggggaaagaaagtaccgaaagagcaaaagtgataatgctttccaacactcatttgtattga

SEQ ID NO: 81241 - DNA, 675 bp, Citrobacter koseri
atgagtaataaaaccattacgctatctggcgctgctactgacgtgctctacgcgctgttttaccgtggcgcattgctatctggtgacctgccgtctaaatccggtgccgccgaacttcgcgaactgggctttgctgaaaccagacatacagcgacgcaatatcagaaggaaaactattttactttcctgacaaccgaaggacaggcgtttgctgttgagcacctggtaaatacgcgctttggtgtgcctgctggtggttacatcggtagccctgtagatacgatgaaagaagatatccgtggctgctgcccaattgaaggttatgaatggggctggtttatcgataaatccgggcaagcttacatccataaagcgctgatcggcgatgtaattcacgctgcggaccccgaagatactcgctcggcgaccaatatctacaacatcagccttggtattcggcgtgatgatacggtgcattttgcgggcatcggtgttgataccaatctcgaagctctgatcgaaaatgctgtgaaaaataccgccaaagacgttgcaaagaaagttgctgatgatcagaaaacgatggatgacctaaccagttttatccgcaaagccattcgtaatgaatgccgtccaggtggtgcgatctggggcataagacgccgtggtatttaa

SEQ ID NO: 81242 - DNA, 228 bp, Citrobacter koseri
atgcgtctcactgtattggatgacgatcccggcaggaagattaatcccggagtcgagcgatacgctgtctttctcgatggcgttgaggttaagcacgtctacacggctgatgatgagaaaggtgaggtgatctcagcggttctcgatgagcgtggttacgtgacaacagaaaacggcgaagtgaagcggcagacgctttacgggacagtaatcattcaacgccgataa

SEQ ID NO: 81243 - DNA, 1458 bp, Citrobacter koseri
atgcaggtcattattgataatgtcccgtatgcgcctgtctgtaattcttctgcccgtatcggaatagcaatctcaacgcacaatcgcgctgacgttctgagccgcgccctgactcagcatatgaagtttttacctgctggcgcgctggtggtcgttgtagacgacgggtcaaaaccttctgccgtggttcctgctggtgtgcagttgcttcgtaatgaagcatcactcggcattgttgcttcgaagaatgccagtcttacagcgctgatggatgccgggtgcgaacaccttttcctgtgggacgacgacgcatggccgattgccgatggctggcatcttccgtatatcgaatcacctgagccgcatctggcgtatcagttcctcgaccttgcaggaccgcgcaagcttaacgatctcgctgtgctttatagcgacgataatcatgtggcatacaccgggcagcgcggtgtaatgctgtattaccaccgcagtgctgttgagctcgtcggtggcttcgactggatttacgggcgtggcatgtacgaacacagtgaccttgccctgcgcatccataacgccggactgactacgtgggcttatgccgatgtagtcggctcagataagttggttcattcgctcgatgagcatgaggctgtagatcgctcagtgccaacggcagaccggaaagcgctggtggaacgtaacgtgaaaatccacaatgagcgtcgcgatacggggtataccggttacgttgagtaccggcagcagtgtgacgtggtaatcacaacgctgctaaccagtcagcctgacccacagcgcggtagccgaatgcagcctgacccggcggcgctgaccacctgggctaaatcaatccggggtgccgatgccgtagtgctggccgaccagctaaccgccgctcctgatggtgctcaactggtgacagttccagatgtcgcgatgaacgtctacttccggcgctggctgcatatctggcagcacctgcgcgatcatcctgaataccggttcgtctggtgtaccgatggtactgatgtcgaaatgctttgcgcgccgtgggatgagatggaacccggcaaggtttatgtcggctccgaaccaaaaacttatgctgatacatgggcgaaacagaatcacccggaacgcatctatcaggagttcatcgaacaacaccgcaacgatgtgatgcttaacgctggtctgctgggtggcacccgcgccgatgttatggcgttcgcccacggcattattcgcctttactaccggatcgagagttatcgtttctggaagaaagaacgggatggcgccgcagttggggacatgcttgcatttggtatagtggcgcagtcattcactgacaggctggtcacaggtccactggtgcacacggtattcaaaacggaaggcatcggcaaagagtgcgcatggtttcgccataaatag

SEQ ID NO: 81244 - DNA, 411 bp, Citrobacter koseri
atgaagccgcaagcattcacccatgaaaatgaactcttagctatggctccattaggaggggaggacgaaagccttttctcaaagcaaaatgttcgcatggtaggcaatagtgaaattcagtgggatttcattttaccagatggaaaggactggcatttccgccagcaattacctcatctttctgacgaagcgaaactaggtgcttttaaagattacattcgcagcgtccttaaagagcagtttaaagaaactatgttggttatgatcgacgggaaagaagtaactgtcccgtttcactatgaaaaagaaacaggcggaagaataattaaagtgccagagcttgagggggattttttagatgggtctgcattaggcgacaccatcccgaatttcataagcgcacgccgttaa

SEQ ID NO: 81245 - DNA, 609 bp, Citrobacter koseri
gtggctgaagacataaaatttgtggtggtaggccaccactcacgatacaagcaggcattgtgtctggctgaattattgagtgcagttctgctaattgatagccgggacaatggtgccaactggaatcaccgccgcgctcttgaatgggcttcaaagcaggattgtcgggttgtgatcatcgaagatgatgcgttgccactgtccgaatcggttgacggtttccgccaatggatagacgaatatccagatcatctaatcagtttttatcttggcactggccgaccaccacagtatcagtcacagatagcagagcggttgatagaggccgacaagacgcgtaccaattacatcacgttgccgcgactgattcacggtgtttgctacagcgttccacagcatcatatcgaacgtgtactttgccggtgggacagcagtaaaccagctgattatgccgttggtgatgcttatggcggcgaggtgatttacccgtgctattcgctggttgatcacgcagacggcgaaccggtagagcgtcatccagacttaactcccagaacagagcgccgccgcgcgtggcggttggccatatttccagtaatgaggtgctaa

SEQ ID NO: 81246 - DNA, 369 bp, Citrobacter koseri
atgtccaggctaaagacgttacagccacggttaaaagctatcgacacccggcgaataaagccagtgtatggcgagaatcgacgcattagcggcagcgcaagggtaggactgaagcggcgtatctatgtccgtgatggcggtcactgctgtatgtgcaatcgcgtcgttgacctgcatgacagcgaactggatcaccgtgtggcgttacagtttggcggtgataacgatgagtccaatctgtggacgctttgcatcgattgtcactcaggcaagtcagcgcgtgaagcttcgacgggccagccagatggagaggccctgaaacattccatcaccgatgacgccaaggaacatggcatcgtggtgatttga

SEQ ID NO: 81247 - DNA, 507 bp, Citrobacter koseri
atgttaacagcgcagaagcggaaattcgctgtcgcgctgatgtccggtatgtctcaaaaggatgcggcaataaaggcgggatattctgagaaatccgcacggtcaaagggttcgcaacttgcaaaagacccggaggtcatcgcgtttattgggcgaaaaaaaagggaagtcatcgaaacagacgacgtaccgacgtaccgtcaaaatgtttataccccagcggtaaacaatactgaaaaaaacaggactccagcgccaccaccagaggtacccactgttgttggtacttttgatgatccgctcaagttcctgatggccgtaatgaacgatgccaccgaagatattgacgtgaggaaggatgctgcaaaggcaatgctcccgtataagcaccctaaaatgggtgaaacgggtaaaaaagatgccaaaagcgacgccgctaaaaaagcagccaataaatttgccgtccagcaaccacccaagctggtggtgaataaccgagggaaataa

SEQ ID NO: 81248 - DNA, 1659 bp, Citrobacter koseri
atgcccgaatggactactgcctgccccgactgggcggagcgcctgaaaaaagggcagtctattattcctgcgccaatctatcctgagcaggctgaaatagcgcttagcgtcttcaggcaattaaaaatcgtagatgcgccgggttctccgacctttggagaagcctgtgcgcagtgggtgttcgacctggtggctgctctgtttggctcttatgacgccgaaaccgggcgccggtacatcaccgaagtgtttgtgcttataccgaaaaaaaactccaaatctacgcttgcggccgggattatgatgacggcgcttctgcttaactggcggcaggcggccgggtacaccatcatcgcgccaacagttgaagttgccaccaacgcctttaacccggcgcgggatatggtgaagcgggacgatgatctggatgatctctgtcaggttcagactcatatccggactatcacccaccgcggcaccgataccacactgaaagtggtggcagctgatcccaatacggtttcaggtattaaatcggttggaacgttaatagatgaattgtggctgttcggtaaacagcacaactcggatgatatgctgcgtgaggcgatcggtggtcttgcatcgcgacctgaaggttttgtgatgtacaccactacgcagtcgaatgatccgcccgctggcgtgttcaggcagaaacttcagtacgcccgcgatgtgcgtgacgggaaaatagttgatccgcatttcctgcccgttatttttgaacatcctcctgaaatggtgaccagcggcgaacatctgctggtggacaaccttgcgatggttaaccctaacctgggcttttcggtggatgagaaatttctttatcgggagttcaggaaagccaaagaagccggggaagaggaatttcgcggttttatggcaaagcatgccaatgtcgagatcggtcttgctctacgctccgaccgatgggtcggtgctgatttctgggagcagcaggcgcacaaagtcacctttgaggaaatactccagcgatctgaagtgatcactgtcggtattgatggtggtggacttgatgatctgctgggtctgtcggttattggtcgtgacaagacaacccgagaatggctgacatggagtcatgcctgggcgcatatgattgcgctggaaaggcgaaaaagtgagataccgaaactcagggacttcgaaaaggcgggtgatctgaccattgtcaaacgtgtcgggatggatgtagagcaggttgttgagtatgtgagccgcatccgggatgttgacttgctggataaaattggtatcgacccctcagaggtcgggcagatccttgatgcgcttagcgcggcagaaattcctgctgagtcagtagttggcgtcagccagggctggcgacttggtggagcgattaaaaccactgagagaaagcttgccgagggcgtattgatacatggtggtcagccgatgatggcgtggtgtgtaggtaatgccagagttgagccgaaaggaaacgccattcttatcaccaagcaggccagcggcaagggcaagattgatccgctgatggcgctgttcaacgcagtttctcttatggctcttaacccggaacccgccaaaaaagattaccaggtatttttcgtataa

SEQ ID NO: 81249 - DNA, 1935 bp, Citrobacter koseri
atgaataatcgcgcctatagcctgatgcaggtaaaggcggtcaatgaggactctcgggagattaccggcattgccagtacccctgaacctgatcgctatggcgacattgtagaccctgccggtgtgaaatttactcttccgttacctctgctgtggcaacactggcatgacgagccaataggccaggtgacagaagcaaaagttactgacaccggcatcgagattaaagcaaagctggtaaaaccaggtgcggatatgccatcgcaactggtcgccaggcttgatgaagcgtgggcatctatcaaaacgggtcttgtccgtgggctttctatcggctttaagcccattgaatacagctttattgacgatggcggcatccggtttatttcgtgggagtggtacgagctttctgctgtaaccgttcctgccaacggtgattgctccattcagtctgttaaatcaatcgatcgcaagtttcttgccgcgtccggcaataagaaaaccgtcgttaaatcatccctttccgctggcgctacagcaaccaataccaaaaaaggaaccaattcgatgaatatcgcagaacaaatcaagagcttcgaagcgaagcgtgcagcgctggcagcctcactgagcgacatcatgagtaaagctgctgatgaaggccgtacgcttgacgcagaagaaaccgaaagctacgacgacacgtctaccgaaattaaggcggttgatgagcatctgaaacgcctgcgcgatatggaaagcaatatggcatcgaccgcgaaaccggtagcaaaagccgctaacggcgaagtcactaccgttaaggctggtgcgccaggcatcatccgcgtcgaacagaaactggaaaaaggtattgcctttgcccgctttgcgaaagcgctggccgccgctaacggcagtcgttccgaagcgctggagatcgcccgcaaacagtatccagacgacgccaaacttcatcatgtactgaaagccgccgtgggcgccggtactaccaccgatcctcagtgggcgggtgcgctggttgaatatcaggaatatgcactggattttgttgaattcctccgcccgcaaaccattatcggccgtttcggacagggcggtatcccggccctgcgtcaggttccgttcaatatccgtatcccggcgcagacttccggcggctcagcgaactgggtgggacagggcaaggccaaaccactgaccaaattcgactttgagtcgatcacgttcagttttgccaaggtggcggctatcgcggtactgaccgatgagctgatccgcttctccaatccggcagccgatgcgctggtgcgtaacgctctggccgaagcggtcattgcccgtctggatacggactttatcaacccggcgaaacctgaagttgctaacgtctctccggcctcagtaaccaacggcattgtagccattccgtctaccggcgacccggatgctgatgctgaagcggccttcgcccagtttgtttcgaacaacctgcaaccgacgggcggtgtgtggatcatgtccagtaccaacgcgctggcgctgtccatgaagaaaaatgccctggggcagaaaatgtacccggaaatgaccctgcttggcggcaccttccagggccttccggctatcgtttcccagtacgcgggcaccaacctgacgctgcttaacgcaccggatatctatctggctgatgatggcggcgtggcggtggatatgtcgcgtgaagcctctctggaaatggaaagcgaaccaaccggcgacagcatcaccccaaccggaactgagctggtttccatgttccagacaaacagcgtggctatccgtgccgagcgctggatcaactggaagcgccgccgcacggcagcggtagcggttatttctggcgtgaactacagctctaaccagggcagctaa

SEQ ID NO: 81250 - DNA, 1359 bp, Citrobacter koseri
atgtggaatcctttccggagaaaacagggaaaagaaaaagccctgcaacagcccgtcagccgcggaggctggacgccattattcggctttatgcatgagccattcgccggggcatggcagcgtaaccttgaagttaatcaggacaccgttctttcttattatgctgtgttcgcctgcatctcactgattgcgagtgatattgccaagatgccgccacggctgatgcgtctcgactcaaaaggggtcatgcaggaggtcaaaacaggggatattccggcactgtacaaaaggccaaatgcctttcagaaccggattcagttttttgaacactggctgaactcgaagttatgccacggaaatacggtggcgttaaaaatacgcaataacgccggaaaaattaccgaactcaggctgcttgactggaacaaggttactccgctggtggcggacgatggttctgtcttctaccagataaaccctgacaatatgaccggaattgaatcgtcggttacagtcccggcgcgcgaagtgatacacgatcgcttcaactgccttttccatccgcttatcggtttgtctcccatttatgctgctggtctggcggcgatgcaggggcatcacattcaggaaaactcggcctattttttccgcaacggcggcaaaccgagcggcgtgattgaagtgcccggttccctgactgaagagaacgccagaaaaattaaagacaactgggactccggctattccggtaagaatgcaggaaaaaccgccattctgagcaatggcgcaaagtacaacccgacaacggtatcagcggctgatgcgcagactgttgagcagttaagcatgacggcacaaatcatctgttctgtctttcatgttccggcctataaggttggcattggtgagctacccacccatgacaatatcgaggcgcaggatcagcagtattactcacagtgtcttcagtcgctcattgagtcgatagagttgctgctggatgatgccttcgggcttgaaggggattccggtactgaatttgatgtgaatgcgctgctgcgtatggacagtgaacgccgtatcaaatcactcggcgagggtgtgaaaaataccattctgacgccaaatgaggcgcgccggagtgaaaaccttccgccattacccggaggcgatgcactgtatcttcagcagcagaacttcagccttgaggcgctggcgcggcgtgatgcttctgatgatccgtttgccaaatccggcgccggcagccgtaccacatctgatgatgcgaacgggaaatccatgtcggaatctgaactgacagcggcaaaagccatgctgagaggattgttaaccaaatga

SEQ ID NO: 81251 - DNA, 204 bp, Citrobacter koseri
atgaacgagcaacaggtaaacgaactgatagcagcgctgaacgaacaaaccacggcgcagagagagcagacggaagcgataaaccgtctggctgaatccaatatggcgctatgtgatgtcatcattcagtctctggctgatgaggagatggacactccgcatgagccacaaacttatctcagcgggaaatccgtaaggggttga

SEQ ID NO: 81252 - DNA, 570 bp, Citrobacter koseri
atggctgacggtgtagaggtaaaccttaccggacttgagtcattgctggggaaaatgtcagcaattactgacgtaacaaaaagcaaagctgggcgatttgcgctcagaaaggctgctgaagttatccgtgacagggcgagggggaatgcacaaagagtggatgatccacttaccagggaagccatctataaaaatattgtggcgagatttaatagcaggaaatacaggcaaacgggtgatatagctttccgtgttggtgtgcttggcggtgcaagggcaaccagaagtgcacgcgaacaaaggaaagcagatcgccgtagagcaaggctggggcaaacatctttatcggaaatgggggagattgctggttctggtaaggggaacccaggcggagccacctggtactggcgttttctggagtttgggacggagcatgcccaggctaaacccgtgctcaggccagcgatgaatggtgttgatatgcaggtagttaacgttttttcaaccgagtttgaaaaagccatcgacagggccgtctctcgcgcgcagaagaaaggagcaacagcatga

SEQ ID NO: 81253 - DNA, 345 bp, Citrobacter koseri
atggattaccagcttgagaaatatggaattagcgcatttaggcaagcacttaaagatccagaaagcgcacagttcaggaacatcaagttggtaaaatctgagcagaagggcggattgtacaaaggcggttatgtttgtggagagtttaacgctaaaaacggatttggggcttacggtggttttcatagattctacgttcatgttggcgccagaacccgttttttaattccactttttggaataacccattgggagtctgatatgggattcgtaaaagaaaatggaagcttagatgaaaaaatatcaagcctaaagtcattcatagaccgatgtgctcagccctaa

SEQ ID NO: 81254 - DNA, 2496 bp, Citrobacter koseri
atggcaggtaaatctcttggcactctcacccttgatcttattgctaagaccggcggctttacttctgggatggataaagcagagagagcctccgcaaaatggagtaaacaagttcaggatgatgctaaaaaaaccagtttagcacttgcggctaccggggctgccgctaaaacagcggctatgggggtaggtgcggcaggatttcaattattaaaaaacacttcgaaacagatatcagaaacagatcgttgggcaaagtctcttaacatttcaactcaaaatcttttagcatggcaatttgctgcggaaaaagccggtgtttctggtgatcagatggctgatatctttaaggatattggcgacaagattggtgatgcagtcctgaataagtcgggtgaagcagttgacgcgcttaatgcgcttggtttatctgccgagaagttgtcaaagacaacacccgatcagcagttactggctattggtgatgcactggggaaaatcggcacaaatgctgaaaagacaaccattctggagagtctgggtaacgacctctcaaaattgcttccactgtttgacaataataatgaaaaactacgtcagtttattgatctagccaaggattatggtgtagcaccagaccccgcatccattgatgaccttatcaaggtgaacgatctttttgaggatattgatgctcaggttaaaggtctgaagatggagattgcgtctggacttgctaaggtcgatcttactgaattaacgacttcatttaataaactaagagatgttctaacagaccctaaagtaattgatggacttgttaaacttgttaatgaagcctcaaaactcgctggatgggttattacaattgcagcaaaattaggggagattgcatcattaactggaaatcgggtttctgcattgagtggagaaatagataccagcaatcttggtgaagtaaatgagaggatcgagttattacaaaaatggaccaaggaaaggaatggtctttattcccaagataagtcgatgttcgctgagttatccggtgctgacgatagtgcaaaagccctgaatgatgaattagctaatctgcttgaaatcagggaaaaactaaacaaccaaaagaaccccgtagtaaatctcccacttcagcccgctactgtagggtcaggattttctcttgggaaagatgaaagtaacggtaaaaccactcctgatgccgcagctaaaaaacttgaaaatgcgttcaaatcgatggagaccaattatctccgtcagaaagcgctgattgataccacaggaaggaagactgttgaaataacggagcttcaaaagcttcagtttgatatggctgacggtaagctttcgggtctcaatgaaaaacagaaagagaggttgattcaacttgcatcagaagttgatcaccttaacgctgtcaaaaaggcgaatgaggaaagccttaaactagcagagtacgtatcgaaccttcagcgcgagaacgctaatgcatcttcataccttggtgctgatgtggttggtgccgggctgggcgataaagcccgggaacggatgcgcgagaagctcagcattgaacgcgagtttttagagaagcgtgaagatttgcagcgtcgataccagcgcggtgatattcgtagccaggaggattacgaccgttacaaccaggaactggacaaagcacttgctgagcgtctcgataaataccgctctcattatgagcaactggatgaattgcagggtgactggcttgctggcgcacagaacggcctggcaaactgggttgattcctccagtgattattattctcaggtttctgatctggtctcgggtggcatggacgggatgattgataatctggctgattcactaaacagcaataaggccgactggtcaagctgggctaacagcatcctcaatgacatgcagaaaataattctcaaggcgattgtgctgaacagtatccagtcaatggggggaagcggtggaatatttggctctttgtcgggaatgtttggtggtggggtatctggtggaagcacaccttccggtgcttataactcggcggcttctggcctgacactgaatgctaagggcgggatttatgattctgccgacctcagccagttcagcaacagcattgtaaacagtccaaccatgtttgcgtttgccaaaggcgcaggactcatgggagaagcagggccggaagccattatgccactgacacgcaccgcagacggtagtctcggtgtgcgtatggtggatgatgccgtttcctctgtgggcggtggtggggcgaatatccagcaaaccatccagcagcacttttccatttccggtaacggtgatgcagcccttaagcaggcaatgcagcaggcggcaaggcagggagctaacgacggcgcgaagcaggcccgtcaggatttgcttcaggattttcagacgcgtggtcaggcccgtcggttgcttggggtttaa

SEQ ID NO: 81255 - DNA, 315 bp, Citrobacter koseri
atgactttagagcaacgagttgaaggaattgaatttgaagttggatttccgaaagaaaatggcgtgagaatctccttcggagaaaatttatccatgtcatcgacacaacgcattggaagtaacgtgtcggtgaaaattggcaaagaaactttagctactatccagtacagcgaagacttatctccagattttacgctggaagggttcaatcagcgagcgaaagagcatgctcaaaatgttgtcgtaaacattattgaagcggcccaggtacagaccgcgaaatatgatgctggatttaaggtctcaattatttaa

SEQ ID NO: 81256 - DNA, 207 bp, Citrobacter koseri
atggaaaagaaatttgtcgacttatgtttcacgatgtcagagaaaattccaagagaaactgctttagaaatcgttgctatcaagcaagtgctggcggcaattttggcaaaaatgcctgacaaacgagaaagcatcattgatgacttatcaggtgtagatagcgatattatgcgtgatatagtagccaactttaaaaagattaaataa

SEQ ID NO: 81257 - DNA, 594 bp, Citrobacter koseri
atggccgcacttgaatggccggacgatgtctgtccggcgtccctgacatggcgaccggaaagcaataccaaaacatttcgctctccctttaatggcgcatctcagacggtacgtttccccggcacccggtgggtgtgctccctgacatttaataacctctcggatgagaaagcccggcgtattgattcgctggttgctgagcttgacggtgaatatggcagggtaaaaatccgggactgggggcgatcaggaagccccccggctggttcacctttagttgacggggcgaatcagaccgggactgaattgcacagtaagggctggacggcgggaacggttgtcctgcgccagggtgactacatcactgttaacgatgaactgaaaatggttacggcagatgtgagcagtgcatcgaacggtacggcgcttattccgtttgcgccaatgttgcgcagttcacctcctgcgaatgctgttattgaggttgcaaacccttacgggattttcaagctaaaggataaccagcaggggaccggtaaccgggtgccgggtgtgtttaccagctacaccctggaatttgaggaggcgttttaa

SEQ ID NO: 81258 - DNA, 585 bp, Citrobacter koseri
atgctgtattcccctttttcagactcaatggttgactggctgtcgcgtgaccgtgtgacggcagtgatcgccgcgaatatccagtttgaatccggcaccgtttatgtgcattccggtacagggactatcgtgttgggtggctacgtctattacggcatggggcgtatgggctctgtcgatgacgccagcgaaaccaacaccaccagtccgactcaggtcaaaatgacgctctctggccttgatctgtcactttttgccacgacgctgaatgagcgttgtgtgggaaaaaacgccgagatttatcttgtcgctatggatgataacggtgtggttcaggttgccgatctcctgtttaagggccgggtatccagtaccggcgcgacagtcggcgagactaacgcgctccagtacaccatcagcaatatttttgaagactggcagcgtccgttccctgaccgctataccgatgagtcacagcaggccgcttatccaggtgaccgcatatttcgttacgtagctcagatggcagaacgttcgatttactggggcagtaaaaaagacgctcccggatttacctataagtga

SEQ ID NO: 81259 - DNA, 399 bp, Citrobacter koseri
atgaagcaccctgactggcaaaacagattaaacgtagtgatgaaggccgccattgagcggcctttttcatggggcgagcatgactgttgtttgtttgcggccgactgcgcacaggccatgtgcggtgaggattatgccgctgaatggcgcgggacgtatgacagcgaaccgggggctaaaaaggccattcttcgcggtggtggttcacttgaaaaggtgcttgcccgatttctcgacgaagtaccggtgaaactggcgcagcgtggggatattgccatcgtcgagaatgccgggacgaagtgcgctggcgtggtgtattccggcgttgtatgggtgcctggcgaaaatggtcttgtcagcctgcgggttaagccgatgagtgtctggagggtacgttaa

SEQ ID NO: 81260 - DNA, 2712 bp, Citrobacter koseri
atgcctgctgctgttcccattgttgccagcattgccgcaggtgtggcggcggcaaatgaaatgtatgccattgcgatggttatcaccgtcgccgcacagattgccacccagatgatgacgaaaacgcctgggctgaattcctatcgcgatacggcagagcgtaaacaggttctgcgcgctgcggccagtgccaaaaccgttgtttatggtcgctccacatcagcgggcactctgttcttttcagaagagcaggctggcgaacaggatgatggcgaaatgttgcatctggccattgctctggctggacatccgctatccggtattcagacggtctggctgggtgatgaaccgatcagtagctatcctgagcatgcctttttcgagctgcacaccaaccgccaggcggcagacccttatatgctggaaaactgcccgtcatggaaagaagacatgatcgggaaagggatcacctggctgcgcgtatcccttaaatttaatgctgaaaaattcccgtctggtatccccaacattaaagtcgaaaagctgggtcgcgctatatacgacccacgaaccgggcagacggcatacagcaacaatgctgcgctggtcattctggattattaccgcaactatctgaaagtcccggattcagacatcctctgggaccagtttcaggaagcggcgaatatctgcgatgaggaggtgattactggcggtaatactgttgaaaagcggtatacgatcaacggtgagtttgacctcagcgaaaacaaggtgagcattcttgaggggatgcttgcggcctgtgcgggtgatgtcacctatatagccggtaagcacggcttgcttgttggcgcctattatggcccggcaacggaagtgatcaccgaaagccagctggccggcgatatcgaaatcatgccggaagtctcccagtcggagcgggtaaacactatcaagggaacattcgtcgatcctgagcaggggtttactgaagcggattttccatctgtatccgtaagtgagtgggtgacagaggacggtgtcgaaatttcgcaggatatgaaactgcgatttgtgacgagtgagtttcaggctcagcgcctggctgatgtgaagttaaagcgaacccgcatagctagaacgatgaacgttacgctgaatctcagcggctaccgatatcgtcctggaatgtatgtgtatgtcaatttcccgtctatcggcatcgtaaacgttgagatgcgggtaactgactggaaatttggtgtgcagaacggtgtgcaactgacactgaaacaggaaactgctgatgtgtggggtgatgcagttggtaagcctgttgaacgcccaccattcactcagttaccgtcaggtggtgttgcccagccgcagaacatgaagtacaccgtcgaagaaatcggtcaggtagtccagggaatattgtcctgggaaaatatcggtcaggttgtctataacaaagtcgtcattcgtcgtaatggtcagatggtgctttctgcccaggtcccagggtctttcacccgtcttactggtttacccaggaatacctataccgcgcatgttgtcgcagtaaaccagatgggcgcggagtcgccggaagcgtaccttgagttcagcattcaggctccgccgccgccgtcccatgttgatatcgaacaggggttcttttccgtcacacttattccccgccttgctgccatcgccaacgtttcaacgcaatttgatttctggacgtcaggagaaacagcgcttcccgactcatcaacggaaaccgttgagggtaatgcgagccgggaggggatcggaaccacctggacgagcaatcagttactggtcgggcatacctattactggtatatccgtacgatcaatgcgttcggcgcgtcggcatttgtcgaagtccctgcactgtgtgagatggataccggcagcctcatcgacatcattgatgacggcattcaaaaatcagatgctttccagaatattaaagagggggtggataccaacctggaaggcattatgcagaatgcgctgggcaatcacggaactgttgagcatcagtatcagcaattcggtgaagttcgcgctgatgtactgacagttaaagaaacggttgtagatcttactggcgcatacgctggtctttctgattatgtacaggcgcaaattggccccaacggtagccttgtcgccgcagtgaatcagaagatgacggctgaagttaacatcgatggttcggcaaaggcttcctatgttactaacctgggaattatcaggaacggagtgacgtacagtgcaggtttcggcatgtccattgagccggatggcagttcgtacaagtccactgtggtggtagcagccgatcagtttggtgtttattccggtaacaatccgggtaactggcaggcggctttcttcgtttacaacggccaggtgtttatccgtagcgtacttattcaggatgcttctatagattttgccaaaataacggacagccttcagtcttcaaattttatcgccgggacgcgcggctggcgtctgtggaaaaacggtgactgtgagttccatggaaaactgtatgcgaccagcggtcagtttgcatttaacggtacgaataacacagtcgttatcaacggcgatggagtgactgttaatctttctggtggtggacgggtcgtcgtcgggaggtggtaa

SEQ ID NO: 81261 - DNA, 954 bp, Citrobacter koseri
atgccggagggtattctgattgattacaacgatggccgcccggtgatggcgataacagcggggcttcgcgcccccagtttctgcacttcattttcaggcgagtcgccggaaacgtcgcaaacaaatcaatattatcaagttaacacaccgttgatacctgattctcaggtcatcgtggtgccaacaaatccgatttatatttatgactttgcatattacgccattgcaatgatgggaagtgttacaagaaatggaaattcaggtgtcaggatctctatagaggtaattaatgatagctggatgatcccgaactggtctggttacgtaatggaattgctgcctgctgctacctataacgaagggttactggttgcgaactcgacggatttcactgccatatctaatcaggccgcgctgatgacctgtgcctattccgggcgtattacggttaacggcagcgcacctcttccggttggtggcattcctttttggaaatgggataacccgaatgtgtcggtggggtttgatggcaccaacatcattgtccgcgatatttcctacaccgggcgggacgacgttgccggaacggcgacgattgatctggtgatattcaatcagacagcaccagttggcggcgatggtatcaccatgaccaacgccgcgggccaggtgacgttctccactctgaaacgaccttttgtatacgaccggcaaatccagatcaccgacgccttccagaatattggcggagggtactgccagatagtttataccggggctcaggttcggatgaatggtggttacgcaaacctcagaaccaaaggggtggttatgtcaaacggcagcgtcaggtctgcatacaacagagtcgtgggaaattacaacaccagcctgaacatgacaaagaacagaaacatcacaatgcccattctcatcttacctaacatgtactga

SEQ ID NO: 81262 - DNA, 1185 bp, Citrobacter koseri
atgaagctcacagttagacaaatcgacacagccaagcctaaagagaagccgtataagctatctgatggtggaggcctctaccttgaagtaactaccaacggctcacgttactggcgtttaaagtatcgctacgcaggtaaagaaaagcgtcttgctttcggcgtttatcccgaggtttctctcgctcaagcacgcgaaaagcgtgatgctgcgaaaaagctgctgtctgctggaagcgatcccggtgaagtaaagaaagcagagaaaattgcccaaaagcttaactatgaaaataccttcgaagctattgcccgtgaatggcatcagttgagagcggatcgttggtcattacgctatcgcgatgaaattattgatacctttgaaaaggatattttcccctacatcggtaagcgccctatagctgaaattaagcccatggaattgctggaaacccttcgtcgtatggaaaagcgtggtgcattagaaaagatgcgcaaagtcagacagcgctgcggtgaagtattccgtcatgcgattgtgaccggacgcgctgaatacaatccagcacccgatctcgccacagccctcgcaacaccaaagaaaacacattttccattcctgacagccgaagaactccctcactttcttagggatcttgccggttacaccggtagcgttattaccaagactgcgactcaaatcatcatgcttacaggggtacgaactcaggaattacgttttgcccgctgggaggatatcaattttgaaaagcggctttgggagatccctgctgaagtgatgaagatgaaacgaccacacatcgttccgatgtcggatcaggttgtcgagctctttgagtcacttaaacctattaccgggctatacccactggtattcgtcggacgtaacgatcgaacgaagccgatctcaaaggaaagcgttaatcaggttattgagttattgggatataaaggaaggctgacagggcatggtttccgccacacgatgagtaccatcctccatgaagaaggttttaactcagcttggatagaaacgcagcttgcacatgtggataagaacgcgatacgtgggacttacaaccatgcgcagtatttggaggggcggagagaaatgatgcagaagtatgcagattacgtagaaagtttagtctctcgaggtgtgtga

SEQ ID NO: 81263 - DNA, 1020 bp, Citrobacter koseri
atggccttaccagaatcattcctgttatctcatgctgaatatcacattgagaataacactccctatgtcaccatatccgatgacaatgaattcagattcagattagaacaactggacagttgtcttaaaactatcagcagaggacgtaagttacctttcgctattctgtataaccgttcaggatacaaagagagtgctgagtcagtcaccattcttgatgctatccgttatctcaatatgttgccacaagatgcaatgaaagtacgaatagctaatccacgtatagctaccttccagcgtttatttactagcaccgatttatattcgcgtgtccataacgggaaaatagcaggggcagacactgttaccacagcagaaatgctgaataagctgatacaggattaccggtttactgtgagccaggcaggatttaaaaaagcatgcagaaagtaccagagggcttcggttaaaaatctgaagggagtgatgaattacatcagacatctgcaggagcgtcattcccggctgctggtcttgcgggttgatttatcatgggcaaatgagcacaaagctgatatcactgctgatgatgcccgtaagcaccgtcagcagctgtttcgcaatatgcaaaagaatccaatctttcgccatgtcctcgggacggtatggaaactggaatatggcccacaacgtaaatttcattaccacatgctatttatcttaaatggtaataaggcacaacaggatggcgtgattgctcatgctttcgggagatattggaatgaaactattactaaaggtaaaggcatgttctacaactgcaacgcttacaaagagcgttatgaggactgctgcctcggcaaactgaaacgcggtgacaatagtaaggacaaggggttacttaaggcgctaagttacatcaccaaaatcgatgcctgtgcacgtctggttcttccgggtaatgccagaacctttggtcgcggagaagtacgttcattgaaaaaaaggaagagagcataa

SEQ ID NO: 81264 - DNA, 204 bp, Citrobacter koseri
atgaaagagattgatatttataaagaccggttcgttgatatggttttcattaccgaactgaccaatctgtctgataagtggttttataaaatggcacagcaagggaaatttccaaaacctgtaaagtttggccgcagttcccgctggattgaacgtgaagtaaaagaatggttagaagcccgcattaatgactcgagagtataa

SEQ ID NO: 81265 - DNA, 1227 bp, Citrobacter koseri
atgagtttaagcaaaggaaagaatgaggattacagattaaaaataaaaacgaaaagagaactatccgttttttattggtttgtaatggaaaataaatctatgatcgatcgctaccgttcctcacctctaaaaaacatgaaaagaataaattcaatttaccgaatgaatatacgggatgcctctttactattatctgaagttgtcagcgactattattcaggtgtccttgacgctatacttcattatgaaggaaaaatagaaatttttcttgactcacttcttccagaatcagagtttgaatggttcaggaaaaatgagcatgcttgttattttgtttggctaagtataaaaaaacactaccctcaactatcttctgaaatgctcaatattcaacaggaggttgcgccacaaaaatttagtaatgtccattctctggttggcctatcaggtcttgataattttagccaaaatattcagcatgcaattgcatcagaaccttttctttcagaaataaactcgctgcatgtacatcccgcatcacacaaagaacgttataactctatcctgtatttcatggatctagttccatcatacttcattgataaattgtcatttataaaaaacataaggtctcaatgggatgttaagtttaaagcaaaacgtaagttaaatatccccgtggaaaatacaggtctatgccagtgggcctgggactatatgaaaaataaaccatccatgaggaagcgcgtttacattcaaggcacagaagcgccagaggggggcattaaattatctggtgaagattattcactctcaatatgttctgctgatgacaaagatggcatctgcaataagaatatgtcagaaagtacggcacaggaggattacaataaatcagctaacaatgacgccgataatgacaagagttcagagcatgaaagtggcataaaaaaggtgagttacaaaaccatagacctttctccggaaaacggcagttctctatccagtattaacagaattggctggcatgatgcatttgagatcattcagccatcgacgccaagagaaacatatttagctatccatgcagtctggattttctatgttggaggaactttcttggaacccgaactatataaccagtttaagcgtgccagggatacataccttacccgtaaaagaaaaaaaataaaaataatcagaaataaattacaggagatgaattag

SEQ ID NO: 81266 - DNA, 435 bp, Citrobacter koseri
atgtttaaggtcacttctgcactctttctcagtgcaactttgttcaccaccgctgcgcacgcgaccattcaggaacagcagtggggtaactggtttggtaataccagcggaatggaatttggtattaatgccgacaatgatgttggtgagcgcattaccttcacttgcatcggaggccacctgggcatcacctacagcgtcccagcaaagaactattccatttcttctggggcaggtctgaaaaagccagggttgatcatcaactcaacccactatcaattaggcgaagctgcatttatggcgctcaaaaacaccagtgatgaaggagtgctggaaatcactgaagccaagaaactattgtccaaaccgttcaaaaccgaaggtcttcaggaagcgctgaaagaggtaacctggcaggactgcatcagccgttaa

SEQ ID NO: 81267 - DNA, 708 bp, Citrobacter koseri
atgcttcgcgaaatgaacgatgcggcagtcagcgtaaaactcaacaataaagttggttttagcgctgaggcacagagcaaggctgctgttgcgaacatatctcctttgctgtacgcatcatcaccccttgaacagaactttatccgctacgacagtaaaccagttaaggctctgacttgtctcgtaacggcccgcactatgccgagtcagaataaaaattactcatgggaggaaacctactgccttgatgaaaccggtgctgcctacatcggcacaaaaggctggccgtcacgtgctatcgtcgaaaagagctgcgaggtgggtgcctccagttgtcctgtatatcttggtctgaacaatgatccaccgaccatgcggaatgatgctgcgcaatatattccttatagcagcgatcgggcaagcgggcagaaagaacttaactctgagccaaaatcaacgaccgctgaaaccgtcgcagagcaggacggttatgtggtgagttttgttaaagccagcaactgtgcagacaacaaactgattgtcaaaaacacaagcactgggaaaaccgctgcaattgcaggattaagtggttgctcttttgatccgaagaaaaatgcagtaattatcttccctcaaaatgaatatgtcggcgtttacagtggtcctacaaacgcttctgaggaaatagcctcagtcgatctcccctaa

SEQ ID NO: 81268 - DNA, 192 bp, Citrobacter koseri
atgaaaactaaaaaatccccggacgatacaacgccagatgcagaatcatttgggctgacctggcccgttgttttcagcgtcacaggcctcactctgctgagaagtaagtcggtcatatgccagacaatgggagccagcctgatgacctatagcctgataagactcataaaaaaactcgccacgcttgcctga

SEQ ID NO: 81269 - DNA, 222 bp, Citrobacter koseri
atgaaaatcatcagtaagcgccaggcgatgcatatttatcgtcagcatcccgaatccaagttatctgccttctgtacaggtcactaccagtggcatggcagtgtctgccattactacggacgtgaagttcaggatatcagcggcgttctcgctgtttttgttgaacgtcgtcagggccgggcaggcccgtacgccattctgcgcagcgtgacagtgaactaa

SEQ ID NO: 81270 - DNA, 366 bp, Citrobacter koseri
atgcagtcgaccaccttatccggcacatcggcggagaacgcatcctgccttcagtggggtttaaaacgtaatatcacgccatgctttggcgctcgcctggtacaggaaggcaaccgcctatactttctggctgaccgggcaggatttaatggctcattcactgacgatgaagctttgcgtctggaccaggcatttccactgatgatgaaacagcttgagcggatgctgacggctggcgagcttgatcctcgcagccagcactgcgtcacacggcatcacaacggacttacttgtgaagctgacactctcggctctcatggttacgtttacattgccatatatccccagtcagctctaaccagataa

SEQ ID NO: 81271 - DNA, 321 bp, Citrobacter koseri
atgcatatttcaactgtaccggcaacggtgacggtttcgtcacgcctgtctcctgtccaagtttggcaaaaactattaacgtatattttagagcatcattacggcctcacgatcaacgatacaccgttcagtaacgatacgacgattcaggaacatatagaggctggagtgaatcttactgatgctgttaatttccttgtggaacgattcgagcttgtgcgcattgaccagaagggtttctcctggcaggatcaagaaccttggataacatctttggatgttcatcgggcacagttcaaccttggcttgaaacgctcataa

SEQ ID NO: 81272 - DNA, 447 bp, Citrobacter koseri
atgtactatgtcggtattgatgtcagtaagcgctctgtcgatgtttgcctcctcgcagagggcagcaaaggtagtcgtaagaccaaaactttatcaaacggtcaggattcagcacagaccctggctaaatggctaatactccagaagtgtgagatcagtcagacgcacgtaattatggaggccactggtatttatcatgaatatctctctcgtggcctttatcaaatggggattctgacatccgtgataaatccctgccgcagtcgtgcatttgccaaagcgatggggatctttacaaaaacagatttggtactgtgtcgttatgggagcacatcaccaacggtggtgattaacgtcagtcttttgacacaaggcctcagacgggaattgatgatctggcataccggttatttgtcgttattggttattgtgccaagtgctacctga

SEQ ID NO: 81273 - DNA, 1098 bp, Citrobacter koseri
atgaaagttaaagtattgtcttttttaatacctgctttattagctacaggaactgttcaagctgctgaaatttataacaaagatggcaacaagctcgacttgtacgggaaagttgatggcttgcattatttctctgatgatgatggtcaggacggtgatcagagctatgtacgtctgggctttaaaggagaaacccaagttaatgatcagatcatcggatatggtcaatgggaatatcagataatggctaaccagagtgaaggagacaatgattcctggactcgtgtgggattcgccgggctgaaatttggtgatgcaggttcattcgactatggtcgtaactacggtgtagtctacgatgtaacagcatggactgatgtccttccggaatttggtggtgatacttacggcgctgataacttcttgcaacagcgtgcaagtggtgttgctacttaccgtaacagcgatttcttcggcttagtcgatgggcttgatttcgcactacaatatcagggcaaaaacggaggaagtggcgagaccaataatggaagagatgatgccctacgccagaatggtgacggatttggtggttccataacttatgatattggtgctgggttcagtgtcggtggtgctgtagccagttcaaaacgtaccagcgatcaaaattctgctcaatatttaggtaatggtgacagagcgactacttatactggtggtctgaaatatgacgcaaatgacatatacttggcggctgagtatacgcagtcatacaatgccacgcgctttgggagttcagatcaccagcaaggctttgctgataaagcccagaacttcgaagtggttgcacaataccagtttgatttcggattgcgtccttctgtagcttatttgcaatctaaaggaaaggatatccaaggctatggtgatcaggatctcttaaaatatgttgatgtaggtgctacatactatttcaataaaaacatgtcaacttatgttgattataaaatcaaccttattgatgataacagctttacaaaagcaaccggtgtaagcactgatgatattgttgctttaggtttagtatatcaattctaa

SEQ ID NO: 81274 - DNA, 1032 bp, Citrobacter koseri
atgtctgaaatgaaaatcaccggcatcgatctggctaaaacgaacttttatcttttcagtatcaatgcttatggaagaccagcaggaaagataaaactttctcgcagcaacttgctcaactggctggtccagcaaccaccgatgacccttgctatggaagcatgtggggcatcgcatcactgggcacgggagatacaaaagcttggtcataaagcgattttgcttccggcgcaacatgtcagagcttatcagcggcgccagaaaaatgattataacgatgcacaggcaattgctgaagcttgccagcatggaaccatccggcctgtacccataaaaacgcttgaccagcaggatattcagacttttttaaaaatgcgccagctggtttcgatggaaaggacacagctgataaatcatgtacgtggacttctcgccgaatatggcattgtgctgaataaaggtgcaacagaactgcgtcgagtgcttccagcactgcttgaggatgctgaaaatggactcactgacaccatgaggacattgctgtatcggcagtataaccggctgattacgctggatgatgagctggaatggtataatgctgaacagaaaaaatacgttcgacaggatcctgtatgcaaacggttgttagccattccaggattcggccctctggtcagccaggcaataaaaagctggatgggggatggcaaacagtttaaacgcggaagagacgcctctgctgccttagggttagtcccccggcagttcagtaccggcggcaagcaggttttgctgagcatatcaaagtgcggcaaacagtatgtcagatccatgctggtacatggagcgagggcggtcctgttcagggctgctgagaaaactgatccactaagcgtgtgggttaatcgcctcagggaaaaacgtggatttaatcgagcagtgattgccctcgcaaataagctactgcggatctcctgggtaattatcgcccgcaatgaattatatttacccgtagtaatgaaaaatcattaa

SEQ ID NO: 81275 - DNA, 240 bp, Citrobacter koseri
atgcgagaaaatatgaaggtatctgccctgaacctgattgaactgttgaataagtcacaatatcaggaggttatgcagcaattttacaccaaacactgcaaaaagagcatggtcagtagccctgataccagcagcaatgatgttctgatcgtttcttcagatcggctacgtgtttttctctcatatggtggacgtgaatttacgctctactaccttggcggaggggatgttcttacgtaa

SEQ ID NO: 81276 - DNA, 309 bp, Citrobacter koseri
atgaaagctaatctgcggtcgggtaacttgccccatattttcctggtactgatcaatatgcagcaatattttatgttcagaaacccttccacgatatgtaaagtcagagtctgccccatttatcatattttcgcaggctatgattgtgcctctgccaaagtcattagcgcccatattgaaagaaatctgatatataccgtccttcataacccccccgatgtgctttgccataagcataagtctaagtgcatcaaagcatcatattttgtcctgaatcataaaatgttcatgtcttatatgacctcatag

SEQ ID NO: 81277 - DNA, 1038 bp, Citrobacter koseri
atgccaatcatagcagcaattcctgatgaagaacgacgactgatgtgtaaagaagcccaactgactcgtgataaaaaccatgccagacgactcattgccatactgatgctgcatcagggaatgaccgttaccgacgtcgccagactactttgtgctgctcgctcatccgtcggaagatggataaattggtttactttacatggtgttgacggactaaaaagcctcaaacccggacgcgcgcctcgctggccggtcgcagatatcctgcacatcctgccgtttctggtgcaacgttctccacaggattttggctggcttcgctcccgctggagcaccgagctgctggcgctcatcgtcaaccgactttttaatgtgacgcttcatcccgccaccttgcacagatacctgaaacaggcagatatagtctggcgcagagccgcgccaacgctgaaaatcaaagacccgaactatgatgaaaagcgccttgctattgagcaggcgctgactcaggagcagacggaacatcctgtgttttatcaggatgaagtcgacatcgacctgaacccgaaaatcggcgcggactggatgcccaaagggcaacagaaacgtatcgccacgccgggacagaaccagaagcattatctggctggcgcactgcactcaggtacggggcgggttcactacgtcagtggcagcagcaagagttctggtttatttatcagtctgttagaggaattacggcgtacatatcggcgggcgaaaaccatcacactggtggcggataactacatcattcataaaagccgtaaagtggagcgatggctggaagaaaactcaaagttccggttgctgttcctgccaacgtattcaccgtggctgaatccgatagagcgactgtggttatcgttacacgaaaccataacgcgaaatcatcagtgccggtatatgtggcagttactgaaacaggtaacgcagtttatgaacgctgtttcaccgtttccgggtaatcaacacggtctggcgaaagtggagcggtaa

SEQ ID NO: 81278 - DNA, 429 bp, Citrobacter koseri
atgaattttcatccatggattaatgcatttcatatcgccgccggtgttatatggactggtggtgttctggcgatggctgtcttatctgcttgtgtttccagctcatcaggtaattatgctggcaacatgcaacagacgttagctggatttatccatcgctggaatcgtaaggtaactacgcccgcgatgatcattctatggggctgcggagtggtcatgcttgtgtcacatggtgcgttaccgcatgcatggctgctgctcaaaattattgcggtattggcgatgtcagctctgcatggcatactgtcaagcggcatacgtaagatggtgaatggagaacaaccaagtcacaaactgggtatggctggctacaaagtggttattatcctgacggtaatcattattttccttgccgaactcaggccgtaa

SEQ ID NO: 81279 - DNA, 1011 bp, Citrobacter koseri
atgaatgaagtccaactcgctcacggcagcggcggccaggcgatgcagcaactgatcagtcagttgtttatggaagctttcgccaacccgtggctggcggagcaggaagatcaggcgcggctggatctggcagcgctggccgctggcggcgaccggctggcgttctccaccgacagctatgtggttgatccgctgttctttcccggcggcaatatcggcaagctggcggtgtgcggaactgctaacgacatcgccgttagcggcgctacgccgcgctatctctcctgtggctttatccttgaggagggtcttccaatggcgacgctgcaagccgtggtggaaagcatggctgcgactgcccgcgcggctgatatctccattgtgaccggcgacaccaaagtggtgcagcgtggcgcagcagacaaactgtttatcaataccgccgggattggcgcgattccgtgttcgattcgctgggcggcgcagtcgctgcaaccgggtgatgtactgctggcaagcggcacgctgggggaacacggtgcgaccattatgaatttgcgtgaagggctggggctggacggcgagctgtccagtgactgcgcagtgctgacaccgctgattgccacgctacgggatcttcccggtgtcaaagcgctgcgtgatgcaacccgcggtggcgtcaatgctgtggtacacgaatttgtcgctgcctgcggttatggcatcgacctgaacgaatccagtttgccagtaaaaccggcggtgcgcggcgtgtgcgaactgctggggctggaagtactgaactttgccaacgagggcaaactggtgattgcggtacagcgcgaagccgcagagcaggcgctgtcccgtttacacacccacccactgggcaccgatgccgcgatgattggggaagtagttgaacgtaagggcgtacgccttgaaggggcatacggtgtaaagagaatcctggatttgccatataccgaaccattccctcttatatgctga

SEQ ID NO: 81280 - DNA, 1122 bp, Citrobacter koseri
atgcgttttgttgatgaataccgggctccacaacaggtgatgcagttgattgcccatctgcgcgaacgggccgtgcacctgacttatacctctgcgcgcccactgcgtattatggaagtgtgcggcggtcatactcacgccatctttaagttcggtcttgatcagttgctgccggagaacattgagtttatccacggtcctggctgcccggtgtgcgtgctgccgatggggcgcatcgacacctgtgtggagatagccagtcacccggacgtgatcttctgtacctttggcgacgccatccgcgtaccggggaaaaatggttcactgctccaggcgaaagcacgcggcgcggacgtacgtattgtctactcaccgatggatgtgctggcgttggcagagaaaaatccgcagcgcaaagtcgtgttcttcggtatcggtttcgaaaccaccatgcccgcaacggccatcacgttgcaactggtgaaaacccgcaatatcgacaacttctggttcttatgccagcacatcactctgctcccgacgttgcgcagcctgctggagcagccggataacggcattaacgcctttcttgcacccggtcatgtcagtatggtgatcggcaccgatgcttacacgtttattgccgacgagttccagcgcccgctggtggtcgccggattcgaaccgctggatttgctgcagggcgtgctgatgctggtcgagcagaaaatcgccgcccacagcaaggtggaaaaccagtatcgccgcgtggtgccggatgaaggcaaccggctggcgcaggcggcgatggccgatgtgtttgccgtcagcggcaacagcgaatggcgcgggctgggcatgatcggtgaatccggcgtgcatttaaccccggattaccaacagttcgatgccgaagcgtattttcgcccggcagtacagcaggtgtatgacgatccgcgcgcccgttgcggcgatgtattgaccggccgctgcaaaccgcaccagtgcccgctgtttggcaacacctgtaatccacaaagcgcctttggcgcgctgatggtctcttcagaaggggcctgcgcggcctggtatcagtatcgcgctcaggagtatgaagtatga

SEQ ID NO: 81281 - DNA, 591 bp, Citrobacter koseri
atgtgtattaatatcagagctgcggctgtttccgtactggcactgtttccgatcatggcttttgcccatgtgggcactgatggcggcacgcaccatgtattaagttttaccgagggctttattcaccctctgaccggtatggatcatatggtagttatggtgctggttggcgtctggagcgccatgaatatccgtcggtggtggttggcgccgctggcgttctctggtctgttattgataggggcgttagtcggtatggcgggcgtgacgattgccggtacggagtatattgtcgcgagttctctgctgggtattggcgcgatggtggctctgcaactgaagctgcgcgaagcggccggtgcgctgattattggtgctttcgctattttccacggactggcgcacggggctgagctgtctcattccgcagtggcgctctccggtatggttatcgccacggccgggctccatctgattggcctggggattggatcgctggtgacattttcgtccacgcgttaccagtggtcatgtgtgattggtgggagttcgtcactgctggggattggtttgctggctggcgttatctga

SEQ ID NO: 81282 - DNA, 765 bp, Citrobacter koseri
atgtgcgataactgtgggtgcaatattccgcaccggagccatatcagcctgggcaacggggttattcatgccatctcaccggtgaaaagcgaagcctcccatacggtgcaggtgctgaaaaacctgatgcaggataacgaccatcaggcgcagtacaaccgtcagcattttgatgcccatggcacccgggtcttcaacctgatgtcctctcccggcagcggcaagacatcgctgctggaagtcaccatcgggcaactgctggcgcggggtttacgcgtggcagtgattgaaggggatctggagaccgaaaacgacgccgtgcgtctgcggcgtaaaggggttccggtggtgcagataaccaccggcatggcctgccatctggacgcacagatgattcacaacgcctggcacacgctcagcgccgacccggtggatattttgtttatcgaaaacgtcggcaatctggtctgcccggccagtttcgacctgggtcagcatcataacgtggtgctgctctcggtaccggaaggggacgacaagccggagaaatacccggtgatgttccgcctggcggaagccgtactggtcaccaaggttgatctgctgccgtactttacagaattcagtgcagaacgagtacgggaggaaatcggggtgttggcaccgggagccgaaatactgatgctttcaaccaaaatccaggagggcatgatacgttgggtggagtggcttctggataaaactcagcagagagtgggattctga

SEQ ID NO: 81283 - DNA, 249 bp, Citrobacter koseri
atgattgaagtcccactgttaaagaaactgcacgtgctggtgccccactggcgcgaacacaacgacgagcatatcgccgaaatggaaaagtacctgcacgcgctcgaggccgaagggcagaacgagctggcgaaccgctgccgggaaacgctggtacagatggcgctggtgagtgaaaaactggcgctgatggcgcaacagcttaagtcggtgaaactgccggggcgggagaaacgcgatgtgcgataa

SEQ ID NO: 81284 - DNA, 201 bp, Citrobacter koseri
atgtgtcaactgcgtgtgcgcgtgttgctggcggataaccgcgaagagctgctcgatgaagtcactcatattgcctgtgatgcggacaaagtgacgatttcgcgcctgttcgaagcggatcgcgagctgttcggttttgagattaaagagattgactgcatgcatagccgggtgctggtgaccccgcgtgcggcaggttaa

SEQ ID NO: 81285 - DNA, 771 bp, Citrobacter koseri
atgaaaatagccattgcaggcaaaggcggcgtgggcaaaaccacgctggcagggctgttggcccgttcatgggcggcagaggggaaacaggtactggcgatagacgccgatccggatacgaatctggcctcggcgctgggcattcccgctgagcgctgtgccgggctacagcccttttcgcgcatgaaagagctggcaatggagcgcaccggggcgggggcaggctatggcagcctgtttatcctcaacccgaaagtcgacgatctgccggagatgttctgcgtacagcatgaaggcgtgcgcctgctgcaaatggggaccgtcgagcatggcggcaccggttgcgtctgcccggaacatactctggtgcgtcgcctgatgagccacctgttgctcgagcgcgatgacgtggtggtgatggacatggaagcgggaattgagcacctcgggcgctcgaccgccgaagcggtggatgtgctggtggtggtggtcgaacccggccagcgcagcatccagactgcccagcaaattggccaactggcggcggatatcggtatccgcaagctggcgtatgtcggcagcaaaattgcccgtccttccgataaaaccttcctgcaatcggcgttgaatgaagaacagattctgggctacctgtcgctcaacgagaccattcgcggcgcggatttaagcggaagcgcgcctttcgatctcggcggcgagtttatggcggaactggcggttatcaggcaacgcctgatggccctgtgttaa

SEQ ID NO: 81286 - DNA, 1911 bp, Citrobacter koseri
atggatatcaaaaccagaacgagcgatcccgccaccatcgccttgtgcccggtagcggaacaagagggcattgcaaccgtattcgatcgtcatcagatgcaacaaccccagtgcggttttggtagccttgggctgtgctgccgtatttgctggaaggggccatgccgcgtcgacccgtttggcgaggggccgcagtacggtatttgcggtgccaacaaagacaccatcgtggcacgtaacctgatccgtatgatggcggcaggggcagcgggccactccgagcacggtcgccatattgcgctcgccatgcagcgcgtgggcaaaggcgaactgccggattaccagattcgcgacccggaaaaactgcgcggcgtggcgaaacgtctgtccatcgaagtggaagggcgctccacgcgggacatcgcgtacgacgtggcgactaaaacgctggaagattaccagaaccaggacagcaaaaaaccgtgccactggctgagtgcttctctgccaccgcgccgcctgtcgctgctgggcaaactcggcgtgctgccgcacaacattgatgccaccgtggcgcagatcatgtcgcgtacccatatcggctgcgacgcggatccgaccaacctagtgcttggcggtttgcgtggcgcgctgtcggattttgacggcatggtgctggcaaccgaactgtcggatgccatgttcggcacgccaaaaccggtggtcacccaggccaacatcggcgtgatcaagaagaccgccgttaacatcgcggtgaacggccataacccgctgctcagcgaagtgatttgcgacgtggcaggcgaaatgcagagcatcgcgcgtgatgccggagcggtcgacgggattaacatcgtcggcatctgctgtaccggtaacgaagtgatgatgcgccacggcattccgctggcgaccaactatctgtcgcaggagatggcgattttcaccggcgcgctcgacgcgatggtggtggacgtgcagtgcatcatgccgtcattgtcggccatcagcgagtgttaccacaccgaattcatcaccacagccgatgaaaacaaaatccagggctcgcgccacgtcagcttccacgaagaccatgcccgcgaaacggcgcgcaaaatcgtccagtacgctatcgacgcgtacggtcgccgtgacaacacccgcgtgaaaatcccggatatcaaacagactgccatcgtcggtttcagtaccgaagcggtgatggatgcgctggcattactgaacccggacgatccgctggccccgctggtggagaacattgccaacggcaatatcctcggcgtggcgctttttgccggctgtaacaccacccgcgtgaagcaggatgacagcttccagcagatggccaaagtcctcgcgcgcaataacgtgctgatgctggcaaccggctgtggcgcaggggcgtttgccaaaaacgggctgatgaaccagcaggcgaccgaagcctgggccggggattcacttaaagcggtactgaccgctatcggcaccgctgccgggctggaagggccgctgccgctggtactgcatatgggctcgtgcgtcgacaacagccgtgccgtgctgctggccaccgcgctggcggacaagctgaatgtcgatctcagcgatctgccgctggtggcatccgccccggaagcgatgtccgaaaaagcgatcgccatcgcctcctggagcgtggcgctgggcctgccgacccatttgggtatcgtgccgcatgtcaccggttcgaaagtggtgaccgatctcatcaccgaacaatccaaagagttgctcgacggctatttcctggtggaaaccgacccgacactggcggcggaaaaactggtggcggtgatgaaagagaaacgacgcgccctggggatttaa

SEQ ID NO: 81287 - DNA, 579 bp, Citrobacter koseri
atgaaaaaaaaggaaaatgtcatgatttacgccaatgcgcagaaatgccttggctgccatagctgtgaaatggcctgcgcggtcagtcacggcggggataacgggttgtttgatgcggttcgggaccagcttccgctccatccacgcatgaaggtggtggcaacgggcgaggccaatattccgatgcagtgccgccagtgtgataacgccccctgcgcgatggtctgccccaccggagcctgccgtcaaacggacggacaggtgtttatcaatgaggccaactgcgtcggctgcaagctgtgcgtgatggtctgtccgtttggctctatcaccgtacggcgcaccgagcagcaaagcgcctggagcgtgaccaaccagggcgtggcgcaaaaatgcgacctgtgcgtctcctggcgtaaagaaaatggcaaagaacataccgcgtgcgtcgaggcctgcccgacgaaagcgataagcctggtggatatgcagacctatcgtcaggcactcattaaggccagagccaaagagctggcccaatcccagaaaaatatcgatttggtcttaaggggaatgtaa

SEQ ID NO: 81288 - DNA, 339 bp, Citrobacter koseri
atgcatgaagcggcattaacccagggactggtgaagattctgattgccgaggccgagcgccatcaggtggaacgtatcacccgggtgcggctgaaaatcggaaaaatgcgcgcggtagagccgcagtcgatgaccttctgttttgctgcgtttgccgccggaaccctggcggaagatgcggagctggttatcgaagcgctgcccgccgttgcgcggtgtcaggcctgtggtaacgattttgaagtgatcaaattccattttcaatgtgccctttgtcacagccgggatgtccagcttatccagggtgacgaactctacattgaaagttttgatgcgtga

SEQ ID NO: 81289 - DNA, 246 bp, Citrobacter koseri
atgtgtttgggtatcccagggcaaattctggaaataaaagatgtcgacaacctgctggctgtggtgtcggtggccggggtcaagcgggaggtcaatattgcctgtctggttggcccgcagcagacgcccgaggactgcgtgggcttttgggtgctggtgcatgtggggttcgccatggcgcgaattgatgagcaggaagcggccgagatgcttatcgcgttgagcgaactcgatgagctcgagtaa

SEQ ID NO: 81290 - DNA, 3789 bp, Citrobacter koseri
atgggagtatcattgttcggcattccattactcgcatggtcaggaacattaatattattagccggtgaagtaatggcgttattacatatccgcaatctgtccaggctactgcttttttccacgctggcagagctgggctatgtattgttgggttttggtcttgatagcgcatcgggtgaaaccggcgcgttgatgcatttggggttacaggtggttatgcgcctgttgaccatcctcagtgcggcgtatcttattaagcgtaactgctcaagtgagctggataagctggcaggcagcggttcacgctggccactggcgtcattgctgtttggcttcggtctgttttccgtaatgggactgtccccctttaaaggctcattcagcaagtttctgattttatatggcgcaatggaacaaggggaatgggccattgccgcaatcgcgacgctggcgactattctggcgtcaatttattatattattgttattcagcgcgtgtgccttgagcctgataataatgccgcacctgtgacgtcgttcacagcggaattattatcagcgcgctggatcctgctgtttatattaaccggtgctacggtgtatctcagcctgatgccggaaccgttattgcaccttgccgaacactatgcgactgcctcggtaaaaactccggtaccgaatttcgaaaccccgtggcattactgggtaatattgccttatgctggcggctttgtgctgtacgtggtaggcaaaataaatgcgacattgcgcgactgttgcgcagtgattattgccctggccacgctggtgttggtctggcagcataataacggcgacagcctgtcccatttattctcggtactgtctgctggtctgattacggtggcagccatctattctcaggcgtatatgcgccatgatgaacacgcaaaccgctattatttcttcctgttcttaatggccggatccttgattggcgttgcttccgccgaggactttggcaatttctacctgttctgggaattaatgacctggagttcgtatttccttgttgttcacgagcgcacgccggaggcattaaaagccgggcgcaaatacttcctgatgtgctgcaccggcgcgtacatcatgcacttcggcattctggtctgccatacccgtttcggcagcttcgatatgtcgattatcgccgcgcaggctacccagttgaccccgacgtttgctgccgttatcggtatttgcttcctgattggcctgggcgttaaagcaggcctgtggccgatgcacggctggctgccggatgcccacccggttgccccgtcgtctatctcggcgttgatgtccggtattttgaccaaagccggtgtgttcgggctggtaaaaatctttcttattgtcctcggcaccagtctcaccgggcacctgctggcgttgggcacccatccggcgtttggcatggtggtcaccgggcttggctgcatgacggtgatttacggggaagtgatggccctgcgcgagcagaaccttaagcgcattctggcttattccacgctggcgcaggtgggtgagatcctcgccatgctggggctgctgaccagcctgagcgtcgccagtgcgctactgcacgtgatgaaccacgcgatcttcaaaaacctgctgttcctagccgcaggcggcctgattgcccacgccgccgggaagaagttgccggatatcgcaggcctgggtcgcgtgatgccgttcaccgccctatgtttcgccattggcgtgctggcggtgatgggcttaccgccctttagcggcttctttagcaagttcatgatgatctatgcagcggtaaaagccgacgcgctggccgttgccgccttgttcctggccggcagcgtattaggcgcgatttactacctgcgcattgtccgcgtgctgttcttctccccgtggaaaggtggcgtggtggaagacgcgccgctggcgatgcgggttgccaccggcatgctcgccgcgctggtgattctgggcggtctgttcccggattacggtttgcagcagtgggttagcccggttatcgcgcagattgccgaacatcaacagtgggccatccctgccctgccaacgctcaatcttgactggtctccggcggcgctgatagcgattgttggcgcgattgcgacctttatgcttggcaagcgagcgccacgccgcgccggaacgttcgccgtggtggtgatggcgctgacgctggccaccgtgctgaccgacgccgggcgctacgacctgctttcctggtggtttgccgcgctgattgcaggcgttggggtgatcaacctctgctatgccatcggctatatggatcacgcccacagccagcaccgctttttcttcttcttcgtctttatgattggcggtctgcttggcgtaaccgccagcaaagacctgttcaacttcttcgccttctgggaaatcatgagtagctggacgctctacttcgtgatcatccacgacgaaagcaaagcggcgctgcgcgaaggctttaagtacttcatcttcaactttgttggtgccacctgcatgttcctcggcgtggcgatgctctgcgcccgcagtgacgggttcagcttcgatgccatcgcacacgccgccagcaccatgtcgctgccgtggctgggtgcgggattagtgctcgtcctcaccgggatgttgatgaaagcggcacagctgccgtggcgcatcgattaccagatgcacccgccaacagcgccgacgccggtcagtggatacatctctgccgtgctgctgaaaagtgggatctacggggtgcttaagctgttcgctctcggcggcgcgggcatgctgtttgttcgcttcggcgagctgggcagcaccaatacactgatgtacgccattgccattatcgccaccctcacgctgctgtacgccggggcgctggcgctgattcagaacggcatcaaacgtctgctgatttacagcaccgtgagccagcttggctacatcctgctggggctggcgctgaccacgccggaagggattgccggggggctgatgcatctggtgaaccatatgctgctcaaagacattctgttcctcgccgcgggttgcatcctggcgcaggtgcacgtgtcgagtctggatgagctgggcggtctggggcgcaaaatgccgctgaccttcgggatgttcctgtttgccgggctgtcgctttcgggcattcctccgttaaacggcttcgcctcgaaatggttgatttaccaggcagcgttccagagtgggcactatctgctggggttgggcgcgatgatgtcgagcctgttcaccctggcggcggtgttgaaattcgcccatgcggcctttatgggcacgcctgagccacagctggaaaaagtcaaagaggcaccgctgagcatgctgctgccgatggggctacttagcctggtcgcactggttgtcagcctgctgcctggagtgctgctggtgccgattagccatctgatggcggtcagcggtcttgggcagatcagcgtcacctggaccgggccgctgccgggcaccaacggctggcacccgctgaccatgtggatgctggtagcggtggtttgcgttgtgggctggctgttttatcgcctcagcaaccgtcagtcgcagtcgattcatttacaccagggcggcgtttgtgacctgaccccggtgcaggcgcatgttccggcttcagcgttgtatcagacgcctgaacggttaatccgccaggtgctgcatccccgggagaaggaataa

SEQ ID NO: 81291 - DNA, 954 bp, Citrobacter koseri
atgatgacgtcacttttcgcgccgctgataatttttccgctgggcgcggcggccctgatttttggcctgttgctcaaaggggtggatcgtatcgttgtggcgcgtctgcagcgccgcatcggccccccgctactgcaaccgtttttcgacattatcaaactgatgcgcaagcagacgttagtaccggatggcgcaccgcgccgtctgttcctggcgctgccagccattggcgtgggcagcatgttgatcgccatcgccctgctccctgtcgccaatgtgtatcagccggcggcagaactcggcgatctgatcgtgctgttgtacctgatcacggtcccggccgtggtgctgatactggcgggttcctgctcgggttcggtttacggcgcagtgggcttctcccgcgaaatggtgctgatcctcgcctatgaggggccgttattgctggcactggcaagcgtggcgatgaaagtcgggctggcacagggcggctgggtcaccttctccctgggcgagatcgtggcttaccagcaagaacacggcgcattcctgttcgacccgtggatgtggcctgcgctggcggcctatgtgctgtttatgcctgccaatcttgggatcgccccgttcgatattcccgaggcggaatccgaagtgctggaagggccgattctggaatacaccgggccagggctggcgctgtttcatctgatgtcggcgctgaaaacgctggtggtggtgggactgggcatcacgctctttttccccaacggacctgcgggcatcgcgggcgtgctggtgctgctggtgaaatgccttgttgtggcctgtgtgtgtaaaacgctgctgcgcgccatggtgggcaggatgcgtatcgatcaggccttttggttctatctgaagtggcctgaactgctgggcattattggtcttatcagcgtgctggctcaggcatag

SEQ ID NO: 81292 - DNA, 429 bp, Citrobacter koseri
atgacgttattgaactccatcgccacccgctccccctggctgtaccgcatcaatgcgggctcctgcaacggctgtgatgtggaactggcgaccaccgcctgtattccgcgctatgacgtggagcgtcttggctgtcagtactgcggcagcccgaaacatgcggatatcgtgctgattaccggcccgctgaccatgaaggtcaaagagaaggttctgcgcgtgtatcaggagatccccgaaccgaaagtgacggtggcgattggcatctgcccgatatccggcggcgtgttccgcgacagctatgccgtcgccgggcccatggactgttacctgccgattgatgtcaacgtgccgggctgcccgccccgcccgcaggccatcatcgaagggatcgccatggctatcgacatctggcgtcaacgcatttag

SEQ ID NO: 81293 - DNA, 579 bp, Citrobacter koseri
atgaactttcttaaagtcctgattcgcaacctgcgccaggggccatccaccgaccccttcccctttggcgaaacttttacgccagaggccctgcgtgggcgcatcgcctttgatgcctcgcgctgttcggtgtgtcgcatgtgcgaacacgtctgtgccggtggcgccattcattttgaagagacgccgcaaggagtggagtttgtgctctggcacaacacctgcaccttctgcggcctgtgcgagcactactgcgtgccgaaagcgattcacctgaccaacgactggcatctggcgcataagcaggaggacaaataccgcatgatcgaagagggcaccatgctctttcagacctgtatgtcctgtagcaccgcgtttctgcccgccagcccggcactgatggacaaggtctatcagacgccggatagcgttgatgccgccatgcgccagctgtgcccgaattgccgtcaggcccgcgccgccgcgcagcaaaatacgccgggcatcgacctgattagcgatctcgggattactcaacgagatccgcaccttaaccaccgcgagaagcgccatgattga

SEQ ID NO: 81294 - DNA, 531 bp, Citrobacter koseri
atgattgacgatatcaagcaggcagaagccctgtttaaccaacacctgacgccgggttttagctttaaaacccaggtcagcaaatggggggtggcaaccgcctgggtgaaactgaccagcccggtgcaactgctgcctgccgcccagagcatcaaacagctgggtggacgcctgcataccatcagcgcctggcagcgcgtggaaggcaagcctacggagatccacgagattgcctaccactttgatctcgacggctcggcgctgaccctgacggtgttcctcgccgaaggccagcgcgacatcccgtcgctgaccccggtgtttcacaatgccgactggaacgagcgcgagtttatggagctctacgacctgaacgcggcgggacaccccaaccccacccgcctgtttattgacgagaacattgatgcggcagtgctgcaaaaattcatcccgttctcggacatggtgaacgccgccagcaccaaagcgctgtgggaaaaaatcatgcagcaacgtggagagaaacaatga

SEQ ID NO: 81295 - DNA, 1083 bp, Citrobacter koseri
atgacccgttatcaaatgccggttggcccgctgcacgtggcgctggaagaaccgatgtactttaagctcgacctcgaaggggaaaccattaaagggctgcatatctctgccgggcacgtacaccgtggtatggaatatctggtgatgaagcgcaacttctaccagaacattaccctgaccgagcgtatctgttccctgtgctccaacagtcaccccaccactttttgcatggcgctggaagagattgccggcatcgacgtgccgccgcgcggccactatctgcgcgtgatcgccgatgagatcaagcgcgtggcgtcaaacctgtttaacgtcggcatcatggcgcacattatcggctttacgtcgctgtttatgcacgtgctggaaacgcgtgaaatcgtgcaggacattaaagagaccctgtacggcaaccgtatggatctgggggcgaactgtattggcggcgtgaaatataacctcaatgccgagagcatcgcctacctgctcaagcggctggatgaagtggccccggcggtggacgaaatccaccagatttacaccacccacagcagtatcctgacccgtacccgtggtgtcggtgtgttgcccaaagagattgcactggaatatggcctgattggcccggtggcacgcgcatccagcgtggaatatgacgtgcgcgccaaaacgccgtacgccatctacccggagctggattttgccaccatgacccgtcctgacggcgacgtctggtcgcgtgcgatggtgcgtcttgatgaggtgaaaatggccatcgcgctgatccgccagtgcctggcgcaactgccggaagggccggtgtcgatttcaggtttgccgaccatttcaccgggcgaagcggtggcgaaaaccgaagccccgcgcggtgagttaatttactacctgcgcaccaacgggacagatatgccggagcggttgaaatggcgtgtgccgagctacccgaactgggatgcactgccggtgatgatgcgtgataacacagtggctgatgtggcactgattgtgaacagcatcgacccctgcatctcctgtaccgagcgataa

SEQ ID NO: 81296 - DNA, 672 bp, Citrobacter koseri
atgcgatcaaaaatgagggtatcggcgctgaatttgatggatttgcttaatcaaccatcctatcatcacatttttcggcagttccataataaaaaatgccataaaggcgagcgagtaagcggtccgggtatgcgcaacgataatatcctgatcgtctcctctggccagttgcgcgtttttctctcttatggagagcgggaatttacgttgtattatcttgagagcggcgatattttttcgacccatactcgggcatatattgaagcagtaaaagaatcggtcatacttacgttgcccacaaaaatatttcaccagcttctgatgacctatcctgaaataggaatgcaaatgacaggaatacttggcgatatgttaggcagctcatgggacattattgaaagtattattttccacgatgccaaaacccggctgattgccttcattttatcgctgggaaaagaacgcggtatggtgacggagaacgggacggaatttgaatgcgatctcactatggaagatatttcgctgattattggctcgacccgccagaccacctcctctttatttaatgtcttaatcaaagatggcgatattatgcggattggcaaaaataaatacgccatcggagatattacagcactgagtatccggctcgcggagtataaagcctga

SEQ ID NO: 81297 - DNA, 297 bp, Citrobacter koseri
atggccgctatccatgaagtactggcgaaatgcagtgcggaaaaccccgtgttttacgaagatgaagtggatattcacctcaatcccaaaattggcgcagactggcagctacgtggacagcaaaaacgcgttgtcacgccgggccagaatgaaaagtactatcttgcgggtgcgctgcacagcggtacgggcaaagtcagctacgttggtggaaacagtaaaggttcgtccttatttgaacgagtaggtgctcaggggacagaacctgctgataaccggcccctgtggttgcggtaa

SEQ ID NO: 81298 - DNA, 921 bp, Citrobacter koseri
gtgctcaggggacagaacctgctgataaccggcccctgtggttgcggtaaaacctacgtgggatgtgccctgggcaacaatgcctgccagcagggttacaacgtacagtactggcgtctgagccggttgctggttgaactgacacacagccgggcagatggcagctacaggaagcagcttgcacagctgtcgaaaacgcagttgctcgtcctggatgactgggggctggaaccgctactgccggcgcagcgcaacgacctgctggagctgatggacaacaggtacggaaagaatgccacggtaatgataagccagctggccgcggtggcgccgctgctgtgtgcgggcatcaccacctggtcgccgctgcgtcactggaaggtcggtcccggccagaaagtcggcgtggtcggcatcggtggactcggccatatgggtatcaagctggcccacgccctaggcacccataccgtagccttcaccacctcagaaagcaagcgttccgcggctctggcgctgggcgctgatgacgtcgtcatatctcgtaatgccgatgagctgaccgcccacgccaacagtttctatttcatccttgacaccgtagccgccagccataatctggatgtctttaccggcctgctgaagctcaatgggaccatgacgctggtcggcgtgcctgagcatccacatccatcaccgagcatcgccaacctgctcttcaggtgcagatctattgccgggtcgatcatcggcagtatcgtcgaggctcaggaaatgctcgatctctgcgccgagaaggggatcgtcgccgacatcaaattgatcccgatccagaagatcaacgatgcctacgagcgcatgctcaaaagcgatgtcaaataccgcttcgtgatcgatagtgccacgctggcggcggtctga

SEQ ID NO: 81299 - DNA, 1254 bp, Citrobacter koseri
atgcggccagacgacatatttcttgttcagccgcattttcagtatacaagcaatgcgtcagggattgtatcgtacaaaaatcgggtaccgccgctactgattcggacctgttttggctccggccacggagcacgttcaatcaacttcatggaggggactattttgtctgaaccactgctgctcatagagcatccgctttcaccctatgcccagaaaatccgcataatgatgcgtgaaaagggcattgtgttttcaacctatcacccggtcgtcggcgataaaaatgatgtattacgccggcaaaatccgcgcatggaagtcccggtgctcaagatcgacgacacgacaatgctgtatgactcgacggtaatcctcgaatatctagaagaggctttccctgagacgtccatgttgcccccctccccactggaacgcgccatggtgcgaaccattgaagacgtttgcgatacgcactttgaagcgatcaactgggggctgcttgaattgaaatatttccgccgggggacggacatctctcacgatctctatgccgcggcaaaacacgacgtccccgggcatgtccaggcgagcctcccccgggcactggaaaccgatgagattcctcgtattacgcaggattttgttgatgccggaaatcgagcgatagaggccggctttgatggtgttgaagtacacggagctcatggacacatatttgaacaatttatcaatggtgagctgaatacccggcaggaccgttacggtggttcgattgagaatcggctacgtttcctgcttgagactctggacgctctcactgacgcaattggcggacagcatgtcggcgtgcgcctgtctccttttggacggctccttgggatgcgacccttcgcggatgaggctgaaacctggctgacggctgcgcgtgaactgggacaacgcaatctggcctacgtgaatttaagtaaccagcatacgatgggcacagagcatgatactgagtttttcaacgaattccgaaacgcctacgaaggcacactaatcatagcaggtggttacagccgtgaaagtgcagaagacgcactgaaaaaaaataaactggatttagtcggctttgctcaccattttgtgtctaatccagacttagtggatcgcctgaagaatgactatccgctggctgggatcgatggaaccacgctttatggactctatggctcaagaggatatacggattaccctcgttattcagaataa

SEQ ID NO: 81300 - DNA, 408 bp, Citrobacter koseri
atgcgcttgttgattgatgaacacaaattcagctgggaagatgcgtttgaggtgtgctgccaggtcttctcctacaccaaccacacgctgatgagcgaagcgctggaaacctggtcggtggatatgctgggtaaaatcctgccgcgtcatttgcagatcatctttgagattaacgactacttcctgaaaacgttgcaggagcagtatcccaacgataccgctctgctggaacgggcgtcgattagctatgtcgattgccaggataaggtggatgaattgtatcgtcatcccgaaaagtggatcgcgggagcgatgctcaatatcgccaatatggggtatttctcttctgacaggacgatcaaggagtatgccgaaaatatctggcacattgattcggtaaggttgtaa

SEQ ID NO: 81301 - DNA, 1455 bp, Citrobacter koseri
atgaataattctaataataccattgacattaaattagcgtttcctctgtggaaaggactaatcactttattatttggaataatactctggtttattccgccaccttcaggtctttatgccaatgcatggcatatgtttgcaatatttgcgaccaccatctttgcgattatccttaaagtcatgcccatgggcgcagtcactatgatcgcgcttattttttctgcactcaccggagttactccgctctcagcaaaaggagatgcggtaggcgcgctttctggctttgctaatgcgacgatctggttgattgggatagcaatgtttatttcgcgtgcggttattaaaaccggacttggaaggcgagttgctctatggtttatctctaaatgtggttcgaacatgctcggtgtggcctatggccttgcgctctccgatctcgtacttgggcctggtataccctcggcatcagcgcgcgggggtggcattatgtatcccataacgcagtctattgccgctgcatataattcagaaccaggcgcgactgcaagaagagccggggcttttttgatgatctgcgtgtcacaaatagatgcgatcgtctgcacgatgttcctgaccgcgatggcgggaaacccgttaattgctgaactggccagaaaccagggcatagaaattagctggactacctggtttgttggtgcgatcgttcccggaatagcttcactcgttctcctcccgttagccctttactttatttatcctcctgaattgaaaaaaacgccagaaattcccgatattgcccgtgaagaattaaagagaatgggaccgatgtctttggctgaaaaaatactggcctttgatttcatgctgttaattcttctatggactgtaggtgatattttcttttcgatttcagcgacgctttctgcctttattggtttggcaattcttcttctgtcaaatattatgtcatggaaaaatattatagaagagaagacagcatgggatacgatgttctggtttgccgtacttgtgatgatggctaacgccctgaataagtatggaatgatatcatggatatcaaaagggatcgtaggctatgtcagccattttgaatggttaaccgtattcttggtgttggtattaatttacttctatacccgttattttttcgcatcggcaatggctcatatttctgccatgtatctggcatttcttgccgtcgccatttccgtcggtacgccgccgctctttgcagcattagtgctcggttatacctctaacctctctatggggttaactcagtattctggtgggccgggcccagcactatttggctcaggttacaactcaaccgggcaatggtggggggtgagttttgtggtttcgatcatatccattctgatatggcttttactcggtggagcatggatgaaggttatcggatattggtag

SEQ ID NO: 81302 - DNA, 240 bp, Citrobacter koseri
atggcacatgttctgggggaaaggataatggaagcgctggagcgtcttctggtgctgctttcggcatttgaagtggtggtctggatgacagatggttggccgctgtatgaatcacgactgaagggaaaattacatgttatcagcagagatatacacagacatgacctcgatctgagtctgcatcgagcaagggctgggcaggaagtctctgttgttttcaacatcggtcgaacggcatga

SEQ ID NO: 81303 - DNA, 225 bp, Citrobacter koseri
atgtcgcgcaaaggatgctcgtcggataatgcggcgtgtgaaggcttcttcgggcgggtaaaaaatgaaatgttctatggcagaaactgggcaggtataacgctggaaaaatttatctgcttcctcgacaggtacatacattggtataacgagaagcgtatcaagctatcattaggtgcaatgagtccggtgaagtaccggcagcatcttgggagcacaacataa

SEQ ID NO: 81304 - DNA, 345 bp, Citrobacter koseri
gtgtcaaaaagcctgaccgtacagtatgacaagatgctttatctgattgaggacagtgaatacagtcgaagggccatcggcaagtatatcgatgtctggcattatcctggcgggcataaggaactgagactgaatggcgtgctacttccctactccacctatggccggttttctgaagttgatcccgttgcgattgttgataacaaaagactgggccatgttctggacgttgcccgccaggtccagactaaccgggacaataaccgttcacagtcagtgccttctggcgatatccttcccgaagacggcatgctcacagcgccaacaaatctcaacgcttgctga

SEQ ID NO: 81305 - DNA, 339 bp, Citrobacter koseri
atgaaaaaaatcattttcgcactagcaataactttaactggttgttcatccaaaatccccgcaaattataaatgtacggatttagagtctaagcaaactcacaacatcacacttatcggaaattctttgaaatatgatgctgttgaaatggaaaaatacgacacaaaaaaggttaaattcgcaagtgatgaagtaaaaattgatacgtctattgatgttttcaaaaacaaagtaggcaatgattatgtatcaatgactaaacatgaagggaaattaatttatgtgtatgcgtcaaatgtaaatgcggataaagccgtatcaatgggaatatgtaactaa

SEQ ID NO: 81306 - DNA, 174 bp, Citrobacter koseri
atgcagaagtttagtgtccctttccccgttcaggactgggctgtcttcaaagacccgaaccctttcttcactcagttttggaaaccggcgctcgccctgtgttgtggctgtaaaacgacaacccccaccgaagcagggtgcctgaaaatttatgtgaagatgagttccccgtaa

SEQ ID NO: 81307 - DNA, 1230 bp, Citrobacter koseri
atgcagtttcgtttacaccatttagtcctcatcccacttttaactctcgctgcctgtaatcagtcagccaccacagcgccttcaagctcactccccgtcgcggccaggcaccaaacggcagtagtgaataatgccagacttgagatttcggccagtgcactggaatacaacacgcaaaaaattcaaaaacttctgggcaataaatcctccctttgcgccattttgaaaggagatgcctatgggcacgatctctccctcgtcacaccgatcatgttgaaaaacaatgttcagtgtattggtgttgccagtaatcaggagttgcaaaccgtacgcgaactgggtttcaaaggtcgcctgatgcgcgtaagaaacgccacggagcaagagatgcggcaggcgacggaatatgatgttgaagagctgatcggcaatctggatatggccaaacgtctggacaacatcgccgctcaacaagggaaaacgttgcgtttccatttagcgctcaactcgggtggcatgtcacgtaacggcctggaggtcagtaatgctgccggggtgaacgaggtgaaggctatctctgaattaccccatctgaaaatcgttggcatcatgtcgcactaccctgaagaagatgcgaacgcagtgcgcaaggatttggctcgtttcaaggtgcagtcccagcaggttcttgatatcactgggatcaaacgcagtgacgtcacactacacgtcgccaatactttcgcgaccctgaccgtgccagaatcctggctcgatatggtacgagtcggcggtgtattttatggcgataccatcgccagcacggactacttgcgcgtcatgacattcaagtcatccattgcagcgctcaaccattatccgaaaggaaataccgtaggttacgatcgcacttatacgctgaaacgtgattcagtgctggcgaatatcccggtaggttatgccgacggttatcgccgcgtatttagcaatgcaggtcacgtccttattgcggggcagcgcgtcccggtcgtcggtaaaacctcgatgaataccgtgatggtcgatgtaacggacctgaaaaacgtcacccctggcgatgaggtggtgttctttggtaagcaaggtagtgccgaaattaccgccacggaggtcgaggacattagcggtgccctgtttacggaaatgtcgattctctggggcgcgacgaataagcgcgttttggtggattaa

SEQ ID NO: 81308 - DNA, 258 bp, Citrobacter koseri
ttgcaagacgaaaagcatcaaccgtacttttttaatccagatatgaccgccgaacaacctgaagactggctggagcagaaaaaacttcaccttactcacttcaaccgtctggtgaaagaaaaaaccgcccttgaggaacggctaactgagatttcatcagaaattgagtggctgtctactgggggctttgaagaaaaactgagttttctttgggatcccagtccgctcctgagaaatcgtcaacaggataatgactga

SEQ ID NO: 81309 - DNA, 447 bp, Citrobacter koseri
atgagtaattactcagaccttttccaaatcatcaagaacagagtttgccagaataatgattttccggcgtattcactgatggaagagaataactaccgggccagccaggtatggtatcgaatcggacagatattcacccttgaatgcgtcctttctgaatacagaaaatgccactcatcaaattattatctgctggacaacaaaaaggcacttcatcaccttatttttcaaataacaaagtggaatctggaggacatcagaaggctatctcttaatgacagtctgtttattatttcagacaggctaaaatctgattacatgtcagaagaagctgcggaatttctccgttcgcaaaaacttccggtcagtcattatcctgttgacgatttctcaggagcggactgggatcccaaagaaaactcagtttttcttcaaagcccccagtag

SEQ ID NO: 81310 - DNA, 612 bp, Citrobacter koseri
gtgcgcctgtttgcctcaggtattgctgacggcccggctacttttgtcgaagcgaaagcgatgaagctttctcacagtaaatcgatggtcaatggcgatccgaccattgccggcatggctatcgctgaagcttgcgaaaaaaatctattaacatttggttctagcgcctatcagacggtggagaataaagtggtcacgccggcgatagaggcagtcgtcgaagcaaatacgcttctttcaggacttggctttgaaaatgcgagactggccgcggcgaatgctatccataatggttttaccgcgattgatggcgatatccatcatttgactcatagcgaaaaggtcgcttatggcacgctgccccagatggtgctggagcagcgcccggatgaagagatagctcgttatatccgtttttatcgttcaatcaaaatgccaaccatcctgaaagaggtacatctggagaatgagagccgggaaaacctggtgaagctaggcgcgctggcaaacagcgaaagcgacacgctgaaaaacctgaatcctgacctgtcagcagaggatatcacttatgccatcctggcggtggatgccttcagcaaaaccgttaactga

SEQ ID NO: 81311 - DNA, 246 bp, Citrobacter koseri
atgaagaggcaagacctacacacactgagcaactttgattttctggcccgcagttttgctcacaggcacgcccttggagtccctgtaaatatcagtgcgattaccggcaatatgaatgcagagcaaaaatcgtggtttgaggaacgttacagatattactgtattcaggaggagcgcacgaaagtgcatgaacagcacaataaaaccactggacagtatgagtcagcatgtcctcaaaaaaagtaa

SEQ ID NO: 81312 - DNA, 492 bp, Citrobacter koseri
ttgtccccactcagtgctcatgcctttttgcttcgctggctcgcgacggcacaaaagcaaaaacggttcccgcgtgcgattgcatccaatattgaggaattgctgacactgggtcgaagcaaaggccctgtcgccagcttacttcatcgactggaatatctgtgggcatcctgcacggggcaggtacccgcccagtcggatttgtaccggctggcttacgctattgaacagcttaaatcgcagggctgggttaatgctgtggtcagtgacgaggaatggggctgtgaaggtctggccgaagaatacagcggaactgatgcgctgcttaccagaaagtcggcactgacctgtggattttcgggggagggcaaactgattgcaccggttgaatttcttgtggcgggtgacttgtcagcctgtgtggctgttttcctgtcccatgcactccctgccgtcatgcgtaagcctgaccggatagcattacagccctga

SEQ ID NO: 81313 - DNA, 309 bp, Citrobacter koseri
atgctgatgaacctcaatacgctggtggcagtgagaaaatcgccacctatggatagcgtgttgcaggagatgtatgccattactggcgaagcatggcgcacagtgacgaaaacggataacaacgtctccagcatttcttctttcattatcagtcgctcagataagcattcatttacacagccattcagtcagttacagacccgggtgaatgggatgacatatcccgttatgacggccagaacgagtgttatttgtccggggatgtcgttcctgctgcaatcaggggggatgtcagttattctggcctga

SEQ ID NO: 81314 - DNA, 231 bp, Citrobacter koseri
atgagctgtcgtggtaactgtcacgacaacgcagttgcagaaagttttttccagctactgaagcgtgaacggataaagaaaaagatctacggaacacgggaagaagcccacagtgatatttttgattacaccgaaatgttttataacagtaagcgtcggtatggttcgagtgatcagatgccactgacggaatatgaaaatcaatattatcaacggctcagaagtgtctag

SEQ ID NO: 81315 - DNA, 9300 bp, Citrobacter koseri
atgaataagatttacaacatcatatggaatgcggcgctcgggctttggattgtcgcctccgaattatcaaaagggaagaaaaaaagcagctcgcgtaaaacgggattgcttatcgtttccggtatattcgctggcgtttctctcactgccgtggccgatgacacacgcgatatcgccgtggattacaaggatggtatttcggctggcgtccatcagaacgtattcaactacggttttttatatgaaaaccaaaacaacgccaatgaactgaatatcaccggggcgatccccacgatagtctacggacagaccggcattgtggaatcatcgaccatccgggatctgctggaaagcggcaaaattattattaccgccaccaacctcgcccacgagcaaaaatccatcaccacaattgaagagctggcggaatacctgagtcatacacagtcgtctaccccgcagcaaagcgtggaatttcaagtgattgacccggccgatcccgagacaacctccaccctgaaggtgtttgataccgcaagcctggcaaactttattagcgtttcgcaaattggcgatgccgtgcttaacacgtttgatgccaatgtgtcgcaaatctataagcagtttggctttgcccttgccaaagatggcgcaaccgccaatctcaatattggcgataattcactgaaagtaagagaaaatgctatccgtctgctggcaaaagactcttctctgctcaaagcgcaagacctgaacagcaaggtcaactggcaatccgataactacattcagtttggtgctgcgccggtcgttccgaacaaaacctttgccggttcgaaacagaccaccgtgtttggcaaagacattaccttaatgacctacggctacgacgaagagggcaatgtcgttgaaacgggtaaccgcaccttttccatcaaaagcacggcggacctggcgaacttcaacaactggctggttggcgccggcagtgagagcgccaaaacccccgacgggcaagatatcagccagatccagctctggctggattttggcgctatcagtaaagtttctgacgcacagacctactacgcgagcctgatcaatcaactgctgacctccggtaccaatgccgacctgctgacctgggattacgatgtctggactgacggacaggcacacaccaataacaccacggcggccacaggggaactgcatgccatctacgctaatggccagggcaccacaggcacattggttgcgggcacaactctggctgtcgatggtagtatcaatggggcaatgaaggccgatggcgagggttctatcgtcaatgaaggcgccctgaacgtgctgcgaaccgctaccggacaagggttggcgattggcatgctggccagtgatgccagtgccactaaccacggcacgattaactccggtttgtttatcgacaaagatggtaatcagaacgtcagcagttacggtgcctacggtatgcaggggctgggaaacagcaccgtggtgaacgaagggaccattaaccaggccatcacaacgaacaactacggaaccgcagctgcagccgacccatggtcaaccgataaacccaacagttctctgacgcttgctatcggtatgcagttgtccgatcaaaccaacgggaccaacaggggtgagattaacgtcgtggacggacgcgctaacggcgtctcatttggcaagggaacggcttacgccgttgaagtgtccggttatgccaccttcacaaacgctgctggcggtaccctttaccttgggcgtgatgccgtcacccccgctgacgatgttgcgatgggcggcggtgccagccccagcgccgggatcctgacccgaagctcaggcgatgtcaccaatgacggaacgatcaccctcggaaaaggcgtacgtaacgcggcggggatcctggtcggcaacgccaccgggaacgtgatcaacacgggtaaaatcaccctcaatggcgactcgtcgtccggcaccagccagaacttcggtatttccgtgcgcgacagcggcagcgaaaacggccagcagatccgcaacgacggcgagattaccgtcaacggccacaacaacatcggtatccatctgaccgccagttcgaagaacgcgcatgtaacatccagcgatacaggggcgatcacggtcgcgggcgacggcggcacatcaaaccgtaactatgcgatctgggctgagggaagtaccacatcccaggccaccgtcgacgtgtattccacaatcacgctggatgaagtcggcaacattggcgttcatgtccgcgataacgcggtggctaacattaacagtaccagcagtccgctgttcaacaatagcgatcaaataggctactacctgtacggcaaaggcgcgaccgccaatatcggcgaagccgttatgaacgataacggtcaggcgcgcaccacgttattccgcattgcgaatggcgcaaactttgccggcaatacgttcgacccgctgacgcaccagctatctaaactcgagatgaccttaacgggcgaaaaatcaattggcgtcttcgcgaccggtaaaggcagcaccgtggatacgggtgaagcaacatttacggtaagcggcaacggtgcggcggcactgctgctcgaagggggcgcagaaggcaccatcagcgataagacccttattgaactgaccggctcaaataccactgccgggattgtcgatggtcaggcgcatcagttgaacggtaacaaacagggtacccctgtcgaaaccattcttaactccagcgccatcattaaatccctggatactgggctgaacgtcatcgcctatgtggcgaagaatctcggcaacatcgttctgcaacaggacgcggttatcgatctcgccagtaaagacagtatcggtgttgacgtgcaagaaggaggacggttaaccaacaacgcatcccaggcattgcatgtcagcaacgggattggcgttcgcgcctctggcaaagatgcgcagatcaaaaagctgggcgcgattgaggtcgatgacggtaccgcaggcgtgctgctgaccaatggcgcaacgctgaatatcactgcgggaaccggtggattagccgataccattacgaccaacggcacggcggatgggattcgccttgaagccggtgcggggtcgctgaccgccaaaggcgtcaccatcagcgcattgggcagcggcgcaggcattcagaaccatgccgaaagttcggatatcacgctgaacgacgtcacgattaacgccaacgacggtccggggatccgcaccagcgtggcgctgaacgtgaaagacggcgccaataatatgctcaacgtcactggctctggatcaggctttgccttcatgaaagagaacggcgacaacgcgaccggcgatttggttatcggcaccggttacaccgtgctggtacacaacgataccggaaacgccacggggaacgggatcgatgcccgcaccaacggcagactgaccacccgcgccgatattaccattcaggacgcgacgggcggttcagccattctggcaaaagacgtttccgccatcactaacagcggcaacatcacctccaacagcgtgaagggtccggtagtggatgccagtggcgacagcagcaaaaccatcaccaacagcggcacgatcctcgccgccaccgatcaggatgtcgcgattcagtccggtaaaggcaatgacaccatcaacatcagcggcggcaatacgcgtggcgtcatcaataccggcgccggtagcgatcgttttatctggaacagcggaacgttcgccggggaggtgaacttcgcggggacaaccaacaacaaggccaacatcggcaacgtatcgctggcgaacacgcgccacatcaccacgctcgccggtacgggtaacgccctcaccttcacaaacaccaggggtaatatcggtacgctgctggcggatgacctcagtctgggaacccacattggcagcggctggaataccttaacgctgacgggcgcacaggcggatatgcgcatcgtgaatagcctgacgctgactgacggcaccctggccgttaacgacggcgcgacgctgcgcacgggcgaccatcgcgatgccagtaataccggcgcgaccattggcaactacagcattaccaccagcggtaaggccagcaatatcatctttgatacgcagggcaatgacgctgacagccagatttatcagggcaccatcagcggtagcggcaactttgtccgcgcaacgggtggcacgacggtgttcaccaccgacaatagctacagcggttccactacgatcaatcagggcgggattttacatctcggtcagggcggtacgacgggcggaatcaacccggtttcgcagatcattgatgacggtattctgaccgtgaatcgcagcaacaacgtcctgcttaacggagtgatttctggtatcggcgcgctggagcaaatcggtaaaggtatcacccgtttaaccggcgccaacagctataaaggggagaccaccgtcgacaacggcacactgctggtcaatggcgatcagtctgccgcgacgggcatgaccaccgtgaacggcattgcaaccctgggcggcaccggcaccctcggcggcgacgtcgtgatgaatgacgccaccacccttagcgcaggcgacggcggcgcggggacgctgaagatcaacggtagcctgcaactgggtagcaaaaccacctccgcgtttgaactgggacaagccttcgtgcccggcggcgcacaaaacgatctggttgatgtcgccggcaatctgctgctcgacggcacgctgaacgtcagccaaagcgcaggcggcacgtttggcccaggcgtctaccgtctctataactacggcggtacgctcgacaaccagacgctggcgttaggcgacattccggtgggccaggataagagcaacattttcgtccagacggtgctggataaacaggtcaacctggtcaacgccaatggcgtcacgctgcagttctgggatggcgcacagacgggcgaaaaccacggtaaaaccgggattgaaggcaacggcaaaatcgacggtggcgatggcaaatggatggcgatcggcagcctgggcgataacaactggacacagcaggacggtatcggtaacgcgccgtgggcgcaaaaagccttcgcggtctttaccggcaacgccggtacggtcgaggtcgatcagagcgcgggcaacgttcagttctctggcgcgcagtttgacgcggacggctatgtcatcaaaggcgatgcgctaaacgcatgggaaaccaccgcgggcagcaatgagctgatgctgcgcgtcggtgccggtggcgcaggcgataacttcaccgcaacgatcgaatcgacgatccgcgaaggtgacagtgcggatagcctgacgctggtcaaaaccgaccagggacgtctaatcctcagtggcgacaacacgtatcatggcggcacgcgtatcgatggcggcacgctacaaatctcgacggataacaatctgggccaggcgggaaccggcgtcactatcaacaacggttcaacgctacagctgggcgcagatttcaccactcagcgcactctcaccctgggcacgtctggtgcgaatgccgtgtttgatctgaattcgcaccacttctcccctgttggcgatatcgcgggcgcgggcaacctgaaagtcaccagtagtacccatgatgcggccagcacgctgtcgctcgatcgggctaacagctatcagggcacgacgctgattgaaggtaccggacaagctcacaacgtcacggtaaatgccagccagacgggaacatttggtagtaacgccagcagcacggtgagcgtaacgaaaggcgcgacgctgaacatcagcggcgcagcaaccggtctgcaatccctgacgctggacattgccgacagcctgttaacgctaaaagacacggtcactgccgccgacgcgacgctgaatctgaacggcacagcaaaggcgctgattgcaggcaatgcaaccgcaggacagtcgaccattaacgtgtcagaagcgagtacgctggcgctggaagaggatgccagcggcggcagcgcaacggtgaccaacagtggactgatgtcctttgccgatcgggcgctggcggaaatgactaccgtgaaaaacctctccggcggcaacgtggatgtcagcaacgtcgacagcgcgacgtctatcggttcgctgtccggcgcgggcaacgttgtactgggcgataaaaccctttccctcggtaatctggcgctggatgacaccatcagcggcatcatcagcggtgacagcggcaatctggtgaaaatcggcgacggaacgctgaccttaaccggcgacaacacctggaccggcaccacatcggtcgatgagggcgtactgctggtcaacggtaatcaggcggcagcgaccggtgacgtaacggtcaaggcgggcgcaacgctgggcggcaacggcattattggcggcgcggtgaatgttgcggataacggccatattaccgccggttccacacttaacagcgtcggcaaactgaccaccggtgctctgacgctgaatgagctgtcgcagctggattatcagtttggccaggcgtataccccgggcggagccttcaacgacctgattaacgtcaacggcgatctggtactcgacggcaagctcaacattgaaacctcacccggcggcaattttgatgtcggcgtctatcgcgtcattaactactccggcacgctgaccaacaacgtgatggacattgccaacgccccgacggcggcagacagtctgtacgtgcagacatcggttaacaatcaggtcaacctggtgaaccacggcggtctgacgctgcgcttctgggacggcaccggcggtgaaaatggcgaactgaaaaacaacggcgtgatcaacggcggcgacggtatctggcaatccagccacggcaacgataactggaccaccgatgaatccacaccggaaggcgcgctgaacgctccgttcaccgatgccgctttcgccgtcttccagggggtggcaggcaatgtcaccgtggataacagtctgggtgatgtgatcatcagcggcgcgcagtttgccaccgatggctaccgcgtggcaggcgatgccatcaccaccgacaccgccaatacgctgattcgcgtcggcgacggcaccgtcgatggcgcaggctatatcgccaccatcgacagtgagatccgcggcaccggcggcgtcaataagagcgacctcggtacgctgatcctgaccggcgagaacagctacagcggcggtacaacgattacggcagggacactgcaggtttccggcgataaaaacctcggcgcagccaataccgggatcacctttaacggcggcacgctgaagtatggtgatgcgtttaataccgcccgcaaggtgacgctggaatccggcggcgggaccttcgacaccaacggacatgatgtttccctgttaacggaagtgggaggggatggtcaactgaccaaaaccggtaatggctcactgacgttgacgctggataacatctacactggcggtaccactattgagcagggcatattgcaactcggcactggcggcaataccggcagtgttcagggtgacatcgttgataacggcgtgctcagtgttaaccgcgccggtatgctgacgttaaccggtaatatcagcggcgaaggtcagttgcatcagaccggtggcggcacgactgaactgcaaggtgaaaacagctacaaaggcgcaacgcttgtcaccagcggggttttacaggcaggtaataccaacaccctgagtgcatcatcgcaccactatattgtcgcgggcacgactctgaacacccagggttataaccagaccgtagcaggactgaacaacggcggtgatgtgtcactcatcggtcaacaagttgggacaacattaaccatcaagggggactacagcggtgaaaaaggcactatcaacatggcagccgcgcagggtgctaacggctcgggtattgccgaccgcctgatcatcgatagtggtaaggtcagcgggagtacgttgctggatgtcgatggttccggtctcggcgcgccgactatgggtgatggtatcgaagtagtgacggcgctcaatggcgcaacaaccacggcgcaaacctcgcgggatgccttccatcttgtcgccgaacgtatggctgcgggtgcctttgagtaccagctccatgccgggaatgcgcaggggcagggcgaaaactggtatctgagaagcgaataccgtccggaaacgatgctgttctccggtctcgccagcattgttcgtcagggcgacatcagcctgttaggtaatatgcaccagcgtatgggggatgacatcaaaccgggtattgatgaagataatcgtgcatgggcaagaatgcttggttactccggaaaaactaagctggatgacgcgactgggacacaaaccgacagccataccatggggatccagatgggggttgatctgtacgctgatagcaactggaaagccggtgtctacaccagcattctggatatcgacagcagcgtcaaaggcagcaaagcgggcagcgcgggtaaaggcggtaatatcgatgataacgcattttaccttggcggatatgccacatggttctccgggcatggcatatacatcgataacgttctgcaatacggtagtcatgatgctcgcctgtctgtatccgggaacaatggctcccacacagtgaaagggcacacgctgaccgcctccacggaagtcggaaaggcgttcagtttaggggcgagtgtatggagtctggaaccgcaggcgcagttgatttatcagtacagcgattttgatgacagcacgctggggggcgcgacgaagacaaaagtcagactcgatactgccgattcgtttactgctcgcgtgggtctgcgcctgaagggcgattatgatacgaacgccggaaagattcagccttatgcccgtgtcaacctgtggcaggggctggggtcgaaagacaaaacccatttcagtaatacggttgccactaccacgctggaatcctcacagcagtattccagcactgagctcgcagcgggtatgacatggaatatcgacagagatctgcaggtttatggcgaattgggcacccaattcagcaatgggagtaataagtctcagatcgaagcgccggttaatgcctcctttggttttaagacaatgttttaa

SEQ ID NO: 81316 - DNA, 591 bp, Citrobacter koseri
atgtacagggtattttttttaggggagtcagtgcttatctttacgggaataaaagaagtgttacttcgttgttttttgtccgttgatgttattcatgtccctttgaccagtgatggtcttttgcatgattctgtatctgttcgtaattctgatgtggttatagtttctcctgatgaaaaaaacttattaagatattcaggattagtaagaaacatgaagcaacccgttattatcttttctgaaaaaaaagtgtataagctgattgagattgtgtgtggcagaggttgttttttaattgagtccaattcttctttaagagtgtttagtgagaaactttctttttttatcacttacaggaactttgttaaaggagcttttcctgtacctaaaagagcaataacggaaattgaattcaggattatgataatgatatcaatgggatggtcgcttacccggatagcgttgtctatgaatagaagtgtaaaaacaatcagtacacacaaaactaacatttctcaaaagctgggacttaatagccaacagctaaaagcatttcttgccagggaagactttttaaattacctgttttaa

SEQ ID NO: 81317 - DNA, 219 bp, Citrobacter koseri
atgtttcattgcccgttatgccagcatgccgcccacgcacgcacaagccgttacatgaccgatacgacaaaggagcgttatcaccagtgtcagaacgtgaattgtagcgccacgtttatcacgtttgagtcggtgcagcgttacattgttaagccgggtgaggttaatgccgccaggccgcatccgttgccatcaggtcaacaaactatgtggatgtaa

SEQ ID NO: 81318 - DNA, 966 bp, Citrobacter koseri
gtgctgacgctgtggcttggctggcaggggacggcgcttctgaataagggcgatttcacggtcgatgagattgagcacaggggcgcgcctgatacgctgaccattcgcgcgcgcagcgcagactttcgcggaacgctcaattcacggcgtgaagaatcatggcacgacaccaccctcggtgagctggtcagcaccatcgcaaaacgcaataaactgacggccagcgtcgcggattcgctgaaaaaaatcccggtgccacatatcgaccagtcgcaggagtccgacgcggtatttctgacccgactggcagaccgcaacggggcgacggtgtcagtgaaagcggggaaactgctgtttctgaaagctggtagcgcgatgacggccagcggcaaacccgtcccgcaaatgacgctgacccgcagcgatggtgaccgtcatcagtttgccattgccgaccgtggagcttataccggcgtaacagcaaaatggttgcacaccaaagacccgaagccgcaaaagcaaaaagtgacgctgaaacgtaagccaaaagagaagcacctgcgcgcactggagcacccgaaagcaaagccggtcagcaaaaagacgaaggccaaaaaagagcaggaggcgcgcgagggtgagtatatggccggtgaggccgataacgtgctggcgctgacgacggtctacgcttctaaggcgcaggcgatgcgagccgctcaggctaagtgggataagttgcagcggggcgttgcggagttttcaattacgctggcgctcggtcgggctgatttatttcctgagacacctgtacgcgtgtcgggctttaagcgcgtcatagacgagcagtcatggctaatcagtaaggtaactcacaatctgaataatagtggcttcacgacgggcttagagcttgaggttaagctctctgatgtggagtacaaagcggaagatgatgaggggtga

SEQ ID NO: 81319 - DNA, 1002 bp, Citrobacter koseri
atgaacgaaaatagtgctgactggctctggcaggaacttatggatgagtactttttctgtaaatcgctgcgcgaagataccgagtggagttataagaaggttgttcgtggtttcaggaagcatatcggggaagcctgtccgccttacggcataaccagtcgcgatgtgcttgagtggcgaaggcatgtgctcaagaagcagtgcctttctgcacatacctggaacaataaggtcagccatatgcgtgccctgtataattttgccatcacttctcaactgacgaacttaagtaaaaatcccttcaatggcgtatcggtcaaacaggacaagaagcgtaaaaaaacgctaacaaaaaaccagatgacaaaaatctggctaactatgcagcaatttgcttctgagcccagaaccgaatctaaatgcgctctgaggccagtatggtactggctgactgtcctggacaccttgcgttacactggtatgcggcaaaatcaactgctccatatacgtctaaaagatgtgtctcttgacgatgggtggattgaattaagagcggaaggcagtaaaacgtaccgggaatggcgggttcccgttgtcagtcatttacgaccgagactggaagcattgcttcagcgtgcaagggactgcggtgccggcaataatgatgcgctttttcactatgagcggtttgtctcttcgcctgcagaaagggcgtctctttcggaaaaaccatcgctgcaaccgttacgctctttttttcgtagactgtcaaaagagtgcggatttgatgtttctccccaccggttcaggcacacccttgccacgacactgatgagctcgcctgaacgaaacctgcagctggttaagggattgctggggcaccgcaacgtgagtacaacaatggaatatgttgatatcagtatggatattgtgagccaggcgctggaaaaggaaatggcactttacaccgataaggctgaagagatgttttacaatggttga

SEQ ID NO: 81320 - DNA, 1644 bp, Citrobacter koseri
atgcgcgacagaatcaggactctgaggtttctgttttcaaaaggtgaaccggaaccagcacgtcatgtatccgctttcacacctgccggctaccacgctccgcgtacggtcgatacgctgtgctgtagcccgttgagaaaaacctgcctgcaacaaatatgggaaaacagctcacttccggcggatgtttatcaccggttttatataacgccactgcatggcttactggccagggtacagaatgtgccggcaacacagcagggaaggtggtcgcagtcagacggcttcggggaccttacgctgcagttcacaacctgtgcggtcagactggccaaaggatacatgtttccacccggagctgcgccagaagagcaggcagagcaaaacgtgatgtggaatacggtcattttctggtctgcactgttctggcatttgccgctcctggcgtctctggagggggagctgcttgatggtaaaagctggcttccgggaataaccgttccggactcgccttatcgatttcgcttccgggaagctgacaactcctcagcttttgcagcgctggcagccggacaacttatgccagcggaagcgacaggctggctggcagaaaatcccgaagctctgggcaatcttgccggggccttatggaaccagcatccggcaatgccgttgatccgaagcctgatgaaacaagcagctgagaaaacagagtctcctctgatggagaggaaacctgcggaaattttaggttcttatgcaggtgaaattccagtaaatacagccctttcaaatgaggggggcgctacggttttacctacagatatgttatctgaacaaacagctctgagcggggcaactgatccatcttcccctgagatctttacacttgccacaggtattgataaccccactcagcttagtgattcaccagttaaaagccgtgaagaaaacgaagcagaaagtgttttaagcgaaatcgaaaaaagtactggctctgactctctgccctctgaagatgatgctgatgctctcctttctcttttcgacatgtcaggagatgctaaagcttcagaaaatgaaggtgaggtacaggcaggcgtgtccgttgtgattgcagaggaacagcaatcgtcagaaccccttgaaaagatagaagaccccgcaaatgaaaaggaaccgtctgcaaaaggaaactcggactattctcaggttgcaattgttaacaaatgtgatgaaagatcagattccgtacccgtagcagtctccggtactgacgtagcggaaggagaacagttttttgactggctccgggagggactcaatcggggagatattagttttaatggtaaagcagacaaaatccatgttattgccggctatgtctttttacccgtccccggtatctttttcgactaccttaaggccactggttcgactattcaacgggaaagcattcaggcttcttttgagcgacttaacctgcataagcgtcgtgataacaggagattttattttgctcagctttacgatacacccgacaagtccgggaggttcaaacgggtaaaaggctacctggtgaaaagcaggcgggtatacagaaagaccatccctcaggacagtcagttcattttgttcccctga

SEQ ID NO: 81321 - DNA, 1509 bp, Citrobacter koseri
gtgacctggaaaacaacagccgaacaaaacgccatcatcgaatggaagggtaatcatcttgtggtaaatgcgtttgcaggcacaggcaaaacctccacgttagtgaactacgctgaagccaacccggaaagtaagatgctttaccttgcctataatcgcgctgtgcgggatgaggctgaacgcaaattcccctataacgtagagtgtaaaacgtcgcatcagctggcatgggcccgtttcggcaggcatttccgtgaccggctgacagccagtctgcgcattacggatgtggcccgcaagctcaatacccgccactggccgctggcgcggctggcgctaagcgggctgaacatgttcctctgcagtgcagatactgagccggggctgatacatctgccgtctgaggatgatcgccacggtctcgatgccggtaaaattctgggggcaatccaaatcctctggtatgaaatgagccgtactgattcaacctttcccgtcacgcacgacacctaccttaaacttttccagctttcacatcctgatttatcaacacgctgggataccatccttttcgatgaggcgcaggacgctaacccggtgaccagtgcgtttgtactgaatcagccctgccgggtcatcctggtcggcgaccgctaccagcagatttaccgctttcgcggggcggataacgcgctcaatgcccctcagctggcgcaggcagacaaattgtggctgacggcgagttttcgttttggccctgaggtcgcgcgtatggccaacatcctgctggaccgtgccggtgaagataaacaggtaacaggcaacgggggggaagacagtgtggtgacccgaattccggagggaactgagcacattgctgtactgagccggacggtatccggtgtgattgggagtgctttaacggcaagtctcatggagaaaaaggtcttctgggtcggcgggattgaaggctacaagaccgaagagcttgaggatctgtactggttctccgccgatatgcctgaaaagatgcagtccccgcgcttcagccgggactaccgggattttgacgagtactgctcgatagccaaagccacgcaggacgtggagatgaaccaggctattcgcctgctcgatgactttttcccgctccctcaaaagctggccattatgcgccgtcaggtcgtcactcatgaaaaagaggctcaggtcacggtttcaaccgcacaccgcagcaaggggctcgaatggccggtggtgatgctgagtgaggattttaccgacattaccgacccgcttctttcgcaggatgagcggcaggatgagaccaacctgctgtacgtggctgtcacccgggccagaagaacgctcgtgcttaacgagttgatgcgctggctgagcgatgaaggcgggaaaaaccgcgagacgacgtacgaaaccgtaccgtccggaaatggagagagtgccgacagccacgaagaaacgggaaaaacttctgagaatgagtaa

SEQ ID NO: 81322 - DNA, 684 bp, Citrobacter koseri
atgcctggcatgattaaccacgaaaaagcctttgttaagttgttcagtcagacggcccggtatcatcaccggtttaaagtgtttgaagacttcatcagctgcagcgtcatcgcgctggaaaaccggcttcacttcagtgaagcgcaggagcaaaagtatctgcgtatagtcggtggatacgaaaaggaggacgtcacgcgcatggcgcagctgctggcccacgttgttaacgggctgggtgaagcgcccggggacttccttggccgcgtctttatgcagctggagctgggtgacaaatacagggggcagtttttcacgccctgggacgtggccagaatgatggcggccatgcagctgggcgacactgaagcgttgttccgtgacaaacccttcatcaccctgagtgaacctgcgtgcggtgccggctgcatggtgctggcatttgctgatgttctgcaaaaggcggggtggccaccgcaccggtatctgtgggtatccgcgacagatatcgatccgcttgcggccggaatggcttacatacagctgtccctgtgcgggattgccggcgaagtggtggtaggtaataccctggcgaatgaacgacgccggatactctatacccccgggcactatctcggcggctggcctgttcgtctggatccacggtacttgcaggcggcataa

SEQ ID NO: 81323 - DNA, 933 bp, Citrobacter koseri
atgtccgaatggtgtcataaccgcctggaaatcaccggtaaatccgtctgcattgatgtcatgctgcagtggataaacggaactgacgtaccgcgtcaccgccacgcagtgcagcagagcatacagctttttctggctggcgcggcggggatactcaagccggtgcgcacaacgtcgtatccgccctgtcaggggctggtccgtgcaggcacagggctttccactgcggccaatcaggcgtttgaaagctggctggcgctcctgctgaaggatgccatcctcgatgcggaaaccatccgggccattgaccggctgtatcaccagtcaggtctgggcgcgctgaaatgggagaatattcccgacccggcacgtgaggttatggcggagctgattgccaggcaatacaccgactggtttggtctggtcagcgccggcgatgagtctgatgccgcaactgcctgggagcggctcagccagtatcctgaacgctcccagccctgcgatatgctggccgtcatacctacgcggctggcagcagagctgaacggttccggagggctgatgtcaggcgtatcgaccacaaccagcctctactgccggcagtacggcatggagtggcctgccgggcacaatgtcaactggcagcggcattcgccaaacagtcttacgctgcagatggatacgccctggcttccgccgtcaggtgaggttgtcggggaaatttctgcggtatttgactgcgaggtgcgtcacagctacagcgagcccgtgagcgggctcagcggttacgactgctatgacggcggcgaacatgtcgacggacacaaaggtgcggccggcgcgtctcagcccggtcaggtgctttatctcgtcagcgatgagccggcgttatcgactcaggaagcagcatcttatcgtgaggtccgggggtaa

SEQ ID NO: 81324 - DNA, 987 bp, Citrobacter koseri
atgaaaaaaacgacttcacacaaggcggcccgccgtctggcaaaacatactgacctttatcgtcagatcaccgaccgcattgttgtcgctctggaaaacggcgtcgcgccctggcgtaagccgtggcgcgcggctgccggcatcggtctggccggtctgcccctaaatgccacaaccggacgtcactacagcggcgtgaatgtcctgcttctctggatgtcagcggaagagcagggttttcgcaataaccgctggatgacttaccggcaggcgcagcaggctggcgggcaggtgcgtaagggtgagaaagccaccctggcggtggtttataaggactggacgaagcaggcggaggatcgcgaaggcaaccgcctttatgacagtgacggtaaaccgctgatggaaaccgtgccgatgcttaaacccctgcagctgttcaacgctgagcagtgtgaggggttgccggcagaggttgcggcttcacctgagcaaccgccgacggtggatgaggacggcatactcagcccggacgtgatgaacagggtgatccggatgtttaacgccacaggggttaaacaccggatgctgcctcagaaccgggcttattaccgtccgctgacggatgaaattgtgatgccggtggctgagcagttttttacggaggcggactgctggtccacgctgctgcatgaactggtacacagtaccggtcatgcgaagcgacttaaccgggaggggataacctcctcatcccgcaagttcggggacccggtgtatgcctttgaggagctcatcgccgaaatgggcagtgcgtttttgtgtgcccaactcggggtattcggtgaggttcagcacgacagctatgtggaccactggctgaaggtgctgaaatctgacaaaaaggccctgttccgcgcctgccggcatgcccgggaagcgtcggaatatctactggcactgcctgaaagtcaggctgtggcggcgtaa

SEQ ID NO: 81325 - DNA, 348 bp, Citrobacter koseri
atgggactggatatttttctctacagccagcacaggcagatcgtcgcagtaccggcaccgtatcatccggtgtatgaactgagccgcgatttttcactgattacctgggtggataagcatgtcggtgaggtggaaaacgcgacctgtctggaactgtcacgcgagcatattcagcaactgaaagagaggctggactgtgcgattgcgacatttacagaggggaatgaggataatcagcttcttcagcgccggctgcagtacgttttcaccctgcgtgacaggctggaaagcctgctcagtgattttgactttgaacatgaatacctgtggttttatgccgcatggtaa

SEQ ID NO: 81326 - DNA, 603 bp, Citrobacter koseri
atgctttttttcgacaacaaagacctgacgaacgtcctgctggccgcccgcatgcagggaggtcagcttcacctggcaaaggatgagggtgtttatcttatgccggccaccggtgcctggcagggcaacgatccggtgccgcgtattgcgtatgccacagggtgtcaccctcagaaaaatgaggactggtacgacacggcacgcctgcttgccggcggcgatgatttcattgaatcactgtcgataagcgacgcggtagccacctctgtactgtccggcaggacggacctgaggatcctgattaccgacacacagatacaggtgctcaccgcagcgactgaccgggtgaaagtcgcgcagtaccgccagaaagccgatcagcttctggcgagtgcagtctgtcacttcaatgcctgtgtcgggcctgatgaactctgccgctggcgtgaaaacgccgtgcgtctgctaaagcaggcggccttcatcagttgtaagcgggcgaagcctgaagatcatcaaacctttctgaacgcctgtggcaggctgcaggccaggttatcgcaggtgaccccgcagggggcgctgcgaataaccggacgttaa

SEQ ID NO: 81327 - DNA, 648 bp, Citrobacter koseri
atgaaaaacctgttttcttcgccggcttccatgtcggttgtctacaccatcgagcacgtcagcacggttccgttgcgacactggcatgctttcgttctggccgtcacagaaactttctggcaactgccggtgcgtctgcgtccggggaatacgtatctgccgtcgcttaatcgcgcggctgacctctttccggttgctgatgtcatggcgttttgtggcgacacaggcggcagtgtctggccggtcaacatgacgattgagcgtgagcgcaaccgcaatacgctgagtatccaggagctggattttcagcatcagccctgcgatttctttgcacgcattgtgatggtcctgctgcataacctgtgtccgggcagctttcggatacattcttctgacgaaggccgcagctgggcgttaccgttacgctggattgagcgacatctcggcctgcctgagcagccgacgctgaccgcgcctcagccggtactgaaaacgccggtgcgtggtgacgcgtttgattccctgctgctgcagctgctctgcggtggtgagcgtgtgctgagcaacgacgactggaatgcgtttacggaggctgaatttcagctgtatgaactgaagcgggtcgcggaaaaaactgacgcgctgtaa

SEQ ID NO: 81328 - DNA, 366 bp, Citrobacter koseri
atgcacacagacgtttatacgcttaaaactccactggacacgctcagctggctttgcctgcttgagagtgaacttctgagcataagggcattccagcgtctcgatcttcatacggaccgggatgaaccgaatgaactgacgtttctggaagattccatcattggcaccggcacagcttatggctggtttgtctttttactcggggaaggcgatattccgcctttgcctgatacgtctaaaaatttgctcttcacgctggacgagctgggaaaagaaattaaccggcccttctgggagaaggccgtggatgaaggtatccaggatgcccggtgtgatcgggctatagcggctctcgaacggatgtaa

SEQ ID NO: 81329 - DNA, 276 bp, Citrobacter koseri
atgactgaagcactgcacgatgtcactttccgtattctgtcgatgtctgagacgcgacgggatgtatgtcccgctcagtatggccccgtaagtggtgttttcatccgggcgaaatcctcagagataacgtctcctgtggcgaacaggtttttgtcgcaccgctcggtgattgtgatccggctgaccccgaactctgtgtatggtgtcagtattacggatattctccccgggtggaggctggcgacatactggatggcgtggccgtttcgggcataa

SEQ ID NO: 81330 - DNA, 369 bp, Citrobacter koseri
atgtctgtcatctcttttgcggttttccctgaacatctccttactcagcttcagcagtctgctgacgcagctgtccggagattgaaatctttcatttatctgcatcgcaacagcagctggtatgtcaacggttcgggcaattatgccgtccgtgcgcacatcacttctgtcaaagaccagggcgttaacgtctttcttaccgttcgtacaggttgccaccgcgccgagtatgtttttcaccgcctgccggtttcctttcctgagggaataacaggtcgtcgaaacgcataccgccatgcttgccgtcaggcacagcatctggcacacctgcgctaccgttttctttccggagggcattctcatgactga

SEQ ID NO: 81331 - DNA, 222 bp, Citrobacter koseri
atggtctttctcaccttctcttttcgccatatcggatgttttcccgtaaagttgattccaggaaacgcctatatagggtgcaaactcacggcgtatttcatagcgcagccggagccccagctctgtgtcagtcagtcccctgccgcgaccccgcgattcatcatcctgactgtagaaattcacctcataggatggctggagtatgagccggttagtcagtaa

SEQ ID NO: 81332 - DNA, 2733 bp, Citrobacter koseri
atgagattccaccctgaagggccttccatacccgatatcctcttagaacgctgtgatacaggtcgagttgtatttctctgtggcgctggggtttcattaccttcagggatgccaagctttgtagagcttacccagcatgtaattgaatactttgacccaccacacgattcagaaatcatggcagcatttcgcccatggcttcacgaccaatcttcagctaatgtccctctcgaccaaattttcaacctcctacatctggaatatggcaaggatgaggtgaatgctttggtatcaaagcgtctggggactgcaagaactgatatagagattggacgtgagcatgccctgattaaaagaatttcctcaaatcagagtggtgtcccacagattgtcacaacgaactttgaccgactgttcgaggataaccaagcgcaagataatctaactcgatatgtgccgccagctttcccaaatctgaatttcggttcgacaattgagggaataacatatcttcacggccgcctggtcgacgaaaatgctgtaaaccatccttatgtgctgagcagtgcagactttggaagagcatatctttcagaaggatgggcgaccaattttattaagcttcttctggaacgatacatcgttgttttggtcggttatcaggcagaagacccaccagttaaatacctccttcagggtctcaatcatgatggccagtatgatcgttccagactttatgcatttgatcgcggccttgccgaggatatcgaagccaaatggcgtgacagaggagttacagccatagcctattccgatcatccagctctttggaagactttggaagcatgggctgagcgagtagatgatccacgtcgatggcgagcttctattatcgctaaaagccagcaagatccgaaagttctagcaccgtatgaacgtggtcaacttgcccatatacttcgcactacacaaggtgcgaaattgttctctgaagctgttcctcttccccatccagagtggctttgtgtgatggatgcaaatattcggtcagccaaacagaagaaaagatactacgaacttgatgacaatgatgcagagaccttcgatccacaagaagcttatgggcttgatgacgatctgcaagatatcgctgatgatgaacgtaaacgtggagtgagtaacgataatctccttgaatggcgcgacgaagatgataacccgtcagattaccatcgcttggctggatgtttggagacaatgccgaaacgattgagccatctcatggtctggttctgcaaatctcttgatagccccgtgatggcttggtgggctatccgaaaaatcagtattcatcctctactactacaaaatattgaacgcaatattgagcattcaacatcaatccacaaacgcgctcgtcaactgtggggcttaattcttgaacatcataaagatccccgcaatcgtcgttatgacgtcgattggtacgacttaaaagctcgaattacaaaacaaggctggacagctggtgtcttacgagaatttcgtagggtaatgacaccccgattggaaaagaagttgccgtatggattgggtgaagtcagaccgccaagcggctcctgggaggaaattcagttcagcgaatttggccaatttgaagttgtgttcaccgaaagacatgatgacgatttagacgtacctgacaatgtattactacaagtatttaatgccttagaagcgcaaataataattgcctccggaatgttagaggatattgatacgcactactttccaagcccaagttgttatccagaacgtgcggttgaaggagaagaacatttcgcgaaaggtgcggaggtattaacttggtttgtccaacttttagaccgagttgttatgaagtggccagaattggctaaggcatacgtaacaacttggccagttaaggagccatttttcttccgaaagcttagactttatgcattcagtaaaaaaggcgtctttgaggctgaccgtgttgccgaagagcttttgtctttggatcaaagtggattttgggacacaaatattacccgcgaacttctttttctgctcactgatcgttgggaagaattctcgcaagaaaatcagaatcgaattatagagcatatattaaccggcccgaaccatttactttatttgtctgaggaagacattccaaaagaaagagagatattagcagctagatacgctcgttatctcgaactaaacggctgtaaagtaaccactattcatcgtgaccaactaactgcgatgattaaaagaattcctgactggaatgatggctgggctacatctgttgtcatcaattggggttcacggacaggttgggttcgtacagacgaaaagccagatataatcttagatcttccagcaaacgaaataatcccaaaagtaaaagagatacttaaacgagaggatgatagctttactagtaggcaaccctttgtcggattgataaaagaaaatccgcgtaaagctttgtctgcactcgctattgcagggagaggcggtgattaccctaaggaattttggtcgccaatgataagtgagttacctatagatcttaaaccaagggtgagacgagtattcctgaaccgaattgtgcgattgccagttacagctttggtcgagttacgacatacattaagtaactggcttgaacaaaatttagctgcgactcggctttgttga

SEQ ID NO: 81333 - DNA, 825 bp, Citrobacter koseri
atgggcaatgtatcaattattactaatgctcttgggcgttttgctaacaacatgcgcctctatggagaagccttcttcagataccatcagttggtagcaatcgaccacgaagaggctatccataacctagatcgagcatttgagcaaaatcttgaaggttttcatactttatatgatgtatcacaagcaatattggattttcatgaatttcctgaaaccagcctcctaatttccatccgaaatgctcttcatcatcgtgaccatcctttgtttcacagtcttcttcagactatttggctggatgaagaagctgagcgtctgcttggcgcggaatatctaattgctaggcatcgaacgataggaggaaatcctccaccgatgatgcatttgataaagttagaagatgtttacagtcgcttagatccccgctatgaatcggctcacataaatccaatgggtaaagcaaatgctttacccagatttatctctctggaaaatggctttgccttcgaaaaagtgtgggctaaagcgaaaaaagatcgataccctacaaaacaggtgtatttagacttgttgccgatattcaactctgctgtttcgagagtttttactgcattggataatgcaggagtgccgttccaaggattcgatgcaaatgcctataaatctgtatttattgatgaattaaagacagatcttcagcattttgatttttttggtctgagaatgcacgcgctgcagatagagttaggccccaaattgacaatacaagaagcttgtataaaacggggctgtacctatgagaagatgatggtggacgaatag

SEQ ID NO: 81334 - DNA, 2292 bp, Citrobacter koseri
atgcaatacgttgacaggagtcgcatactacccccaccaggtttggtcactgacaatgctgtaaaggaaaacctttatgacattggggattttctggcgctggaatctcagagacgagctcagactcgcccaccacgtctggtcagtgtatccagagttgaaggactaaaagactcgctctatgaactttttaacgggcggtgcgccttctgtgaatccgatcattattcattgagtattcaacgatttcgtcctagtagcaatgcaaccccattgggaaaaagtgctgatgccccactttattacatttggcttgcttgggcgtggcaaaacttctatctcatatgcgatcagtgtaatgagttaatgggtcgcaattttttagtgcatgggaagcgtacccctataccgtcttcgcaggaatataaggactttctgcgcagtgaaagtagcctttggcctcattggcccccaagggaagaaagcttaattttagatccatgccagataaaatcctttgtcccccattttgatgttagacctaatggggagtttaatggcttaagccgtaagggtatagcaacgattgatcttcttaatcttaataatgatgatctgataactcgccgtgcgcaacgttacaatgaatatataaatctactatccacttctattgagatgcattctgaggattcgctttccagtatactcaacttcagtaaattagagtttggcggtagttggtatctacttttgaggcggcttgcttcacatatagatggcaagaaaggcaacgctttatcagtaagaaagataaaattctttttccaatctatgtggaatagccctaagaaaggaaacgatcttctttaccaggcatttgaagaactttatgagtcccctataaatgagtggattgaggaaagaccatcccatccgaaaggtgatttatgttgcgtacaatttaataattttaaatcgctcgagactatcaagcttgagttgccggtaatacctgaaccagaagatggcaaaaaaccagaggcccgagctctactgctccttggggaaaatgcggctgggaaaagtaccattctggaaggtattgcattggcattgatttccacggagggtagaaaaaagctcaatttgcagttacaggattttattttgtccccttcattactggcaggagattctcgctcggcgccaaatatggcagaggtggtgctaacccaagacaataatgcatctttgacgctgacattaaaaaaaggtggggattgtattgtaactcagaacgaacagtttaatgttgggccggtatttgcctacggagcatttcgtcaatatagagaaggaaaacggttatatgcggctgataaaacagtgcgcaatctctttgacggaagtctacttggaaacccacaaagttggcttctgagcctcagtaacgtagattttgatcgggtagttgctgcactaagggaggtgttgtccattgaaggagaatttgatgtgattcaacgttctccaaaaagaaaagaatgctccattatcactgcaattaatggtatcgaaactcgcactcctctgaatgttgcatcttctggtttccgcactgtactggcaatggtctgcgacattatgcaggcattaatggataagcgcgtcgctcctggatttgagaactttgagaatgcacagggagtggtactaattgatgaagtggaagcacacctccaccctcgctggaaaatgcagatcatgggcggtttgcgccgtgcgctaccggctatgacttttattgtcacgactcatgaccctctatgtctgcgaggtatgtacaatggcgaagttcgagttatgcaacgaattttgcgtgataatattcgttcagaatctgggtctcctcagagagtcgaaacgctgaccgagttgccggatattactaaattacgtgtagatcaactcctgacctcagatttttttcagctcgcttccaccgatgagcctaggctcgatcgtcttatcgctcagattgctgacctgctggcaaaacgcgaacaaggcaaggagcttactgaagaagagagtgaagttattagaacatttgagtgcgacattgccaatgctatgcctgtagggacttcagaggcacatcgtctggtgcaggaggccgtggcggaatatttacgggagcgacgtcaggtttcggctacaaagattcaggcattacaggatagtacgcgatcacgtattttgagtattttgcgtgaggtggcgcaatga

SEQ ID NO: 81335 - DNA, 927 bp, Citrobacter koseri
atgaggcatgtttcccgggataccgcccaaccaccgttatcactatctgcgttgaacactgacggaaaaagtgagttacaacgagcacgagaacattattctgtgccggaccaagcagagagctttaaatttaaagcctattcttcggatgatgtaaaatggcaattaaacacattatttcattttaagtgtgcctactgtgaaacttttttctcctcttcatcgccagtagatgtcgagcactatcgcccaaaaagtaaagtgagtgaagatgctgctcatccggggtactggtggttggcgatggactgggagaatctgttacccagttgcattgactgtaatcgtaaaaggcgacagcacattgttaatcaatccagtagtcttacatctctactggagaatagccagaagccaatcacctcaggagggaaaaaagacagttttcctctagccaatggtggggtacgtatgcaacctgaaagcagaaaccagtccgatgaacaggctttgctacttaatccctgcgaacatcagccgcaatcattcttgcattttgtcagtgtaggagcaccttctctcagcttggtagtgcctgttggagatagagaaagcccacatggagcaacctctatccatgtctatgggcttaaccgccttggtttggttcaggaccgcacacgttatttacggcggctcgagtttctgggtgatatgctagtatcgcttggagagcttctagataaagtggatataatggagttaaacgaagaacagaaagacgctattattcgtccattgagattattattggataaaactggtgaagaaatggcttgcatggctagaccagatcaaccctattcagtgatggctgaaacttggatcactcaattctatcggcaaatagaaaaccaaggagtatga

SEQ ID NO: 81336 - DNA, 477 bp, Citrobacter koseri
atgccgatatgctttcagaaagatgatgagaaagccattactcggtcgatagagtccctgaaaagtcagttaagggaagaacacaaacgttcagatcgggctggtaaacctacaccactcggctatatctgggccagagagcgtaataccagcgaacatcatcactaccatctggttctgctgttcgacaaagacgtttacggttatctgggaaattatactaactctaacgctgataatatggggacccggatacagaaagcctggtgcagtgctattgggcttgattatccttactatgccaatcgggttgaattccccaagaatcacagcgcctggttcactcggtatgatgcgttaacgttaagccctgattattgtgagttcttactacgggttgcttacctggcaaaaacgtacagcaaagatgtcaatgacagttatcgtaacttcggtacaagtcagctcatagcttaa

SEQ ID NO: 81337 - DNA, 180 bp, Citrobacter koseri
atgccagcattggaaaagcttgaatcaaaaggaatggtgcagctattcgaagaggcaggtatcaattatgtcaaatttataggttcaacaatgaaccctgtcgaactggcagctaagatcaatatgccaatataccaggctggtgcgctgacactgagtaagttagctcgaccagaataa

SEQ ID NO: 81338 - DNA, 723 bp, Citrobacter koseri
gtgaaaagaaaagttgaaataaccaagaacagcttttttgagcttttttctgatgcaataactctttatgaattatcagctgcaacaaaaaaatcacacatcaaaaaaacacttgccaaatcaagtgtactttcaattaactacgctattgaggctgcagctaactcatttttatcttctatagaaataacgcaaaagttaaaagatcaaattgacaggttctcttcacttgataaatttgactatactcttcaatggcataaagacatgtctttacctcgtggaaccactcaaacacaaataataaaagaattaatagcacaacgaaatgcattggtgcatcctaagattaaaattttcactgatacaatagaaactaaaccgggtgaaggaaaaattgcttatcaacaccagtctaatattaattccgagcaagctaaaagtaatatatcaggtatatccctcgatcctgaaacatataccgaaaaagatgcttttattgcgattaaggctcttgttgattttttaaattgctatgttaacgattggtggggtattgatttggaaacatctgctttactgcttttgccttcatggaacggctcaatacaagcacaatcaataatttatgagcggaactcacttgagactgttctaaggcatgatcctgcactaaaaataaaatttattgggttgcatggtatatttgagcaatttcaataa

SEQ ID NO: 81339 - DNA, 891 bp, Citrobacter koseri
atgccaagtgaagagaaaaaagctggttcgcttattccttactctattaagtctcgtattgaacatctttttactgcaccaggagaaggagcggaccacgctatagctataacgtctcgcaatctaaattggctaatgtttgttgatcctgcatgggtaaaggaatggcttataccccttttggatttaaaacatcctgcagcagaaccagcatggaatggttatcttcagtgcaatgctatgccttcaattgcagtagctgaacttattaaaccagcttttcttaaccttatcccttggatcgaatctctttcttgggaaaaagattattcagttcgagcttcgcaatggcttggcttaatgagaatgtttcaccctgatgagccctccagtccttccaggaatgaaatgcgctccatattacgagcattatctgacgaggctcgaaatcgttttatttcctggttaggattggtcgggcagaaaaacgagagtggctgggttaagtatgtgatcccattaatcagagaggactggcccaaagaacgccaatatagaaccacgagctctgtaaaagcatggattggtttacttgacgatactggcgataagtttccggaggtttacgattcagtaaaaacatacttagtaccaatcgagacaattgatcatttgttctacagattcactcgggagctcggtggtaaaggagcaattgcagctatttttccagaaaccacgcttgatttaatggacaaaataacaccactgatattcacgcgtacatcaggagagctgcagaagattcttgagctaattgaagatacagatacaagtctgatcaaggattctcggtacttacggcttattgcactggttgagaaaaattag

SEQ ID NO: 81340 - DNA, 2424 bp, Citrobacter koseri
atgattcgcggttccgctaaaaaaggaattattgtgttttgtctgacggcaatcgctttcagtatacgggcggaaataatgccgacctctactggaacgatggagttggcgagagcggtatttgatactgatgcattagaatctaatggtctcgatcctgtgattgctgattattattccttagcgtcccggttcactcctggtgtccataatgtgaccgttattattaatggcaagaaacacagtgtcatgtcggttaagtttaatgaggaagggcagccctgtattgataaagcatttctggaaagcgcaggactcatcacgaaaataaaaagagaaacctgcccgctgatccatcaatactggtctacggcaaccgttagcgctacgcctgaaacagaagaaatgtcgctggttgttccgcaggaagcgattgatccagataataaccgacaggtcgcggacgttcgcggtggtcatgccgcaatgctgaattactccatgtttggcacgcattataaatatgacggcgataattcagaccgctttcagtcaacgtttgaacttggttttaatgcgggtgactggattgtgcgcagcacacaattcgtcagcgacggcagcgaccaggaattagaaaccgactcgtattatacctacgcgcaacgcactttcgccgactatggcgtgatggtgcagggcgggcaaatcaacattgccaacagccgctttagtattccatcggtctacggtgtgcaagtcatgccggataataccctgctgccgaacgaggggagcggcgtcgaggtgacggggatcgccagatattctcaggcgcgcgtggatattcgccagggcgggcagatcatctattcaacgcttgttcccgctggcccctttaccttaaccgatgtgcccattgctaacctcaacaccgacctgaatgtcacggtgacggagaccgatggaagcgaaagccattttaccgtatcggcgagcacgtttcgtagcaaccatgtcggcagggcgccgggcttttctctggccgtggggcgtgcggaagatatggacacgaattttgagcagccctggattgtgtcggcgtctgatggctggtcagtgaataatcgtatgaatctcatggccggaatggtgatggcggataaccactattacggtttctctgccaatgtggataccgttcccgtacagaatttatatgcctcgctcgggtttcttgggtcgatcgataaccgtagccagactgatggacacaaaaccacgctggatcttgggtattccttgccctgggggatggggatttcgctgggcggcagctacggcacggcggactatcgcgaaatgcaggaactgtatagcgacgacgatgattactccccaacgaaatacgatacgaacgtcgcggtcagttggtcggatacgcttctggggcgtttttcactcggctactaccgtaatgaggcctgggacagcgactataatagccgccgcattatctcttcctggtcgcaaacctataaatatttcagcgtcagcgtgaactgggaatcggatatcagtcgtggggatgagagcgatcacgatatgttctacgtgaacgtttctgttccgttaggccgtaccggtgtttcaacgaactcgtggtatcgcgagagtgaaggaagaagctcttatggcacgcgggcgatggggtcgctgaatgacgacaaccaatacacggtcggcgtgtctcgcgatcaggacgaaagtgttaccgactgggatagctcgcttaacagcaatcttcactataccacgctgtccgtggcggctggcggcgataacgacagcaatacgaactactctgccgcattgagtggcggcattgtggcgcatgacgatggcgtgaccttctcaccgtatccggtcgcggacacgtatgccattacccaactggacaagcctgttgccggtatcgaaatcgtgacgtcgcgcgggcccgtctggaccgataaatggggtcaggccgttgtcccgtcattgacgccgttccatgaaagtacgctggaactcaatacccaaagtcttccgggcaatcttgacgtcaataatggccggacggcgattaaagcgtcgcacggggcggtcgcgaaatggcaattcaccacgctgagtcagcggcgcgtgctgctctctgtcatgcgtgcagacggtactccgttgccgaaaggcgtctccattgtcaacgacgccggggaatacatcacttccgcgccagaggacggtttgatcttcctgaatgatatctcagcaagccatcagctgtatgcgaaggtggacggtggacgatgcaaactgaactacaccctgccggaagccgatccgcagaaattctacgaggagataaaagggaaatgtctctaa

SEQ ID NO: 81341 - DNA, 336 bp, Citrobacter koseri
atgacaaacagttccataaacaagatccattgcagagccagcggcagaaatattgcctatttagccaaagagcttgacaccgtggccgttccttatcaacgagggccaatgtgtttcggtgctggcacaacggaatatatcaacatcctgctaccgttcggcactgctgccattggcgcagttgccggtgtgttagccgcttatcttaaaaaagataaaaagttgcggcttgttctcgatgatggaaagttgaaagaaattgatgcttccaattacaagccagatgagctaattgcagccgtacaaaaaatcaaagaactcgacatactcgattag

SEQ ID NO: 81342 - DNA, 159 bp, Citrobacter koseri
atgaccatcctctgtggttacaactggtcgcttaaattcaggcctgccgggaaagcgcaggccgacgggttaagctttgacgtctatcaggacgacgttacatcgcaagatgcgcttatcgtcctggtcgatagcaaacggactatgctgcctgattag

SEQ ID NO: 81343 - DNA, 294 bp, Citrobacter koseri
atgaaaatgtctcagaagctccgcgcaattagaaaggcggaagggcttactcaagcaaagttttgcgagctaacagggttggcaataagcactctaaaaaactatgaaggtgaacatcgagaaccggggatccaaatcgttacgcagatagtgaatacggcgttattcaaaaaatatacgctctggataatgaccgatgagacagccccgcaagctggtcagatagcaccggctttcgcacacattgggcaagaatcaacagaatcagaccactccgagaaacagactggttaa

SEQ ID NO: 81344 - DNA, 273 bp, Citrobacter koseri
atggaagccaatgattatgtgattcagtacccgcttgacgcggtgcatacggtgaagtttgccgagttgcttggtaagccagaatcggcagttaccaagatggtcaaagagaataaattgccagttatcgagcttcgggatccaagtaagccgaatgctcgcgccggtgaaaagtgggttttcatcccggaatttaatcgcgcagttcgtgaggcgttctacaaccgaccggtagaacagcgtgacgcgtggctgctttggatggggctttga

SEQ ID NO: 81345 - DNA, 501 bp, Citrobacter koseri
atgcctgtaatgacactcggtatcgtggagaaacagccagcagctctgcgcggtctgattggtaaatatctggccgcgcctcgctggcaggatagctgcgacttttacaatcagatgatggaacgtgagcgcctgaccgtttgttttcatgctcagttaaagcagcgtcacgcgacgatgcgttttgaagaaatgaacgatgtagaccgtgagcgattagtttgcgctattgatgagctgcgtgctgcattttccagacgtcgacaggttggcgcgagtgagtatgcgtatattagttttttgacggtcagccaacgccgcactttgtttatgcatgccggattaactgaaaaagaatttaatcagccttactggcgtattaatgaagattcctgttattggcgtgatgccttatttcgtgcattgcgagagctttttaatttatttgaatatgcaccaacaatattaacttcggtaaagcctgagcaatatctgcattaa

SEQ ID NO: 81346 - DNA, 225 bp, Citrobacter koseri
atgcatacagtaacaggaaagcagcgcagtaacttctcattaatgttgcaacaggcgcgagccgaagcacaggccgatgcggccacgcgcttttcctctcatctggacggtttaatccgtcatatagctggcgcagatttgtcgcgcgtggagattgtcgagttactcagtcaggaatccatcaagttccataatatcggtctttctcgcggggagtctctttaa

SEQ ID NO: 81347 - DNA, 297 bp, Citrobacter koseri
atgtctctgatgcactccgtattacttaataactggctaaagattgcggttatgaaaaacggtgaattatcgcttgctgacattaagcgcgataaagaaaccggagcaatgacggaatcaaccatcgctatttattcgagtgaattaaacctcctgacggatgtggtcaatttgcttgtgaaacgcgccgtttttcataagcaaatcaccaccgtcgatgaattatcgaaattaaccattgagctgaccggttactgcgtcggtgagtttaaaaagctgaacaaagagaggagctaa

SEQ ID NO: 81348 - DNA, 225 bp, Citrobacter koseri
atgccggattatatggatcacattcaggagcgacagacggaatcactgactcgccagattaacgccgctcgggtgaagccgtgcggcgctgctgcgttggtttgcgaagaatgtgacgcaccaatccctgccgaccgccgtgcggcatatccgtcggcgacacgctgtgtctactgtcagtcagcgcttgagtcaaaagctaaacactttcgggggcaggcatga

SEQ ID NO: 81349 - DNA, 276 bp, Citrobacter koseri
atgagcattcgtatcgagattggcgagcgctatgtcgtcacaagtgaccgttttcagttcattttgcaggagaaaaagactgccgaaacagggaagaatgccggtaaagagtggctggatgttgtcggctattaccacaaattaaaccagctcgtttctggtctgattcatcacgatattttgagcggcaacgctgtctcttttgaagcgctgagcgctcaggttgagctgctcggtcagcagtgtttacgggcttttgacgcaaatggccgttga

SEQ ID NO: 81350 - DNA, 867 bp, Citrobacter koseri
gtgcttagcctgaaagcggttgcgagctgcaccgcgctcgtcgccatcttctttgagagcataacgacgcataatttcggtaatttctttgcgctgctggcgcttgcaaaacagcatcatgtgccagtgcggcgtcccgtcgtggtgcggttcgacaacacgcataccgtaaacctgcaaatcattatctttgaaagcggtacgcatcaggctccagatacggcaaaggtaacgctgcgcatccttcggagtgtaagcctcaccattccagccatgattaagctgtacagtcttatctttacccttcccgacctgacgtgtcgggtgatacttcgacggtgcagtcagcgtgataaacataccgacatcaccctcagcagcggcataacgctcaatccccgcgatggtgttcatcagttccatgcggcgaatttcaggattggaaatactccccatcactttgctgataaggtcgatacgttcgccggtaactttgttttccagctcgcaggatttcaggtattcaagatttgccaggcgacgtgcatgcacatcacggacggcgtgtttactggcatacggcgagcggtctttattcacctcacctgcagcaatcagcagcgcttcatgccagcgcatgcgctgcgccttaagctggatagtccaccattcatcgttaatcagtcgagcgacggcggaaaatgcctgtcggattgtcatctggcctttgcggtatttcttccagaaaagcggggcaacattaaaagcacgagctgcgccagcaacatgaccgtacaggtgcgcctgagcctcatcggtaaaaagcgactctttgccaccgtgcgcctcagcccatgcgtcgcttaa

SEQ ID NO: 81351 - DNA, 2034 bp, Citrobacter koseri
atgcaacccatacacccccttatcaaagcggcaagagataaaaaattaccgcatccagcccagctgaatgaattcaatcaagagtactggattaaattcatggaccaaataggtccgctaactgcagaggcttcagcatacatttcaggtgctacgtggctcaataataattttcaaagtgtgaataatactcgaaagcaaatttgttttttaaagggctgcagacctgaatatcatgaaatgatcagggcacatatcgccagtgctaattatgctttttggcaggtatgcgacgaacaaaaagagatttttgaagatacaagcaatacagctatagagcagtttattatctcaaaaacttcgaaggtaggaaaaagcgacccggtaagtgtaaacagtgtaaatatgcataggcttgacagtctaagaggtccattgttcgagctatttaaatataaggaccgtatgcatatactctttcctgatgatcgcccgaacaagttatcaaaacttgacgtttatctcgcagaaatgaggatgtctcagcacttccatagcttttcttcgctgtggcaagacttgctctatggtcgtgcagtattcactttccagcagaagcgagtctttttcatgcaatgtcattctgactatcaccgcatgaaaacaattgcagaataccgtcgagatcattttttagccacttcaataactgaagctcgtaccgtaatggataaatttcagaatataaatccttggtcaaattacctacattatgagccaggtaaagcgttgagcccagcaccatggcgaacattatctaaacgctcgcaaatgattgccagatatcagcctttatcggctttaattcagcttgacgaccacctcaaatcactattaaaacgtaaatcctccccttgtattgaacgtaaattacaaagtgttttagatatatgggttcatctatctgtgctggctgttcagattgatgaacatctgcatacaaacgaggaaatcatcgactggtcaaaactagttcatcttgcacctcaatttgaacattctaatcttattgctgcactaatacagtgttgtgaatatagtgaaactgagatcatcgatgccctagatttattgacctggagaggaaagtcgccgcaggaggatttatgggtgcagcctctggtgtctgtagaggataattatattttcccgatcagtgcttttcttacagctagcctaacccgtaatatagattgttggatgactaaaatagatcccaatgatactcgccgtggaaaactatttgagaaggatttgattagagtactggaagagtgccgaaatggaaactcggtgatgaaggagcatttgcgctatacctctgcaattgaaccaaactatcatggacataaggaagaaatagatctgaccttctcttttggaaacttactaattgttgtagaagctcgtagccgtaaaacatctatcacgccactcgattatgacaatgaacttttcgattctaacgggctggtgcataaaaccaagcaggcaattagaaaagcagcctttgttaaggatcatcttgagcatttttgtagggattattacccccacttatctggtacagaagacgttgaggttgtcccactagtaataatcaatggtcaatttcatgcgggttttccactgaataacgtacctattatcgattcagcgcttctgttgcattatcttcgagatcgcgaggtgcgttttatggcagcagcaccttatgacaaacatcagtatggcatcccactttggcaaagtctcgaagaggcacaaagccgtttcagggattatctttcatgccctaccttgataaaggtttacgattcaatgtgtagagagtcagtaaaacgctccaacaatctcggggaggattttgatgaggttgtttcacttacattcgaaattcatttcatgggatgggaagagcaattggctcatgttaaacgagcctttcaaaatcaatttgtaaaatattactga

SEQ ID NO: 81352 - DNA, 375 bp, Citrobacter koseri
atgaaaactctacctgcaacaactcagcgggctgcgaagctctgtctgtcgcccgtggctgtctggcaaatgctgcttgtacgcctgctaaaacaacattatggcctgattctaaacgatacacctttcagcgatgaggcggttattcaggaacatatcaatactggtatcaacctagctgatgcagtgaactttctggtggaaaagtacgagctggttcgtattgtcgcaggggattcaactggcaaaaacagtcccccatatctgcgagcagtcgatattctgcgggcgcgacaggcaactggtttattgcgccgaagccgtaaaatgctgtacgttaaacaacatcttttttattacctccttgattattga

SEQ ID NO: 81353 - DNA, 459 bp, Citrobacter koseri
atgacaacgcagacacagcacgacctcgtacccgctaaccaatccgaatttgaactgaccgtcacgcaggtacccgacgaacagcgtatcgatttctggcctcggcactttggcaccattccgcagtggataaccctggagccacgtatttttgcctggatggaccgcttctgtgcggattacagcggtggtatctggtccttttacaccctcagcaatggcggcgcgtttatggcccctgagtctgacagtgatgagacatggcatctgttcaacggcatgaacggtaatggcgcggatatgagcgcagaagctgcaggtatcgcggtctgcctgattgaatacagccatcacgcctgccgtacagggtgtgacgcgatgaccgcgcactattaccgcctgcgggactatgccctgcagcatcctgaagcccacgccattctgcgcatcattgactga

SEQ ID NO: 81354 - DNA, 2037 bp, Citrobacter koseri
gtgatcattcgtagcgtaaaattcagggctaccactaatgaaggggaatatgggtttagtttcaactttgcgcggactctgaccatcatccgggccaaaaattcaagcgggaaaagcacattattcaacagcttgctctacggtctaggcatggaagaacttgttgggggtaaaaatgaaaagtcccttccctacgccctcaaggagtatatcgaatacaatgagcgtcgaatcctaattacagcttcggagatgatgcttgaaatagagagtcgctctggagaaatagttacgcttcgacgtgcaatcagggatgcggtgagggaccctaggctcattgaggtatttgcgggagctcatttaactgaaaaaaaagcatttggcgaagccaggcctacctatgtgcacgatggcggtggtgctaaacggcccgagggtttccatctttttcttgagcgtttcttagatttgagtttgccgagagtgccaactacgaacggtggtgaggcaaagctgtacctacaggtggtttttgcagctttagccgtggagcagaagcgaggatggacagactatatcgcgaacattccgttttttggcattcgtgatgcgcgaaccagagtggttgagttcttgcttggtttggatgtattcgagacgaacgctacacgcaatcggcttaacgtcgaatcggttaagattgatgctgactggcgcaagctttattcggagttgctacaagaaacgagtccgcttggaactgcaatctatggcgtttcctcaatcccttcggctctcttcaaagaggatgaggtaagcatcagaaaactggctggcaattcatctgttccattgaacgagtacatcagccaactacgatccgagtacgctaccttgcagaaacaggctgagcagtatcataagacctctggggtcgaggcgattcatagcgttacagttgctatggacgaactgcaggaacttgttatgttgcatgagcgtgctacaaccttctacgcggagcagcgaagatccctgaaggattacgagaatctgctcgtcgaggctaacgaggacctggaacggaacaaggcagcagcgaagctccgtgacttgggtgcgaagtacgatgtggcgaccgctattggtaagtgtcctacatgcaatcagccggttgacgacacacttttggccggggcagtgactggtccccaaatggacttagcggccaatatcacctatttggagagccaacgtcgtatgcttatacgtcagattgctggcttgaagagtggtttgcaggcgactgaccttcgagtaaatgagttggctgctcgtatagctagcaagcgtgacctactcgttgcaatgcgcggtgatataacatctggagcatcggagtcgaaggcaatcgtgcgtcggcaggttcagattgaagttgaggtagaagcgcttgagaagctccagatcacatctatggagctgttagcaaaattcaggctgattgcagagcgcatgagcgtcaatcagacgacaagaagaggcatgccaaaagaaaactatagcgaggcggacatcgagcgaatccgccgcttccaattaaatttcagagcaaatgctggatcgtttggctacgaaagtgctccgattagagagatcgaaatcagtaaggacacgctcattccatgcctagcccagatggcattaagggagatacggactgacattaaatcggactctagcgccagtgactttgttcgcctcatctggagtttcttgcttgccttgtatcagacctcgaccataccctcatccctcggaaatcatcctggcctgttgatgtttgacgagccaggacaacattcaatggctgttggcagtcagcatgctcttctcaagcaactagcgaacgaagcaagcttgcagagcatcgtcgccgcctctttcgatgagtcggaagaagtgttccgtcaagcaacacaaggcgtccaatacactctcatcgaatgggatggcaaacttttgcagccccagtaa

SEQ ID NO: 81355 - DNA, 468 bp, Citrobacter koseri
atggttgaggtcaaggagcaaaaacggcttcgcttcgaacggcgaccgtcaccagtattagctgaacataggcctatgtataagattgggcaagtgttgcttatcctgtctctggcttctcgcggagggaagtcaagtttaccgcgcctgcaactattcaactgggctatgaagtcgaccaaacgccagcaacagttggtcctagctgttgaagagaaaatcttgcaagttcctgcatggggtttcgatcctgcattagctattgctgttcgacttgccattgcggaaggcttaatcattgaaaactccactggctatgagatttcgacggctgggaaagtctttaccaaagaaatattgaaagactccaatttgttcggacgcgagcgttcgtttctatctgatatcggaaaagggctgacagagaaaatgatcgaagcaactgctagtggctgggaggcacagtga

SEQ ID NO: 81356 - DNA, 927 bp, Citrobacter koseri
atgttcaacaccaaattcgggccatttaacggatctacctgggaaagtctttgtcagcaggtctttaagcggaagtatcaagctgaatgctatcagcagatgccagcatctccaggagactacggcatagagggttacacctcagacactgggtgggcatttcagtgctattgtcctgagaagcactacgaacgcactgagttgtatgataagcagcgcgacaaaattactactgaccttagaaagctgaaagattacgcgcaggaacttcaaacacgactgggaagcacgaagatttctcgatgggtgtttgtcacccctgagatagatcgtaatgcgctccttgcacatgcaaaggccaaggaggcggaagtccgtgcttggaaactgcccatcctaaccgatgacttcacagtattgctccacgatggcgatcactatttggtcgaaattaatgaggtacgcgctgcctgtggagaggctttggtcttcgacgacacagcaccagtcctggctgccttaactggtcagcaagaacagtacgagataaacgttcatcgtaagtcaggctatcgactcgccgaaaaggctcaggtgccggactttcagactcgcgtacaactgcttagtcagcgcaccattgagcagttccttgaggctgacgggtatttccgccgtgtcgcatcagcgtcaccaatgacacatgtgcgacttattcgccttatcaacgagtacgaacaatacgtcattgaaacttcagctacttggtctggaaccgcagaagagttgactatccaagttcgtgatggattggcaaagattatttccgaggaactcgcacctgagtttgataaggccaacactttgaaagtggcaagatacatgaccgctcggtggttggcagtctgcgagttggactatggttga

SEQ ID NO: 81357 - DNA, 138 bp, Citrobacter koseri
atgtatcatcatgaaaatgtcctcgtgttgctgatggatatcagactaaggaaaaaagtgcgagttaaggatatgttagcggtaatggtggtggtccactcgcccattcttcaaaacagttatctaggcggaatgtag

SEQ ID NO: 81358 - DNA, 1461 bp, Citrobacter koseri
atgacgattaagcagcccgtcgaggtctgcatgatggattttgccactttgtgcgacaatggagcaactttacagctcgaccactaccaacgaccctatgtttgggatagacacaaggtcaatcagttgctagaggatttggacgagttcaggcacagcggcaacgggcagaaagtctattatctaggtaccctattgctgcatcggaatgacgaaaaaaaagcccgctatgtgatcgatggccaacagcgcctcagtaccctagcagtgctgtatcatactttgcacaatgaattacccaaagggttagaatttcattaccgctctcccatctcagctcgtaatttgcgagtagcacgcaagctaatgagcgaacatcgtgaatcagctctagagccatccatcgttgagcaattgtgttttacggtgatcacagttgagcgcgaagatctcgcttttaccttttttgatactcagaattttcgcggagtaccacttaaagcgactgatttgctcaaagcttatcacctgcgggctgtgaacgggcccaacgtacggcatgtagagtcattgcagcaaatctgtgctcgacgttgggagcatgttcaaatggcaggccctaggcggcaggattgtgaacagcaagattttgcacccgagctgtttcagtactatttgtggcgtgcccgcaattggcggggtaataagaaaatggagcgtgaagatcacgatagtctgctggaggcctttcaacaacagagtgttggtggtggtgagattgatgagatcccgctctacccgggttatcacaatcaatttgccaattcccttaaattgcaaagtagcgatgactatcgcttggcattgaaccctttacaaattagtggaagtgcggccaatttaccatttaccttgcgccagcccattcataaaggcatctgttttttcctttacgctcaaaaatatgcctctttacttgatgcacttttataccaagagaatacctgccacgaattagaggcatttcgagagttttatcggcgtgtggtacgtgctaatgcctattacttgcaggagctctttaacttggcccttctgatgtatgtcgaccgttttggttatcaacatctattagcctttgcagtgggtttggaactggtgttggggggattacggttggagaaaagttatatctttaaagaatcaccactcaagtacttacgtgacgctccttacaatctgcttgatgagatatgtggagcctatcgcccacaagaggtgatggcattcttgcgttctgaaatcgaacgtagtaagggatacgggaatgctgtctccatcgtcctctctaagggcgttcaggggcgttaccttaatgcgctgctggattatttcaatcttgatggtatccctgagggtgacagttgggtacttaaaggttggctagggatggaaaagtag

SEQ ID NO: 81359 - DNA, 2022 bp, Citrobacter koseri
atgcaatatgaatcaaaattaatgtcactggctcaactcattgatgaaaaaagacttttcaatattcctatctatcaacgcctctatgtatggggtagtgaccagatcaaagtattacttgatgatctagtctccgcctgtaatgccgacaaggatgtattttacttgggtagtacgctggtgattgagcaaggaaggacagaatctgggcaccccttgttggatctgattgatggtcagcagcgttttaccaccttgtggttgcttagcgtagtaatcgagcgactgctctcatcatcgaaaaacagtgagcgaagccaaaatcccctttcctgttttctctatgcccagttgggaaatagtcgtgagccgcggattcggtttgccattcgccctgaggtaagccgtttttttgcagccttacttgatggccgagctgcatctgatgagcaaaaggccgctgcgttgagttatgcgatgcaggtcatggagggttacttcacccatagaacggatgacacccaccggattgatcttgtcaaattgggtacgttcatccgtgatcgggttcaactggtattgaccctggtaccggccaacacggaccttaacaagttgtttgaggtcatcaacaatcgcggtgtgcagctgcagcaccatgaaattttgaaagctcgcttgctggcgttactgccagatagcgctgagcgcgaagcctatggccagatgtgggatgcctgctcatttatgggggcctatgtcgaaaagaacctacgtaccgttaaaggaataaagctgatcccgctttataatgtcgaggatgctaaacgagaccgggagatgctctctgatcccttggttatacgtgacgtactgctggaattaggtacacaacaagacctcagacaccactcattagacgatatcctcaatgatgagacactcctgacggagccatctaacaatgcttctgaaaataacgaggcctatgaagccgatgatgtacgcagtattatcggcttttccatgctcttacagcatgttttacgcctttttctgttacatcagcaacgcgatgatatcagcaaaatcctagacaaagagctgttacagatcttccagactcattggctggcggggctagcccagtgtgagaaatcagaacaagccaatcagatacgtcgcttcatcgagttattgtggcgttgccgctatctgtttgacaaacatatcatcaaatggattagcgatgatgctaatgaagaaagtcatggtattcgtcgcctcagagtgaatgaaaatcggaacggttaccaaagccttattcgcgctagccgtgatgccgatagcgggtttgctatgttacaaagcatgctctatcactcacagcaattgaccacccattactggctaactcccctgcttagttacctactaaaccatggcggtgaaggtgcccaccgatacctgcaatatctggacaatcacttgctttgtagtggtagtgaacagccactgatcgaacgaacccgtgcgtttgtgttaaatccatggtgcgatagctatccgatccgcgatatgcaggcggtgctgagagctgatgagggaaccggattttctcactactggttttacaagctggaatatattctttgggagcattaccgctttcaaaaagggagtgcctggcaggcattccgaatgacggccaggaattcagtggagcatgtttccccacagcagcctgagcattttgataccaaccgagtgagctctgatatgctggactgttttggtaatttggggctagtttcacgcagtatcaactcagaatacggcaacaagccctatgttgaaaaacgggctcgtttcattgagcgtaaccagagcagggtggactcacttaagttggcactgatttatgaaaatgggcagtggaatgacgtgctagcactggctcatcagcaacaaatgcttgaggaatataacgcatatttttctgaggttgagctcgggaaatag

SEQ ID NO: 81360 - DNA, 288 bp, Citrobacter koseri
gtggccgaatcgttcttcagttcactgaaaaaagaacgcatcaggaagagaatatacaaaacccgggatctggcccaggcggatatcttcgattacattgaagtgttctacaaccgggcccggcgccacagtcatctcggcggcgtcagtccaagatttctactgaaggctatttcccgagctcaacctcagaaaaatatgcgttatattcctcaagcatttgttgctgatgagccagtgctagcacgtcattccactgcccattttcataaatcagtgccaacttaa

SEQ ID NO: 81361 - DNA, 165 bp, Citrobacter koseri
atgggtttaaccatctctaataccagcctagctgtgcacaatgtaatctcaacttgcaaaatgctatgcaaattcaaagataatgatatgcttctgaccaatattgacattcgcaacaagaggcacagccatgatccgctgccacctcgcccgaatgatgggtga

SEQ ID NO: 81362 - DNA, 246 bp, Citrobacter koseri
atgatccgctgccacctcgcccgaatgatgggtgaacacaagctgcgtattgctgacgttgccagagagacggggctcagccgtgctacggtaacgttgctctataaagagactgctcaaaaagtggatttggacacgatagaaaaaatctgtctgttatttggctgtagcattggcgatctgctggagcttaaagctcacggaattaaagccgatggagaggaattaagggatgcagatcactga

SEQ ID NO: 81363 - DNA, 2946 bp, Citrobacter koseri
atgcagatcactgagtaccacgcaaaatactacgcccatgagctcacgtgccttcacgcggcagacagtgtggatcggctctcacagtccctgttcgatgcaacggtagatttgaatcctcatcagattgacgctgcactttttgctttgcgaaaccccttgcagcaaggtgtattactggcggatgaggtcggtcttggcaaaaccattgaagccgctctcgtcctctgtcagcactgggcggaacgccgacgtcgtttggtgatcgtttgcccggccgcattgcgcaaacagtgggcgcaggagctggctgaaaaatttgcactacccagtagtgtgctggacacagctgcgatcaagtcaagcggggtatcgccaagaacttatcttgcaaatactgcaggcaaaaaggtaatgattatgtcttaccattttgcagccaaattagccgacgacttagtgactgtgccttgggatctcgtcgttattgacgaagcccataagctaagaaacgcccatcgagcaagtaatcgcatagggcaagcgcttaagttggcatttaatggtcgacgcaaagtgctgttaactgcgacgcctctgcaaaattccttgatggaattgtatggcctttcaacgctactcgacgaacatttgtttggcgatgaaaagacatttcggaaacagtttattcatggtgaaagcgccacagatgaactgaagcagcgattggcgggttttgccaagcgcactttacgtagccaagtacttgagtacgtgcgctacaccaaacgccaagccgtcactcagccatttaaacccacagatgcggaacaagacctttatgagcgcatctctgtctttttgcagcgtgaaatatcctttgcattacctaagcgccagagacacctaactggcttgatattgcgaaagctcctggcatcaagcccgtatgccatcaccggaactttgcaaaccatactcgagcggttgcagaaaaaattgatgggtgacgatcagtcagatgaagacctggcgactcagttgatcgagcaagatgatttagaagatgactatctggatgatgctgatttttccgatgctgaaacggacgaatcgctagcagaaacgatgggagtaacttcaggttcgcccgatgcaaccatagaactacaggctgaaatcgcagaaatcgagtcattcattcagcaagctcaatctttaacgactgataccaaagcggaagcgctgctcactgcgctagatttaggctttgccaaaatggcagaacacaatggcccgagaaaagccatcatatttactgaatccaagcgcactcagcagtttttagccgattatctcgccagtcatggttatcaaaataaaatcgtcaccttcagcggtacaaatactggcccagaaaccaatcaaatttaccaacgctggttacagcaatatcagggtagtgaccggattacgggctccgcacaagttgataaacgcacagcgcttattgacgaatttcgcgaacacgcagaaatcatgatagcaaccgaagcggctgctgaaggtgttaacctgcaattttgtgcattgctgatcaactatgacttaccctggaaccctcagcgcgtcgaacaacgtattggtcgctgccatcgctatgggcaaaagcatgatgtcgttgtcattaacttcttaaatactcgcaaccaggccgatcaacgggtgcttgaactgctcactgaaaaatttcagttattttctggtgtttttggtgcatcagatgaagtgttagggcgaatcgaatccggtattgattttgaaaagcgtatcgcccgcatttacgatacctgccgtaaaccacaagacattgagttggcgtttgaagaacttcaaaaagagctagaagcagatattaacgacaagctcaagcaaacccaaagccagcttattgagcactttgatgaggacgttcacgacaaacttaaaattcagttggatgctaccctggcgcgtctcgacaaagttagccgttggttttggggcgtcacccgttttgcacttagtgataaagaaggcgataaagaaattgccaataaattgggagcgaaagctcagtttgatgaacacaattacagttttgcactaatacagtcgcccattgccaatgcacctgccggccgctatcaactggtgcgatcgcagcaaaaccagcagcggcaacaagattttatggcgcacgcttaccgcctgaaccacccgttgggtgaatggtcgctcgataccgccaaaatcagcgccactccagtggctgatttggtatttgactatgcaggccatgaaaccaaattgagtgtaatcgccgatctagttggaaaatccggctggctacgtctcgacaaactcacggtaagtgctttggacacggtagaaagcttgttgttttcagcaatcaccgatgatggcaaatcgctggatcaagaagcctgtgagaaactattttctgttcaagccaaaaaaacacaatgcactgcgaatgcagagtcacccgtgctattagccaacaatcaacagcggcgaattgaagccagtcttgcgcaatttatagaggaaaaccagcgcctgtttaatgctgaacgggaaaagctagaacgctgggccgatgacaaactgctggccagtgaaggagcattaaaagacaccaaagctaaaattgcccaagtaaaacgtgatgcccgcaaggcgccaacactagaagagcaatcagagctacaaaatcagttgcgcgatctagaacgccaacaacggcgccaacggcagcaaatttttgatgtggaagacgagattatggccaagcgcgatgaactgattgaagcactgcaagagcggctcacgcaaaccacagcaacagaacatttatttaccattcgttggcaagtagcttaa

SEQ ID NO: 81364 - DNA, 1446 bp, Citrobacter koseri
atgagtaagtttaacgaactagtcactaaactaagagaagttttccagattgatcgccccgaactggattttggtgtttatcgcatcctcaatgcgcgtgccgatgagatcaatgaatatctggaaaaacgccttaaagaaaaagtagaacaggcgttggctagtggcagtgcagccaatatcggtcagctcaaagacgatttgaaaaaggccgaacaggctgcaactgatgcaggctttgacccagctgagtctccaaaagttaaagaactgaaagccaaaataacccaggccagtagcggcaacgccgaacatgaaaacgccgtattcagccacctgctgaccttcttctctcgttattacgacaacggcgattttatcagccagcgtcgttataaaggtgacacctacgccattccctatgccggcgaggaagtcatgctgcattgggccaataaagaccagtactatatcaaaagcggcgaaaatttctccaattactcgtttaaattagatgatgcccgtgtggtgcacttccgcttggttgccgccgacacagccaaagataaccgcaaagacaacgacaaagagcgctgctttgtattagctgagcagaagatcattacgcgcatcgacgaggaaggtgaagggtatgaagaagaaattcttccggtagaggaagtcatcaaaaaagacatcgatggcaacgaaacgaaagaactcattatccgttttgaatacaaagccatgccgaaaggcagcaaacaggataagttagtcgaagcgacagtcagtgcggtggtcgctgatggcactgtggccagccgttggctggatttaagcaagcgtgaaccgacggaaaagaaccccaaacgcacgctgcttgaaaagcacttaaccaactacaccaccaaaaataccgccgactattttatccataaaaatctcggtaagttcctgcgcggagagctggatttttatattaaaaacgaagtgatacacttagatgacgtgcagaacgcagaagtctttagtgatatagaaaataatctgcgtatgattcagtgcttgcgcagtattgccctggacttaattaaatttttagcgcaattggaggattttcagaagaaactatggacgaagaagaagtttgtagcacaaaaggattacttgatctcagtggattacttagaaagcgatcagcttgaaactgtatgccagaatgaaaggcaaatagcgcagtggaaaagacttggagtgatatcaactggcaaccttaaaccagatgttcttgcgaaatacaaaggcctaacggttgatacttctctgttcgacattgatttcaagaatttactgctaaaccaaattgacaacttaagccaaaagataaacggcacattaattagtggtgataattttcaagctttgaggggctttgttgaataa

SEQ ID NO: 81365 - DNA, 1815 bp, Citrobacter koseri
atgaaaaaagtatttgtgtatcatcgtgttagctcggatcagcagctcgacgggtcaggtatcgcacgccaagcagaactattagaaggctacttagagcgtactggcatttgtgcggaaatggatgatccagccccagtagtactatcggatcaaggtgtctcagcctttaagggtttaaacatctcagagggtgagttaggggcatggatggaacaagtacgtaatggtatgtgggatggttctattttggtagtggaatctatagaccgctttagccgccagaacccgtttgatgtgatgggttacatcaatgctctaatggcacataacgtagctattcatgatgtaatggctaacatagttatcagccgtagcaattctaaagatctgccttttgtgatgatgaatgctcaacgggcatatgatgaatctaagtataaaagtgatcgtattcgtaaagggtgggcgaagaaacgcgaacaagcattcaacaaaggtactattgtaactaataaacgtcctcaatggatcgaagtagaaaatgataagtatgtgcttaatcataaagcggcagtagttaaagagatatttgctctttatcaaactggtatgggatgccctacgattgctaaacaacttcagaaaaaagaaggtgagcaatataaatttaatcgtccttggactggtgagcttgtacataaaattcttactaatcgccgcgtaacgggtaagattttcatttctgaaatcatccgtaatcatgatgatattgataatcctgtaactcagaaaaagtacgatatggacgtgtaccctgtagtaattagtgaagatgattttgaattagtacaggacttgctaaaatctcgtcgtcctaatgctggtcgtattactgtgaagaaagaagggcaggaagaagtactgattaaaagtaatttgtttagtggtatcgcacgttgtacagaatgcggcgggtcaatgtatcataatgtggttcgtgctaaacgtacaccaaagaaaggcgatccaaaaatcgaggaatatagatacattcgttgtctcaatgaacgtgatggactttgcgaaaataaagctatggcctatgaaacagtagagcgttttgtagtagaacatttattaggtatggatctgaatactgtaattaaagaacaagaattcaatcctgaaattgaagtgatacgtattcaaattgatcaagttaaggatcagatcactaactatgaaaatggtattgaacggcgtaaaagtgctggcaaagctgtctcttttgaaatgcgggaagaattggatgatgccaagttagagttagaacaattattagcacgtcaggcttcattagctacagtacaagtagatgtgccagtactacaggatgttaacgttactgaattatatgatgtgaataatgtagatatacgcacacgttatgagaatgaactaaacaaggttgtttctaatgttcgtctaaaacgtaatggcaatttttacacaattgacattatctacaagcagaacgagctaaaaagacatgtactttttgttgagaataagaagaaagaacaaacgttaatcagtgaggtgatcattgaaaatgttgatggtgctaaattctattacacaccatctttcgtaattagtgttaaagatggtgagatccgttttcagcagactaaagaagatctttcaatcattgattactcgctattgctgaactatgtagatgctgtagatcggaatgatgccgtaggtgtttggatgcgtaatcaattcaattttctgacgtctaactaa

SEQ ID NO: 81366 - DNA, 357 bp, Citrobacter koseri
atggtcggcgaacggggcaaaatcctcccattcttccatcacgtcgaccatgcagcgctgcaactcttcgaacgggaataccgacgctttatcgtcgacaaactcgcacataaacagattcttaaagtcctcatcactgttttcgcgtttgagctggtcgaggtcgaacagggtgcagccaccggcaagggcgtcctcaatggtgacaatctgccgccactgaccatcgtcgcagagctggccaccggcgagcgcgctgtgactgatgtcgatttcgatgcggtcggcaatacggctgcgacccttgttaaacagttcgccagaccagaaggggtaagcgccgtgcgccagtgttga

SEQ ID NO: 81367 - DNA, 156 bp, Citrobacter koseri
atggctttgcgcggtgttggaattggtaccgagataaatcagctttgcgccgttattaccaagcacaatggggtcgccggtcaggtcgacgtcgaccagttgcgcaaactggatgatgtattcgcggaacacgtaagcctgcgttttactggctga

SEQ ID NO: 81368 - DNA, 855 bp, Citrobacter koseri
atggcaaaaaaagtctcaaagttctttcgcatcggcgtcgagggtgatacctgcgacgggcgcattatcagcgccagcgatattcaggaaatggccgaaacctacgacccgcgcgtctatggttgccgtatcaacctcgaacacctgcgcggcctgctgcccgatggcgtattcaagcgttatggcgatgtggtcgaactgaaagccgaaaagattgacgacgattctgcgcttaacggcaaatgggcgttgttcgctaaaatcactccgaccgatgaccttatcgcgatgaataaagccgcgcagaaggtctacacctcaatggaaattcagccgaattttgccaataccggcaaatgctacctcgttggccttgcggtcaccgatgacccggcgagcctcggcactgaatacctcgaattctgccgcaacgcgaagcacaacccgctacaacgctttaaggctaaccctgaaaacgtcttttccgccgccactctggcagagctggaatttgaagacgttcccgacacggtgctcaacagcctggctgacaaggtgaaagccattttcagccgcaagcaggtcagcgacgatgcgcgcctgaatgatgtgcatgaagcggtgaccaccgtcagcgagcatgtgcagaccaacctgaccagacaggatgagcgtatttccgctatggaaaccgcgtttgccaccctgagtaaggagctgaccggcaaggttgaagaaaccagccaggcattttccgtcctgaaaaccaccctcgataaaaccgaaagtttcagtcagccgcgacgcgcgaaagccagcggcggcggtggcgatgagctgctgaccgactgctga

SEQ ID NO: 81369 - DNA, 1074 bp, Citrobacter koseri
atgcgcccggaaacccgctttaagttcaatgcctatctgagccagctcgccaaactgaacggcatcagcgttgatgacgtcagcaagaaattcaccgttgagccgtccgtcacgcaaacgctgatgaacaccgtgcaggcgtcatccgcgtttctgaagacgattaacattctgccggtcgcagaaatgaagggcgaaaaaatcggtgtcggtgtaaccggcactatcgccagcacgactgacacctcgggcgacaaggagcgccagaccgcagatttcaccgcgcttgagtccaacaagtacgagtgcaatcagattaactttgacttccacctgacctataaacgcctcgacctgtgggcgcgttttcaggacttccagcgccgcatccgcgacgccattgtccagcgtcaggcactggatttcatcatggccgggttcaacggtaccacccgcgctgatacctcagaccgcagcaaaaacccgatgttgcaggatgtggccgtcggctggttgcagaagtaccgcaacgaagcaccggcgcgcgtgatgagcaaaatcaccgctgggaacggcagcgttatttctgacgtgattcgcgttggtaaaaacggcgactatgagaacctcgacgcgctggtgatggacggtaccaacaccctgattgacgagatttatcaggatgacccgaaactcgttgccatcgttggccgtaagttgctggccgacaaatatttcccgctggtcaacaaacagcaggaaaacaccgagtcgctcgcggcggatatcatcatcagccagaagcgcatcggtaacctgccagccgtgcgcgtgccgtacttcccggcaaatgcggtgttcgtgaccacactggaaaacctctctatctacttcatggatgagagccaccgccgcagcattgatgagaacccgaaaaaagaccgcgtggaaaactacgagtcgatgaatatcgactatgtggtcgaggcgtatgctgccggatgcctgctggaaaacatcaccctgggcgatttcactgcgccagaagctgaagcaccggaaggcggagagtaa

SEQ ID NO: 81370 - DNA, 750 bp, Citrobacter koseri
atgacgagccccgcacagcgtcacatgatgcgggtctcggcctctcaagccgcgcagcgggaacaagccccgctgcgccatgcaaccgcctacgagcagatgctggtaaagctggccgaagaccgccgcacgttaaaaaatatccgttcaaacgaacgcaaagccgagaagaaacgcgagctgctgccgttctatgcgccgtgggtggccggtgtgctggccgatggccgtggcgcgcctgatgacattgtcatgaccgtcatgctgtggcgtctcgatgccggtgatatcgctggcgcgctggagattgcgccctacgcactgaaatacggcctcacctcagaccatcgccgcaccacgccttacatgctggttgaggaggtggcacttgctgcactgcgccagcgcgatgccggtgagcctgtcgacctcgcattactgctgaccactatcagcctgactgacggcgctgacgttcccgatatggtgcgcgcccgtctgcataaggtgaccggcctgaccatgcgcgatgccggtcagaacgccggggcgctggcgcagtttcagcgcgcgatgcagctcgaccgcaatggcggcgttcgcaaggccattgagcaactggaacgggcgttaaagccaaaacctgaggctgcatcccgtaaaacgactaaaccgcgcacgcgcaaacctgccaccaaaccggcagccaggcgcgggcgtccaccaaaggcgataaaaaccgccggttaa

SEQ ID NO: 81371 - DNA, 417 bp, Citrobacter koseri
atgtattacagtgcagaaaataatggtttttttgacccgaattacaaagatgattttgaactcgcgacgggatggccgcatgatgctgttgagatagccgacgaatattatcaatatctcaatgatggcatcagaagcggaaaagtgctggcagcagatgaatgcggccagccggttttgaggtacccgcagccacgttcagcagaggaggagattgcatttgctgagactaaaaaatctcagttaatggcggaggctaatgctgccatcgctccacttgagcgtgcagtgaggctgaaaatagcgacagatgaagaagctgaaaaactcgaagaatgggagcgatacagtgtactgttgaatcgggttgatacatccaccgcgccggatgtcaactggccggaacaaccagaataa

SEQ ID NO: 81372 - DNA, 327 bp, Citrobacter koseri
atgacggccacgcatgaccacctcgaccgccacaatttcgccggtgtcgtcacgctggtaagaaccagcaaaacgcagcggcactgcatcagcacccggcgcggcatactgcgcccacagcgccacatcgggcagaccaccaacagaccactcgacggcgagcgcctcatcgtcgaggccgaggtcaatcggagccgcgccattcatgccgccgccgcgatagttttcgagcttgcgggtcagcttcggcagcgtcacggattcaacaacgcccatgtagctgaggccgtcattgaacatgttcagatatttgagtttgcggggtag

SEQ ID NO: 81373 - DNA, 606 bp, Citrobacter koseri
atgagactgaaaacgaaagtttctgcatcgacgtttttcctttttatcatctcactgttttttccatttttggcggatctgcaaacgccactgatgcacggtgagatagttaagtggatcgaaaacagccaggcggtctggctcctgtttggtgccatatttacgtttttttatatgaatacgatgcgacatgagcagaaaaagttctggttatgggccgtggtatggtggattgttctgttaggtagaagtatcagttggggaagaaactatttacctgatgaaccaaaatttatctttagagctatttcgattctattgattgcaatgttgcttcttcccgtgattttttcgaatgctttacgaaatgctattgccataagatttcgaactgtacagttaccgttatggacgactctgtttgtagtagtgacttttcttatcgccgattcggtagaacatcatagatttatcgctccgctatttttgcataatatgcagtacactgatttaattgaagagctttacgagactgtttttctgctgggcctttttgaagtatcgtttgaagttatgaaagatgaaaaaaaacgcctttccaagtag

SEQ ID NO: 81374 - DNA, 204 bp, Citrobacter koseri
atgcctttgaaaagtgataagtgtgttttgttttccggagatttagattttattgctttaagttttgccagaatgcgtcttctgggccgacagctgcccacagatgctattaccggcaacatggatgaagactgcaggatgcaattcctgaagcgttatgaattttactttgaacagcttaagacaaaagagctggcagagtaa

SEQ ID NO: 81375 - DNA, 441 bp, Citrobacter koseri
atgagcagcaatggcttatggggactcaacgtcctgcaaaccgccaaccataaaatgcaccatacttttattgaagctgtctgtctgggcacactctgcaatttaatggtctgtcttgccgtctggatgagctattcgggtcattcgttaaccgacaaaatcgtcgcgatgctgttacccatcggcatgtttgtcgccagcggttttgaacacagtatcgcaaatatgtttcttattcccctgggtattatgattcgtgactatgcaccagatgaattctggtatataacacaaacgactgcgaataattttccgagtctaacggtgagcaatcttgttaccgataacctgatacctgtggctattggtaatatcatcggcggcagcgtactggtcagtattacctactggataatatatttgtgcgagcagcatcactga

SEQ ID NO: 81376 - DNA, 396 bp, Citrobacter koseri
atgaatcgcattattgacaccattcccgaagaaactctgcgtcatctgatgtcgtgggactggccaggcaacgtccgcgaaccagaaaacgttattgaacgcgcagttctgttgatgcgtggcaccagactgaatttatatattaattcaagacagacacgcctgctgcctacattgggcgacgccctccctacgaaaggtccaatggcgcagatgttgaatcctgccaacccggaaaacgataaagaggaacgccagcgaattatccaggtattaaaagagaccaatggtattgtcgccggaccgcgcgatgcagcaacccgtcttggaatgaaacccacgacactgctttctcgggtgcaacgcctggggatcgctgtccacgaagtgttatga

SEQ ID NO: 81377 - DNA, 279 bp, Citrobacter koseri
atgaccgtaacggcgggtcttgcccgcgaccatctatttatcaccatccttttattgctgctgctgacgcgggtgctggcaggtctggtgcgtatggtggcgcgagtatttttcgcccgtccaccagaagcagtcagccgtggcgagctgggctggctgacgacggcacccatggctgttctgctggtgatgatgctgttgatgggcatccatatcccacatcccgtaagccagattctggaggatgcctcggccatcgtcctgtcagtaacgcagtaa

SEQ ID NO: 81378 - DNA, 513 bp, Citrobacter koseri
atgcacgcctggctgccggacgcccatagcgaagcgcccagcccggtcatcaccctgcttccagcagagctgctgaattgcgctctgttggtattgattcgttactacatcattatttgccaggccgtcggcgaagatttccccggtgaattactactgatattcgggctgctttcagtcgccgtcgcagcgttctttatcctcgtccagcaggacatgaaacgtctactggcttactcaagcgtagagaacatgggacttgtcgctgtcgcgccatgcattggcgggccgctgggaattctggccgccctgctccatacgcttaatcatagcctggagaaagccttgatgttctgcgactcaggcaatgtcctgatgaagtatggcacccgtaatccggatgttgtctgcgatatgttaaaaatcatgccgcttaccgccacgctgcttgccggtggcgtgctggcgcctggcggcatgccgccattcaacattttctcagcgagtttatga

SEQ ID NO: 81379 - DNA, 1065 bp, Citrobacter koseri
atgatatttttattagatgagttatctggtgctccatcatgggtacctgctgtattgctcgtcactttctcattcgcactaggttttctggcccgatttacacttctcaggcttatccgttactggcagggtcgtgacagaaagttattcaaatcccttgaaaagcatcttcgtggttccatgttttttttcatccccttactgttaataaatattgggattaattatatcaaaattaatccgaattctttggtttttattacatcgacaatcaatatgtttattattttatcagtttgttctgttttaattcgattgattaatgtggcgcaggatatgcttttcattcgttatgatattaacctttcaaataaccttcgcgctcgtaaaattcgcacgcaattaatatatgttaaaaaagttgctatcgttctgcttgtgttattctgtgtttccctgattctactcagcttccctgctgttcgaaaatttggcactacaatcctggccggtgccggcgtagcaggaataataattggatttgctcttcagaagacgctggtcaacctttttgccggaattcagatagcctttacgcaacctataaaaattgacgatgcagtggtcgttgaaaatgaatggggctggattgaggagatcaacctgacttatgttgttgtgcgtatatgggatctccgccgacttgtactgccaattacatactttacagaaaataccttccagaactggacgcgtaataacgcacaaatattgggttcagtttttctttaccttgattattcaatgccattagatcctctccgtaagcattttgaaaaagtactcagtgaaacaaaactctgggatcaacagactcaggtgctccaggttaccgatactaatgacaagactatggctgtcagattattgatgacggcacagaattctcccattgcgtgggatttacgctgccatgtgcgtgaaaaaatgattgagtttattcagcaaaattatcctcagagttttcctcatgtgagggcaacactgaccgattctggtatttga

SEQ ID NO: 81380 - DNA, 423 bp, Citrobacter koseri
atgttcaacggcatgagtgataatctgcctgtcatagcaaagagtatgggtatctacctcaacccaaaaatcggggcagactggcaagtgcgcgggctgcaaaaacgcgaggtgactccggggcggaatgaaaaatactatctggccagagcgctgcacaccggaacggggaaagtcagccacgttggtggcaattgcaaaagtttggtgctgtttatcaatctgcttaagcaccttaaggcaagctactgcggcgctaaaacgatcatactcatcgtcgataacgacatcatccataaaagtcgcgaaactcagcgttggctgaaagcgaacccgaagttcagagtgatttatcagccagtttactcgcgccatgggggaatcacgttgagcggttatggcaagcatttcacaacacgataa

SEQ ID NO: 81381 - DNA, 213 bp, Citrobacter koseri
atgggtgtggccgcagtcgcccgcgaacttagcctgtatgaatcacagctctacaactggcgaagcaaacagcaaagtcagctctcttcttctgaatgtgaacaggagatgtccgctgagatcgcccgtctgaagcgtcaactggcagaacgggatgaggaactggccattctccaaaaggctgcgacatacttcgcaaagcgcctgaaatga

SEQ ID NO: 81382 - DNA, 618 bp, Citrobacter koseri
gtggcggccagcctgcgctggcagggactgcgggcgaaagcctcccgccggttcagcctggtcagttatcatgagcctggtctgccagtatcagataatctgctgaagcaggacttttacgccaggggcccgaatcagaagtgggtgggtgatgacatcacgtatcttcgcactggtgaaggctggctttatctggccgtggttattgacctgtggtcgcggtcagtcattggctgttcgatgtcctcgcggatgacagcacagcttgcctgcgatgcgttacagatggcgttgtggcggcgtaaacgtccggaaaatgtcatcgtgcatacagacagaggtggtcagtactgttcaacggattaccagagcttaatgaaacgccataatctgcagggcagtatgagcgccagaggcgattgttacgacaatgcctgtgcggaaagcttcttccacacgctgaaggtggaatgtatccacggagaggactttgccagccgggaaataatgcggacagcagtgtttaattatatcgagtgcgattacaaccggtggcgtcgtcacagtgcctgtggcggtctcagtccggaacagtttgaaaaccagaacctcgcttag

SEQ ID NO: 81383 - DNA, 228 bp, Citrobacter koseri
atgaaaaagtttttacttacggcttttgcggcaacgattgttctgtctgctctgactggttgtacacgtaccagttatgcgatacataccaatgacggacgcacgatcatcagtgacgggaaacccagtgagtctgaaactggcctgctcggatacactgatgccaacggtgtgaaacaacaaattaacaaaaccgacgtcagagaagtagccgagataccacattga

SEQ ID NO: 81384 - DNA, 234 bp, Citrobacter koseri
atgaacagaataaacccattagcgatagttatggttgtattcatagcaatcattgcttccggctgttcgtctaatcaggccattaaaactactgacgggcggactatcgtgaccgatggaaaacctcagattgacgatgatactggtctggtttcctataaggatgctcagactggcagaaatgagcagatcaaccgcgacaaaattactaatatgagtgagctggacaactaa

SEQ ID NO: 81385 - DNA, 3174 bp, Citrobacter koseri
atgggtaagagtttaggcggcttttttggagccatcataacggcggtagtagttgctgctgccgtctacttttcaggaggaacggctttagctgcggttggttggggtgctgctacgggtgctgtatcacttgttgctagttcaatgctagctcaaataggggtaacgggttatggggatgtatctgatagtctaagccgttctacaagccctacaacgggtttaccagtaatatacggcggtgatctcccgcataaaaatggtacttcaggcggttcatttattttaacgggtagtattgtcagttggtataacgtacccaattcagattcacaatacttattttctgaacaagcagttgcttatgcgggtactgaaaaacatattgaacaaatttatattgataatgaaccagtactatcatcaccaattatacaagatggaatagtaccaaatagttctatcgcaggtaagtataaagattatctacaacttgaagtacgttttggtggtgattatacaagtactaaatcccttgctgctcaatatgctggccagaaatggacaaataaatttcttggtaaaggtattgtaagtatcagtactgttatcaagaaaactcaaaaatctcttgaaaataatattctggtaaatgaccaattcgcactaactgtagaaatgaaaggtcaacgcatttttgattttgtagatggtactattaaagctagtagtaatccaccttctattatccatgattacttaaccaatactgtatatggtatgggtattgatcctagtcttatcaatcaagatacattcgcagaaacagcagcatattgtgatgcttttgaaatgtacgcaaatggggcaattagttatcaaagtactttcatggaaaacattgaaaatatatgccaaagttttggcggtatcatgtatgtacatgcggggcagatatgcctaaccacagatcgtaaaactgtatctatagcgtcgttctcagagcgtaatatggttggtgctgtacagattagtacttcaggtggtacggattattttaataccgtagattgtaagtacactaacccccaatcaatgtacacaacggatgtagtacgtattccttcagatattaccattgatgaagcaatccaacatgacggacaggttattactttgtcacgtgattatacttggagttacgatcaagaagtcatagctaaaatggctaatgttgatgttctcaaggcgaagtatgccctacgtactatcagctttaccacaagtgaaggatgggatttaaaagtatgggatgccattgatgttagtaatgatgaacttgctgtctcaggtaaatttaaagtactgaacaaagatatcagtacagatcaagagaacattggctacgtaacaatcacggcggtggaagctcctgatgctatgtatgatggtatagatccgggggtatggtcgcctggtggcgtgattaacttccctgaactatcagtacttccaccaactaacttacaggcagttaagaaaggtaatactacttctggttcggttgtagatctaacttgggatgcttcaccagatccatacctacgcggttattatgtgtactataaacttaacagttcttctacgtggatttatgcaggtagtactggtgtacaaaaacttgattatgaactttttggattaacggataccggatcatatgatttcgcagtagaggcatataataatcttggactagtatcacagaagctatcactaattggtattgtacctacatttaactttgcgttacctgctgtaactggtgtcgtactggcaaataaaacagaatcagcactagtcacagatgcccctgattttaatatacgttgggattcacagaagaaccttctagttaatgggcgttcatttagtgagtacttcaaatattacattattaatatctatagcggtactaccttagttgatacattctatacacaaagtaatacattcaatttaactcttgcaatgaaccgtttgaaaatacgtaaaccaactattggtattatcgcacaaggtttcaatactggaacatattcacaagaagttaaaattacagtagagaataaacaggcaggtttagtaactggtgttagctttacaggtggttttggtaatctatttgcctcttggactaaatcagatgaacgtgattatgctggtgctgtaattagtatcgtgaatggtacgactacgcgactttttacgagttatgcccctgaattcgattcaataccaaatattacggatggggaatatactgtaaaaatggggttctttgatgtattcggtactgacaatattcaatatagtccagaacaaataataagcattaactcaaagtaccaatttacacaagatgatgctgatgaaattaacagtattcttgatttagatgaccgtctaactgatactattaataacgctgtcaatgaatcaaatgaatatactaatacacaagttaatattgttaagaatcaggttaatgataatacggcaagtattggtactttaacgcaaactgttgcagataataatacagcccaaacacaggcattaacacagttaacatcttctgttaatggtcaaatcgctaccgtgaatcaggaaatggcaacaaaggcagatcaaagtactgtagattctcagtattcattatctgttaatgctaatggtacggtagcgggtattcgtctagttgcttcacaaggtacgagtaataacagtgctatctattttgctgctgataagtttattgttagtggttctagtgctgctactgttggagggactgctccatttgcgattgttaatggtactacctatttgaaaacaaccatgatagctgacttaagtgttactaatgctaagatcgcaaacttaagtgttaatactgctaagattgttgacggtactattaccacagcgaagatcgccaatacaatacaaagtaataactatgttgcaaatacttcaggttggcagattaacaaggctggtactttctatattaacggtagtggtggtacaggtagaatggttatcagtaataacataattcaaatatatgataacaataacgtgttacgtgtacgtatgggattatggtaa

SEQ ID NO: 81386 - DNA, 624 bp, Citrobacter koseri
atgaacgcgagtacatacacaaacgctaatcttctcaagtactggaagttagttagaggtactaccaaaacacaactaaacctaatggaaattatgagtctaggcgttttcgtaacgtgttttgatgtattaccaaaaggtactaatggtttccattggacggattcactaattgatgttgatctcgatggttatcaatatattagttttcccgatattatcagtggttcactaccttcatactctgaacaaaagggtattacaaatgatgctattaacttcaaaataagtaacgttaatgcttcagtacgtgctcttgctttgggtggtttccttaaagatgctcagatgaatatcaagttagtaatattgaatccatatgatagtactgtaattgattccatgcttatgtttactggattcattgataacgtacaagcagtagctgaaccaaacgctaaatccaatgaaatgactatctacgtaaactcagtatataagaagctagatcgccagcctgctctaatagctgctaattcagtatatcaatcttattacaaagatgatgagtactttagtctattaggtcaagttaaccaaaatcaaaattggaagtacaaataa

SEQ ID NO: 81387 - DNA, 555 bp, Citrobacter koseri
atggcatctttttcaaataatgtgaaggttacaaactttcaaattaaaagtactgaaccaatttactctaatcaaacatggacaggccagcgtatcatgagatctacgggtattcagtactacaatattcaattcacacttaatttcaatccttcagcactaacagaagttaataactttttagctcagtacgcacaggggaaaccatttaccttttcactaggtgttgctggtacatatcatggtacacaaactggatcagttaccagtactggattaattccggcgggtcatatgatagtaccgacaagtaccaatacattagccattggtgaatgggttcaattcactaaccataacaagctatatcgaattgtagaacgtactggaacaagtattactatctttcccgctttacagaatacagtacaggccagcgaagtaatcaaatataacaaccttattatagaggctatattagatccagataatgattacacaatgccagtaggtaacattatgaacatcacactaaaggcaacagagaacatataa

SEQ ID NO: 81388 - DNA, 603 bp, Citrobacter koseri
atgaaagattcttttgagctttttataaaatcatttccagcaataaccgcgatactacttaatgtgatgattgttgtggtcacactttatattgtctatcgtagtggaagcatggctataatagctaataaaatatggggtatattcattggcgaaaagcaatatttcaatgaaaaattagctaaaatagagcaagctgaacatgacatagcaaaatttaacttcaaaacaaatttaaaatttacaaccattaaacaaattgagactttttattctcagttggagaaattcaacttggaattgaaaatgtataaaggattacgagatgcatacaatccaaagggagatattcttagtgtcgctgttgttagcttattgattggatgttttttacttccactatttgttggtgttttcatattcaaacctttttgggactttgaaagcggaaagttaattaatctttttgtgtacacttttctcattgcgattagcacaatatttagtttcagtgagttacttagaaagataaaagcgaatagaatgcgtaaagttgtatataaaatcaaaaaagaatatatgagaaatagaaagcccaactag

SEQ ID NO: 81389 - DNA, 2199 bp, Citrobacter koseri
atggcaagaaataataatatacgtgttgatattgatgctgatgctacgggcttacaaagggctttaactcaatctcaaaagtcattagaaacttttgcccgtaatacttctggtactttatcttcaagtgctgatagtatcgcgggtgctttcggtcgtatgagcagtggtataggcggtgtaatttccgttgctggccttgctgctacttcagtaggtgctctagtactgaaggctaatgatatggtaagagaactaaaccaacttagtaaacaatctggattatcagtagaacaacttcagagacttcaaaaggcattccgtgaaaccggttttgatgcggaaaagtttggtgatatcaatcaggatacacttgataaattagctgatgcgtaccgtaatggtggtggtattgctgatgatattaaatctgtagggttagatccaaagaaatatactaagtttctaaatgatactcagggcggagtaaaagcagtaattcagatgttttatgatttacgtgatgcgggggcaagtgttgcggatcagaaattcctacttgaatcagtagcaagtgatgccagtaaattaactggtgtacttaatgaatcagctaatgctagtgaagcatggttgaagatctcgaaagaatcagtagatgtaacagatgaacaagctaaacagtacgcagaatttgataagaatcttagtacacttacacaaactggtaaaacctatctatttgaagcattgaatccaattgttgtagctactaataactttgtagatgtaatgagtaagaaaccagatagtactgatttttttgacacctatattacaaaggcaaacgcactacacaagatacttaatagtttaggtattcttaatctagttgatcctctaactcaatcattaattgatggtgaagaagaacgccgtaagaacaataagactcctgtattgaataataatcttccgttaggtgctgctacagttcaattagatgaaaagggagggtacgtagatccagcaaaagaacaagctgaacgtgataagaagctaaaagaagaacaacgcagacaggaacaggcagcggcaaaggctaagactctacaaaagaaagcgacacgtgaacgcctaactgctcaggcggcacttgataaagccattactgatatgacgattgatagtaatgaaaggcaactagcagagtttgacagacaacaaaaggcacttgtagatgttatcaataaatcagctacaactcttggactaaataagactcaactacagaaacttctaagtgaccagttggcatccggtgcggcaaaacgtcttgatatggttaatcaaatgattggctatcaagttccaaataaatcattaaaagatactaatgcgttaattgcttcaggtggattaaatagtactcaaactagtttcctggcagatcaacaaaaccaacgtataaatggtgataatccatttgcgtataataatactgaccagctacaaaaagataatactgatgctatgaatgctgaactagaacagaatgacttattattgaaaggtcatgaggactacgaaaaacggaaggctgaaatcacagctaagtacaacgcacaagcaattacaattagtaatcaaaacgcacaagcacaactagaaatttttggtagtactgctgattctcttgctcaaggtatggtagatgctttcggtgaatcctccggtgctgctcaagcggcttttgctcttagtaagggtataagtattgctcagacagtactatcaatccaatcagcactagcacaggcattagcaacacctttcccggcttcacttgcgaactacgcacagatcctatcattgggtatgagcattatcagtactgctaaaggtgctgctaacggacaattccacggtggcattgatgaactaccagcggtgtatgataacaaatcattcgtactgaaagcgggtgaacgtgtagtacagccagaagcgaacaagaaactaacagcgtttcttgataaacatgaaggtggtagtacttctggtgatgtgaccattaacgcacctttgatcattcaaggtgatgtagctggcgatgataagaaattcaatgaaatgttgaagaaacaccaaaacagcgtagcacaggcttacagaagctctattaaacgtaatacataa

SEQ ID NO: 81390 - DNA, 360 bp, Citrobacter koseri
atggttaacaaaagggggttatcacctgatgagtactttaacttggatgaagaagtactagatatgctaatggtttatgatgcttatatagaaccgtccggtattcacattgaaatgctaaaacacgcatatcaatgttattacttgtctcttaattcaagtactttaacgcctgaagctaagaagaatttaaaagtatcagactatgattttcttgatgtacttgatccaactcttagtactcgtgaaaaaacaaaaaaacgaaaagccaataaggaagagaatcaatctaattctattacttcaattggtgaagctattaaaaaagaggctatgagaaaaaataatggcaagaaataa

SEQ ID NO: 81391 - DNA, 300 bp, Citrobacter koseri
atgaacttacaagcactacaaaagaaactacagcctaaacatcatccattggatattgaaggcgaaactatttttatacatcgtccaacagctaatgacatttcaaaatgtgtcgatgtagcaagtacaatcatcctatgtgtgaaagatgagaatggtgatcctatcttctcaaatgaagatattgatggtcgcattaacattaacatgatggatagtattcatttaaaccgcattcataatgaaatcattaaactattcaaggattcagacgtacaggatgaacttgaaaaaaaataa

SEQ ID NO: 81392 - DNA, 1767 bp, Citrobacter koseri
atggggcttgattgggttccgttttcttttcaacgcgaaccaatggatatagcacaacatagaagtactaaaaaaatagtacttcagtcatgttctcaattacttaaaactacagtactacaatcaatagcatttaacctaatggcaaatgatccatgtaactttgcttttggtagtagttctgaatctgaagtgaagaaattcaaggatggtaaatttttaccagcaattgaaactagtgaagtactgaagcccttagtaacagataagaacgataagaacgcagccaataacgccaaacaaacacaaatggtaaacggtactttcgtgtactggcttaacttaaatacgccaggaaacctacgcggtattacatgtagagtagttctactcgacgaggtgagtaactgcggtattactgatgaaggtaatccaattaaactagctgaagctcgtactagtactttcggtgatgatgctcttgtggttatttccagtacaccattatacaaagatgatttagtaaattctgaatataacctcagtgataaacgccgttggtttgttactcacacttgcggtcatgaatatacttttgaatgggaacaagtagcctttgaattcaaacaacttgagaatggtagagcaataccagacagtacaactacccgtttaatttgtccacattgttctgaagtaattgatgaacatactagacaccaaatgattgataatggtcgatggatagctacaagtactgatggtgatcctggtgtagtcggctaccagatctcgcgtatgtattcgccccttaaccaaatttcagaaatggtaagtaagtttgccgatgctctttataatttcaatcttcagacattctataataatgaattgggattaccctatgaagatgaatatcaaaaagaactagatatacttcaattagaatcattacgtgaagatgaatttaatctacataaaatacctgaaagtactttaggcataactatagcagtggatcagcaattagaccgcttagaagcaactgtattaggttttgacgagaagaacatttatgtactttcacataattttttctatggtcatgactgtacaaagattgaatctcaagcatggaaggacttagacacattttgccgtcaagatttccgtactgtagatggtcgccttgtacctacacttgccgtattcgtagatagctcgaacggtaacgctacagatacagttaagaagtttaccgcacgttgggctaagtaccatcctatcaagggcagtagcagtactacaggtgacttattcaagcgtagtacacaagcaggttatgaactacagatcctaaacgtacatgatcagaagaatacgatacgtaaacttttaaacttgatgctcagtactgaagcagagaacgcaccgatacaattacgcttttccagtactctacctactgattactttgaacaactatctgccgaagaattaaaacctgctggtggtaaattagtttggagactaaagaaagggcagaagcgaaacgaggctcttgattgtctcgtgtatggaatggtcgcaattgtatatgctcaaagtaagttaggtgctcaacctttcaagaaactacgtgaatataaatcaaaagaaacaaccaggaaaataataaataacgtagaagaaccagtaactattcccaaagaaaaaccaaaacgcattagacgtactggaatgggttcaaactggtttggtaaatga

SEQ ID NO: 81393 - DNA, 531 bp, Citrobacter koseri
atggcactattaccagaaaagatctatatggttagtaaccctatggatctaacagttaatgtacctgctgctactattcttgttattagtttcactacatccggtcaatctcaatcattagataacctcagtggtagtacttcaaaagattttacagttactttagaaatgagtacagcacaggaattactattctgtactcaaatttccaacggtcaagctagtacatttacttctgaagtcatcaacccattaatgtttacttctgaatatgggcaattgaaaacgatgattgatgaaattgaccaagtgatagctaataaaattgctggcggtgctaactactcaatcactattaataataaaactcttgttagtgagtctcttagttctcttgaatcgatgcgtgaacgctatgtaaaacgtgcgaatgccctatttgtgaaaatgaatggcgggaatatctcaggtaatgggaaaccaattaagagtatcacggttttcaagccaaaacctgggagtactcgctaa

SEQ ID NO: 81394 - DNA, 1518 bp, Citrobacter koseri
atgtggtttaataaaaagaaacaagtacaagagcaaaagccagtacaacgcaagaaacaaaaacaagaaagggctaaaccttccagtactctaaagaaagatattaccgctgtacgttcaactgctgtactcaatttcggatttaatgccaactcaggaagtaatattaattttctgttattaaaagcattgccaacaatgcgagcattttcacgtgatgctgtacttaaaaatccaattgggcgtaagtacatgaacctatcggtagatggtgtagtaggttctgatggtgtgtatgtaaaaccttcagtagaaattgatagtactgatgaagaaattaaccagctaaaccagcaattagaaaaactatttgatcgttgggcttacaatgctgattacttttcactagatggggtactaacttttgatgtattccaacaaacagtagaaaaagtacgtgtacaagatggtgaatgcttcattcgtattcataaagtaaacggtactatcaaggttgaaatactagattcagcacgtttacaggcaatcaataaccaacatttacaaaatggtaactatatcagtaatgggattgagtatgacaagtataaccgccctgtaaattactggttctgccgttttgatccggttacatatgcgtactatgcaggtgactatgaagttattccagcaaatgaaatttgtcattacttcatagcagatcaacaaggtcagcaacgaggtatacctgatttagtagccagtagtaaattaatagaagatctacaaaactttaccgtagctgctcttacagctaaacgcgtttctgctagttctatggcgtttattactaacaatcctagtactactcaaactgatctattaggtgctgaagatagagatgatattacaccaacatatacagagtacttcgaagctggttttattggtgaacttggtgaaggtcaggatattaaaactgtaacgcctactaatggtgtagacggtattgaacaattcactaatgagttaatgaatcaaatcagtatgggtctaaatgtaactaaacaagctctattagctgatactgctaatgcttcatttagtgcggcacgtctaacagagaagttacagcaaactactttccgtactcgtaccaatgtactaatccagaaagtactaaaacctatctatattgcttggttaaaaaatgaaatggtaaataacagcaagttaaaactaaatttctcagactttgatgatttagtttgtgctcgtttcatttctcagaaaccaattagtttagatccggtgaaagatattcaagctgaagtaatgaaacttgatgcgggtcttattagtaaaactcagattatcgcggaattaggcggtgatccagtgaaagtactagctgaaatacaaaccgaaaaggaaaaagaaaacacaaacaaggaagataaccaggatggaagtcaaacaccagaagagggaactaacgatacccctacaggcgattaa

SEQ ID NO: 81395 - DNA, 1899 bp, Citrobacter koseri
atggaagtcaaacaccagaagagggaactaacgatacccctacaggcgattaatacagagtcgcgaactattgatattgctttttgttcagaatttcctgtagagcgtgatattgatggtgttatctataatgaaatccttctatgtggttccgaaaacgttgatctacgccgccttaataacaacggggcggtactctttaatcatgaccgtgatgaactaattggtgctgtagtatcggcacgaatggattctgatcgcgtaggtcgtgctactttgaaaattagtagtactgctaacgatgaatgggaaatgattcaagagggcgtactaactcatattagtattggatataacattaatagttactacatcacagataataatatctacgttaatgattatgaaatctatgaagtatcactagttactgtacctgctgatcctacagtgggtataggccgttcaatggaatcacatcttgaattgaaatcactaaataaagcaggtgaaacaattcaagaggatcattcaatggatattgaaaaaccagagagcgaacaggaatctattgttgaagctgctgtagaagtagtggaagaaaaagtagaagcagttgtagatacgattattgaagaaattgtagaaagtactgaagaagtagaagaaacaattaaagaagtaattgtagaacatgttgaagctatcgtagatgaagttgaacgcgaactatcagatgaagaacttttagatattctttctaaacgtcctgaattactaaataaagcagaacataaatcactaaataacagtgaagaaactgaacgtgtacgtgaattaaacgcactcggtaaggtattaaatattgatgtttctgaagcaattgaaaacggaatttcaatttcagatttcaaacgtcaactaaatgacattaaaaacactcctattcatgataaggaaatcaaacaaatggataagaatctattaaaagatatggtacgtgccattaaaactggtgataagtctgctctagaagcatatgaacgcggtatgaatggttatgtacgtgctgtagtaccagctactaatactactactgctgctggtgcggttgctgatgatctacaagatcaatatattccagagctactaaaactttctgctcttggtgaactaaatactactgtttattctggcctagctggacgtggtaatctaagtattcctaaagctgctggtgttgctcctgtatttaaattctatggtgaagctgaagaacaagtagattcaattgctagctttactaaagttaccctaactccaaaagcgtttggtggtgctattccactatcaaaacaagctattctaactgctccaaatatcgaaactttcgtacagtctgaactaatgcgttacgctgctcaaggtttagaacaaaacgtaatggataaaattgttgccgctgctccagtacacaatgttgctaccgctggcactattactcttgctgatgtacaggctgctgtagctaaacttgcacaagctaacgtagatatgcgtggtgttaaagctgtaatgaatgctaaaactctatcagtactacgccaaatcgctgtactagataacaccgctgctaaagcaatggttgaaggctatcgtaatactgaaatgtggctagctgatgaagctgtagtggttgtttctgaatttgttgcggatggtactatcctattgggtgatttctcaaatgtaatcatcgcaaactgggaaaactcagaatacgatttcgacgatactacttatcgttcaagtaatactatcgtttatcgtgtttgggattactcagatattgcccttgctcatgatgaagcgtttgtaaatatcgttatcggtgaataa

SEQ ID NO: 81396 - DNA, 330 bp, Citrobacter koseri
atgactatgagagcatttactaacgctaatcaagatgcgtttctaaatgctttcggtcaattaatccaaacttctacgggaagtacttttacaggaatagtagaagtacttcccgtttctattgaagcggcgggtggattcatcgaaagcgtagaaacattcgttacaatgaaaaaatcagatatggttagtactgatattgagattggtacagtactaattatcgagggtgaaaaccaaacaatttataatattgaagatgatctttcagggatggttaattgttatttccgtacttctgctggtcagtcattcgcagaggattactaa

SEQ ID NO: 81397 - DNA, 276 bp, Citrobacter koseri
atgatgttagtacaaaaagtacgaaatacaatgaaacagctaattaatgctacaaagagtctaactgtttctcgtgatgtagatgtatttgaacaaatagcatttgattactcaatgagtagtatcacatttggaaatcaacgtcaggtagcaaactttgctattcagtacttgatttcccctaaaccggaatcaggtaataccgcaccatcaattacatatgatcagattatcagtacttttgatactaataaaacgggggcatggctttgttga

SEQ ID NO: 81398 - DNA, 345 bp, Citrobacter koseri
ttggcagacaaacgcagcaaaatgctcacgatgtgggtgaccgaggatgagcaccggcgtctgctggagcgctgcgacggtaaacagcttgcagcctggatgcgccagacgtgcctggacgagaaacccgcccgcgccggcaagcttccctcgatctcgccggcgctgcttcgtcagcttgccggcatggggaacaaccttaaccagattgcccggcaggttaacgccggtggtggcagcgggcacgaccgcgtgcaggtcgtcgccgcgctgatggccatagatgccggactcgagcggctgcggcatgccgtgctggaaaagggtgcagacgatgatcgttaa

SEQ ID NO: 81399 - DNA, 408 bp, Citrobacter koseri
atgggatcagatgttcaatggcagatagataatggttatttggcgcaagttatgggggatttttcgacagagtcgcctagctttgaaacgccaatgtttgggcgatattttgatacctttcaagctgctatacatgttgcaaaagctttcccagggagtacgttgcagccatcagagtacgaagataaaactgggatgctaatacgtcattattatgtggattgtcatccgtattatgatcgactccctcctgaaaaaagcgataattttcagtatgatgagtacccttctgctattcatgtggctgcgtgtattgatcaagctagcaaagaactcgacgaactattgtttggtggtggatatggggaaaatggtgaggggcatgcaagcccgataattttatattag

SEQ ID NO: 81400 - DNA, 591 bp, Citrobacter koseri
atgccgtcactctctgttgagcgctggttagcactagctactgctggagatagccaggctagatttcatctgggtaagatattctcatgcggtcttggtgtgcatcaggattataagcaggctatatactggtttcagcttgcagctgagcaaggccatgatgatgcccagtttagtcttggttgggcatatcatctggggttaggtggatataaagatgctcaaaaagcttcggaatggtatcagaaagctgctgagcaaggtcatgcagaggctcagtttcagcttggaaggctgtatgctttctctgatttaagaaatgatgcgttagcagtcgaatggtttctctgtgctgcgaagcaagaccacagtagtgcccaatttaaacttggctggatgtaccatctcggtatgggcgttgagcaaagtgataggcaggctttccattggtttattctggccgctgagcaagatcatgcaggagctcaggcatctcttggtgagatgtataaaaatggatggggggtcgagcaagatgatgttgctgcgcaggattggttttatcgtgccagaaccatgcactatccctaa

SEQ ID NO: 81401 - DNA, 537 bp, Citrobacter koseri
atgcttgatactgactgcattactgttcttacggccaggggtattactgagattttaaatagtggaggaagccaggcttggagacttgatgctactcacgtagctaagcttccgtacctggtttgcgtccaaaattcgaaaaaagactggggtagtcaggaggctaagcatcatcatgcatttatgatcgggaaaatatccggagtaagtcgagcccctgaaaaccctaagcgctggatcataaatattgattcctatgctgaaattgatatccctgggcagtgggacggcaatcgtaatccagtctcctatagaaaacttgaagacatgggaattgatatctccaaagtggatttccaacccctacctaaagaggattccttagtcttgaatacgataaaaggcggggatgaatatgatgagtatgaggaggatagcaacagagttaggccgataaatctaaaagaggctaaagcagggttggctttatattttggtgtgaatgaggatgatattcagatcacaattaagggatga

SEQ ID NO: 81402 - DNA, 915 bp, Citrobacter koseri
atgctgtcacttattattatttttgtttttcttatcagtgtattgtatgcgcattctcgcggtaaaataaaacaaaagttttccaggcagttatttgatcattcaacatttatggctccgataaatatgtttatgacaggcttttcgaagctgccgtcaaagcaggcatggtttcccccagaaacatttcctgaacttcaaccattaattgataactggcaggttataagagacgaagctgttaatttgcaagggcacattaaatcatctgaaaaaaataatgatgcaggatttaatacattttttaagcgcggttggaagcgcttttacctcaagtggtatggagatgctcatccatcagcggagcggctttgcccagtaacaacccaactggttagctctattccctgtattaaagcagcgatgtttgctgaattgccttcaggaagccatttaggaaagcatcgtgacccttatgccggttcagttcgttatcatttaggattatcaacaccaaatgatgaacggtgttttattgaagttgatggtgtacgccgcagttggcatgatggtgaagtgataatttttgacgaaacttttgttcactgggctcagaatgataccgagcagacacgtattattttgttctgtgatatagaaaggccgatgaagtggcggtggtcacaaaaaataaataggtggataggtggggtgctaatgtcagcggcagcatcacccaacgataataatgacaggactggtgctataaatcatttatttaaatatgttaatgctattcgtgatgcaggtcagaagctaaaaaaaaggaatcgaaaactatattatttgattaaaaatggagttatttctttgatttttgtttggcttgctgtctcagtgtttagatggctgtga

SEQ ID NO: 81403 - DNA, 216 bp, Citrobacter koseri
atgacagagctggaaaaacagttgctgagcgcattagagcagctacagcaggactactcgaaaaggctggacgagtgggagagcgccttcgcggaatggcggacgatgtctggtcttatgcaacgggagaacgcggcgctgagcgagcgcgtcacgggcttgagcaggcaggtgcagagtttgagcgatcagctgcgccggttgtcgagcggctga

SEQ ID NO: 81404 - DNA, 486 bp, Citrobacter koseri
atgaacagtcttttaacgctggcgaaggacttagagcagaaatcgaaagcgcagcagcagagtaccggcgagatgctgaaagccgcattcagcgagcacgagaagtctgtcagagcggaactgagcgaaagcgagaagagaatcagcgccgccatcctcgaccacgaccggaagctgtcctcagccatgagccagcgtacgaaagggatgctgcgcatggtcagccagacgtggctgaccatcgtcctggtctccgtgctgctgatcgcctcgaacgcggccattctgtggtggcagagtcagcagatactcgacaattacgtgagcatccgggagcagaagagcacgcaggcgatgctgtccgagcggaacagcggcgtgcagctctcgacctgcggcgagcagagacgccgctgcgtgagggtgaacccggaagcgggacggttcggagaggattcgagctggatgatactggcggggaaatag

SEQ ID NO: 81405 - DNA, 246 bp, Citrobacter koseri
atgcagccccagcctgccgttcacgatggtctgccaggcatcaatgcgcggacggtcggcgcggtcgtaatacggctggagacgcttgccagtcagcagctccgtgttcgggatcaggaagttcagctccagccgccccttatcctggtgctcaacccacagcacgctgtactggtctttgtcgagtccgggcatcagaacccgttcaaagctcgccatcagcttttcgcgctgcccgggcggtaa

SEQ ID NO: 81406 - DNA, 771 bp, Citrobacter koseri
atgggcgcttaccgtgagctgcgcaagttgcctcgcggggtcagtattgctgacgagtttgacgagcgtgtcgaagcggcacgcgcggcggctgatggtggtgatttcgacctgtatatcaccgctcagggtggcgcaaatgtcccgcgcgacggccagactgtcagggtcgcccgtagcgtcagtgatgaggttaacgactacgaagaggatatcgagagagtggtcggtatttacgcacctcacctcggcgcgcgtcacgttcacattacccggtcatcagaatggcgaatcgttccaaaggttttggccgttgagcctttgaccttaaaaagcggcatcgccgcgcctcggagtcctgtcaataactgtggaaagctcaccgacggtgatactccagttatgacccctacaccgtctgagcatgccgcagcggtgctaaatcttgttgatgacggggttatcgcatgggatgaccccgaagtcgtgacggcgctcaggaacgcattaaaacacgacgcgccccagcaaagaagcggtgagccattaaaaccgcatgacgtcgccccatcgggcaggctgacaaaatccgaacgcgcgcaaataccgcgcatccgctttgaccttgcgcagcatggcatcaccccgaaacgctgggagcttgaggcgctggcgcgcggggcgtccgtgacatacgacgggcagaaattcacatatccggttgctgatgagtggccgggattctcaactgaaaaggagtggcgtcaatga

SEQ ID NO: 81407 - DNA, 471 bp, Citrobacter koseri
atgacaaaggcacatgacttaaaaattcatcctgaatgttttgcgccggtggccgccggtaaaaaacgtgctgaagtgcgtataaatgaccgcgattataatgccggtgatacgctgatattgcgggagtatgacccgcaacggggctataccgggcaaaaagtggtggcgttaattactgatgctacgtgtttgagggcgtttgttgacggctgtgcgccttatattttattgagtatccagctcgtagaacagccagcaatcaacgggtgtaggctgatgcgatggaatgagttagctgtgcgtgggctggtatttcgtattaattatgaggtgctccactcgcagggtttagcaatgatgtatgacactgaaaccggtgtatctgatggggtactggtagcgtcagatggtatctggaattattcgggcgaaatcattaagtctgcaaaacaaaagggatggctgtga

SEQ ID NO: 81408 - DNA, 237 bp, Citrobacter koseri
atgcacgtaattcggggcgggattccgcagcaccagaccaaaagtattaagttaatggctatcgttcatcgcctacagcaaataatggtcaatgagaacctgacacccgccgagttggtcgggtgtgccgaaatagtcagagataattacggcaggctgtacgatatcagcaatccgaaaattgaggcgttcacaccggcaaaaggcccggtaattccaccaccacgtcgaccatag

SEQ ID NO: 81409 - DNA, 432 bp, Citrobacter koseri
atgtccaaaaacctcgaattatttaaccagcagacggcagaagtttttgcggtgctatgggataacttcccggtgccgcaggtcatcacctacgaaaaatttaacgccgcgctacctgatgactactttgaccaacttaactcaccggaaatgaaagcactgaatcagttgcgtagtgtggttgagggtacatttacttttctcagtgaaaacggctacatccagtatgaaacagaccatcagacctattttcgggatgtgcgcctgaccgagaaagcactcgccgtgctcaacaaaaagcccgaggcactcggcggtaatgaaacgatgggtgataaaattatcagcgcagtgaaaaaggggacgccggaagttattgccggtacggtgacaaacatgctggcgctcggtgccggtctgataaccagctaa

SEQ ID NO: 81410 - DNA, 1023 bp, Citrobacter koseri
atgagcaagcgcaagccacgcaaagcagtcgccacgaccgccagcgccccacaaaaaatggaggcgttcaccttcggcgagccggtgccggtactcgataagcgcgacattctggattacgtcgaatgcatcagtaacggcaaatggtacgagccgccggtcagcttttccgggctggcaaagagcctgcgctctgccgtacatcacagctcgccgatttacgttaaacgtaacgtgctcgcgagcacctacattccgcacccgctgttatcccgtcaggatttcagccgctttgcgctcgactatctggttttcggcaatgcctttcttgagcagcgccacagtgtcaccggccagttaatcaagctactggcctcaccggccaaatacacccggcgcggggtcgacgattcgattttctggtttgtggaaaatttcactctgccgcatgagttcgcgcctgataccgtgtttcacctgctggagcccgacattaatcaggagatttacggactgccggaatatctcagtgcgcttaattccgcctggctgaatgaatccgcgacactgttccgccgcaagtattaccagaacggcgcgcacgcgggttacatcatgtatgtgaccgacccggcgcagagtgcgaccgacgtcgaatcgctgcgcgaggcgatgcgcaactcgaaaggactcggcaactttaagaacctgtttttctacgctcccggcgggaaaccggacggcatcaaaattgtgccactgagcgaggtcgccacaaaggatgactttttcaacatcaagaaagccagcgccgccgacctgatggacgcgcaccgcgtaccgttccagctcatgggcggcaagcccgagaatatcggctcactcggtgacgttgagaaggtggcaaaggtattcgtgcgtaacgagctgtcaccgctacaggacaggttcagggaggtaaacgactggctcggcatggaggtcatcaggttcaaagagtacaccctcgacaacccggaataa

SEQ ID NO: 81411 - DNA, 747 bp, Citrobacter koseri
atgaaaaataacgttttctcacaaagccagattcaggcaatggccgatattctgcacaatgacagctttgactatcaggcaacatggttgcgggtcgggaaactcaatatcgaccgtagcatcaccaaatcacgccagattggcgcaacgcagctctttagccgtgaggcgctacttaaagcgctgacaactggcgataatcaaatctggtttgctcatacagttgagcatgcgcgggtggcgctgatgtacatgagcaacctttcggcacgcgtcggtgtccgtctggcgagcaacggttacagcgtacagctcgacagcggtgcggccatcagccttgttggcgaggaatccctctgcgccgcgctggcgggtaatgtctaccttgatgagttcggatggttcaataacccgttaagagcggcaaaagtcgcggcggctatcgcctgccataaacgccacagcctgacgatgttcacctctccctctgataattgtgacgctttccgggtatggaatggcacgttccgcaggcaccgaccatcaccgctaatcaataccggcgacagcgtattttgtaccgatggtgtctggcgtcagtcggtcactctggatgcagcatgccagcgcgggtgtaatctctttgcgcctgaggaaattaaacgcgaatacagcgacgatgattatcgtctgctgtttggctgcgactggtctttcgctgttgcagcgggtgaggtggcagcatga

SEQ ID NO: 81412 - DNA, 450 bp, Citrobacter koseri
atgctggagcgccaccagtggaaaggcatggactttgccgctcaggcggagggcatccgcaagctgaccgagaaatacaacgtcgaatacatcggcattgacgcaaccggcctcggtctcggtgtgttccagttggtgcgctcattctacccggctgcacgcggcatccgttacacgcctgaaatgaaaaccgcaatggtgctcaaggcgaaagacaccattcgccgtggctgtctggagtacgacgccggggcaaccgacgtcacgcagtcgtttatgtccatccgcaaaaccatgaccagcagcgggcgcagcgccacttatgaggccagccgcaccgaggaagccagtcacgccgatatcgcatgggcgaccatgcacgccctgttaaacgaaccgctttccgccggtagcggcatgcagcctaaatcaattctggagtttaattaa

SEQ ID NO: 81413 - DNA, 1752 bp, Citrobacter koseri
gtggggactcatgcttttgctgatatgatgtatcgtctttaccagtgttttggcctgtttgaaaaagatgacgaacggcgtgaagtgtgtggaaacagcagtttttcctttcatcagaattttttcgatcaaggctataacgatttaataagaataattgacagcaatgaaatcttcagtctcgaagaaagacgcgaagttttttacaaatacgagcaactatataacgcgctaatgcatattccggtcttttctcacctagataatcgacaaatcacaaagcgataccttcaggtcgcattgcctcccatagtagcattagacgtctataattctttccccccggatgatgaaatgcacttctattaccatattcatcgttttttaatcagcatacactgcccacacgaaagcgctgataaaagaaagatttattcaggagtgaaggaatatcttcgagaatatattcgcacacttgagtttcactacacggatcatctggcatcactaattagtttcattaatgatattaaagcaagtagtggacagaaggaagcaactataaagagaataataaaaaattgccgtttagagtatgatgaaagttacatctctgaaaagaacatcaaactcaattttctgaatttaaataaaattgaaagagcttatctttcacttaacgtgttacttgcatttgaacgcaagacctctgctgtcacagcaatatctatgcattaccgacatacagtgagcaatggcgttaattacaacactagctttggcattctatgtcgatatctttattccagagggtatgatgaacgactattacactatattacactcccattttataacgaagcagtccgaccgatttcggtaatgatagaggagaaaccgtatcgctacgttcacgaattaaaatggcttattttcaacattagtgaaggcaacaaatactctaagtgggatttagccgaaatggaatccagtctcaatgccgccactaactcagatgtactaaagccttactcccaacttttgcaaatcatcacttttctcagtcaaaataaaatagacgaagccttctgtcttgtaaacaaaatcccattagatagcttacctattggttacctgccttcagccttttcagttatcaaaatggcattaaaagtaaaactggaaagaaaaaaaataagaaacaaaacattactatccgcgataaacagtactttgagtaatcaaggtaccattactgagtttatacctgtaaccacaggagaaactgatagtagtgttgtactatctgcagataacatgacgatcatgcgtgcaataaaaatgtacaaccacatgataataaaggtaagttacttatctgaggattcaccgtctgatatctgtccgcaatctatattcgggcttcttaatgaaatagagtttgcgctgggtaagctaaatgccctggtttgcgaaacaggtgatagtattgatagtaatgaactggccgggtttatagtaaaaaataaaacacttacagctcgcgaattgaatgaaaacctggttggcgtacttgataaatgcacactttataatttcctgagtagcatcaatgtttttattagttatttgaggtgccctggagaagaactaggacacatcaggatatttgccggagtaacagagaagccaaaacgtcttcgggaaaaggtatgtgaggctttgaggattgtatcagaaaaacgtagatag

SEQ ID NO: 81414 - DNA, 879 bp, Citrobacter koseri
gtggaatatgagcttattcatttaaataataaaggtttaattaaaacttcacatggagatatctctttccttgctttcataaaacatgcaacctttgctggattagaaagttcgcatgttctactacacccattaagatacacaagttttttttgtgagttcgccccatccttttttggtttaaatcattttcgtaagtatcctggtctagaaaaagatccaacagaaactgcctatacgtctaacagaataggcagggcgtttgctgactttttctcaaaaaaaatatatggtgcaaaatatacacatagctatgaatgcgcaatggcactgaaaaaacttcctataaaaggagatagacctgatttttattgtgatacacttactgcgcaatttgcagttgaggcaaaaggatattctgctcaaagtgtttctgattttgatatgataaaacataaaaaacaatctgggacggggcctctatctatcaacttctctgtggctagcgttgcatacaatctctacaagaaacccaaaattaagttttatgatcctatagggagtgatgaaccatatgatcatgttcttaactcgcgtttgcgatatttttattatcgcgatgccataaacttcatcgaaaccatctctgattcaaggacgcagagcgaattacctgattactatgcttataatatatcacatccatttcttcccttccgtcaattcttagtaaataaatggatagcagagcgaaaattcatgggcgctgaatggctgacatcaatggaaaacgtgagtattgaaaatcaagaaaatgatgatttttatattgacgttgatggaattggtataaaaggccgtcacaaatggttcgactaa

SEQ ID NO: 81415 - DNA, 450 bp, Citrobacter koseri
atgctggagcgccaccagtggaaaggcatggactttgccgctcaggccgagggcatccgcaaactgaccgagaaatacaacgtcgaatacatcggcattgacgcaaccggcctcggcctcggcgtattccagttggtgcgctcattctacccggcggcacgcggcatccgttacacacccgaaatgaaaaccgcaatggtgctcaaggcgaaagacaccattcgccgtggctgtctggagtacgacgccggggcaaccgacgtcacgcagtcgtttatgtccatccgcaaaaccatgaccagcagcgggcgcagcgccacttatgaggccagccgcaccgaggaagccagtcacgccgatatcgcatgggcgaccatgcacgccctgttaaacgaaccgctttccgccggtagcggcatgcagcctaaatcaattctggagtttaattaa

SEQ ID NO: 81416 - DNA, 747 bp, Citrobacter koseri
atgaaaaataacgttttctcacaaagccagattcaggcaatggccgatattctgcacaatgacagctttgactatcaggcaacatggttgcgtgtcgggaaactcaatatcgaccgcagtatcaccaaatcgcgccagattggcgcaacgcagctctttagtcgcgaggcgctgctcgatgcgctgacaacgggcgataatcaggtctggtttgctcacaccattgagcatgcgcgcgtggcgctgatgtacatgaacaacctttcggcgcgcgtcggtgtccgcctgacgagtaacggccacagcctgcagctcgacggcggtgctgttattagctttgtcggcgaggaatcccattgcgccgcgctggcgggtaacgtctaccttgatgagttcgggtggttcagtaacccgagaaatgcggcaaaaatcgcggcagctatcgccagtcataaacgccacaatctgacgatgttcacctctccctctgataattatgacgctttccgggtatggaatggcacgttccgcaggcaccgactgtcaccgctaatcaataccggcgacagcgtagtttgtacagatggtgtctggcgtcagtcggtcactctggatgcagcatgccagcgcgggtgcaatctctttgcgcctgaggaaattaaacgcgaatacagcgacgatgattatcgtctgctgtttggctgcgactggtctttcgctgttgcagcgggtgaggtggcagcatga

SEQ ID NO: 81417 - DNA, 1023 bp, Citrobacter koseri
atgagcaagcgcaagcaacgcaaagcagtcgccatgaccgccagtgccccgcaaaaaatggaggcgttcaccttcggcgagccggtgccggtgctcgataagcgcgacattctggattacgtcgagtgcatcagtaacggtaaatggtacgagccgccggtcagcttctccgggctggcaaagagcctgcgctctgctgtacatcacagctcaccgatttacgttaagcgcaacgtactcgcgagcacctacattccgcacccgctgctgtcccgtcaggatttcagccgctttgcgctcgactatctggtattcggcaacgcctttcttgagcagcgccacagcgtcaccggtcagttaatcaagctgctggcctcaccagccaaatacacccggcgcggggtcgacgattcgattttctggtttgtggaaaacttcactctaccgcatgagttcgcgcctgatactgtgtttcacctgctggaacccgacattaatcaagaaatttacggcctgcccgaatatctcagcgcgcttaattccgcctggctgaatgaatccgcgacgctgttccgccgcaagtattaccagaacggcgcgcacgcgggttacattatgtatgtgaccgacccggcgcagagcgcgaccgacgtcgaatcgctgcgagaggcgatgcgaaactcgaaagggctcggcaactttaagaacctgtttttctacgctcccggcggaaaaccggacggcatcaaaatcgtgccactgagcgaggtcgccacaaaggatgactttttcaatatcaagaaagccagtgccgccgacctgatggacgcgcaccgcgttccgttccagctcatgggcggcaagcccgagaatatcggctcactcggtgacgttgagaaagtggcaaaggtattcgtgcgtaacgaactgtcgcccctgcaggacaggttcagggaggtaaacgactggctcggcatggaggtcatcaggttcaaagagtacaccctcgacaacccggaataa

SEQ ID NO: 81418 - DNA, 432 bp, Citrobacter koseri
atgtccaaaaacctcgaattatttaaccagcagacggcggaaatctttgcggtgttatgggataacttcccggtgccacaggtcatcacctacgaaaaatttaacgccgcgctacctgatgactactttgaccaacttaactcaccggaaatgaaagcactgaatcagttgcgtagtgtggttgagggtacattcacttttctcagtgaaaacggctacatccagtatgaaacagaccatcagacttattttcgggatgtgcgcctgaccgagaaagcactcgccgtgctcaacaaaaagcccgaggcactcggcggtaatgaaacgatgggtgataaaattatcagcgcagtgaaagacgggacgccgggagttattgccggtgcagtgacaaacctgctttccctcggtgtcaatctggtaaccagctaa

SEQ ID NO: 81419 - DNA, 780 bp, Citrobacter koseri
atgggggcttaccgtgagctgcgcaagctgcctcgcggggtcagtattgctgacgagtttgacgagcgtgtcgaagcagcacgcgccgcggctgatggcggcgatttcgacctgtatatcaccgctcagggcggcgcaaatgttccgcgcgacggccagaccgtcagggtcgccagtagcgtcagtgatgaggttaacgactacgaagaggatatcgagagggtggtcggtatttacgcgcctcacctcggcgcgcgtcacgttcacattacccggtcatcagaatggcgcatcgttccaaaggttttggccgttgagcctttgaccttaaaaagcggcatcgccgcgcctcggagtcctgtcaataactgtggaaagctcaccggcgataatactccagttatgacctctacaccgtctgagcatgccgcagcggtgctaaatctcgttaatgacggggttatcgcatgggatgaccccgaagtcgtgacagcgctcaggggagcactaaaacacgacgcgccgcagcaaaatcgccagcaaagaaacggagagccattaaaaccgcatgacgtcgccccatcaggcaggctgactaaatccgaacgcgcgcaaataccgcgcatccgctttgaccttgcgcagcatggcatcaccccgaaacgctgggagcttgaggcgctggcgcgcggggcgtctgtgacatacgacgggcagaaattcacatatccggttgctgatgagtggccggggtttactggtatatctgaatgggggtaa

SEQ ID NO: 81420 - DNA, 1176 bp, Citrobacter koseri
atgctcggacttgcattttcaagatacggtgcggcaagctacagccgtaacttatcagagaaagttttcttagggcaggctaatttaatcaggaaaggttttcatcagggaggcatgccaggttatgggttgcggcgtatgcttattgatgaaaaccgggttgagaagggcaaactcgagtttggtcagcgtaagagtatccagacggatcgtgttattcttgttcccggccctgagaatgaagtaaatattgtaaacaagatatttgacatgtttaacctggaggcaaaaccagagcgagttattgcatctgagctcaatcgaaataaaatcattgctgataacgacactgaatggacaagagggaaaatccatcagatactcacaaacgaaaaatacattggaaataacgtttataataaaaaatcttttaagctcaagaagaaacacgtcatcaatcctgaagataaatggatccgatatgacggggcgtatgagcctatagttagcgtggagaaatttaatcttgccagagaaatcatcaaaaaccgctcgatcgttttatctgaagacgaattacttgaaaaacttcactcgctactaataaaaaaaggcagactttcaggattactgatagatgaagaagaattattgccctccagcagtgtataccgtgcccgctttggcagtctgctgagagtctatcagttggtaggatacaacccaaaagaggattactcatggctggaaacaaaaaaatatttacagggcatcaatagaaaaatatctgatagtttaatcgaaaatatatatctctctgatggctgggtaagtgatacctgcgataacggcttgttgaatatcaatgacgaatttacgttatttattcaggcgatccggtgccagaagaagcaaactgggggtctaagatggaagataaactttcaccatacactcacccctgatatcagcattgctgctcgcatggatagtttgaacacttcgattatagattattatatatttccatcaatagacttattgctaaatgataaagagttaaaagagcaaaaccatttcagttttgacatgtaccgttttgatgatttgcacccactctaccgtctggttaaacgaacaaagctaaaggaaatcattgatgaacctaaaagatga

SEQ ID NO: 81421 - DNA, 876 bp, Citrobacter koseri
atgaacctaaaagatgaaataaaaatgatagaagttgacagtatatacatagcaaatccgagaaaacgtgacaaattcactcatgaagaaataaaaaagaacatacacctgatcggacttaaacggcctatctctgttagaaagatcgcacatgaacactatcagtatgcactgatatgtggacaaggccgcctggaagcataccaacaatacggggagaaactcattccggccattattaaaaatgtggatgaagaaacaggccatttaatgagtctgacagaaaatatagcccgaagaaatccgagatctgcagaatcactggaaaacattaagcaattaaaaaaagatggattaaccgacagagagataggtgagctcctgggatatacgctcggatgggtaaatggcgtaatatcccttctggacaaaggagaaaaaaaacttctgtcagcatttgagtctgggcacatccctctttaccttgcggtagaaatttcgcgagccaatgatgatgacatccaaaaatctctgacagaggcacttattgaaggaaaaataaaaggtagccaaatcaatataataaaacgtgtcattgagagaagaaaacaaggagataaaggcatggtgaataaaaactatgttcagggacgtacagccaaaagatatacgcctgaagaactatcagatatttatcaaaaaaatgctgatgaacacatgaatattcagactaaagccaaatatgccagagagactttgcttgccgtaagagagttatttaagaatctcaataacaaccaaaattttcgtactttattaataaataatggtattaccgatatgcctgaatgcttgcatatcaataaaatcaagtga

SEQ ID NO: 81422 - DNA, 903 bp, Citrobacter koseri
atgattaaacaatgttttagcaatcaatttcaaacttatttagttaataatcttgtgcagtccagaccattacctggaaatataaaggcaagtatcaaatataaacagataatgacatctatttcagaaatagggttaatagaaccaattgtaatctatatcactgaaagcggcatccaaaaaatactcgatggacatcttcgcattgaagcactcaaagaccttagtataactcatgctcactgtctggtctcaccagtggatgaagcgtactcgtacaacaagcgcgttaaccgactcacactcctgcaggaacagaagatgctcaggaaagctgtcgaatcgggtgtttctattgataaactcagtgcggtactggggatatcctataatattatcaatactcgacttcgtatttctgatggaatttccgctgaagctgtcgccctcttgtcagaaaaaaacataccccaaaatgtttttgatgttctgagaaagataaaaccttataaacaagctgaaattgttaatacaatgataatgctaaacaaactcaccagaaaatttgccctttcaatgcttcattcattagcgccagaacatttagttacacagaataaaaacgaatcacaaaataaagatgttgcaaaaactcttgctcgcctcgaaaaagagatggcagcactacaggttgagacacaaaatattaaagacgagtacgctgaaaataacctcaatctacatatcatcaaaacatacattaccagacttctcaataatagttccattttgctttggttatatgataacaatattgaatatcttgatttgctcaaaaaaatctcaggcattgataatataaataacatttcttctacttatgaatggcaccagaaagtatag

SEQ ID NO: 81423 - DNA, 726 bp, Citrobacter koseri
atgcctgctcgttcattatgccaaaaatttttgaaaaatatactgtctccattgcaccgctatcgccagaatgcacttattgatgtgaccagtgcggtcatttgtggagcctcccttacgttaaccagcatcggtcgtcatcttcagggctgtgcttccgtcaaacataatatcaagcgtgttgaccgactgttaagtaacccactcttacataaggaaatccccgttgtatttcagagaatcacacagcacataactcgtaatatgacccgggtagtcattctaatcgactggagtggttaccactccgcagattttcagcttcttcgggccagtcttgcctgtgatggtcgttctttgcccctgatgagctatgtcgttccttcgtctcagttaggtaacccagatattcatgcgcgttttctcgactcgctctcccggtgttttagtccaaaaacagaagttataatcattatcgatgcggggtttcagggacactggttcaggctaattcgttctcatggctggatctatatctgtcgagtgctgggtgctcaatactacaaaattcatgaggtgtgggaaaaagtcactaaaataatggataaggcttcctgtacacttatttatctgggtaatgggctccttggacgagacaaacgcgcccgacataaggggtatttttatctaaaagcaaagagaaaggacgcaagtttaagcgtttga

SEQ ID NO: 81424 - DNA, 315 bp, Citrobacter koseri
atggacaataagaacggttacgatccatccatacgtagaggtgttcatcagttctcacacgctggggtttggttcacggtctgttatcggggaagtgttcttgagcaattcaagtttggtgatcgggtgatatttgaaggttctgtaggaaggttgttctggctgggaacggttgaaagggattgttttgtactgattagtgagacaccctttaacaaggtgttggatgctctagtttatctacatgctgaacgccgtgtgtttgaacaacatgctgatgattggttctgtggacaagaagaattaccgttctag

SEQ ID NO: 81425 - DNA, 675 bp, Citrobacter koseri
atgatcaatacaaccttcatagcagaaccaatcatgacaacatcaggccagctcgtaggctgtgaactgttaacccgctttcaccgtgaagatttgccagtactgaacagcaagtacttcatcatggccatgacggtcgcagggaagaaggaactactgaaacaacaattagagacagtagaagttcatgcgtcatggttcagagaacaccggcttttctgtaccgtgaacgttgataccgtacaggcacggctatgtgtctttgacagggatattattcagctattggataagctggatttcatgaggcttgagatctcagagaactttgaagggcttgaactcggtatcaatcatccagtacttaaaacactgttaaacgtgggctatcgattgttccttgatgatcttggttccggtcgggctaacgttgcggcgttaactactggatgctatgaggcggtcaagatcgatagggcgttctaccgtgaggaagtacagaaacctacattcaacgcactgatgaagaacatcatgaagtattgctcctatgtaatcgtagagggagtagagcaacgccaagagctacctgtattacgcaatgctggagtaacggcggttcaaggctatctataccgttcagtaccgttcgacaagatacacaaccttatctaa

SEQ ID NO: 81426 - DNA, 378 bp, Citrobacter koseri
atgaacatcatattacacttccctcaaggctctacaagcatcatagacggtacttatacaggttatgagtattcccgttcagataagctaatcaacgctcatatcacgtttgatgaatcatacaagctattcatcaaccatcacagtttagtactcagctataaatacatcacagtgaatcaccagcacagctacacaatcggtagatgggtttatgactggaacacaatagacaattacaaaggctccgagcgtgtacatctcgactatctacagtgcttgactcaggaactaatacaagatgaatcattgaacggtagacccaaagataactttcgaattgctctattgatcaatcaattcagagaagaaaaataa

SEQ ID NO: 81427 - DNA, 543 bp, Citrobacter koseri
atgattagtattagacagctatcaattcagtacggatatgatgaatcgacggtacgcgattggaaatcaaaagggatgccgcacgggaaaacggttgatgatgcggttactatttcgtggattgttgatcatatcattcgtccgttacgtgatactgatacgaaagaacaaattgaaaaagaacgcctacgtaaactaaaggcagaagcggcattatccgaattagaactacaagagaaacaagggatagtagttagtactgaatatattgaacaagtactaacagaatatctattccaggttaaaaccgcaataagggcaatcccaagtaaaacatacttagagctattcgctcagacagacgcaaaagatttacgcgatatattaaaacaacatattgatagtactttattccagctaggaagcatggaatttgaactacccacggatgaagagattttagaggatggacaacaagaagaaagtaacgagactactacagaaagtattaccgacgatacagccaccgaagggctttgttga

SEQ ID NO: 81428 - DNA, 1926 bp, Citrobacter koseri
gtgaaagcccgataccagtcaggcaaagagcttgccggtaatgtgggtgcggctggcgctgccggggtaggggtggctactgccgggctttatggtgcatctcgctttattgctccgggtattggttttgataagcaaatgtcaggcactcaggcaatcctcgggttgaataagggtgatgaaaaactcgcacaaatcaggaaacaggcgcgtgatattggggcgacgacagcattttcgccgggtgatgttgcccgtacacaaactacactagcgcgttcgggttataaggctgatgacgtgttggcggcgacagggtcaacagttaatttaagtcttgccgcagatgtggatattgccgaagccgctgacattatcacgaatatgcagtcggcatttaatcttcctacaacggaaatccagcgggtggcggatgtgatgaccaaaggatttacgtcatcaaataccgggctcgttgagttgggcgaggcaatgaaatatgtcgccccgatagctgaggcggcgggggcaagtatcgaagatactaccgcaatgctcggcatactggcagataacggcatcaaagggtcaatggcgggaacgggggcgagcgccatctttaaccgtctgcaggctccactcggtaaagccgttgatgctatcgccgagctgggcgttaaaacccgtgactctaaaggcaacatgctcccggtggagcaaatcctcaaagccattaacctttcatttgctaaaaataagctgggtactgctgaacaaggcgagtacctaaaagttattttcggtgaagaggcgatgaaaggcgcaattaagctggttgctgctgccggtgatggttctcttgataaaaaacgaaatgagattaagaactctgccggtaccacggagcttattgcaaaaattcaaaccgataacctcgatggggatttaaaaaaacttcagtcagcatgggaagacttgcagattgaagtgttcgaaaaagaagattctgcgctgcgtaagttaaccacatcggctacagagtggttaggcactgtaggggcgtggacaaaggcaaatccagagctgactaaaaccatttttacagtcgttaccggcgcgctggctttcgtcggtgtgattggcgctattgggctggttgcatggccggttattgctgggataaatgccattatcgccgccgctggcgtgctgggtacggtctttactgttgccggtggtgccattgtgacagcgctcggtgcgattacctggccgattgtggccgtcggtgcagcgattgtggccggggcgctactcatccgcaaatattgggagcccatcagcgcatttttctcgggggtgattgagggcgtcatgagtgcctttgcaccggtcggggaaatgttcgctccattagcaccaatctttgacggactcggcgagaagctgcgcggcgtctggcaatggtttaaagacctgattgcaccagtcaaggccacgcaggagacgctcgatagctgcaaaaatgtcggcatcatatttggtcaggcactggcctctgccttgatggctccgctcaatgtttttaacaagctgcgcagcggtgtcgactggcttctcgaaaaactcggcatcatcagcaaagaatcggacagcctcgaccagactgccgccaaaaccaacgccgccacgcagggtaattcctacatcccggcaaccagtacatatggcggctatcaggcttaccagccagttaccgcaccggcgggacgctcttacattgaccagagtaaaagcgaatacaacatcaatctgccgggaggtgttgcaccggggcatcaacttgacagacagctacgcgacacgctcgaacagattgagcgcgaaaagcgtgcgcgtcagcgtgccagtatgggtcatgactga

SEQ ID NO: 81429 - DNA, 486 bp, Citrobacter koseri
atgatgcttgcgcttggaatgtttgtgtttgaacgccgcaccctgccttatcagtcgatgcagcactcgaaggattaccgctgggcgtctaatgacagagtaggtaaaccgcctgcgtatcagtttctaggtgagggggaaaacgcgatccagcttgctggtacgctttaccctgctattaccggcggtcgtatatccttgcttgctgttgagctgatggccgacgagggcagagcatggccgcttattgagggaaccggcaatatcttcgggatgtatatcgtcgataaggtgtcgaccacgcataccgaatttttcagcgacggtgcggccagaaagattgatttcaccctttcgctgaaacgggtcgacgaatcactgacggcaatgtttggcgacctgaataagcaggccagcgagctactcggctctgccggtaatctgactgataagctgcagggtgcgctcggagggctgacctcatga

SEQ ID NO: 81430 - DNA, 276 bp, Citrobacter koseri
atggatttcctgcatttcacttataaatttgacgagaaaaacacaccacgcagaggtgtcatctctcagcaaatcatggggattgatccgcaatatgttaagaaagtcggggagtattaccatcttgacgagacaccaatgcttcttgacgggctggcagcaataaaagcattgcggaagcgggacgaagataacaagttacgcattcaggagcttgaaagaggtattgaagaattaaagagagttgtccgtgagcttgcagatagtgcttcttaa

SEQ ID NO: 81431 - DNA, 240 bp, Citrobacter koseri
atgatgagcatggacaacatgattattgccggggtaagaatatatttcccgcctggcaccgatctccctgttccaacgcctgaactcaggacatttgccatcgtcagcaaagacctgcctggacatctggtgcttgagtacaaaaacaggcagtgggttcctgtactgacccggctttttgatgattcagcacatgcgatttcagctataacaagcctgagtaaaaagacgtggcattaa

SEQ ID NO: 81432 - DNA, 510 bp, Citrobacter koseri
ttggattcccgacgaaagcaattgaaagaaaatctaagtttaaacgcccgcttgcgtttcttattagttttcccgtgtatccttgaagagttcgacaaacagatagtcctatttataaaatcatttattgataagtatcattttaaacaagctcatacacacactcccatttttatattggatgtctctcagtcccactttgatgacattgcagagcgtttatacgaaaaggatgtaatcccgaacatcggtcgtcatgtaaaagccttctccgagaaaaaattttttagtgagcctattgttacccgagataaaaaagaatttgttcttcgctttattcgctgggatgattacaaaaaccttcatcccaaagttaaggcggatgatttttttgtaatcggagatggagatgtgacagagctggatcttcgggatgtaaatcttgaagctttgggtgccgaaaaatttgatgaaattaaatatatgatggggatcagcaatggctactaa

SEQ ID NO: 81433 - DNA, 1767 bp, Citrobacter koseri
atggctactaaaattggagctgtactgtcgtgttcgccagaggctgtaatcgttgcagtagattgtcttgagacatttgaaacaaataaagaaaaccttcaggttgggcgctttctgaaaattgcccaaggtaatcacgattttacaattgccaccatccgtaatatcaaaggtactaacaccactgatccagaaggcaagccagcctggagcttccagattgagtgtcaggctatcggaacgctgctggatgatagaaattttgaccgcagtagtctgctgctgccggtcccaactgagcatgcattcattgctgaaaatgacaccttagacaaaatcttttcagctgatagtgagcacgacttccctctcggcaagctttccatgaataaagataccgacctcatgatcagcggtaacagattcttcagtaaacacattgctatcgtaggttccacgggctctggtaagtcatgcacagttgcgagcgttttgcagaggattgttggaattgctgagtgtaaaaacggcaataaagatcggcagaataactcgcatgtggtgattttcgatattcatgatgaatattctgccgcattcagcttgcaagaagaggaatcgttcactctcacccggctggatattgataccttacaactgccctactggctaatgaactctgaagaacttgaaagcatgttcatcgaaagtaatgagaacaactctcataatcaggttagccagttcaagcatgccgttgtattgaacaaagaaaagcataatccgaccattacggaagttacgtatgacacgcctgtatatttctcgattaaggaggtctacaactacatagaaaacctgaatcgagaagtgattggtcggctggtgggggaagataaaccaaagctggctagtggagaactagtcactgatagaacgatttatttcgaaaaaattcaagactttatcgctacctcgtctgcgggggcaactaaggcaaccgtcggtcctttcagtggtgagttcaacaggtttgcttcgcggctggagtcgaaacttacagataaacggctgcggtttctgttgaatgccaagaaagttgacggaaatgcacatgttacagacgactttgagacgttgatgaaacaattcattggctatctggataaatcaaacgtcactgttatcgatttaagcggggtgccatttgaagttctcagcgttacagtcagtcttatctctcgcctgattttcgacttttgcttccattattcaaagctgcagcatgccatcggcaagcttaatgacatcccggtgatgttggtttgtgaagaggcacacaactatgtacctagggacggacacgcatcttatcgggcatcaaggaaatctattgaacgtatagcaaaagaaggcagaaaatatggcttgagcctgatggtagtaagccagcgtccctcagaggtctcagaaaccatttttgctcaatgcaacaacttcatctctctacgtctgacaaatgatgccgatcagtcctatgtgcgaagactatttcctgacaattccaatggtatcaccgagattttaccaaacctggctcccggtgagtgcgtggtagtgggtgatgcggtattactgccagcagttatcaaaatgccactgccggtgccagaacctcactcccaaagcgttaaagttcataatgagtggcaatcgctatggcgcgatgtggctttcgaaaaggtcatcgaacggtggaggaagtga

SEQ ID NO: 81434 - DNA, 522 bp, Citrobacter koseri
atgattgagttggaatcaatattaaatatagaaaatgaccttgattataaagttcagtttgctgtttataacgatgaagaagaaccgcttgatacattccttagagataaagatgaatggcaagggtggaatgaatggcggaatggtagggatgatttcaacaggcagtttattttcagtttgataagattctatccccaaaacaataggtggttgtttggggggatatatgaagtactggaacgtaatcctgataggtatagggttagattagtagataaacataaaggattaataggtaggttattaatagactatccaggtcctggagcacgtggtagatcctttcgttttgaaaatcactactttaagatgaaagtggcagaaatatttgagagtgaatatagtggtgaaacatttcgtggttttgatcaaattcagcactcatttgaaacgttagagcatatcattaaaaaacagaaaatggactggaagagagcattattgaatgtcaaagggtga

SEQ ID NO: 81435 - DNA, 432 bp, Citrobacter koseri
atgttacgcatgactatagttatgttcttattaattacgtcaatagctgtacgtgcttctactatgaattattcatgtgataaaggctattacgttactgttagtgctgatggtaaaaacggattcataaaagttttcaaagattcgaaaccggtagcattaactaagtctgataaatttcatattgatcttgaatcacatgcttatgatatggatggcagtactatttttaactactccgcatataggggttatgaccatacagtggaaagtatagctgtatctgacttttataccttaattactaagaatacgattctatctaaaccgtcagaaaattcgaagttgctcattagactatcggggcagcgttcatttctagttaattgtaagttaacacttgatttatctgatattgatttttcaaaataa

SEQ ID NO: 81436 - DNA, 294 bp, Citrobacter koseri
atgatagatgtaatacttaacctactatctaaaggattagatttctttattaagagaaaaactattcaagctgatgtagaaaaaacaaatgccgcagggcaaatagaaaccaacaaagaagagattgaaaaagtatcattccattggcgtaatgctcttggatttgtgattaccttaatcatcctctataactggatcatagtgccagtactagacgcgttcggaatcgtagtaattcaagtgcctttgggacaactactacaagtgcttttgattatggttggtggaggttaa

SEQ ID NO: 81437 - DNA, 312 bp, Citrobacter koseri
atgaattttgaacaacattatgaagaactaacaagtgaaattaaattaggtggtgttacacctgatggtaattcaatgccaattaataaaatttttcttggtaaaaagtttcaaaagatcattaaaaatagcactcacaatgtagatagctatatgaatgtgatctttgaaaaaaagcaaacctttaaagatggtgaagtacttgaatgggaactacatggtgaagtattacccgtattcctaattgactataagaagctattcgtacaaggtaaacactttcatgtatacgcagtggggattattgaatga

SEQ ID NO: 81438 - DNA, 327 bp, Citrobacter koseri
atgaactacgtttcatttgctttaattcactatgaagtaatgcgtagaataatccaggaaagtacttttctaggtaaacaccgtgtaccggaagaagatgtatttgcgatagtaaagaatgctgctgaattcagtgaagtgatggtatttgaacatctaaaactattcagacagaataaaaatcaaaactatccagatagtaaatcatcgcgtgaaaagtacaaacgcatagcaaccctagtatcacaggcgtttgaagtactagtaaaggaagggaaatcccttaatagaatgggaatagtaagagttcaattaaaaatttcatag

SEQ ID NO: 81439 - DNA, 924 bp, Citrobacter koseri
gtggcaaagcagaagttcaaaatcaccaactggcgcaactacaacaaggccctgattaatcgtggctccatcactttctggctggacgacgaggcgattcaggcctggtatgagtcagcaacgcctgcatccaggggacggcctcagcgctattcagaccttgccatcacaaccgtcctggtgattaaacgtgtattccggctgaccctgcgggccgctcagggctttattgattccatttttgccctgatggatgtcccgctgcgctgcccggattacaccagtgtcagcaagcgggcaaagtcggttaacgtcagttttaaaacgcccacccggggtgaaattgcgcatctggtgattgattccacaggactgaaagtcttcggtgaaggtgagtggaaagtcaaaaagcacggcaaagagcgccgtcgtatctggcgaaaactgcatctggctgttgatgcgagtacgcatgaagtcatctgcgcggacctgtcactgaacaacatcacggacgctgaagcattcccggggcttatccggcagacccaccgaaaaatcaggtcagcggcggcggacggcgcttacgatacgcggcgatgtcatgacgaactgcgtcgcaagaaaattagtgcgctcatccctccccgaaagggagcgggctactggccagtcgggtatgaggaccgaaaccgtgccgttgcgaatcaacgactgagcgggagcaatgcacggtggaaatggacaacagattacaaccgtcggtcgatagcggaaacggcgatgtacagggtaaagcagttatttgggggttcgctgacgttgcgtgattacgatggtcaggttgcagaggctttggccatggtgcgtgcgctgaacaaaatgacaaaggcaggtatgccagaaagcgtgcgtattatctga

SEQ ID NO: 81440 - DNA, 606 bp, Citrobacter koseri
atgaaccgcgattctctcctggccacaacggtgtgcctgtctctttttacgctgctggcgggttgcgcgccgatgcacgatacccgtcagtcgctgacgcgacaaacgcctgctgcacaggttgattcaccattaccgacggcaataaaaaacggttggccggacagccagtggtggaaggcgtaccacgatccccagcttgatgccttaattgacaacgcattacagcattctcctgatatgcaggtagctgaacagcgtatacaactcgccgaggcgcaggcgaaggcggttgaagcgcaggatgggccccggctggatttctctgcggatgttgaacgccagaaaatgtctgcggaagggctgatggggccgtttgccatcaccgatccggcggcgggaaccaccgggccgtggtacaccaacgggacgttcggcttaaccgccggttgggatctggatctctggggcaagaatcgggctgaagtcagcgcgagaatcggcgtagtgaaagcgcgtgaagcggaacaggcgcaaacccggcaactgctggcaagcggcgtcgcgcgtttatactgggaatggcaagacgcaggcggcgcttaa

SEQ ID NO: 81441 - DNA, 228 bp, Citrobacter koseri
atgccgctatccggcaattttgcccggggcgctacgcttgccgggcctacaaaccatcactggccggataaggcgtttatgccgctatccggcaattttgcccggggcgctgcgcttgccgggcctacaaaccatcgtaggccggataaggcgtttatgccgccatccggcaatttgcccggggcgctgcgcttgccgggcctacaaaccatcgcctaccaatcctga

SEQ ID NO: 81442 - DNA, 306 bp, Citrobacter koseri
gtgcagtgcaaaggctttctgtttgatctggatggaacgttggttgactccttacccgttgtagagcggacatggtgcaactgggccgatcgttttggcctcacgcatgatgaagtgctgagctttattcatggcaagcaggctatcacttctctgcgacacttcatggcgggaaagccggaagaggagatcgccgcagagtttacccgtctggaacagatagaagcgacggatacggcagggattgtggcgttgccgggcgcggtcgaattgctgaaccatctcaataaagccggtatcccctag

SEQ ID NO: 81443 - DNA, 882 bp, Citrobacter koseri
atggggataagcgctttccccactttcatgacgaatgcgacgcctgcaacgcaaccattgatcaatgctgagccagcgcaagcgccgacagcgcctgcgccagaaacgccggagcagccggtcggccaggtaatgccgggcgtgccgggcgccgatgcgcccgtggtggcgcaaaacgggccttcccgcgatgtgaagctgaccttcgcgcaaatcgcgccgccgccgggcagcatggtgctgcgtggcgtgaacccgaatggcagcattgagttcggtatgcgcagcgatgaggtggtgtcgaaagcgatgctgaacctggaatacaccccgtcgccgtcgttgctgccgatccagtcgcagctgaaggtctacctcaatgatgagctgatgggcgtgttgccggtcacgaaagagcaactgggcaaaaagacgttggcccagatgccgatcaacccgctctttatcaccgattttaaccgtgtgcggctggagttcgtcgggcactatcgcgatgtctgcgaaaacccggccagcagtacgctctggctggatgttggccgcagcagcgtgctggatctgacgtaccagaccctgccggtgaaaaacgatctgtcgcacttcccggtgccattctttgatccgcgggacaaccgccaggttacgctgcctgtggtctttgccggttcgccggatctgatgcagcagcaggcggcatccattgtctcttcatggttcggttcgcgcgcaggctggcgcggccagcatttcccggtgatgtacaacacgctgccggatcgtaatgccatcgtctttgccacgaacgacaagcgccctgatttcctgcgcgatcatccgccggtaaaagcgccggtgatttag

SEQ ID NO: 81444 - DNA, 2607 bp, Citrobacter koseri
atgaacatcctgacccggtggcttctcattccgccggtcggcgcacgcctgagcgagcgctatcaggggtatcgccgtcatggcgcgtcgccgttcagtgcgatgctgggctgcctgtgggtgattctggcgtggacttttattccgcttgagcatccgcgctggcagcgcattcgcgcgcagcataaagcgctctatccgcatattaacgccaaccgaccgcgtccgctggacccggcccgctatgccattcaaacgctctggttgatggccttctcgccgcgtaaagagaagaaggtcgaaccgcgctggcggtcgctctcccgcctgctgggcgtgcgcggtcgctatcatcagtggatggacacgctgcccgaccgcgtcagtaaaaagaccacgcacctggaaagcgaaaaagagctgggccatcttagcaacggggtgcgccgctttatcctcggcgtcatcgtcactttttccctgattctggcgatcatctgtattacccagccgtttaacccgctgtcgcagtttatcttcctgatactgctgtggggcgttgcgctgctggtgcggcggataccggggcgtttctccgccctgatgctgatcgtgctgtcgctgacggtgtcatgccgttatatctggtggcgctatacctcgacgttaaactgggatgacccgctgagcctggtttgcgggctgattttgctgtttgcggaaacctacgcatggattgtcctggtgctggggtatttccaggtcgtctggccgcttaaccgccagcccgtgccgctaccgaaagagatggcgcagtggccgacggtggacatttttattccgacttacaacgaagacctcagcgtggtgaaaaacaccgtttacgcctcgttgggcatcgactggccgaaagacaagctgagcatctggattcttgacgacggtgggcgcgaagagttccgccagtttgcccagaccgttggcgtacagtacatcgcccgtaccacgcatgaacacgccaaggccggcaacatcaataacgcgctgaaatacgcgaaaggcgagtttgtctcgatctttgactgcgaccatgtcccgacacgctcgttcctgcaaatgacgatgggctggttcctgaaagagaaaaagctcgccatgatgcagacgccgcaccactttttctcgccggacccgtttgagcgcaacctcggtcgtttccgtaaaacgccgaacgaaggcacgctgttttatgggctggtgcaggatggcaacgacatgtgggatgccacattcttctgcggatcgtgcgcggtgattcgccgtaaaccgctggatgagattggcggcattgccgttgagaccgtgaccgaagatgcgcatacctcgctgcgcttgcaccgtcgtggctacacctcggcctatatgcgcattccacaggcggcaggtctggcgacggaaagcctgtccgcgcacatcgggcagcgtattcgctgggcgcgcggcatggtgcaaatcttccgtctggataacccgctgtttggcaaaggcttaaagctggcgcagcgtctgtgttacgtcaacgccatgttccactttttatcgggtattccacggctcatcttcctgacggcgccgctggctttcctgctgctgcacgcctatatcatctatgcgcccgcgctgatgattgcgctgtttgtgttgccgcacatgattcacgccagcctcaccaactcgaagattcaggggaaataccgccactccttctggagtgaaatctacgaaacggtgctggcctggtatatcgcgccgccgacgatggtggcgctgatcaacccgcataaagggaaattcaacgttaccgcgaaaggcgggctggtagaggaagagtatgtcgactgggtgatttcccggccctatatcttcctggtgctgctcaacctgctgggggtcgtggtgggcgtctggcgttactactacggccccgccaacgaaatactcacggtgatcgtcagtctggtgtgggttttctataacctgatcattctgggcggcgcggtggcggtctctgtggaaagtaagcaggtacgccgggcgcaccgcgttgaaatctccatgccggcggccattgcccgtgaagatggccacctgttctcatgcaccgtgcatgacttctccgacggcggcctggggattcggatcaacgggcaggcgcaggtgctggaagggcaaaaggttaatttattgcttaaacgcggccagcaagagtacgtctttcctactcaggtcgtgcgcgtgctgggcaatgaggtcgggctgcaattgctgccgatgaccacgaaacaacatatcgactttgtgcagtgcacatttgcccgcgcggatacgtgggcgctctggcaggacagcttcccggaagacaaaccgctggaaagcctgctggatattctgaagctgggcttccgtggctaccgccatcttgcggaatttgctccgtcttccgtcaaagtaattttccgttctctgacgacgctggtttcctggattgtgtcgtttattccgcgtcgcccggagcggcagccggatcaggtgatggctcaacaatga

SEQ ID NO: 81445 - DNA, 1560 bp, Citrobacter koseri
gtggaccccgtattttctatcggcatctcatcattatgggatgaactacgccacatgcctgccggcggtgtctggtgggttgacgctgatcgcaatgaagatgccatcagcctggtgaatcaaacgattgcctcgcaggcagggaacgcgaaagtcgcggtcatttgtatgggcagcgatccgggtgaattaatcaaattagatgaatctcacggcccggaaaaaatccagttattttcaatgccggattctgaaaaggggttatactttttgccccgcgatttgctttgttctgttgatcctacacattactttttcattcttctttgcgcgaataacgcctggcaaaatatatcaggggaacgccttcatcagtggctggaaaaaatgaataaatggacccggttccatcactgttcgcttctggttattaaccctggaaataataatgacaaacagttctccctgttgatgggggagtatcgttcgcttttcggccttgccagcttacgttttcagggcgaccagcatctgttcgacatcgcgttctggtgcagcgaaaaaggggtcagcgcccggcaacaactgacgctgcgccataaagatgcgcactgggagctggctcacaaggaagaggcgaacatccagccgcgcagcgacgaaaaacgcatcctcagcaatatcgccgttcttgaaggcgctccgccgctgtcggaacactgggcgctttttgataataaccaaaccttgttcaacgaagcgcgaactgcacaggcggcgacgatcatcttctccctgacgcaaaatagccaaatcgaacccatggcgcgaaatatccatacgctgcgccgccagcgcggaagcgcgctgaaaattatcgtccgcgaaaatctcgccagtttgcgagcgaccgacgagcgactgctgttaggctgcggcgcgaatatggttattccgtggaatgcgccgctttcccgctgcctgacgctgattgaaagcgtgcagggacagcaattcagccgctacgtcccggaagagatcgccacactcctgtcgatgacgcagcccatgaagctgcgcggtttccagacatgggacgtcttctgcgaagccgtacataacatgatgagcaacacgctgctgcccgctgacgggaaaggcgtgatggtcgcattgcgcccggtgccgggtatccgcatcgagcaggcgctgacgctctgccgcccaaaccgtaccggcgatatcatgactatcggcggcaaccggctggtgctgtttttatcattctgtcgggtcaacgatctggacactgcgctgaaccatatcttccctctgccgaccggcgatatcttttccaaccgcatggtctggttcgaagataaccaaatcagcgctgaactcgtgcaaatgcgcctgctgtcgcctgaactgtggggcacaccgctgccgctgacccaggggccgaaccctgtgctcaatgccgagcatgacgggcgagtctggcgacgtattcccgaacccttacgactgctggatgacagcgtggagcgcccacaatga

SEQ ID NO: 81446 - DNA, 501 bp, Citrobacter koseri
atgcacattttttgccaatggcgaaatcgccgtaggccggataaggcgcctgcgccgccatccggcgttgccgaaagtgggctaccaatcccgcctgatggcgcttcgcttatcaggcctacaatgctgtgccgtaggccggataaggcgcctgcgccgccatccggcgttaccgaaagtgggcgaccgatcctgcctgatggcgctgcgcttatcaggcctacaatgctgagccgtaggccggataaggcgcctgcgccgccatccggcattgccgaaaatgagcgaccgatcctgcctgatggcgcttcgcttatcaggcctacaatgctgaattccagacagcaaaaagccagcccgtgggctggcttttctgaattggtcggtgatagaggattactcgccactgcgtggctcgcccttcgggccgttgctcgcgcaacgttctctcgctacgctcgagtcgaacctcttgcccccggaggttctcatcctcgttaa

SEQ ID NO: 81447 - DNA, 1269 bp, Citrobacter koseri
atgggaaaactgacagacatacaaatccgtacatggattagaaacaatgagcactttgcgggtcgctctgacgggaatgggctatacatctgttttccagagacttatagcgccccattctggcgatttcgctacaaaatggctggcaaagccagagttatgctgattggctattactccagcatttcgctcgcgaaagcgcgggaaatcgctaaagagctttctgcccgtgtagctctgggacatgatgtagcaggagagaagcaggaacgtaaagctgaagcgttgaagaagatggaagaggagaaacatgctctgcgtgtttcagaactggctacggaatactttgagcgtcagatcctcaaccggtggaagcaccctgacattctgcgacgtcgcatagataaagacatcaaccctaatatcgggcatctcagaatcgaagaggttaaagcctggcatatcgacgatatgctgcaaaaaatcgtccaacgtggagcgcctacagttgctaatgacgttcttcgctggactcgccgtatttttgatttcggtatcaagcgacatatgcttgaaagcaatcctactagtgcttttgaaatctcagatgctggcggacaggagcaaagcagagaacgctggctcagccgtgaagaattaatgaagctcttccaggctatgcccatgacaaaaggcttctcacgtcaaaacgagctgacaatgaagcttctgctggtgttttgctgccgcaagatggagctttgcggtgcccgatgggaggaattcgatcttgatgaagcggtttggcacttgcccgctgaacgagttaagaatggtgatgcgattgatatacctatcccggcagtagctcttgaatggctgaaagaactgcaccagatgtcctgcaatagccagtgggtgcttccagccagaaagatgcagcaccgcatgatcccccacattcaggaaagcacgctgcctgtagcattgagcaaggtgaagggtaacctccccgacgtgcctaattttactattcatgattttcgacgtaccgcgcgatcgcatctggcggcattaggtattgatccggtagttgcagagcgctgcctgaatcacagaatcaagggtgtagaggggatatataaccgttatcagtacttcgatgagaggaagcaagcgcttgagctttgggctgacttgctcgtttccttagaattagaaagaggcgagggctataacgtgatgccgttgagaaagagcatagcgtga

SEQ ID NO: 81448 - DNA, 792 bp, Citrobacter koseri
atgatagatgagagcgtgaaagcggtagccgaaaagctcgctgttccggtttatgaagatgcactgagcccttttgctaaagagctatcaaagggattagtctctattgccagaatggtaaattctggagttttcctaatggaagacagtgtatgtgcggtaacaaacgtcttgcggatgactgctgaaaatctggcattattgccccctaagcaaatttcattcgatcgaccaagggttgctctccaggctctgaatgaggccagatttgcaataaatgaagatgaaatacagcgccttttttcaaatctaatatcagcgagcctagacaagaaaacttcggaaagtgttcatccggcgtacatcgaaattatcaagcagctcctgccggatgaagctagaatacttcggtttatgtttaataaagaaaaccatagaaaaggtcatgcaccaacgattgatataattcaacaagattcggaggatagtaatataagaaccacatcaactacaccagaagtaaacctaatttgtgaagatgctggttgtgttacccccgaaaactcatttatgtatttcgtcaacttaaaacggttgggcctgctagctacaacatcaggaacatctttcccaaaggaagagcatgaaagaattttctcatcagataaagtaaaagaaatatgcagagtgaattcgcatctagatagagtttcttataaaagcgggcaatatagttttacaggttttggtcgaggctttgtcaattcgtgtgtcggcagacatagcatttaa

SEQ ID NO: 81449 - DNA, 141 bp, Citrobacter koseri
atgaacctttctagtcactctgctcatgcaggagaagaaactgctgatattgaagaaatagataaagagagactgaaagaattagtgaaatatctgactaatacttacgggttcaaaactcaggaaacattaaatgactga

SEQ ID NO: 81450 - DNA, 3114 bp, Citrobacter koseri
atgactgattataagaccattgctgaatccaataattttatcgtccttgagaaatacaccaatgttcaggataccagcgacagctaccagagcgaatcggaccttgagcgggagctgattcaggaccttattaatcaaggttatgagtttatctccgttaagtcaccgacggcgatgctggcgaatgtgcgggaccagcttcagcgtcttaatggtgtggtgtttaacgaaagtgaatggcggcgcttcacagagcagtatctggacagccccagtgacagtagccaagacaaaacccgtaaaatccatatcgactatatctgtgacttcacatttgatgatggtcgtctggaaaacatctatctgatagataaaaaaaacctgctgcgcaataaggtgcaggttattcagcagtttgagcagaccggctcacacgctaaccgttatgacgtcaccattctggtcaacggcctgccgctggtgcaaatcgaactcaaaaagcgcggcgtggctattcgtgaagcctttaaccagatacaccgttacagcaaggaaagctttaacggcgataactccctgtttaaatacctgcaactcttcgtgatttccaacgggactgatacccggtactttgccagtaccactaaacgggataaaaatagctttgatttcaccatgaactgggcaaagtcggataacactctgattaaggacctgaaggactttatcgccactttcttccagaagcatactctgctgaatgttctgtttaattacagcgtgtttgacagcagccagacgctgctcgtcatgcgcccctatcagattgccgccactgagcgaatcctctggaaaattaacagctcttttaaagcgaagaactggtcaaaccccgaaagtggcgggtttatctggcatactaccgggtcaggtaaaactctgaccagctttaaggccgcacgactggcaaccgagctggactttatagataaagtcttcttcgtggtagacaggaaagaccttgattaccagaccatgaaggagtatcagcgcttttctccggacagcgtcaacggttcggataatacagcaggcctcagaagaaacctggataaggacgataacaaaatcatcgtcacaaccattcagaaactcaataacctgatgaaaaccgaagctgacctgcccgtctatcagcagcaggtggtgtttatatttgatgaatgtcaccgcagccagtttggtgaggcccagaaaaacctcaaaaagaaattcagacgcttttatcagtttggttttaccggcacgcctattttcccggaaaacgcgctgggagcagaaaccaccgccagcgtattcgggcgtgaattacattcttatgtaattactgatgcgattcgtgatgaaaaagtactgaagtttaaggtggactataacgatgtccgcccacagtttaagtctcttgaaacggaaacagacgagaaaaaactcagcgcggctgaaaaccagcaggcctttctgcacccaatgcgtattctggaaataacgcaatacattctcaataacttccgtcagaaaacgcaccgaaccttcccgggagctaagggctttagcgccatgttagcagtgagcagcgtggatgcggcaaaagcttattacacgacctttaaattgctacaggaagaagcagcgaaaaaatcaggcagctataaacgtcttcgggtggcaaccatcttctcctttgccgctaacgaagagcaaagcgctattggtgatattaccgacgaaagctttgataccagcgcaatgaacagcagtgcgaaggaattcctggattcagctattgatgactataacaaccactttaaaaccaatttcagcaccgacagtaacggtttccagaactactaccgcgatttagctcaacgagtgaaaaatcaggatattgaccttctcatcgtagtgggaatgttcttaaccggctttgatgctccgacactcaatactctgttcgttgacaaaaacctgcgttatcacggtctgatgcaggcattctcacgcaccaaccgtatctatgatgccaccaagaccttcggcaatatcgtgaccttcagggacctggagcgtccgaccattgatgccatcacactttttggcgacaaaaacaccaagaatgtggtgctggaaaaaagctacgaagagtacatgcagggctttaccgatgcagcaaccggcgaagctaaacgaggttttatggctgttgtttcggagctggagcagcgcttccctgacccggccagtatcgacagtgaaaaagagaaaaaagccttcgtcaaactgtttggtgaatatctgcgggcagaaaacatcctgcaaaactacgatgaatttgccacgctgaaagccctgcagaagattgatattagtgatcctgaagcggtagaaacctttaaagcagagcactatgtggatgatgaaaaatttgctgaattacaaaccattcgtctcccggcagaacgtaaagttcaggattatcgctcagcatacaatgatatccgggactggcagcgacgcgaaaaagcagcaaacgacagggataaatcaaccacagactgggatgacgtggtgtttgaaattgacctgctgaagtcgcaggaaattaacctggattacatccttggtctgattttcgaccacaatcgtcagaaaaaaggtaaagaagccctgactgaagaggtcagacgcttgatccggtcaagtctgggcaaccgtgccaaagaaggtctgattgttgactttattcagcaaactaaccttgatgacatgccggacaaggccagtatcattgatgcattctttacctatgctcagcgtgaacagcagcgggaagcggaagcgttgattaaggaagaaaacctcaatgaagaggctgcaaggcgctacatccgcacatcactcaaacgggagtatgctaccgaaaatggcactgagctaaatgagacgctaccaaagctcagtccgctgaatcctcagtacaaaacgaaaaagcagaccgtattccaaaaaattggtgcctttatagataaattcaaaggtgtaggcggaaacatctag

SEQ ID NO: 81451 - DNA, 654 bp, Citrobacter koseri
atgacatgcctgccagactcaattacatgctacagcttactacgagtctggaaggcggcgacgaactggccgatagtatcagagaagttacaaaaagtgccgaaatggctttacgtggttattccaaatcaccgcagaaacaaaaaaatattaaaacacatccagctcccaaaagtactacgtgacgataaagctttccgggatgaatgtgcacatctggcaggtatcagcgatattattatcgtagcaaattgtctcattgctatgtcagcacggctaggggtttctcctgtcaaccttgcgaacagagccgcagccttaaaaaatgttatcaagccggagatactccccgaacttctggatttgcttcagcaggatgttgatataactgccttagtcccccctccaaaggtcaaagatgataatagtcgcagcgatggcggaaaacttgtaggactaacgggaatagttgaaggaggcgcatctattggcgttgaagctcagcggattatcacagcagaactgaagaaacacatccccctcactgctgttcaacgaattgctctcgatactgcgcgtacgagccttgcactggaatgtgacgcattcaacgttatcgaagaaatcaaacgcatctcagctaacttaaactag

SEQ ID NO: 81452 - DNA, 258 bp, Citrobacter koseri
atggaacaaattaaactgtgtgtttgtggtgcggatattgtttttgaacctaatcagactgcctacaataaactgattaatgaaatggcgatggataataaagttgcacctgcaaataattatctgatgcgtattgttaccccggaaacgaaagaagcactgattgacgtattaaaacgtccgggtgcagcgttgcaactggtcagtaaggttaatgatatttacgcgccggaactggagattgaagtaaaaaactga

SEQ ID NO: 81453 - DNA, 381 bp, Citrobacter koseri
atgaatcacgcgcagtggctggttgttgtggcgctggcgtttgtctggggctggctgacagctgactggcggcgcgacagcctggagctggcaatcaacacggcggcgcaggtggcaggtaatgaatcgcgcaaggtgatgcagggcattgccagtgattccgccagggcgctggaagataaactggaggcgctaagaaatgcgcaaccgcgagagatccgcacggaagtgcttaagccggtttttactaacaggtgcctgtctgatgagtttgtcagcatgtacaacagcgccgtcgctggtaccgaacgtgcgttatcaggaaaacctgaaaacacgatgcgccacgcagctgccgcgcctgaacggggcaacaggtaa

SEQ ID NO: 81454 - DNA, 303 bp, Citrobacter koseri
atgcaggaacatgaaaagagcctttattcactgctgattatgggggcgctcattgctgttgcgaaggtgctggccagtgatgatcccattacaccgcgcctgtttatcagccgtgtgatcctgggcagttttgtttcagttatcgctggcgcggcgctgattcaaatcccggaggccagcccgctggctattcaggggctgggggctgcgttgggtattgctggttatcaggctgttgaaatgtggctgcgcagacgtgcagcgggaaagaagaacgggagcgtgacaaatgaccctgagtga

SEQ ID NO: 81455 - DNA, 507 bp, Citrobacter koseri
atgagtcagacacagcttgagagcctgaccgcattttttcagcaaaacgtgccgccgcgcgccatgcagtcatttgacagtgtgctggatgaaatgaagttcatccctgccgcgaaggattacgggctggggcagtaccgccaggcggtgattcgctatgacgcggtaatcagctggcagcgtttcccgtatcgcctgtgtccgccgcagttgcttatgtcgctgctggccgcgtggctggatgaggctgacagggaattactggatgaagtcggcctgactgaagctgaaccggactgggatgtgtcagtggaggatgaggaaaccgccaccattgtgctgacggtaccaatggcggaagaactggtgatcagggaggacgaaaacggggcgatcccatggcaggggaaacgctggtcgctggttaaccctgaagtctggatagcgatcaccgccaatatttatggcgtggatgaaaccggtgcgccggtaggcggtaacgaatga

SEQ ID NO: 81456 - DNA, 702 bp, Citrobacter koseri
atggcactttctcccgcgcagcgtcacagccagcgcattgcgatggaacaaaagctgaaacgcagccaggcactggaaaccacggaaagcatgcacctgctgattaaggcgctggaagcggatgtggaacattgccgtaacctgccaacaatcgcggatcgcgttgagtttaaacgggatgtgttgctgccgcgctggacaccgactgtggaagcgtatctggaaagcgggcaggtgtacgccaacccggtatttgcctggtgtgatatctggctgtttgacgtgggcgatctggataaggcgctggactgggctgacattgcaatcagccagcagcaggcaaccccggatcggttgcgcagcaattttcccacgttcgtggccgatacgatgctggcctgggcgcaggaaacatccgggcgcggggaaagtgttgaaccgtatttttcccgcacatttgagcgtgtcgccagtacctggcggctgcatgaacaggttacggccaagtggttcaagtttgccgggctggagctgctgcgcggcgaagatggccagacaacggccgcgagtgtggacgacattgaaacgctggagaaagccgatcagctgttggccaccgcagaaaaatactatttaaaaatcggcgtcagaacggcacggcagacgattgccgcccgtatccgaaaactgacgcaggggtaa

SEQ ID NO: 81457 - DNA, 804 bp, Citrobacter koseri
atgtcgcatttaaaaactgactggctgtgtgttgctaccgaaggggataccgttgacggcagagagattaaacgccagtggattatcgatatgggggaaacctatgactataaccactatgtcgctttgatctggcctgaacacgagaatgattgcggtaattttggggaggtgctggaggccacctggcatgatggcgaggacggactggcacggctttacgtcagcctttgcccgaatatgcgtttaattttcgccaaccatgaagatcagctcctgttcttctcgattgaaccggatgagaactggcgcggtagtgggcgtacatacctcaaggggctggcggtaacagatactcctgccagtgttggcaccacacggctgcgctttagtagtcggcgcaaaaaattatctaagcagggatattacagttgcgtgatttcccgtgacggaaaaattaaacaggatatacgaatgaagaactggcaaaaattgtttggtattaaaccgaagtttgaagatgaaacgccgcctgatgatactgcgcagggtgatgataagttacaggcgctggccaacgcggtaaacgaactggaaggccgtgtggccaaaattgaaaatcagctgaatgatgttcagggtgatgtggataccattgcggaagtggtcgataccgaagaatttgcggctattcgtgataatgcaaaagatatcgttcaacgttttaacgatctgggtaataaatccacccgtacaccagggcgcaagatttcagaaaaagcgggtaaatttaatttcctgtaa

SEQ ID NO: 81458 - DNA, 207 bp, Citrobacter koseri; identical to SEQ ID NO: 29115

SEQ ID NO: 81459 - DNA, 429 bp, Citrobacter koseri
atgactattagccaggaacagcaaaatcgcgggctggagcatttaaaacagatccgccgcaaatacttcagcgaaagcagcgaggccgctgaatggtgggacaacttaacaccggagtggcgcggcgtggtgcttcatgctgctgcggttacttctggttccggggcatttaaagctcatttaagcaagtgctgctggcgtgagctttatgaacgcctgggttatcgggacatgattcaactgcgccagggcatttcacgggcgcggttaacgtttgaaggtttcggcagtttacgtgacagcgatttttcaaagcgcactgcgaaccgcccgatcaaaagggcacacccgatcagcagtcgtaacggggtgcagatgattattgctcctcatatcgttaacaagttacagcaacaggggaatcattaa

SEQ ID NO: 81460 - DNA, 204 bp, Citrobacter koseri
atgaatcttaaggggaatggtatgcgcaagcctaaaacaactagcgtcacgatagtgtatttcactataaagcgccgcccagaaaatagccgccaaggaaccgaacgtgggcgcgtgtggtatcacaaacacgattacttagaagtaccgtttcgtcgtgcgccgcgccttgtccgttgtctgtctttcaactttcagcagtag

SEQ ID NO: 81461 - DNA, 174 bp, Citrobacter koseri
atgaaagcatttgttacttatctgaaaagagaatccccagcgatgcaactggccagcggttcaaccggctggatagaactgccgaatggtcagcgctggaacccaggccatatgtacaaattcaacacccaacaaccgcgccgcccgtggtggcgtcgcctgatggggttatga

SEQ ID NO: 81462 - DNA, 687 bp, Citrobacter koseri
atgcaccatgcttttgagtgtatgggcgaaccactcgcacgcgatttcgatgcgcaaatgttttcccgctaccgtgaaaaacggttaaaaggtgagtatgcccgttcaaacagagtgaaagaggtatcgcctcgcacgcttaatcttgagcaggcctacttccgggctgtgttcaatgagctaaaccgcctcggagaatggaagggtgaaaacccactgaaaaatatgcgacctttccgcacagaagaaatggaaatagcctggctaactcacgaccaaatttcgcaattgctcggagagtgtaaacggcatgaccatcctgatttagaaaccgtggtcataatctgtctcgccactggcgcccggtggtctgaggccgagagtctgaaaaaaagccagctcgcgaaatacaaaatcacattcaccaacacgaaaggcagaaaaaacagcactgtcccaattagcaaagagctctatgagtctctcatcgaactaccggcaggacagcttacccacgttttacgccacaccttcgccagccactttatgatgaatggtggtaatattttggtcttgcagcgcgtactcggccataccgacataaaaatgacgatgcgatatgcgcactttgcccctgaccatttagaggatgcggttaaattaaatccattaagtatttcgatataa

SEQ ID NO: 81463 - DNA, 951 bp, Citrobacter koseri
atggctttagtaagatcggaacatgaattagatctagccaaagagcttttagacgacattgagttttcaaggctagaaatagaaccactgtttatgaaagcagcgcgactagctcgtttatgtggtagcgaagagtttaaaaaatggatcggttttgaaatgcgaggttataattccaacgaccccacatccttaaagtacatgacaaaaaccgcaagatggattgaccgtgaagaaaatcgcggctattgggttccattatctcaaattgaatcaaccacaaagtctcaaacaatgaagcttaatgcactgagcactccaaacataagtggagttgcagctgcaatacggattatggaggatcattataaaaatgttaactctgtggcaaacacaatttcaaaatatactggaattagaagtcgggcattaggaatccttcatgattttgttgcttcaatatattatgaaaaagagttagaccatttagcagaatctattttcgaaaactacaaaaatgatgttgatactttaatatcagatttatgttctgatgtactccaacaaatcccttcagtagtaaacagattatcagagggcgatacagagtctgtcagccaagcgcttacaaccatcagaagaattattgatagttttgctgatgcgatctttcctccaacagatgagacttatgagattggtggaaatcagttatcactggcagcaaatcggcatttaaatcgtttaaatgcatttgttcatgaacgagtggaaagcaaaggaagaaaagataagatccgacaaaatcttactaacctttacgggagagtgtctactggcgtgcatgcagaagtttccattgaagaggcacaatcccttttccttaattgttaccttgtgctaggtgaaatattgcacattggtatgttgaaaaagattacaaacgcctaa

SEQ ID NO: 81464 - DNA, 288 bp, Citrobacter koseri
atgccgagtttaaataaccccgactgtctggcgtacgaacaccatgaccaactgaatcatattgattataacgaatcgttagaatcggataactcgttgattattccgaaatcctccaatggagggcgtcgtgacaaccagaatagtattcgggttcagggcaaaagaacgttaaacgttcttttcttaacaatcagtatcttgcagatttgcaggatgatggaaaattccatcatgaggaaaatcaacaaagtacagatttgtactatgggaaccaactatctttga

SEQ ID NO: 81465 - DNA, 264 bp, Citrobacter koseri
atgcgactgattaatgactacgccccccctactccagaagatcttaaccagctcaaagaacagcttggctataccggcacacaaatggccgatctggctggcgtagcaagcaacagccagtggcgtaaatacacaggcggcgagtcacctcgcgcaatgtcaccgcacatacttttttttatggcggcacagcttgcgctaagcgacaaagaactggattctgtgatgaagaaaatgcaggaaattggtgcaactatttcataa

SEQ ID NO: 81466 - DNA, 993 bp, Citrobacter koseri
atgaattttgattgcaacaaggctgtaaaggaaatatttgaattttccggcaatgcagcaggacaagagccagagttaaacatcgcatggggtgtcgacaggaattttatgttcggtgcagcgttatccatgacatcaattctcattcacaaccagagcattaaaattcaccttcatctttttacggattatattgatgatgattaccgagaaaaactcagcaaattagcgaaacaattctcaacaaacataactgtctattttatggatgcgacagaattgaaagtattaccttgtggcaatgcatggtcatatgcaacatattttcgcttcatcgcatttgagtatttggctggaaaagtagactcaattctgtacattgatgcagacgttatctgtaaaggtccacttgctgagttaagtcacctcaatcttgatggatatgctgcggcagtggtgcgtgacgtcgatgacagtcccgccagaaaggttgaggaaaaacctgattattttaatgcaggtgttatctatgcaaatcttaaagagtggaaagaacagaattttatcaattctgcatttaatattcttttggataaagaacaaaagctacctttcttcgatcaggatgttttaaatattctattcctgaataaagtgatgtttttaccacgcacttacaatacaatttatggcataaagcaagagttaaaaaataaagacatatcaaaatataaagaatacataacgactgatactattcttattcattacgttggggtaactaaaccatggaattcatgggcaaattatccttctgcgcaatattttttggaggcatggaaggcttcaccgtgggcaaatgtgccgctgttaccccccagaacaccaaaacaatataagaaaaaatcacgccatgaaaggctgcaaggcaagtatattgcttcaattatcagccacattggctattttatacaaaaaatcaagggcaactga

SEQ ID NO: 81467 - DNA, 1071 bp, Citrobacter koseri
atgaatgataagcacagtcctgatgagcataaacgaaaagtagatgtctgggagcaaatgctgagtaattacttttacaataaagtattacggccggatacggagaaaacataccgtaagatggtgcgtctttttctgcgttattgtggcgcttgtgaaaatgcgttaccgctgccggatgaagtgacacatgagcatgtgctgagatggcgaagaaatgaactgaacattcagaaagtccgggaacggacatggaacacaaaaaccaggcatatgcagtctctgtataattattggatcaaaaaagggattgtttcacttaaagaaaacccgttctcagaaacacaaattgaaccgggtgaaaaacagaaaaaagtctatacacaatcacaactgagaacgatttaccgtattctggaacaatttcagcaacaggaaaatatgttgccacctgatcagactcactttcaggtttgtgctgtttatcccactcgattctggtttgctgtgctggaaacgctgagactgacggctattcgttttaaccagctgattaacctgcgtattggcgatctggattttgaggagtgtacgatcacattgcgcagtgaaagcagtaaaaatcaccgggaatatcagattgcttttgttcagccactgcgtggtttactggctccgttggctgaggaaatgcgttgtcacggggcggataaaaacgatattttgtttgatgtacatcgtctttatcataaacaatcctcccggcctgaaacgcctgtcggtcagacgatacgttctttttttcgtcgtttatcaaaggaatgtggatttcatgtcagtcctcatcgtttcagacatacactggcgaccacattaatgaaacatcctgaacgtaatatgcagttgacgaaacagatgttaggacaccgtagcctgtcttcgacaatggagtatattgctctggacgcatacagtacagtcaggatcctggaagacgaattaggggagtttttaacaatgggattaggtggtgagcattcaagactagtatcaaaaagacagggattgtga

SEQ ID NO: 81468 - DNA, 1593 bp, Citrobacter koseri
atgttaccgtggtttcgtaaatcgctttcccggaaagcggaagagaaaacattacgtgtttccccgggaaacacgcaggaaaaagtattatttatccgtgacagtgacggcttttatttaccgcagtcggttgacatattgctggccacaccacagcgacaaaactggttacagcaaatcagccgggtggtggcgttaccggataaccagtaccgggcactttgcctgtctcctttgcagacgctggcagaacgacttcagtgtgtgccggcatcaaaaaccgggaaatatgccggcgaagggggcctgctggatttaacgctgaatacgacggcctggtgtatgcggatgtcccagaaagagatgctgccccgggggcttccgtcggaagagcagagccggcagttcagtgcctggaatgtgtgcgtgttttataccgggctgttttactggttgccgttaaccgcacagtttgaggggcaactgaacagtctgtcaccgtggcagccggggatcagtccgccatcagagccgtatcgttttcgctttcatgagccggtgccggatatcacgcattttcgccggacaacaggggccatgatggctttccggctattaccggagaaggttattcactggttgtcgggtacaccaaaggcgcttcaggcgttgtctgacgtggtgaccgggcaggtaaacggtgataatgatttacagcgtgtgctgaatgaggctctggctgcgttccccgccggtgcattgccggcactttcttccgttgtttctgtgtcagcgcctgatgcttcgtcttcagtgctatcaggacagccggagaatgatatcgcgtcatcagcacccgctgaattggcgcaaaagccacaacctgcccccctccctgtaacatcggtattgcctccggagtctgttacttcagaaaaaacagagaacggaattcactgcgatataccgctaatggtagtagcagaagcggaaggtgcggttgctccggagacacctgattctgccgatgaaaaaacggtctcagatacgtctcttccgttatctgaggatatgaaatatgcacttgaattatcaggtttaatgccggacgtcttatctgatactcagacgggcaatagtgatgagaaggatgaacagttcaaaaactgcctgagtacaaaaaatgaaggcgaagctttctgggcgtggtttgagtccggattattgagcggaaaaatagcaataaatacgccggatgcgaaggttcactgtgttatagagtatttgttttgccagagtccggctgttttttatcagtacatacaggagacgggtaaaaatccggatgatatcggccatattatttcttcttttgaatcccttaaattgcacagaattatccgtcgtgatacccggcaaacgggacatttcagggctcggatttatggtgaaaaactgaatccgctgagtgataacaaaacattaattacgttatcccataaaaaaatcaatggttacatgattaaaggaagtcagatttttggcatgaatatgccggaggaatcattgtttattcgaattgtcagcagttag

SEQ ID NO: 81469 - DNA, 336 bp, Citrobacter koseri
atgaaatgtgaatcaggggcaggggtatgggagtgggtaacgtttttgaagaatgaaatcctgtatccgttttttacgacagccaccattttgttgccgttgattctgattgtgggggcttttctgatatgggctgaacaggatagccggcatcaggctgagcaggggcgttattatctgacagaatgtcagttggtggaaagaaacagagatacgggcttctggtcagagcgggaaaatattctgcaatgcggggtgacccgggagcatgtgaatgcggatgcgtatgaaaaggcaatccgtgcctggcagcagaaacagacagagacaaaataa

SEQ ID NO: 81470 - DNA, 1002 bp, Citrobacter koseri
atgccaaactggtgctcaaaccgacttgacatcaccttacacaacgcggcggatatgccggcgcttaaacactggatatatgcggatgacgggatacccgcctggcagacagcgatagcacaaagtctgcatttgttgctggccggctgtgcggggatactgaaaccggtaaaaccgctgtcttttccgccgttaccggaactgacctcatacggggaaaccggccctgtttccccgggaaacaccgccttcacgcactgggttgagatgctgataaccgcaccggatttgatgccgtcatgttgtcagcaaatccatcagtggtatcagatgtggttatctgaaggtggggtgtaccattcctgggactcgctgacggcgatgcagaaagcgagactgtcaccgttgttatcggccggcagttttgactggctaaaccggtttaccggggaggatgagagccgggtggcgacagcctgggaggatattcagtatcttcgcggtacaggggaagccgtaccaatggatatgcggacattgttaccgaccagccttgcggctgaattacacggcttcaacggtcgtttatggaaaacaccggaagttatctggagacaggcgtgctggcaggcgtttgcccccggtaacagtacatatcacctttatcagtgtcgttatggtgtgaaatggccgaacggcagtggttttcactgtattgatggcgggcatgcgacggagttatccgcagagtttgatactccgtgggggccgccgtcagcagaggtcttgtgtgctttgtctgcgcgtttccgctgtcaggtccgtcatgtctatgccgaagaaggctgtggtttctgcggatacagcgagtatgaccatggccggttagccgaccatgaatctgatgatattgagttcagtgatgaagagaatgaggacggtttccgggatgtgacgggaccggactatattcttgattcattaccacattacggagggtga

SEQ ID NO: 81471 - DNA, 294 bp, Citrobacter koseri
atggacaaaatcaccattatccgttttcagttactggtacatcagttactgaaagtgcattacgggattacgctgagtgataccggattgtctgatgatgcggaggtatcccggatgattgaactcggaatatcgccggtatcggcggtcaaccgtctggtggataaataccatctggagaaactgaatgcatcctgttatctgccggcatccccgtatgtcagtgataccgatgccttacatgcacaggctcagctgagcggtgccattaacccggatgtcatgcccggataa

SEQ ID NO: 81472 - DNA, 975 bp, Citrobacter koseri
atgaaaaaatctgaccgtaaacgccgcccggctgcggataagcctgttcgcgatatttatcaggaagtgactgaccgtattgtgaccgcgctggaaaaaggcacctgcccgtggaaacggccatggcggccggcagaagggacgggcaccggttttccggtgaacgccctgaccggtcatccctatcaggggatgaatgtgctgttgttatggttgtcggcggcagagcagggctttggttgtgatacttggttgacttaccgtcaggcacagcaactgggtggttatgtccgtaaaggcgaaatggcgaccgataccgtgatattcaaaccgctgaacgtgccggcaaaagaccgtcacggtgagccgctgcgggatgaacacggtgaggtggtgatgacggagataccaatgataaaggcgaatccgttatttaacatcgcccagtgtgatgacctgccggcacatttttacgaaaaacggcgacaacccggagaggtgacgacaggaataaccctgccggccacgcaccgggcactggatatcctgaatgccagcggcgtgaaggtgaccagtgcggcgcagaaccgtgcatattacagtccgtcacaggaccggattgtgatgccactgtcgtcacagtttgaccgggatgctgattactgggccaccttactgcatgaactggtgcacagtactggtcatcagtcccggctggcccgtgaaggcatcacctcatcgtccctgaaatttggtgacccgctgtacagttttgaggagctggttgcagaaatgggcagcgcttttctctgtgcgcagttaagcgttgagggagaggtgaatcatgaaagttatcttgacagctggctgcgggtactgaaagcggacaaaaaagcgttgttccgggcagccgggcaggcccgtcaggcctgtgagtttttactgaatacggccacctcccgacaggccgcgtag

SEQ ID NO: 81473 - DNA, 411 bp, Citrobacter koseri
atgggactcgatatttacttttatgccagtgaaaagcgcggtgcagacaaaagccggatacccggctcacgttatgcagaagcggacagcgacggcgatattgaagtcgggtatttccgtaaggtcaatgcattgtttaagtgggtgcatgaccatatcggggcttttgaaaactgtgaaaaagtgccggtgacagaggctcatctgcgggctttacagcaggacttgctggcactgacgccggaaaactgtcagacacgttttccgaccacagagggttttttctttggttcaacggcctatgacgaggtgtactgggctgatgtggaagacgtcagacgctggctgtcagggataacggagacgtttgactttgaggcagagtcactgtgttttgtggcctggtggtaa

SEQ ID NO: 81474 - DNA, 261 bp, Citrobacter koseri
atggccagagcctgtacgatacgggaactgatagcggatttatcccgctgtaatccggaggcattcgtgttgtgtgagatgtggttccccgatgatgttaccaatgttgatgaaacggcttgtccggcagaaacgcgggcaacattaacgaatgttgcacatcattttgatgcggagctggggataaactgggacactctggcgtgtgcgctatcgtgtgtcagagacgctgagcagaatgtgcccggcatgaacggatag

SEQ ID NO: 81475 - DNA, 513 bp, Citrobacter koseri
atgggatatacacattattttacacaaaaacaaagcgttgaccccctgatgtggcagaacttccgtgaacatctggacaagctctatcaccactatctggccaatcctatatccgcagagcagatatgcggcggatacctggataaaatcatagtgttgtgtgatggtctgggtgaaaaccggctgaacgatggctcattattcaccgatgacggtgaggcactttgttttaacggcaatgcagctgatgacatgaatcatgagacgtttattgtacagcgcgaaatccccgttgaggattactgggatttctgcaagacggcatataaaccctatgacgtgtttgtggtggcggcattactgctgttgcacaacctgtgtccgggatatttttcggtctcttctgacggggatactctggactggcaaccggtgctggactatgtcagtaaggcattcccttatcttatcctgacgttaccggaaggcattgatgtgccggaggctggataa

SEQ ID NO: 81476 - DNA, 357 bp, Citrobacter koseri
atgtctgttttactgcctgaaaacaaaccgttttcatttctgagtctgatcatgcaacggctgtaccgtttttatgaccgtataccgtttgtctcgtcagggatacccgatgaattaccgtggataagtaaccggaccggccggtacgcttaccgtgcgacggtggtgaaagtgaatccccggcagttcaggatccgcattaccgtacgtctgggatcgtattcgaaagaataccgctttcattcgttgatcacttcgctggacagcaggacatttcgttccgccaatgcggcataccgtgccggtatggcgatggcactccagctggcacaggtgcgttatgcctggtgtcgctga

SEQ ID NO: 81477 - DNA, 438 bp, Citrobacter koseri
atgacgttatttaacctgatttatggcattgcccgtgggctgttctttgtggccgatcacgtctgtcgctattcccggggttgggaatggctgatgtggctggttgaggaagcccggacactgcgaaatgttgaggctgatttgaaactggctgaaaggtatgccggggagcaaaaccgtcctcattccgtttcgctgatgcagtgtacgctttatgatgccggatttgcttacggcagattattactatggcaggcggatggtctgatgagaccctggccggcatatttgcttcgccgtttaccggatatcggtcagcggattgatgcagcggtctggcagaaaggctgtgaagccggccaggatgagactgtcactgaatggatggcaatggagatggctgatgaatacctcatcggtattgaactgagcaattaa

SEQ ID NO: 81478 - DNA, 363 bp, Citrobacter koseri
atgagggtatctacatttccccaatcgtctttttttgacgatctgcactatctcacgcaattgcatcacctgtcaggtgatctcgatatggttcttgcttttgtccgtctggatattggcgagtgtatggacgaagataattttccgccaaacttctggataatcagtgccgttgcagagcaactgggtgtgttatctgtggaggctgattttacccgtccacatcttgagaaaagggtccgcgcagtctgggaagcggcagagcaaacgccttatgcgtctgactttcgccgtatctacaacgacgcggccaaaaatgcacagtttgaagatccggttgaagcgctgatgtttggtgcttaa

SEQ ID NO: 81479 - DNA, 678 bp, Citrobacter koseri
atggtcgtggcgattatattaaacgggtttatagtcagaaaggggatattgaggaataagataaaaatgaaagcctatttaattattttatttattaatttttctttttgttttccgttaatggcgaagacattatttttaggtgattcgttaacggctgtttatgaaaagcctgcaaaatatgttttggatgaaaaaataaaaacggaatatgtttcaggttctggattaataaataaaaacaaaaaagactggatcgcttttgtgaataattctgatttgcgtgagtttgataatgtgattattagtcttggcacaaatgattttgttcaatatgatccggaagaatggcggaaatattacagtctggtatttcaattaattgctgaaattcaaaataaaaatccgttagcgacaattatttggatatctccgccacatttaaaaaatctggtgcatgaacgttatttaatatatacccggcatattattaaacacagtgcgatgttattaaatgttcattatctggatgttaatcagcctcatatattaggaacacaatggcaatctgttattcataatgaaactgtccggactgatgatggaattcatattacccgtaaagggggagagcgggtaatcagggaagtggtaaaaatcctgaatgggcaggattga

SEQ ID NO: 81480 - DNA, 909 bp, Citrobacter koseri
atgtccagaagagcaaaagccctgtcccgtgaaatgcatatccttgcccgtcaggccggagggagttttaaaaccattgcagaccgggtcaaaatcgcagaacgggttgcagcggagctggccgggctgaatattcagatacgatctgttgagcagctgaaatcccgtcatgttgaaatgtacattcatacccgcagagaacagaatatcagtttacgcacctgtcaaaacgaaatgtcggctatccgggcgatatttcgtgttgccggacgtcataaactggctgaccctaaacatgagcgcctcagtaatgaggcgctggggctttctggtgccagcagggctggcacccgtaccgcgatatcggacgagcgctttcacggagcgctcgcccggattgagccttatgatcagggagtggcattaaccatgcagctatcccgtagtctggggttgagaaatgaagaagccgtgcagtcagtaaaatcattacggacctggcagcaggcgcttaaaaacggtaaagatcgtgttcatgtggtttttggtacaaaaggaggcagaccccgtgaagcattagtgccggataaagcccgtgtattaacattaattaataaagccattgaatatgcggataaacataacggttatttaattaatcgtccgtcattacattctgccaaagatcgttatattaatgtgatgcgacggataggcggatttattcacgaagaatcaaatcatggtttacggtatgcctatgctcaggatgttgaaaaatattatctcagtaagggggtcagcccaaaagaagtctatgcattaacatctatggatttagggcatggtgatggtcgtggcgattatattaaacgggtttatagtcagaaaggggatattgaggaataa

SEQ ID NO: 81481 - DNA, 1020 bp, Citrobacter koseri
atgaacaggaatgtacctatagatcttgattttgaacatttatcagaacaacttaaaaaagttgctcgggaatttgtcgatcttaaatatcagttagattgtaaaggtcgatataatcccgactatattccggatgatttatatggtatggctcattccggagattattcttctgtttctggctggacattttttatcaatataatgccatttgttcctgcggaaacaaacgaaagacagataaaatatattcctattgaatatactttaggatgtagctggcgatggtggcctgagcatgcagagaatgataaagataaaatcattaactttattaaaaatttagatcaggctcagagtacctcttatacctttatttctaatcttggcatcatattatcctctgaaggaaaaaaccgaattaatttttgtcgatatcatggcataccaaaaataccaggtaatgtggatgaggttaaatacccggaagcagaaaggataagtatctataaagtagatacatgtgataattatttgggatgcagaggtataaaatcatcttatctggcagtattagatgacagatatattcaggcaatagaacatattgattatgcattacctttattgcggggctatgggataaatatagaatataagtggccagagcgttttcctgagttaatggatatcgatagattcgctgtcaggtcgctttctgaatatgcaggatgcaggaaatctattgatatggagagagttaatgagtatgtaaaaaaagaaaaagaaggggaagggactcagaatttaagtattttggatatgaagataaaaaacaaattatttttattttcagtatcaatattattattgattgtgaattttatattgtttgtcgagtttagagatggttatcttgctcagttgttttgtggattcttaggtatgagtatctctatttttattatgatggtgatgcctgtttttattgttaaaaagaaatataaagataatagataa

SEQ ID NO: 81482 - DNA, 165 bp, Citrobacter koseri
atgtctgatattgtcagagacctttcgcgtctgggctggacagatgaacgcattggcactgagctgggcatggatcaggatgaagtgctgcggctgaaacagattagcggactgacggagctgtttcaggaagagagttttagtccggcatggacggtaaaataa

SEQ ID NO: 81483 - DNA, 492 bp, Citrobacter koseri
atgcgcattcggtgttcagcccgattacttatcatcaactctttcaggcaagtactgttgtttcgttttgttcatacaaatgatgcactggcaggtaagtcatactgggccacgcctggtggtggtgttgagcacggtgaatcttttgaacaggctgctatcagagaactaaaagaagaaacaggtattatcagggatgatgttggggaatgtgtggcgcaaagaacttttgaaatgacgcttccaagtggggaaactgttctggcagaagagcagttttttgtcatattttccaataaagaagaaatccacattcacgggtggactgataatgaaaaatcccttatcagtcgccaccattggtggagtattgatgagctttccaggactcaggatataatatatcctggtaatattactgaattaatccctatgtcttccgttcagagagcgctgggatttcatatgagttggtttcctgcgccgccgtga

SEQ ID NO: 81484 - DNA, 285 bp, Citrobacter koseri
atgagtcagtctcttaaaaaatacattgatgattttcttgctaagaatatatcggctgaatattttaccgacacttatatggcgaagtggaagggggagcgtgatagtaacctacttaagcaagataatgataatctaagtgaattattatccagtgtcttctgtgtggctgatatgtacaacccagataatgatcgtgaagaatacgaatttaacgatgagcaactatggaatgaggtgaataacttgatgattgattataaaaaaggagagcccgacagttaa

SEQ ID NO: 81485 - DNA, 684 bp, Citrobacter koseri
atgagtgcaggtgcctgttcagctaaaatggcagaagaccgagacaaattcttcagaaaagccgcctctttaggtattgattttgtaccggtggtcggtgatttcaaaagttttgttgaagcggatgactggattgattacacattagctgctgtgggcacattgccttttgctaaggtattcacgaagccactgaaagaagctaaattactgttaaaagctggcgatcttgagggggcgaataagctcataaaagatgcgagtgatgccataccaacaaaattgccttcaagtcctatatcgcaatcatcaagtggagtatggaaaccagatcatggtgtagaggtaaatgttggagctacaatcgtctctgatagtgtcgctttcagcgcaaaacagttagataagaaatttaaacatgcttctgattttggcgtaataacaactaagaaaaatagtgataccattgcagaatatcaggctgccatcaaatcacatttagataataagacgacttatgaacatgggacatacctattagttccagaatcaaaggtgttcttcaatccacaaactaataatgtggttgtaattgataaatctggtaattttgttagtggggggaagcttgatcctcaaacgaagcaatatgaaaacttcataaataacgggacattaagatga

SEQ ID NO: 81486 - DNA, 294 bp, Citrobacter koseri
atgaaaagaaataatctacttaattttaagatagttatatggattttattctttcctttaataggagctttgctatcaatttgtggtgtttttattgggtatgttgttgcttattttaaattgggtgtttttcctattgaaacaatatttcctaaaatagttgatgccataaagcctggcgtggctgttgggttgttattaggctttagcttatggatatggggaatagttattcctgaactcaccggtaaatttaaaccagataagaaagatgataatgagactaaaaaatag

SEQ ID NO: 81487 - DNA, 9951 bp, Citrobacter koseri
atgtctgtgtggtggctccagattcagggatttcgtatgaacagccttttttaccggattgtctttaataaagcccgtggcatgctgatggttgtggctgacattgcccggcgcggacggggcggaaatacacgtcgcggacgttgtgctccggcagggattattgcctccctgtccccggtttgttttgccatctggctggctgccggtttgtgctcgtttcctgcttactccgctattgtcgctgaccgtaatgcgccgggaaaccagcaggcgacggtgatttccacggcaaacgggttgccgcaggtgaatattcagacgcccggtccggaaggggtttcacgtaaccagtatacacagtttgatgtggacagccggggagccattttaaataacagtcacagtaatacacagacccgtctggccggcaatattaccggtaatccctggctggcaaagggtgaggccaggatcattcttaatgaagtcaacagccgtgatcccagccggctgaatggttttattgaggttgccggacgtcgtgcggaagtggtgatcgctaatccgtccggtattacctgcaatggctgtggttttatcaatgctgaaagaacgaccctggccgccgggaaagcgctgatggacggcggcagactgaaaggtttcgatgttgacaaaggacggctcagtattgaagggcgcggactgctggcggaggacagtgactacactgcgctgattgcccgggcggtgaatgtgaacgcccggatgcaggtcggcggtgaactgcggatcaccaccggtcataacgaaaccgatctccggggtaatatcacccggattaagcccggtgaggatgccgggcagccggcgtttgcgctggatgtgtcggcgctgggcggaatgtatgccggtaaaattattatggaaggcaccgaaaaaggcgtgggcgtacgcaatgccggagagctgggggcgatggccggcacattgtcactccgtgctgacggtcaactggtgaacagcggtgtactggccggacagggggatctgagcgtcgccgcgaaaggtgacctgggtaataccggcagcctgacggccggcggagacgttgaactgacggcgccgggaacactgagtaatgaggggattatccggggcggacaggatgtcaggctgaccgcggcgggtatttacagttcggaaaaaagtacgcttctggccggtgcgccggcagccacaactgacagaacaaaaggcgatttagttctgacatcgggcggggaactgaaagcccgggggcagaataaagccgccggtaagatcgttgcctccggaaccggcgtggatgtcagcggcagccggacagaggcaaaagccgtcacactgacagcgacggaacgtgagatcagcactgccggtgcggtattacgcgggcaggatactgtcagtctgcgggcagcaaccggcatcgataataccgccggccgggtttccggagggagactgactatacattccccggaaatcacgaataccggcggccttctgaaccaggaaggtacacaggatctgctgctcagccagcataccctccgtaacaacgggggaagtatcaccagtgccggacgaattcatctgaaagcggatgtgctggacaaccgctctggtacgcttgcggctgccggacgggatttgagcatcgaaaccggcgatctggataaccgtcagggcaaggtgcagctttccggtgcaggtgtgttatcccttcagacaaatgtacttcagggacagcagggcgcgttgctgtcatccggtgatttccggctgaaagccgggcaggcggatttatccggtggctatacgcaggccggaaaaatcaccgcagaagccgggatactgacgaatgacgatgccgtgttgtctgcccgcggacaggaagggatgcaactgacggtctccggaacgctgagtaaccggaacggccgggcggaaagtgccggggacatcacgctgagcagtgcgaaactggacaattctgccgggacactgcttgccgctgataaagggagtttatccctgaccacaccgggtgaggtgctgaatgataaagggcgtctgattgccgggcggcatatcctgctggatacggcagcgctgaccagccggggagggctgatttcagccaccggcggcaacatgacactgaacagccgtcaggcggttattaatgaacaggggcggatggaggcccttaacaggctgacactgaatgcagccggattacataatcataacggtaccatcaccggacaggatgtcaccgtcggtaccggtgcggcaaaacttcacaacgccgggggaaatattgcggcccgggatacgctggcgctcaatacaggagaaacggataacaccgggggactgattcaggccgggaaaagcctggttattgacacaaataaccggcagctgagtaaccgtgaaggcgggcagatactggccggtgcactgacgttatcggcagggaatacggataatcaggcgggggttattgcctcatccggtgatgcacagttgcagaccgctgatctgaacagtgacagcggaaaaatactcagtcagggcgatttgacactgaatactgcggtgctccgcaatcagcacgggctgttgcaggcagacggggctttaacgctggatacccatggaaacgggttaatcagtacagacagcggtgaacagggcggtattattgccggcggggatctttcactcagaaccggccgcctggaggcggcacagggtgtgatacagggccgcaatatcacgctggacacgcagggacaggcgctggatcaccgtggcgggtatctggcggcccgggagagtgtcagactggataccggcgaaacggataacagcggtggtcttttacgggccggcacatcgctgatactggacactcatgaccgtaaactggttaatcagcagagcggagagcagggcgggattgttgctggtgatcgtctgacgcttgaagtgaatggtctggataaccatgacggcgtcattgtcagcggcggtgacggcgtgatgaccaccggtctgctggataatacgcagggacagcttgtcagcgcatccggttcgctgtctctgacgacaggagaagtcaataaccggcaggggctgatccaggccgggaaacagctgttactggatacccggggacagacactggttaatcgtgacagtggggagcacggggggatccgggcgcagggcgatctgtcccttctcagtggcagactggataatcaccaggggattgtgagtgccggcggacaggccgggctgaaaaccgtaatgtcagataacactgccgggctgatcactgccctgcgggggctggcaatcaccggcgggcaactggacaataccgccggcagtattctctccggcgccggactgacgattgacacacagggaaaccgcctgattaaccgtgatacggtttcccgtggcggtatctctgctgccggtgaggcgattattacgaccggggagacggataaccggagcggacgtatcgtgtctgacgggaatgccgtgttgcataccggcaacctgaaaaacagcctcggcctgatagcggggaatggcgggctgtcagtgaacagcggtgagaccgataacaccgggggacgccttcagtctgccggcgatcttctgattaacaccggtacggctgccttcgtcaataccggcggaaggatagccggtgaccatcatactgctgtcacgacctctcagcttactaaccgggagggaacggttcaggccggagaaagactgactctgtcagtgggtcaggcactggataacggaaaaggggcattgttatccggcggccggctggcattgtcggctgaccgtctggataaccggcaggggcaggtgattgctgacggtgacagtcagctgaatgtacagacggtactgaataatgaaagcgggcttgtgcactcagccggttcgcttgatattgtggcttctgacatcaataaccggcataccggacagagcggtaaggggctggagtcagggaaactcacgcttgccgccgatattctggataacgcggaaggggcagtgcgcggtgtcagccatctgaccgtccgggtcacccgggtactggataatctgcggggactgctttcctcacagaaaacgctctctgttcagggacaggcgctgacggtgaacaaccgtgaagggatgctgatagccgatgacagtgcggatatttctgcgctggcagtgagtggtgacggacagattttgtcccgggatcgcctgacggttcatgtggccgacgatttccttaataccggctcggttaaagcgaacggtgatctgacgctcctgaccgaccgccggctgattaatgacggggtgattgccggacagcaggggctggagatccgtgcggataatctggtcaatactgttcagggggatatcacggcgaaagaaacgcatctgaacgtggccggcacactggagaatcgcgggctgattgacggtgaactgacacacctgacgaccggtgtgctgaacaacaccggcagcgggcggatttttggtgatcatctcgctgtcgaagccggcgttctgaataatgaccgggagggtgacaaagccccggtaatcgcatcccgtgatcgtctggatattgcggccggaacggttaataaccgtgggcatgcacttatcaccagcctcggtaatatggtttttggccgtcatctggataacgattatcgtgcaaccggccggggcgatgtcctgaataatgacggtgcatttattgaggccggcagcgatgcatttatcggcatgcagacggtgaataataccaaccggaaactggaaacacatacggtcctggtggagaaaagtcagcatcatgaaggtgttcttaacggcagtaccacccgttatgactgggcagatgttgatctcagtaagaagaataaatatggcgtccatacagcaagaatgccggatggcagcgaaaatgatcgtttttatgaatataactatacccggaccgtcacggagacacagatagcgtccactgacccggggaaaatactggcgggagggaatatccggtttgataccgcccgtctgtttaatcatgacagccagattgttgccggcggtagcctggacgggcatatcggcaccctggataaccgggcgacgcagggtgagcgggtgaccacggatgaaggatggcagagacggtggtggccgaagaaaaagaaaagaccggttggcggaaccaaaacatcacagggaaaagaaacgggtgattaccgtccggccccggtaacggaaaccattgatctgaaaagcctgacctggcagggacacgctgtggtaccggacaaaacctggcgcgggagtgaacggcaggtgtctgcggtgaatgaaagtgcagagggcgcaggaagtcattccgtggccggagcggacagccgggtgaatatcagtaccggtcaggccggtatggtctcaacggatattcccggcgtggtgcatgatcgtccgttactgttacctcccggacatacgttcagcctgacgctgaaaccggaaaccgggagcgggcagcagatcactccggtgatccgcacggtcagtcctgatgtccgtttaccggataacagcctgtttaccctgcaccccggcacggacagccactacctggtggaaacggatccccgttttgtgaataaaaaacagtggttgtccagtgactacatgcagaatgcctttacggcctcccacgataatgtgcataaacgtcttggtgacgggtattatgagcagagactggttcgtgatcagttgatccagctgaccggggggcgttataccggtaatcagagtaatgatgaagcccagtaccgtatgctgatgaataacggtattgccttcggtaaacagtatcagctgatccccggtgtggcgctgacgccggagcagatggcgttgctgacgtccgatattgtctggctggttgacatcccggtcacgctgagtgacggcagcatacaacaggttcgtgttccccaggtctatgcgaagctcagggaaggggatttaggtggtgacggtgccctgctcggcggacagaatgtcctgctgagtgcagaacaggatattaccggcagcggcaatatcgtgggacgggatgtgacacaactgagtgcacggacgctgatcaacagcggcagcatcagtggtaaccgggtcagtctgctggccggtgaagatatcctgaataccggcgggcagatactgggcggcaaagccgtgtcactgctggccggcagaaatattaccagcgaaaccaccacccgcagtgacggtgtgaaccgctgggttgatcgccgggccggtatttattcggagggggcagatggtcatctgacactgcgtgcgctgaacaatatcaccctgaccggcagcgatatccggcatgccggagagaacgggaagacgtcactgacagcaggtcatgacctgcatcttaatacggtcagtacagtccgttctcaggaaagtgactggggtaaagataactggcgccgggagtatatacagacggaaagtggcagtcgtattcatacggccggagatttggtgttgtctgccgggcgggatatttcggccactgccgctgatgttaccaccgatgccgcgctgactgcacaggccggacgggatttacggctgaacgccggtaacagcgtgacggatctggcggagcacagtaaagaaagcagtcgcgggctgttatcggggcattcatctgagcgtcatgatgaggtccatacgcgtcaggccgtcagtactgaactgtccggagagacagttcatcttcagtccgggcgggatatcagtgtgtcaggcagcaatgtggtcagcagcggaaatctggcgttgcaggccggacgggggctggatattaccaccgcaacggaattacgggatgagactcaccggcgtgaagagaagaaatccggcctgatgagtagtggcggtattggttttaccgtgggtaaacagtcactgaagcaaagcacggacagcgacagccggctgaataaaggcagtacgctgggcagtacggacggaaacgttgtgatgacggccggcggggatataaaggtacacggcagtgatgtggtggcgaaaaaggatatcagcctgaccggtcagtctgttgcggtaaccgcagcggaaaacacacgcacggaactgacaaaaaccgaacagaagcagagtggttttacgcttgccctgagcggtactgccggtgcagcactgaataccgcagtacagacggccggagatgcaaaagaaacggataacagccgcattaaagcccttcagtctattaaagccgggttatccggtgttcagggggctgaagccgcgcgtcttgctgagacacagggggatgcgggttctgccttcggaattaatctctcttatggcagccagtcttctgaatcagaaaccgaaacccgtcagtccacggcgcagggcagcagtatcagtgccgggcaaaacctgacagtgaatgccggcggtaaaacggcaggcagcggcaacattgatgtcaccgggagtgagttacaggccggtggtcacgccacactcaacgctcagaatgatatcacgctgacatccgcgcagaacacccggacggtggacggcaaaaacagcagtaaaggtggttccgttggtgtcggtgtgactttcgggtcaaatggtgcgggtttcaatgtgaatgccagtgtgaacagaggtaaaggatttgagaaaggcaacagtcagtatgccactgacagcacggtaaatgcaggcaaaaccctgaccctcagcagcggccatgacaccaccctgaaaggtgctcaggttcaggggaataaagtcattgcgaatgtcggcaataatctgacactgcaaagtgagcaggccactgataattatgactcaaaacaaacgagcttaagtgcgggtggtagcgtcggtttcggcaatggttctctgaacatttctgccagccgggataagatgcacagtgaataccgttcagtacaaaaccagacggggatttttgccggtaaagaggggtttgacattacggtcgggaagcacacccaactggatggtgcggttatcgcatcagaaggaaatgcggagaaaaaccgccttgacacggggacactgggctttaagaatattgagaataaagcagaataccgggtggaacaccagggcggtagcctgagcaccggtggcggtgtgggagataagctgatatccaatatgggcagtgcgctggccatgggggggaataaaaaggaaagcagccataacaccacgcatgcagcagtctctgacggtaaatggattatccgggatacagaacatcagacgcaggatgtggcgacgctgagccgtgatacggagaatgcccattcggcgctgaataaaatctttgataaagagaaagagcagaaccgggtaaaagagcagcaactgcttggtgaaattggtgttcaggtcagagatatcgtgcggactgaggcgacaatccgagccacggaaaaggcgaaggcagactttgatatccgcaactataaacaggatgatatcgataaagcgaaagcggagctgattgctgaaggtaagagtgcgggtgacagggatatcactgcactgctatttaacaaagaggttgagaaaaacttagcggaatcgggctttggcaccggcggtaagtatacccgtgccatgcaggcggcaacggcagcggttcagggcgtgatgggcggagacctgaaggcggcgctggcggatggtgtagcaccgtttatcgcaaatgaaataaaaaaacagatcccggatgaagaaaccgatgtcaaactgaaacgcaccattgctcatggtatagcgaatgccacccttgcactggccaaaggtgagaatgttgcggcgcaggcgaccggggcgatgacaggggaagcaatagggatactggcggagtctgtttatcataaaaaagcgcatgaactgacagagcaggaaaaagagaatgtcagtgcctgggcaacgctggcgtcaggtcttgccggtggtctggcaggcggagatacacagagtgtggcgaacgcagcccaggcagggaaaacaacgattgagaataacgggattagtgatggatttaaactctcgaaaggaatggcagaatatgggttgtcagcatcgacactagctacatcgatgtcaaaggataataaattaccacaagaagttaccgccgcattatctaaacatgcgaaaggcgatctccctgagggacaagatccagccagaggtttactggttgcatgggcaccagttcctgcgattgctgccagtacagttatagcaccggcaacagcgacatatggttttttgtttggcggtgcattaggtggcgcaacagatgcgacgcagcaacttatcacgatgaaaccgggcgaaacatatagttatacagatacgttgattgcaataggtacaggctctctgacacaaggtaaaggtgttatatttacaacagtagtgaatggtggcggcgcatatttaggtagttcaatcaagcatgaggatccaaccgcatcagtagcaggctcgatttttggttcagtgctgggaggaacaacgtcaaataaagttactaataaattgatagataaaggatatggttctgttacatcaggggtcgcaggagatgttgcgggggctatagtggaatcatcatctgaaaataccattaaacaaataattaaggatggtgaaaatgaaaagaaataa

SEQ ID NO: 81488 - DNA, 1746 bp, Citrobacter koseri
atgctatcttttttatccccgttacagcggttatgttttttcccgtttctctctctggcgatgagtgcggtatctttctctttatcagccaaagagactccatctccgttattccggtccggtgaacagccttttattcatcaggaacaacagcaacagtcacgtgaagcatcgctgatgccgaaagcgccggatatacgcttatccccgccgtcttctgtcttctcccggcttatttttccggcagagtcaccgtgttttcagatcacacaggttgtaaccgacgggagcggggcgcttcctcactggatcccggtacagcgtattgtcgatcaggcaaaagggcagtgcctggggcgtgacggaattaatcttctgatgagtgcattacagaaccgtctgattggacacgggtatatcacaacccgtgtactggcaccgtctcaggatcttaaaaccggtacgcttcgactgctgattgtgccgggaacggtcagggatatttatctgaatacaggcagtgatgactatatccggctgtatagtgcgttcccggcccgtaagggggaattactggatttacgggacattgaacaggggctggaaaaccttcagcgccttcccacggtcagtgcacggatggtcctgaaacccggtgacaggcccggacagagtgatattgtgattgaacgctcgcaatcccgttactggcgtaccggtgcctgggtggatgattccggcacggaaagcacggggcgatatcagggcggaataatgctggcgctggataatccgttgtccttcagcgatttgttttatgtcactgcaagccgggatctgggatttggcgggcgtcataaaagcacccacagttattccgcacattattcggttcctctgggatactggctggccggcataaatctcaacgattaccgttattatcagaccgtggccggaaaatataccgacattcattacagtggtaaaagccgttccctgaatctgcaactgagccgtgtgttacatcgtggtgccagttcccgtacgacggccagttatgacgttcttctgcgtgagacccgtaattttattgatgatacggaaattactgcccagaaacgccggaccagtgcatggcgtatcgggttatcccaccgtcattatatcggggcagccaccctggatgccggggtgagttatcagcggggtacccgctggtttggtgccctgccggccccggaagaagcctgggatgattatggcggcgttaccgccttatcaaaaattctgagctggaatgcctcactgaccgcaccgttttctctgggggaacagtctttcagctggaataccacctggcgcaggcaaatgagcgccacccctctgaccccgcaggacgaattttccatcggcaaccgctggagcgtgcgtggttttgacggcgaacgtacgctcagtgcctcaaatggctggctggtacagaacacgttctcctggcagacacctctgcctttgcaggagctctatctcggggccgattacggtgaggtcagcggtaacagcaccactcagagtgatttaaccggacaacatctggcggggtcagtgctggggatccgtggcgcattcgggaataccggcgtgagttatgacgcttcagtggggatccccctctcaaaaccggccggatttaaaacagaccctgtggtcaccacgttcagtgtgaactggaactggcagtga

SEQ ID NO: 81489 - DNA, 861 bp, Citrobacter koseri
atgcatgatgatgtaattaatggtgtccttgattgggttgaggataatataaatatgcctatctctcagactgatgttgttaaaaaatcagggtatagtcaaagatactttcaggatatctttttagaaaaaacaaaattaagtattgctaagtatattctggcaagaaaattgtccttatcctccgtattacttcgcttaacaaatctgtctgtttttgaaatatcaactatttattcatttaattctcagcaaagtttttcgcgagcatttaaacggtattttaaaattacaccgaatttattcaggaaacgtgatttttgggatttcagatattattttcctcagcaccggtttttgaattttaaagatataaaacacagatctgtttctttatattctgaatgttacacagacaataaactcggtgaaagtaaatcattttatatcactattccttttgagtttaaatctaattatagtgttgaaggtcttgcttttaaaaataaaagtcaaattaatcatattaagggtatggtaaaagcatcaagtgattatttgagtgtttcttatgatttttgtgcggatgaaaaaacaaaaaataaaataaaggtgaactatgttataaagcagataaatggggatggttttattttaaatgaaaaaggttcaaagtattatatgttttcatttgtcgggagttggtcggagtatgctattttatctaatgttatatacacaagggaattaccccgattaaatcttaaaagacgattaggatttgatattgagatattttattcttctggtcatcatactgatgatatttgttcattatattattttataccggtgtgttaa

SEQ ID NO: 81490 - DNA, 399 bp, Citrobacter koseri
atgagtgataaaataactatttcccggggagaacgttggggcatcaaacttgctcatggaaccaaatggggaatacgtggcgttaaaaaactggatcgctactgcacagaaaaagcaaaagaaaaaggtcttcctggctggttaggtcatttgccaaaaatcattatcattaccattctgattttgagcgctgtatttaatcttcctttattatttattatattctgcttatacctattattacatgtcaagtatgatgatacatctggtatattagatactccagagaactctctctttaatgatgatcctcttgttgaaagaacatacgataacgttaactcaatagatgatggtgctccatatggagagtctcatggaacatggggggataactaa

SEQ ID NO: 81491 - DNA, 1539 bp, Citrobacter koseri
atgatgacaaacagttatctcgagtattttctcacgctgctggcctgggtggtgaataacggattgtggtcggtactgaccagcaccgggctgtttgcgctgccactggcttttaaagtggcggggatttggctgaaggtgcgggaagagggggaggatgaaggtaacaaaggctcgctggcgattgtgcgcatcgagaacgccctctacggggcttttgtggtgatcctcttttgttgtgtgccgttgatggaagtgagtgtcagtaccctgcaatttgataccagccgggccaaaacctgcggcagctggacaccggtgaagccggaggcgtccggttacagcggtgtggtgtcatcactggataatcagacagccaaaatcccgctgtggtggatgctggtgcataagttgtcgaaaggggtgacacaggcggcggtggccagtattccgtgccggccggatttgcgtcaggtgcgttttgaggtgcagcacagcaatatcaaaaatccggcactggctgccgcacttcaggattttaccgatgattgttattcacgtgcgctgtatgactggaaagcgaaagatcagggaaaaacgcaggatgagaaaacgttgcaggatattacctggataggttcggtgacgtttatgaaaggggaatatcatcagatccagtcccggacaccacgggcgggctttccctgggatgcagggcgggatgacgggtatgcgaatgtcaacggtaacggttacccgacctgttatcagtggtggaatgatgcgaatgcgggcttactgaaacttgtcaaagagcagaccgatgaagggatgtggctgcgtgcccgggcagcgatgaagctgattaataaaaactcgaaagagtttgaggaggccattgtccgccggctggtgagtccgacgaatctggatgtttccggcggtcgggtgtaccggggatacgggggaaatgcggatatgacggtgatgaatgagctggccagaatgggaggggtagccggcacttcgctggcgtcactgggggcattccctgcctttgattcgatgcgtcagtccttaccgatggtgcaggggctgatattaatggcggtgtatatcatgatcccgatgatactgctgttttcggcgtatgaatttaagacggcgataacggtgacgtttgtgatatttgcgctgaactttctgaccttctggtgggagctggcacgctggatagacagctggatgatggaggcactgtataattccgatacgcacagccagtggaatatgaacgggatccagaacacgtctgatgatgtcattatgaatctggtgatggggacgatgtttttggtgttgccggcgttgtggatgggcgcattaagttgggcgggcattaatttaggaagtgctataagtaatagtatgaaatcaggtacggataaagcaacacaagcaggagaaaagggaggggaagttgctaaaaaggctggagctacttttatggagggagtaaatggaaaaggactaaaataa

SEQ ID NO: 81492 - DNA, 339 bp, Citrobacter koseri
atgacgaaaggaaaaaccgggcgccggttatggccggtgctgaaagtgaccgggctgaccctgctcagtatggtggtgttgctggcggtggctcagctggggctgagttattacggtgaggcggacagtctgcgccgggcgttttaccgtgcccgctggttctggctggtctggcggtgtgtgttgtacgggatggttaccgtcggattatggaaactgtatcaccacccgaaagtcagtgagacggcccggcgcagtctgaagcgcagcggactggcgatggccgcctttgtggcggtgagtgaatggtctgtctgggcgggaggtgacggcttatga

SEQ ID NO: 81493 - DNA, 1446 bp, Citrobacter koseri
atgatgaaagcaaaacgacacactttttttccgccggtgctgacactgatggtgttatgcagtgtaccggcattctctgcccgggcagcgctggatttttccgccggcgcgaatgatatcggctacggtgcgaatgtctccggcgcggtctctgacaaactgtactacaacctggggggcggcacggtgttatcccagccaccggggcgcagtaatctgcaacgtctggggatgagcatgggctggaacagtgatctgatgtgcggcaattttgatatcaaaaccaccgtgggcaaccagctgaacggggtgacggccggctttaagaatctgatgagcgaggtgatccagaacgccaccggggcggtggccagtctgccggcgatggctatccagcgggcgaatcccggtctgtatgaaatgctgaccaacggggtgttgcaggccaatgtggcctttgataaggcgcaactgagttgccagaacatggccaaacggatgatggacttttcagagaataaccagtggacgcaggcggcaatacttgaagaggccagaaacatcatcaacagcggggatggtgatgcggtggggacaatgaatcaggtggaaaaagagccggacggtaaggccggggtgccgtggataggcggaaagcaacgcggggggattggacagctggccattcagccaacacaggattttgcgcaggccggctttaatatcatgaacggtctgccggcaaccagcacggctccggtgccggccggccagtgtaccggggcggcgtgccggcggtttgccaacagtgaggaggctgctcaggtggtaacacaggtactgggcagcaaatcggtccgcacctgcaccaatccggcggattgtcagagcggcggtgaggcaaaccagccgggtagttcccagccgggaaccgggctggcgccggtgctggagaccaccacccgggaaaatctggaacagttgcataaactggtgaacagccggggcgcggtcagtgcggcggatttggcgaaactgaaaaccggtagcctgacggtctctcggggcgtgattgaagccctgcgccgggatccggataaaacggcgttaacacagcgtctggccggtgagctggcgatggcggatacgatggagctggcgctgacgatgcgccgtatgctgatcaccggccagggggagccgaatgccagtaattttccgaaagcccaggagatcggtaatcagtcggttgaccaactggatcgcgaaatcgggatgctgcaaacggaaatggaagtgcgtaaatccattgccaataatgcgatgctgacggtgattgagcgtgatcagcaacggacacaggcgaatccggctacccagaccccggataatacggatgtgcgtgtacaggggctggagcaaaacagtgacaccggaggacgttaa

SEQ ID NO: 81494 - DNA, 975 bp, Citrobacter koseri
atgacccgacaatttcatcgccggcgtctggcgggcgcactgttactgggatgttcactggtaccggtggcggaagccagcctgagtacggctactctggtggcttctgcggcatcaccgtcgtgcatcagctggcgtatcagcggaatttgctactggctgaagtgcggctggggcggctgccggatccagacttctgtccgggtgtcgcattttattccgcaggcggtggtctcggcctaccatgccccgggcgaaaacccgtggcaggaaatgtcactggtcagcggggcgtccggcgggattgaaaatgccgtgaccggcgtgctgagcggcgtgtcagccggcggcggaaacagtgagcagaagtttgaggcaaaacgtaaaaccgccctgcactttttttatgcggatgccatcggtcatccggccaccacccttatcggcggcagtatcccggggtattcctgtgacagtgcggccacaccgctgtttccttattacctgagcacgctcgacagtgtgccgtggcggctcggtgtgccggaaatggcgtatccggaagccctgatccccgggaaacgggaaatcggggcacagagccggggcaatatgtggggcaatctctatccgcgcagcggttttgtcacccagcaggacggggataaagcggcagcggtggttgcgcagcgcgtggcagatattatcacccgtaccggtcaggcgcatacctatgtacccctgaaaggaaaccgccgggatggctactggccgccggaggcggtgacggagaataccgggacaaaaaaccataaatggcagcgcctgtcgccggggctgaaaaacagctgtgcggtgtttccggatgagagcggcccgcaggcgcaggacggcaattatgcctgggcactgtggcagccgtacagctgctgtaagcgcatggggcaaaaatttctgtacagcacaacgttttaa

SEQ ID NO: 81495 - DNA, 441 bp, Citrobacter koseri
atgaaaaaacgatttttatccctttccggattgctgatgctgtcgctgtcatgtctgccgttcactgccggggcagcagtggtgctgtataccacgcaggatgacgctctgccgcagacagatatcccgtttgaggtggtgtatctggatgcgcctgagcgcgtgctggatgaggtcctgcttcagccgggtacggaactgcgtgaggcggatgccccgcacatcaccgccctgttacaaagtccggcctggcaggccagagagacggcgttacggcaggcttatcagggcgtggttcaggcctggcaactgggtgtggcccgtctgccggcggtggtggtggatgcgcagtgggtggtttacggcactactgatattgaacaggctgtgacacagatacagcagtaccgggaacaacaggaaggaggagctcaaccatga

SEQ ID NO: 81496 - DNA, 2226 bp, Citrobacter koseri
atgaaaacgacgggaattaaagtaacgcttttggcgctggctgtcagttattcctgcgctttgcaggctaaaaatgtgtcgctgggtgacactgccgtggccaccgggcagcagagtacggcagtggggcagggcagtatggcgctggggaataatatgacggcggaacaggcacagacggcgatgaaagcccagaatgtcctgttgcagaaccgggcgcaggcgcatgagcagtacacgcagacacaggccctgtttgacagtaaattgctggcgaacagcaatattctggagcgtcaggaagcaatgaaaccgttgttgcagcaacaggcggccttagcgggtcagcgtaccgcgcaacagcagcaggtgacacaggcacagcaggccgctgaccggatggcacagatttatgaacgcaatctgggggcggtttcccagattgtggatgcggattttgtggagttgtggcagcaggggcaggctgaccgtctggctcaggaagtgaaaaaacgggttgagcaggatacgtcggtcaataatgacacgcagttttatgtcagttatgtcaatgcctatattgaagcgaaaacccgaagtgccctggttaatgaaaccatcaaagaaaaaaccggctcccagattacgaccaattatcagggcgtggccctgtccccggtactgagtgccggccacagtgacaaagcgatgctgtggtcggatgcggtcacggataatgaccagaagcagctgttgtcccgtctgcatctgaataccgccgccctgaagggcattgccggttatcaggaagagctggccaaaatcgccctgatcacctcggcggacgggaaaaagaatctgtatcaggcttatcagaaaaatgcccggcagcagattgagcaggggttaaccggggtgacggaggccgggaagcagatcctgtcagagctgtatctcgataacatcgatgaaggcacctttaatcagatggtcagcggtattttcacccgctatgagaatcagctgaactacctgatccagctggataaggtcaacagtttatcgccggacagcccggattatgccgaagaattacagcagctgctggtactggaaagccgtccccgggataacaccgtcgggctgaacaccaacccggaggcgctgaaacagaaagtggatcagtaccttcaggacaatgcgctcagtcacacacaggccatgtcgtcacaggccacacagctgaaacagcagttatcggcggaaaaagccgtcaccgatcaggccctgaagcaggcggaaacgcaactctcccggctggaaaaggatctctccgcgctggatacccggttgtcggatttgcgtccgacgcaatccgagctggaaaacatccgggatctggagaaggtgaaagcggagctggctcagaaacaggcggaatatcaggcggcggataaagcgctgaatgaggcgcagagtacgctgacgcagggacagcgtgcggtggctgtcggggataacagcctggcgctgggcgagaaatccgtggcactgggtgtggatgcccgggcgctggcgaaaaacagtgtggcactgggcgacggcagcctggccgaccgggataacagcgtgtccgtcggccgtgaagggcaggaacgttttctgacgcatgtggccgccggcattgccaaaacggatgcggttaacaaagggcagctggatgaggagcgggatgcacgcattgccggtgataagcagaccctgaaacaggctatggactacacggatgtgagcattcagtacagtgaggcgaagacaaacaagcggattacggaagagcagcaggcccgtattgagggggatgaaaagacgctggcggcggcaaaccgctataccgatgagacgttcgggcgggtgactcacacggtactggacaatgcccggcagtataccgatcagcgtttcagacaactcgacaataaaatcagtcaggtggaaaaacgggccaatgcggggattgccggggtgacggcgatttcctccattccgtatgtgaacagtgaacgtttttcattcgggatggcgatggggcattaccgcgatgcacaggcgatagccacgggagtgcagtataagccgacggccaacacgaatgtgcgcctgaatgcgtcatggaataacggcggcgataccaatatcggcgccgggtttgccgtgggctggtag

SEQ ID NO: 81497 - DNA, 2853 bp, Citrobacter koseri
atgggattttcattattccgctcacgccggaaagcgcaggcggtttctgctgaaaaaacggctgacaaagccgtacaccgcagtacaccggcagagaatgccggtttagcccgtcagccgctttcccgtccgggaaaaatgacccgggcggatgagaagaagatttaccacgcgaatccgtcttttattgattacctgccctgggtggaatttctggatgaggagcagtgcctgctgcttgatgacggggtgtcggtcggggcggtgtatgccgttgagccggcaccgacggaagggcgctccggtgaccgtctgctggaaatccgggatgcggtggaggatgcgcttcaggacagcctggatgagcatgatgataacccgtgggtggtgcagtttttttgtcaggatgaggacgacgtgagcgtcacgctggccaccttgcgggactatatcctgccggcggcacggggcacggcgtttaccgaagcctggctgggcgaaatggcacgtcatttgcgggggatagcccgtccggaagggctgtttaaggacacggaggtgaccggacaaccctggcgcggacagcagcgccggacccggatggtggtttaccgccggctggggaacagctatgccgatccgatgccgccggtggcgatgctcaatcagatgtgtgaccggctggtcagcagtctgggcagtgccggggtgcactgtatccgccaggacgggaggcaggtgcatcagtggctgctgcgtcatttcaatccggccccggactgggtggacagagagacgctgtaccgggaaggggcgtactggccggcggcggaggaagcgccgggcaccctgccggtgctgaaggattttgcagaaacgctgtggtttaccccgccccggtcggatgtggaaaacggggtgtggtggtttgataacctggcgcacggcgtggtgaacatcgaaaaactgcgtaaagccccggggccggggcacctgaccggggagcagaagcgcggtgacaaaaatatcaatgcgctgatggacctgtttccggaagggacgatgctgtcgatgaccatcgtcacacagccccaggatacgctggagcaggaatttacccggctggggaaaaactcggtgggggaaaacaccgattcgcagcgtacccgccgggatgtggaaaccgccagaagtttactggggcaccgtcataagctctaccgggcctccctgtcattgctgctgcgtgccggttcggtgggggagctgaacaaaaagcgtgtggatctgacggccacgctgctgaatgccggtctggagccggtgaaaccggaatacgatgtggcgccgctgaacgggtatctgcgtgccctgccgatgtgttttgatccgcagacggataaaaaacactggtatacccgcctgacctgggtacagcacctggcgggattactgccggtgaccgggcgtaccaccggcaccgggcatcccggctggagcttctttaaccggggcggcggggtgctgacctttgatccgcagaataaacaggatcgtacccagaatgcccacctgttgttattcggtcccaccggggccggtaaatccgccacattatgtgcgcagttatcacagctgatggcggtccgccggccgcgtctgtttattgcggaggccggaaattctttcggtttactggcggattattacgccagtctgggcctgagtgtcaataaggtcagtgtcaaacccggcagcggggtgcgtctgccgctgtttgcggatgcacatcagctgctgacgatggatgaacagcgtctggcactgaatgcggatgagctgcccgagacggacagcgaatctgaggatgatgagcagcgtgacatcctgggggaaatggaaatctccgcccgcatgatgatcaccggcggggatgtgcgggaagaagcggagctgaagcgggctgaccgggcgatgatccgccgggcgctgatggcgggggccagagcgtcttatgcggcgggccggcagatgctgccggcggatttgcaggaggcattgtatgccctgtcacggggggaaggcgaagaggaagggcgggcattaaatccgcagcgccgggcgaaagcggctgaaatggcggaatccctgggcatgtttaccgaaccgggcagttttgagcatgagctgtttaatcagcccggggaactgtggccggaggcggatgtgaccctgattgatttggggcatctggcgcgggaagggtatgaggcccagatggcgctgacgatggtgagtcttatcaactccatcaacaacattgccgagcgggatcagtacctggcgcgggacattaattttgtggtggatgaggcacatatcgtgacggtcaatccgctgttgtccccctatgtgaccaaagtggtgaaaatgtggcggaaactgggggcctggctgtggctggcgacccagaacctggatgactacccggactgtgccgagaaaatgctcaatatggcggagtggtgggtgtgtctgacgatgccacagaaggaagtggaggcgattgcccgctttaagacgctcagtgaggagcagaaacaggtgctgctgtcggcagccaaactctccggctgttacacggaaggtgtggtgctggcccggaaagtggaggcgctgttccgggtggtgcagccgagtctgtacctggcgctgggaatgacggaaaaagaggagaaacagcaacggcgcgtcctgatggagcgccacggatgcagtgagctggacgccgcattccgggtggcggatgaacttgaccggaaacggggattaccgccccggaacccgggatga

SEQ ID NO: 81498 - DNA, 435 bp, Citrobacter koseri
atgagaatgatgaaatgtgtgatgaaaagcagtgtgctgtgcgcactgctgttgttgctgaccggctgtgccacctccaaggaggaactgctgccgccgggaaacagcgacatgatggccatctggtcaggcagacaggctgacccgaatacggcggacacccggacggtgacggaagctgcccgcagtacgctgcgtcgcgggctgacgaacgaggaagcggtgcgccgtcagcaggcgaacaccgcgtatacccggacacaacacagtgagatccatcagcagtttccgcgtctgccgaacccggacatggtgatgtatgtgttcccgcatctctcggccggtaatctgccggtgccgggatacagtacggtgtttccgttttaccatcaggtgcagtatgccctgccgggtgagcgtgtggagggcttgtga

SEQ ID NO: 81499 - DNA, 468 bp, Citrobacter koseri
gtgacgtattttgcgaagccgggggcgccggccgtgatgccggtgacgtttccgctggtgtttgtgttcagtgccggaagtcatttttgcctgacggtggccggtcatcaggtgtttgatgatgagcaacagcagctgattgccggcatgtcaccggcgacgatacagctggcgtggcaggttgccgccggtgaggcggccggggcggtgctgtctgtcggccgtcaccgggtggtgctgtgtgacaacgacattaccgtttaccggtttgccccggggaataaggcatacccgcaggaccgtgactgggatcgtctgctgtacaccgtttttaaaggggagacgccggataaagccggctggcaatgcgtgtctttttcattatctgaactgagctgtcacggtgaatttgcccggctgacctgccggggggcgatcctgaagggagcgggaggagtcatgtcatga

SEQ ID NO: 81500 - DNA, 1497 bp, Citrobacter koseri
atgaaagtgacatccaatacgctggtcaaaatactggtgccgtccgcactgacgctggcggtgctgatcggcatcaaaagttgtcagccggagacgccggccggtaacggcgggcaggacagtctgtctcagtcgattaatgatcttgacccgggagagctgaagtcgctcgggattgagggggataccccggccgatacgctgcggacactgattggcaccatgaaaacggtgcgtgaccgtcaggcggagctgattgcccaaaacgagaaactgctggaagagaatgcgcagctgcgcagccggcaacagaatgtatcggggcagatccagtctgcggtggcctctgtccgtcaggaagcggagagtcagcagcgtgctctgcaacaggagcagcagacgctgatgcggcgtctggataccctgggggcgtcactgaccgccccgtcaggtcagccggcatccggcagcggacacggcgatattccgctgggactggggctggatgcccagggcagcgggctgacggtgaaagacgggctgttgtgggctgagccgcaggatgctcagccggctgaaccgggaaggagtgtgaacggacaaccggctaaaccggcgtttccgacgtcttttctggaggataacgccattacccgtcagaaagcggaactggaccgggtggcgaaaaatcagcgcacgctgtccggtacggcggacggtgaggcgcataccgaaccggcttacacgatacccgaaaatgccactctggtgggcagtcaggcgatgacggcattgctgggccgggtgcccatcgacggtaaagtgaccgatccgtatccgttcaaggtggtggtgggaaaagacaacctcacggcgaacggcattgcgttaccggatgtggaaggggcggtgatcagcggctcggccaccggtgactggacattgtcctgtgtgcgcggggatatcacctcgatcacctttgtctttacggacggcacggtacgcacggtgccgaagccggctgaccggacggacggcggcagtcaggccggcagcggacagaatgcccgcaataacggcggatcgctcggctggatctcggatgagagcgggatcccgtgtatcagcggtgagcgtaaaaccaatgccggcacctatctgccgaccctgtttgccctgacagcagcggcctcggccgggaatgcgatgtcacagagccagtataccgcgcagaacaacggttacggtatcacctcctcgctgtccggggatgcgggaaaagccgcgctgggcagtgccatcggcggcggttttaaggatgtggcggactgggtgaaatcccgctacgggcagacctttgatgcggtgtatgtgccgccggggcagaaagtcgcggtgcatatcagccgtcagatcccggtggattatgaatcacagggacgccgggtgaactacggcttttcactgacagagggtgaggaaggaggtctggagtga

SEQ ID NO: 81501 - DNA, 906 bp, Citrobacter koseri
atgagcatcaaacatcatctgaccgcctgtgcgctcggggtttcagcggtgctttctgcggtttcactgccgctgccggtgcaggcggtggaactggtccgctgggagcgtattccgctgccggtgtccctgcatgtgggggaagaacgcattgtgtttgtggaaaaaaatgtgcgtgtcgggtttccgccgtccctgaatgagaaactgcggatacagagtaccggcggggcggtctatctgcgggcggaaagtgcgttcccgcagacccgtcttcagttacaggatgtggaaagcggggaaatcctgttgctggatgtgacagccacggcaggtaaaggggcgctggagccggtacgggtggtgtacagcggggaagtcagcacgcagcgtgacagtcagaccgtcagacgcagcgggcagaccggcgggaccgccggcaatacggccccggcggcaaccggaaccggggagcgcaaagcgaagccccgttatccggccccgttaccggtattactgacccgttatgccgcccagagtctgtatgcgccgttaagaaccgtggagccggtgcccggtgtacagccgttatcactgagcttacccggaacactgacggcactctacccgtcagcgccgctgaccgcacagccgctggccggctggcaggcggcggagtaccgggtggtggcggtgaaactgaccaaccagtccgctcagaaagtggtgctggatccccgtcagttgcaggggcagtttgtcagcgccacgttccagcatcagtggctggatgtgaagggcaccccggaggataccaccacggtatatctggtgatgaaaggcaaaccggataaggcatttccggcggagccgcctgtccggggaacgggagggaaagcccgatga

SEQ ID NO: 81502 - DNA, 645 bp, Citrobacter koseri
atgagtaaattccgtcatgccctgcaaaaccgggatcagcatattctgaccctgcgggtgatctgcggggtactgattttctgcctgttagtggcatttaccggctggatgcgggcgccggataaactgaccatccataatccgccggatttacgatccggcagtacccgtgcatggtgggaagtgccgctgccgacggtgtacgccttcagcttttatatttttcagcagctcaatgcctggccgaaagacggtgaggtggactatccgcgcaagattgcgcagctcagtgcttatctgacgccgtcctgccgggcgtattttgagaaagaggctgcttaccgcaccacgctcggggagctgaaaggacgctcccgggtggtgtatgaaatcccggggcgcgggttcagtgaggataaagtccgggtgattgaccgggataactggattgtgcgcctggatttggtggcggatgaatatttcagtgcggagccggtcaagcgggtaacggtgcgctatccggtgaaagtggtgcgctgggagggggatccggaaagcaatccgttcgggctggcgctggactgctatgacgggacacctcagcgtctggaagccgcggagcagaataaggaggccagtcaatga

SEQ ID NO: 81503 - DNA, 417 bp, Citrobacter koseri
atgcagaccatcgattttatgccggatcgcttaaatgcggaacccaccgtctttcgcggatttaccacccatgagatgtttgcggctgccggcgtcggttgtgcgggcggggttattatcagtctcccgctgttaccgctggccggatgggttattctgccgaccggggcactgattatgccgttggtcgtggtatttttcggcggcacctttctgacccgcatcaaacgcggaaaaccggaaaattatctctaccgccggttgtcctggaaactgcaaaccgggtttgcccgcaccctgccgctgaccgggcggctgaccgaaaaatccctgatcaccgtgtctcagggctggtttttacgccggacacaggcagtgtcactgtgccggtatcttgccggaggccgccatgagtaa

SEQ ID NO: 81504 - DNA, 369 bp, Citrobacter koseri
atgaagataaacacgttttgggggcggggtgcccgccgtatggggacgtcagtgatgacgttatggtcgttattcagtctgatgccggtgtatgccgcactgccacaggtggagcccccctcttccggcggcggtggcgggctgatggataccctcaagggctatattaatgacgggattgtgattggcgggctggttgcggcggcggtggcttttattgtggtggctcaggcggcgatttccactttcaatgaagtgcgggatgaaaaagccggctggggtaaattcggcgccattgttgtggtcggtgtggtcctgattgtggcggtcgtctggctggccggaaaatccgccaccattattttttaa

SEQ ID NO: 81505 - DNA, 240 bp, Citrobacter koseri
atgaatccgtcacagcaggcggcgtttgaggccgctgccggtccggggatgtctccggctgttctgaatctgttgtgtatcggggcattactggcggtgctgtttttatgggcggcctggggactggttgatgtttaccggggctgggcaaatgacagtgtccgtgccgccaaaatggggcagtttgctgtccgggcggtgatattactggtggtctgcatctggatgtttgccagctga

SEQ ID NO: 81506 - DNA, 327 bp, Citrobacter koseri
atgcgattattttctcctctcactcccctgtgtgcactggtggtcagtgcctgtctggtgtgcccggcacaggccggggaaaaagatgaactggcgctgaccttaaaacagcttgaacacatccaggcgagtctggagcgtgcccgtattcaggcaaatcaggataaccgcacccgtttttattttgattattcccgtgcctccggagaggtggagattatccggcaggggattgcccgctatctggagccgtcccgtgcccagcccacggtgccggtgaatgtggcggagccgctgcgcggggattaccgccgggagcagcgatga

SEQ ID NO: 81507 - DNA, 759 bp, Citrobacter koseri
atggcaacaactgaagcccgtcaggaaaccccgcgtcatccggcaaaagaacccggtttgctgaccaaactggtgtggcactggccgtgggccatcatcggtgtattactggcttcctgggtatgcagtctggtgattgaatgggtcgggattgcattcttctggccggacgaaggagcagaccatagccggcaggtgatgttaaccgagagcgggtatctgtcggaagggtttacccgcagtctgctgatgtccagtccggcgcagtggctggcgcataccgtagagcaggcataccggtggttgtttgtggagtccggcctgatggacagctggcagaacgtctacccggtgccatcggccaatgggaatgcgatcgcccgtgaactggataactggcggagctggctggtgtctgagctgagggactatctgctggcgacagtgtatgtgacgctgacgttttttatccgggtgaccattctggtgctgtcgatgcctttgtttattatggtgctgctggtcggcatggtggaaggttttaaccggcgtgatttgcggcgttatggtgccgggtatgaatccagttttgtgtatcaccacgccaaacgctttgtcaaaccggccttttttgttccgtgtatgatttatctgtcctggccgtctgccatttacccgaatctggtgttgttaccggcggcgctgttgttcgggcttgcggtgacagtggccactgcctcattcaaaaaatatttatag

SEQ ID NO: 81508 - DNA, 2148 bp, Citrobacter koseri
atgagtgatcgttatgtgatagaggcctggctgcgaccggccgtggaactgaacagtgccctggtgtccggcggggcggcatttgtgtgtgcggtggccccctgggctgtggcattgtctccgtctgtgagttatgtcaccgccggcgcgtttgccggcttttccgcactgcgggcgcatcagggattccgggtcttacgttaccgccggaatctccggcgtcttccccgttatcaggtgacgtcggcacaggtgccggtcagccggcagcgcctgtttctgggaaaagggtttcagtggcagcagaaacacacgcagcgcctgctggaaacccagcgcccggaagtggagcggtatgttcagccgccggcacattaccggctggcccggcagtttgaactccgttttgaatcccgtttcccggcggtttgccggcttttgcagaaagacagtcgcctgaatccggtccgcccgctgccgccggtggggggaaatccggtgttacacggtgtggagccggatgaagtgaatgtgacgatggatttgcgtgaacgggtcggtcatatgctggtactgggaaccacccgtgtcggcaaaacgcgtctggcggaactgctgatcacgcaggatatccgccggggcaatatcacgatagtgtttgatccgaaaggggatgcggatttgctgcgccggatgtgggcggaagcgcaccgggcgggacgcagtgaggagttttatgtgtttcacctgggctggccggatatcagtgcccgttataacgccatcggccgttttggccgggtatccgaagtggccgggcgggttgccggccagttatccggtgaagggaacagtgcggcgttccgggagtttgcctggcggtttgtcaatattattgcccgggcactggtcgcgctgggagagcgtccggattatgcgaaaattttacgttatgtcaccaatatcggggaactctatcagacgtattcgatgcaggtgattaaagcacaactgccggatttatttgctcaaatcgagaatgcacagaatgcgctgaccgtggaggatgtgccccgtcatctgcaaagtgatccgaaagcggtggctatctgggcaacagagctggcgttaagcagtgaaaaagggaaaaaaatctatgatccgattctggacgggctgcgcagtgcgatccgttatgaccggacctattttgataaaattgtggcctccctgctgccgttactggaaaaactgaccaccggaaaaaccgcagccctgttatcgccggattataccaatatgcaggatccccgtccgatttttgactggcagcaggtgatccggaaaaaagggattgtgtatgtcggtctggatgcattatcggatgcggaagtggcggcggcggtgggaaattccatgtttgcggatttggtctcggtagccgggcatatttataaattcggaaccggggatggtctgccggaggaagggcacgccggaaaattaccgatcagcctgcattgcgatgagtttaatgaactgatgggggatgaatttattccgttactgaacaagagcgggggggcggggattgaggtgacggcttacacgcagacctggtctgatattgaggcccggctggggaatgccgccaaatcggcgcaggtcaccggtaactttaacactctggtgatgttacgtgtccgtgaactgatgaccgcaaaattactgacagaacagttgccggaagtggatatttacaccaaaaccctggtatccgggatcaccgatatttccaacccggggcaggggagtgatttcacctccaatacccaggacagggtcagtatggtggcgaaacccttactgttaccggcagatattattcagttaccgaaagggcaggcgtttgccctgctggaaggcggaaagttgtggaaaatcaggatgcccctgccggcggccggggaggataccctgatgccaccggatttgcaaaaaatcgcacagtatatggagaaaaattaccgcaccggcgaaacctggtggacggcaacaccatttgcggatgtacacccggacaccggcggcatgaacgtaactgagatgaatccggataccgaaggaggcaacgatggcaacaactga

SEQ ID NO: 81509 - DNA, 342 bp, Citrobacter koseri
atggttaagcactgttttcccgggaaacactggctgagttttgagcactgtttccccggtaaacactggttaagttttgagcactgtttccagtggaaacactggctaagttttgaacactgtttccactggaaacactggctaagttttgaacactgtttccccgggaaatactggctaagttttgagcactgtttccactggaaacactggctaagttttgagcactgtttccactggaaacactggctaagtattgaacactgtttccagtggaaacaccggttaagttttgaacactgtttccccgggaaacacccagaaaagagtctgagagaatga

SEQ ID NO: 81510 - DNA, 198 bp, Citrobacter koseri
atgttaccgccgatatggccttcagacggggttgactccccggcattctggctggccctgctgatgtggtgtgtattttttgttgtgatggggatcctggggaaaaaaaatagtcctgcccgccgtcatcaccacggtcacgggaaaaaaacgcgtgtgccggaaaaagaaaatccgtcagatcctccttatggttaa

SEQ ID NO: 81511 - DNA, 555 bp, Citrobacter koseri
atgcgaaataattctgaagaaaagacaacgcgtgccttttatcccctgtccgtcctggggatgctgctgttttgcgttgccggcggcagtcaggcggcgttaacggtggtggcggattatggcgggcagccgaccgcgcctttttatgacgcaataaataatgccccgaatgaatggacaacaaagccggcgtcccgccccctgccgtccatgatggcaccgtcaatggtgttgccggttgagacaccggaaatgacaccgggggaggtggatgatcgcgcgctgcatttaccggggattggggcactgtatctggtgggggatgatccgttatcccgggcctggctcacacagcatgccacccggctgaaggcaatgaatgcggccgggatggtggtgaatgtgaaatcggacgccggattacaggcgcttcaggcactggctcagggaggactgctctccccggcatccggtaccgatttggctcaccgtcttcaggtatcccattacccggttctgatcacggaaaccgggctgacccagcaggtgaagtaa

SEQ ID NO: 81512 - DNA, 639 bp, Citrobacter koseri
atgcgtaaaaattccctgctcatgcttgtcctgctgctgttttccgtgccgttaccggcgcgggaggtgccgccgggctaccgtgaggtggcccggcaggagaatgtaccggcagaagcgctgtattccctggcactgacggagtcatcctggacattaccggcacatcacccgcaggccggtgaaatccatccctggccgtggacactgaatgtggccggtaaaggataccgttatccgacacggcaggccgcctggcaggctttacaggcatttttacagacgacatcccccaaacgcatcgatgtgggcattgcacaggtcaatttaggctggaacgggcatcacttccgttctgactgggaggcttttgatccttataccaatctgcatgtggcagcccgtattctgaagcgctgttatgacacatcaccgggcagctggctccgtgctgccggctgttatcaccatccggcgggcggtcagcccgccacccgttataaaggtatcgtccggcgccagctggcaacactgacgggcggtacccaacctgtttccgctcatttaccggtagccattgcagaacgaccggtatcgtttgtgtggatagaaccggagaacaaaaccaatgcgaaataa

SEQ ID NO: 81513 - DNA, 744 bp, Citrobacter koseri
atgaaaaacataagatgcgtggttttactgggcgggtgtctgatgtccgcaccgctgacagctgtacagtctgtttccgggacaacccaaccggttcagattgaggcggggacatcggctgagagtcagactcagtcattgcagtatgaggcgcaggaatggggactgagtgcagaggagtatgctcgttttgaggcgctgatgaaagggcggcgcggtattcagtctccaggactggatccgctgacgacactgggcattgaggcccggtcagatgaggagcgccgccggctggctgaaaagtgggtacagcaggaatttgcccgggcggaaaaagagctggcgtttcagcgggaagtggatgcggcctggaaacggctttatggtcagatattaccggtcagcctgggaacagccggcgcgaccaccgggatggtacagggaacagcacagcgccgtcaggcgttatttgtgcaggcggaaaactgtcgcgcgtgtgatgcccgtctggccactctgctggccggcaaacagccgtttgatatttatgtgctggggacacagggggatgataaccgcctgcgggcctgggccagacaaaaaaatatcccggcagagcgcgtcagaaagcgggaaattacgttaaatcatgatggcggtctctcgcttcagtacggactgaccaccacaccggtggtgatgcaacagttaccggatgggcggtggcgtccactcacaccttaa

SEQ ID NO: 81514 - DNA, 729 bp, Citrobacter koseri
atgagtgcttctgccaaatcttacgctgtccggaccgtaattatcggcggcctggtattgtttgctggtctgtgtgtggcttctgtgctggcgttactgaatattgctggtacgcaggagaaacagctgtcacagcttgaccagcgattgcaggcgattgagatgacgatggctgcccctgtcacggatgacggaataaatgcgcaactggatgtgattcgtcaggagctggcgacgctgaaacagggagccgcatcacagcgcgataccctcagaactgtgacagagcagctggcggttgccggcaaaccggatgagcagattacgctgttatcggacgggctggaaaaacggctggcgcaactggaaacccgccaggcacagtgggcactggcgttacatcagttgcaggaacagcgtcagccggtgcaaaaaacagccaatccacaggttgtcagggcaaaacccgccgcgccggagacttcccgtcccggggcttcagcccgtacagcccgtacagcccggacggtgccgtttcagttaactgccattgaacagcggggcggtcgtcgtctggcagctctggcccctgcggatatccgtcagctggggcaggtgcaattagtgccggtcggtgggcgttatcagggctgggaaatgaccgacattcagacagaccgtgtgacattacgttatcaggggcgcacggtgacattgcgcctgccataa

SEQ ID NO: 81515 - DNA, 663 bp, Citrobacter koseri
atgcgtatgaaaactctcccgatatgtcttgccctgacttcactgctgttggggggctgtgcagataaaccctcccggcctgccgaacaggtggctgacaccgcgatcccggtcaacaccactcatgctcagccggtgctcccggatctttatccgtcagcgccggaagtggtgcgttatgaccgttaccggctggttgatatttcgccttcacaggcacagcgttacccgctggaacaaattgttcacctgcgtattccggcttccgtttcacccacggtcggggatgcgctgcattatgccctacgtgattccggataccgtctgtgcacctctgatgggcaggcgaaccgcctttatcgtctgccgttacccgccgttcagtatcagatgggaccgatccgcctgaatgtggcgttacagatccttgccggtccggcctggcagttgttggtggatgatgtacagcgggaggtgtgttaccggcttcgtccggaatacacgccacctgtgccggatgccggaagggacagcgcttcatccgtctcagtgggcacaccactttctgcggggagtgcgccagtaccggtgcctccggtgctgaatacctctgccggacagagtggtgtgaataaggttcatcgcggagggtggctgaaatga

SEQ ID NO: 81516 - DNA, 960 bp, Citrobacter koseri
gtgactaaaaatacacaacaaccggtacatgatgcgttatttaagcagtttttaacgcatcctgagaatgcccgggattttttcgcggtgcatttaccggcgaacattctgcccttgtgcgatttaagtacactgcgcctggagccggccagttttgtggagcgccgtttacgtcagctgcattcggatgtgctgtattccgtgcagacaacggaaggggaagggtatatctactgcctgatagagcaccagtcaaaaccggatcggctaatgggttttcgtctgatgcactatgcgatgtcagcgatttcgcatcatctgaaaaaatcgccggcggataagacgctgccgttggtggtgccgtttctgttttatcagggcagtgtttgtccttacccgtacagcatgaactggctggacgggttcgccgatccggcgctggctcagcagttgtacactcggtcatttccgttagtggatttgagtgtgctcagtgatgaggaaatcctgacacacaaaggggttgccctgctggagctggttcagaaacatattcggacccgcgacggtttgatggcggtattgccgataatcgcgcagataattaactcgcaacacaatacggttgaccaggtgaggagtgtgatggaatatattgcctatcaggggtatattctggatgaatcccgctttttcagccaattgattgcactgtcaccggagtataaaacgatgctgacaacgattgcagaacaacttgagcaaaaaggtatcgaaaaaggtatcgaaaaaggtatcgaaaaaggtatcgaaaaaggtatcaaaaaaggtcgtgaagaaggtatcggcctgggtgttgaaaaagtcgcccgctcattattacaacagggggttgatctgaacattattatgcaatgtaccggattgacccgggaaaagatcgagtcattaaaacattaa

SEQ ID NO: 81517 - DNA, 468 bp, Citrobacter koseri
atgaccagcaaaaatacggcaacatctgaaaataaatactttaatctgcatgtgaacgggattgggtatttatcgaatatccgtcaggttaacggccctaaagggcagtttttaaccgcagtgattaatgcactcagtggaccggctgataaccctgtgtacgttcgttttgatacgaccgtcgtcggggagaatacggtctcactggtcagacggtgtatcaaagcggtggatgaggacaaaaaagtcctgaccgggtttacattaagtaatctggcctccgatattttcaccctgacaaaaggtgagcatgccggagaacagcgggtcagcctgaaagccagactgctgaatattgactggattaaaatcggtaaagaagtggtctataaagccgagaaaaaccagtcaaccccgccggggaatgagcagcctgcatccagagaatatgcagctgattctttttag

SEQ ID NO: 81518 - DNA, 201 bp, Citrobacter koseri
atggataacagaaacagactgaaaatctggttacagcaacatcatctgactcaaaaagacctcgctcaacttattgaaaagacaacacgcagaccttgttctgtcagagcggtaaaatcctggttatgttcaccggaaaaaaacagcgcccgcacctgcccggactgggtgattcagatactcaatcacatggatgaataa

SEQ ID NO: 81519 - DNA, 2055 bp, Citrobacter koseri
atgaaattatttctgtgcgaaaaaccgtctcaggccaaagatatcgcccgggtgatcggtgcacatcagcgcctggacaatttttttcagggaaatggtgttcaggtcgcctgggcaaggggtcatctgctggaacaggctgaaccggaagcttatggtgcgcagtttgccgcgccctggcgacaaagtgccttacccgttattcctgaacagtggaaaatggtggtaaaaaaagatgcggtttcgttgtttcggaccataaaacagttactcagtcaggcaacggaggtggtgattgccacggatgcagacagggaaggggaggtgattgcccgagaattactggaggcctgtcattaccggaaaaaagtgcagcgtttatggttgtctgcgctggatgaggcgagtatcaggcaggccttaaataacctgttacccggcgagaaaacggcctccttatattctgcgggattagggcgggccagagcggactggcttatcggcatgaacatgacacgtttatttactctcaaagcccgggaactgggttttggcgggatattgtcggtcggacgtgtccagacccccacactggccctgattgtccggcgggaaagagaaatcacgcactttgtttccaaaccgttctggcgggtaactgcgtctttacagcatcaggggattgtttttcaggctcactggcgacctgctgtgcaatattgtgatgatgagcatcgttgtattcatgttcaggcggctcaggcggtggaacaactgtgccggcaggcaggcaaggcgacggtatgtacggtaaatgaaacgaaaggaaaagcattgccgccgctgccgtttgatctcgggacacttcagcaggctacctcaaagcgttgggggtattccgctgataaagtgcttgaaatcgcgcaaagtctgtatgaaaaacataaagccaccacgtatccccggacggattgcgggtatctgccggtgtcgatgcgtgccgatatcccggttgttttaaatgccttgtcacaaagtgatccggccttacagaatgtgctggcgcaattgcagccggcgcgtatttcacgggtctggaatgatgcaaaaattaccgctcaccatgcgattattccgacccggcatacaccggatttgaatgccatgaatgaggctgaactgaatgtctacaaacttatccgtacccattatcttgcgcagtttttgccggatcaggaatgggatgcgacggaggtgtttttagatattggcggacaacaatttgttgccaaaggaaaagtcgaaagggtgaagggctggtctgtattatttgtgaaacatgaagacgatccgtcagtaaaggaagagacagacaacgggcaggaaaccggaacggaaacattgccgcctcttcatgagggaggcgtctgtgcgatagcagaggcaaaggttgtacaactgacaacctcaccgccgaaaccgtatacggatgggacattgattgcggccatgaaaaatgcgtcatcctttattaccgatccgacattaaaaaaagtcctgaaagagaatgcggggctgggaacagaagcgacccgggcagggatcattaccacgctggaaaacaggaaattgattgtcagacagaaaaaaacactccgggcgacagacaccggctgtcagctgattgatgccctgccggcagcctgtacggatccgggaatgacggcgttatgggaacaatcacttgagcaggtggctcagggacacctgtctctggatgtgtttatgcaaaagcaaatcagctggctgtctcatctcattaaaaaaggcggggaaatgccgctggcgctggatctgccaccgatgccatcctgcccggtgtgtcaggggaagatggtattacgggaaagcagtaaaggacgtttctggagttgtcagcattatccggattgtaaagggagtgtagcattaccgggaaagacgcagggcgtcacacaagtcgttagaaaaagaaagaaggcagcgaagaagagcattacagggctctttacctga

SEQ ID NO: 81520 - DNA, 537 bp, Citrobacter koseri
atgaaaaaaatttggttacttatctcatgtttttctttatggcttttaaccggatgctctgtacaggaaatcgcggagtggaatcagaaaatcagtaatttgggtcatcaggtcagcaataccatgaacggggggatgcaaaagcgggaacagcgggagtatgacgtggtcatccctgtggatattgacaccgctgcggcccgtctgcgccgctattatggttttgaggatgtgaatgccaaaattcgcgcgttacgtcagtcaggtaaagaaagtgatcaatgggtcgccacggccattgcagaagaaagccgtggctgggaatgggaagtgacgccgggaagttattataaaatgggggcggatatgggaaaacgtaacccgccggcacatatcgtcatcgaactggagaaaaatggttcggggactcacatgtatatcacttacagcgcttcgtacagtgataccctgactccggagtttgttcaggaaatatttaaaaccgcgaatgacgttgcaaccggaaaaagaaggtag

SEQ ID NO: 81521 - DNA, 705 bp, Citrobacter koseri
atggaacaaaataaacattctcaacagttacttcaggctggccctttaaagtcaacattaacactgaaactccataccagttatgcaatccggctatgggaagggcgggttgtacccaactctcagaatgacggtgacgaaaaaaagcgtaaatggatgatccccagtcttccgatgtttatttcccgggcgggtcatattactgatgatgcaaagaagggatacttatatgcagaaatgtggctgtatcagcttgagcaggcactggagcaagggactcagactattcagaaattactttcagaggttgaacaacaattagttcagttacctgcggcagcggttatttcggatatctcatcaacatcacctgttgatctggcgatattcagtaaatcccctgttggttataaatgtgtctggttgcttgttggtgttgatcaacttgccttgcgcgtattacaaggagagcattatggttttatttcacgtcagcaacgtgacagagtactgaaattagcgggttatcaggttcgtcatgtgaccgggatggcggtaaattaccggaaatatgagatcttccgtcataaccttgatttaaacagtgagacttatcaacaggcttcccgttatttaggtgaaattgatccggatatcatttcagggaaaaaacgcgcttcatttttacctgttttaaaaaaataa

SEQ ID NO: 81522 - DNA, 603 bp, Citrobacter koseri
atgaaggcgtattcaataaatcacccgtgtttccaccggaaacagtgctcaaaagttaaccggtgtttccactggaaacagtgctcaaaacttaaccagtgtttccactggaaacagtgcttaaaacttaaccggtgtttccactggaacagtgctcaaaacttaatcagtgtttccactggaaacagtgctcaaaacttaaccggtgtttccactggaaacagtgctcaaaccttaatcagtgtttccattggaaacagtgctcaaaacttaaccagtgtttccactggaaacagtgctcaaaacttaatcagtgtttccactggaaacagtgctcaaagcttaatcagtgtttccactggaaacagtgctcaaaccttaatcagtgtttccattggaaacagtgctcaaaacttaaccagtgtttccactggaaacagtgctcaaaacttaaccggtgtttccactggaaacagtgctcaaaacttaaccagtgtttccactggaaacagtgctcaaaacttaatcagtgtttccactggaaacagtgctcaaagcttaatcagtgtttccactggaaacagtgctcaaaagttaacctaa

SEQ ID NO: 81523 - DNA, 1296 bp, Citrobacter koseri
atgcaatttcctccggacagtattattcagttttcattagaaaaaatgcggcagcaactgcatcaccggcaacgcagccagcccggcacggcactgcgcagtggattgatttacgccggcaatgttcatgatgccatcccccggcaattattgctggaatcccgactttccccggttgataaactgacctggatgatgatccggcttcatgcacagcaacatgagggggccgtatttccgacctatgatgacttacaactccagttagccacgccccacagcgataaggcctcgcgggaaacggtcagcagggcactgttaatgctgaggctgacgggctggctcagtttatgccaccgggtcagggataaacgggggcgtatccggggaaatatttatatgttacatgatgagccggtgaatgcctttgatgcagagacattagatccgcgctggatggatgtactggaaaaaagttgttatcacaaaaataagagtgtgcggtgcgtggcccgcgctgtgctgactgtcctgaaaactgagccgtcaatgcgacatcagcataccagaatgcaactcattgagcagcgacttgaacgtcttcagacaccggaagcgctggcagacaggcaacgccggatactcaatgggcagacggcacaacttcatccgggtaaacataaaaaaaatcgaactcagtgtaaaacaccgggttcgaaaatcgaactcagggaaaaaaatgatgaaaaaacgccgggtgcgaaaatcgaactgagtacacaaacccagtctgattcaggggttcgaaaatcgaactgttacgtacgtaatacttttacacagagtgtaaaaaatacgtacgtagatcaggaagagcaatatttatcgggtactcaggtgcaggagttgaatcaacggattgatgagaatgaccggcagatgctggaaaaacaattacaggtgttgccggaagaagccgcaatatcgattgtgcagcaactgacacagggggtgaggacagggagtgtgcgtaatccggtggggtatgccttgcagctattaaaggcagcccgtgaagggcggtatcaccccgtttccccagcagaaacggagatgaaaagtgcgcctttacagaaaatgtcaggtactccggatgtatcacaacacacgcaaaccaaaccggagagaacggagagaagtaaggcgtctcagggggcgatggttgctcctgatattgcacgtcagtaccttcagcgttttcgtcgtactctcatagggatatccaatgagcaatga

SEQ ID NO: 81524 - DNA, 285 bp, Citrobacter koseri
atgtcggataaccgggttatcagtaacaatcaaccggcccggatatttccggaatgtgtcacacctgttccggcgcatattcagcggaaggcaaacgggttattgctgcgttatttttcgggagaacgactttgtaaaaaagtgaaatgcggcggaaaaaagggcggtgtttacccggtattgaaaattgatattggcgcattctggcgtctgctcagtacggaccaggggcaaagctggaagctgatgagccatgaacgttataacaagatgattagccggtaa

SEQ ID NO: 81525 - DNA, 591 bp, Citrobacter koseri
atggcgactcaattagcacaggcagggaatcatctgctgacagaactggtgatggaaataaaaagcggaaatctgcggcgttgtgaggcgctgggactgacggacaatgagatccggttactgaacagtttaaccattgaagatctgcattatctttctcaaagtccggtctccattattacctgccagatccaccgggagaatttgcgtttattgctgacccgggcgaaagacgtccattgtcagaatcagatgattgaacgctgtctgagactgggagcctccattgatttattgaatcagtattttggcatgacctcactggaggtgtcagcccgccggcggttgtccgggatccggggaaatgccggccgttcacagcggctgtcagatgtgcagcaaacggaattatggtatcgctggaaagaggagggtatgccggagccggatgatccggattgtctccagatcatggtgtcctgtgctgaaaaaatggatgtttcactgaccacggtgtggaatacggttcaggaatggcaccgggacggtgttctgaatgccgcagacaggagaaacggtcatgtcggataa

SEQ ID NO: 81526 - DNA, 1650 bp, Citrobacter koseri
atgaaaaccgatttacagcataaactcagtcaggcgcttctcagaggaaatcctgtcagttccccgttatccggcaatgctcacgtcaatccggtgtctgaaatgccgatgatattaacacttgagcaacttcagccaaatccggataaccctcgtcagggcagaaatccgcgttatgaggaaatcaagagttccattcgggcacgtggactggacagtgtcccaaaagtcaccaaagcaccgggaagtgagatttatatcttcagtgacggcggaaatacgcgctatcagatcctctctgagttatggcaggagacacaggatgagcgttttttccgtatccatgtgttatttaaaccctggccggggcgtttgcagtgtttgattggccatctggcggagaatgaagtcagaggggagttaacgtttctggaaaaagcacaagggatttgtgtggcgcgttctctgtatgaggaaacgctggggaaaaaattatcactccgggcattcgcccagcgcatgacggcggacggattacccgtcagcatatcgcacatcagcaagatggaagatactgtttctgttttattaccttatatgccccgtttactggaaaacgggctgggaagaccccaaattgagcaattattatccgtgcgctcgacattaaaacgggtggcggattcgttactttttcagcatgacgatccggacccggtccatgactttctggggtgttttgaaagaacatgcacagaaatagataaccatgatgtttttgattatgacgtgtttctggatgaactgattggtcgtcttctgagggagtgttctgttgatggtgtggattatgaacgctgggtatttgaattgaaggtcaataaaggccggcgcagtacaaaaccggaatggcctgtaccggtggacagtgaggatgaaacaacaacggcccattcagaaagcggacataccggtattacttccggtttttcggcggaggatgtgttaacggagccactgtcttctgattcaggtcaggagacttcggtatcccctgttgttgaaaagaaaaaatcccgtccggttgtggagatccagacggatttatacgggggtgcaccggtactgagcggggataccgatgaagcggatattgatcctgacatcgtcggcgtcatgtctgtcccggataacgcagagcgtaccacaccggcagaggtaccggtcgctggttattctgcggctacactgacgtgtcaggatctctggccggtggcctcacatctggatgatattgaacatcttcagacgcagatttatcgtactttgtttgaattagggaatgaactggatatctcccccgaatttatggccgcctccggggtgcattctccgggatttaccatcttgtcagagacttcggcgctgggacgtgtgatgactgttttctcagcggaaaacggcgctcatgatggtattccgggcgctctcagaaccctgctgaccggcggaaatcaatccgggatgccaccggtattgaatgatgtccagtttatgacatggatgaagctgatgtacttgttgcgttgtctgtatgccagacaaagagatgttgatccggatgtgaatgatgaagaggaatgggaataa

SEQ ID NO: 81527 - DNA, 1353 bp, Citrobacter koseri
atgcataaaaagtcttcttctgctgtattacctgaaactctgtactcaccggaggcggagcagagcgtgctgggcgggctgatgctggataatgaccgctgggatgaagtggcgccgttattacaggcggaggatttttgttccagagcgcatcaggaaatctggaagaaaatggccgccctgtgtcagataaacagcccgatagatttaatcaccctcagtgatgtactggaaaaagacggcgtgcttgagcgggtggggggctttgcttatctggcggaattatccaaaaacacccccagtgcggccaatattgtccgctatgcggagattgtcgtggatcgcagccgtgcccgtggtctgatgatgctcgggaatctgctggccacccagagtgtggcggctcaggcaaatataccggcgttatgtgagcaggctgaacagcggctgtttcagctgtcagaaaaagggctgcccgcttattccccgtcgttgctcgatattttaaataatgttgttcagcatctggaggaggcattaagtgcaaaagggataaccggtacgccaacggggttcagtgagctggatgaaaaaacctgtggtttgcaggcaggcgatttggtgttactgggcgcacggccatcgatggggaaaacggcactggcgctgaccgttgcacagaatgccctgcgtctggcagaaaaaccggtcttttttttcagtctggaaatgccggcggaacaaatcatgcagcgcttactcagtgatttgggcaatgtctcactgacggctatccgcagtgcgtctctggaagaaaatgactgggagtgtcttggtggtgccatgtcacagattgccgaatggggggagcgtctggtgattgatgataccagtaatatgacaccttccctgttacgtgcccgggcacggcgttaccgccgtaaagtgggtacgccgggactgattattgtggattaccttcaactgatgcgcagtcctgaacaggaaaaccggacgcaggaaatcagtgaaatttcccgtagtctgaaagcactggcgaaagaactcgggtgtccggtggtggccctttcccagctaaaccggcaactggagcaacgtgcagataagcgcccgacaaacggggatttacgggattccggctcgctggaacaggatgcggatttgattttatttttgtaccgcgatgaggtgtatcacgaacactcaccggacaaaggtgtggcagaaattatcatcggtaagcaacggcagggtccactagggacggtgaaagtgcagtttaacgggacgtatacacgtttcagtgatttttctcagggatattatttttaa

SEQ ID NO: 81528 - DNA, 432 bp, Citrobacter koseri; identical to SEQ ID NO: 14471

SEQ ID NO: 81529 - DNA, 873 bp, Citrobacter koseri; identical to SEQ ID NO: 14470

SEQ ID NO: 81530 - DNA, 375 bp, Citrobacter koseri
  misc_feature (310)..(319): n is a, c, g, or t
atgaaaaataataatggactagagaaacgcaggtttatgacacaaaatgaaatcaatttaattcttaatgctgttagtacaggaacctatgcagtgcgtaatcgctgtctggttttgctgtgttttattcatgggttaagggcaagcgaaatatgtcgtctgcgtatctcagatattgaccttaaggataaatgtatacatatttaccgattaaaaaaaggattctcaactacccatcccttactggaagaggaaattcgttcgataaagtcctggctgaaaattcgccttacaagccaacattcagaannnnnnnnnngttgtttttatcacgtaaaggcaatcccctttccagacagcaattttatcagataa

SEQ ID NO: 81531 - DNA, 657 bp, Citrobacter koseri
atgaaagacgacaaagttgtacatcttggtagaaagaaaaaagcatttgaggacgagttgttagaaattgctcagcttctttcgcagaacaatgaggatgcagctgatgttgatggggttaatcagacaatcccatcaatcaacgtcaacggttcagccaatgtgattggcaacggaaacaccgtaaataatgtaataacctttacaagatccattcagaaaaaaattcaggtcaaaacggcagatggagttattgatgcgacacaaaaatttcagataaaaagccttgtagatgaatgggttgagaattataacgctataaagaagtcaagactcacacaccagaaagcatggtcacttctaaatcgccacatgaaagtaaatagctatcatgaaatcaaagacataaaccatgctaaagcaataaaattccttcgctcaagactgggcgaactgcgcaacatgccatccgctccgaaaaaagttcaagactggagagcacaaacaattaagtcaatccaagccaggtgctctgaaaaagggtggcagacatggcgtaaactttatatgcaacagaaatttgaaaaaaattcaatgactgaacttaccgatgtagagctaaaacaactgtaccaaaccgtatggaataagaggtga

SEQ ID NO: 81532 - DNA, 213 bp, Citrobacter koseri
atgaaatgcgaaaaaagagaaaacatgcacagagcggatatcgtcgcggctttgcgcaaaagaaacatgtctctctctagtttggggcgggagcacaacctatcgccttacacattaaaaaatgccctagataaaccatacccaaaagctgaaaaaattattgctgaagcaatcggtatgactcctgaagatatttggcctgggagatattga

SEQ ID NO: 81533 - DNA, 2055 bp, Citrobacter koseri
atgtcttcatttaatggttgggttactgcaaaagagataactgagttacccggtttttcttgtgctgttagcaccattttgcgcaaagcaaaaaatgaacagtggacatgcagaaaaagagaaggcgtaaaaggtatcgcctatgagtttctcatcgaaagccttcctaatgatatgcagtcagccatccgtgaaaaagtgtatcaggcagtgctggcctctaaacctggcgaacatgccctccgtgcagttgttgcacgtaaggccaccgcagaccgtcaggatatagccctgctgcgccagtgcccggtcattcttgagcgcaaggtcggcgaactgaccattaaacaaaagcagatcgccgatgcccgcgcggcgctggcgatggaagttgaacgtctgcggaatgccggttcatcacgcaccgctgccgtcaaatttatcgtgaaggctgcacgtaccgattcactgccggagcacctgaaagatgctgcggttatcgccaacgcccgcaagggctcaacccgtaaaggttttggtgagcgcagccttcaggagtgggtatcaatttacgaagcgtcccggccaggtattgagcgcctgacgctgcttgctcctggacaactgaaagccaggacgcctgaaaagatccagtggcttccggactttctggcccactggcgctccagaaaggggccgacgctcagggatgcttacagtgactttaaagctgaatgggaaaacacatatgccgaccagccggcaattgcagccgcctgcccgtcatatgatgccgttcgccgcgccatggcaaaactgccaaagcgcgagcgtgtgcgcggtcgcgtcagtggttctgcggcgctggcctatgaatgcttccagaagcgtgactggtcacagatgcccgttaacggctgctggattgcggatggtaaatcactggatatgaaagtggcacatccggatcatgggcgtccgttcactccggaactgaccctgattattgatggccgtacccgcttcattgtgggctggagtctggcgctttccgaaagcgttattgccgtcgctgatgcctaccgctacgcgatgaagcatttcggaaaacccctgtttgtttattccgataacggcggtggtgagaccaacaaaacgctggatgctgacgttaccgggatattcagccgtctgggtattgaacacccgaccagtattcctggccgcccgcagtctcgcgggatcattgaacggctgaacaaaggcgtacctcgccgggtggccatgcgatttgacacctataacggcggcagcgcagaccgggaacatgtgcgcattaccgagagagcgatccagtctgctgtcaagtctcaggaaaacgggcgtgaactgacaccagtgcagcgtgcggcactgcgtaaactgccctcatggcaacagttgctggatgccatcgccgaagaagttgatatctacaacaacacccacgagcaccgtgaactgccaaaagtaagaggcaaacacatgactccggcagcataccgccgtgccactctggaggctgaaggcgatgagacggaatacctgacggatgtcgagctgcgtgaggcattcatgcctgagatggtacgtacagcgcagcgcgggtatttacggctgtttaataacgattatttcgctgaagacctgattcaggttgatggtgaagaagttcgcgtggcgtttgatatccatgacccttcaacagtcatcgttcgccgcatggatggctcttatgtctgtactgccatctggaatggtaataaacgcgcagctattcctgtgagcgcaatgaatgtggccgttgaaaaacgtcgccagcgccgcctgaaccgtattgaggacaaacgccaggagatcgaagccgaaggccgctccgttctgccggggcagtccttcgacgatctggggagttttattccggcggaatacaccgtcgagaaagaagaagagccgtatttcttccttgaaactgaccgcgaagaatatctgaagaaagccggtaaccaccggtaa

SEQ ID NO: 81534 - DNA, 894 bp, Citrobacter koseri
atgaatattaagcaggaactgacagaactgatgacccgccgtggttataaccagacgcaggttgcccgcgccattggcaaaagccctgccgttattaaccagtaccttcaggggaaatacaccggtgatattcccagtattgatgaattaattaccggctttatttcccgcgaaaacgaaaaggaaaaatcccgccgtattacggccagctatattccgaccctgacttcccgcaagggcatggaggttattcgcctggcgcatctggatggcgagatcaacgtgatttatggcgatgccgggctgggtaaaaccatgatgctgcgtgaatatgcggcaacccaccgcgaggccatcctgattgaggctgaccccggttatacggcccgtaccgtactggaagagctttgctcacgcctgggcctgaacaagcgcggcaacatgcacgaactgagcgaagcctgcatctctgcgctgtcagactccggccgtctgctgatggtcgatgaagcagaaaacctgccgtaccgggcactggaaaccctgcgtcgtatccatgacaaggcaggtattggcgtcatcctggcgggtatgccgcgcctgattatcaacctcaagggaaagcgcggggagtacaagcagctctacagccgtgttggtcttgcgcttaatctcggtgatgccctgccggaagaagatatcaacgctatcgctgtcagcatgttgccggatgctgagaatccggacgtcagcacggcgctgtttaaggccagtcacggcaacgcccgccgcctcttcaaactggtacgcggcgtcagccgtcacagcagtatcagtggccatgcagtcagcgccggcgctgtccgtaaatttgcagaaatgctgattaactga

SEQ ID NO: 81535 - DNA, 291 bp, Citrobacter koseri
atggttcatgcaggtaaagacaagactaatgccagcgtaatttcggcactcgcgcgggctgaggcgctgattatgtacctgtcggcacagggtgtcagcgtgcagggcgtatccctgcgccacgcacagccggtgatccgcattgcacgctgcgcctggtgcgaaaccatcaaaaaacagggcaaagcccgtttcgaccaccacggccatgaccgtttcggccggttccgtcagggggtgtacaccgacgaaaacggctgccgtgtggtctggtcagaatcaatccactag

SEQ ID NO: 81536 - DNA, 240 bp, Citrobacter koseri
atgtctctcaaacatgaatatcaggcgtttatcgccagagtaagacaggacggaggcaggttacttacgtttccatgcccgtgctgcggggaaaaagtggagaccctggctgcacctgatggcgcggtctgggacaccctggcgacgtgtcctcattgtgaggggacgtttattaaaatcgtcaccgccacacaggtgacaacagcaataccggacggagaagccatatggccagaatag

SEQ ID NO: 81537 - DNA, 192 bp, Citrobacter koseri
atggccagaatagttatcacctttacggatatgggacgcgggcttgatgttcagtgccgcgtcgaaccagaggaaaaagatacagagcgcgttcagatggtcgcggcctctgtgggttatggccttgctggccacgtaaaccagaaagttattgatgccatcaaaaaaaaggggaaatcctatgtcaactga

SEQ ID NO: 81538 - DNA, 651 bp, Citrobacter koseri
atgtcaactgaaaacaccgtaaagcagtacaccacacagcaggctccgcagggttactggattgatgcccgtggcgttctgacaccggatagtctgattaaagatattgatcgtgaccgcgatcaactggtcggtgaactggttgaacaggccatcgtggtgtcctccgccctgagagaactgaaatcccgtgcctttgctgatatccaggcgtttattgacctttcggccgaaaaatatggagcggccaaaggcggcaaaaaaggcaacgtcacgctctacagctttgacgggcgtttcaaaatccagcgtgcgatgcaggatcgtattgccctggacgaacgtatccagaccgcgaaggcgctgattgatgcctgcctggctgactggacagaaggtgcgcgtccggaacttaaggcgctgattaacgaggcctttgatacggacaaagaaggcaatatcaataccggccgtgttctggccttgcgccgctacgacattgaggatgaacgctggcagcaggcgatgctggctatcagcgaagccgtacaggttgtcggaagcaagtcctatatccgcgtctatgagcgtgtcggcgacagtgatgaatatcgtccgattgccctcgatatcgctggcgtgggggtgtga

SEQ ID NO: 81539 - DNA, 234 bp, Citrobacter koseri
atgcgcgtcctgtctgaccgtgccagaaacagcaagcctgccagcctcttcatgtcccatgctgaccgtgccgttatcgccgagcagaacggcgagttcggaaaagcctctgcatcctgggctgctgcgttagtggtggcgcagcgtccggttaatgctgaatgggcggggtcacggatggagttctgcaacaacgccgcctttcgtggctggggagttcccggtgaaggctaa

SEQ ID NO: 81540 - DNA, 192 bp, Citrobacter koseri
gtgaaggctaaagagtttaaccagtgctggcccgttggcagtaccttcatctaccagctgtcacccgtgcttcgcggtggtcggatggtcagaacggtggatattgcccgcgatattaaagacgctaccgttgttgaaattaatcaggagccttatttcgccaatattaaatcactgaaaccgactcactga

SEQ ID NO: 81541 - DNA, 447 bp, Citrobacter koseri
atgtctgaatatctgaaagaaatgagtgccgcgcagtttaatgcggcctttcccgtgggctcttcttttgcttatcactcaattaaaggtaagccagacactgcccgttacaccatgacgcgctctgaagcgtgggaactcggccacggcgcaacggtggtgatggttaatggtgtcagcggaggcgtggatattacgcatcttattccggtggcggtcgataaaggtgatgaccatgcagacgtattgccggcgcttattgcatggcatgaggaaagggttgacgagttacaactgattgttaaacacaaagactgcgatctggttatttcacctgaattgaccatcaaagccggaacgaaggaacacaaaggtgtccgtatgggcgttattctggcgctggctttactcggcaaacttccgttaacggcaaaggcggagggctga

SEQ ID NO: 81542 - DNA, 723 bp, Citrobacter koseri
atggaaagcaataaagaaaaacaccttcagcgtattaaaaagctcctggcaatggcccgtaataattccagccctgaagaggcagcgctggccatgcgtcgtgcgcagcgcctgatggagacgcacaggctgactgagtctgatgctgagttcaccgatatcagcgaagcctcaacgcagaaagtcccgacccatgccgaaaagatgccggaatacatggcgtttctggccgaaatgattgcgcgggtctttggtgtccgtttctacacctcccatggacgccacaactggggtgaggcggcaaaacgtaccattacctattacggcccggacgaacgcccgcaggttgcggcgtactcctttgaggtgctcggcaagcaactggtgaaggcccgccgtgaatatctggccacactgcgtaaaaacatcaaacccgcgaccaaaattgcccgcgctgacacgttctgttctgcctgggtcaacggagcttatgccgtcgtcagtgacttcgttgtgaccggagatgaggcggcactgatggagtcctaccgtagcacccggctgagtcagggcatgaaaacccttgagccgcgtaagcccggcaaggccagaggtacagatgacgcggccgcgcagggctggcacgccgggcgtaacgcgcgacttcatcacggtgtaaccggcacagagacccgccctgcacttatcggaggcaaatcatga

SEQ ID NO: 81543 - DNA, 375 bp, Citrobacter koseri
atgacggagcagcagcgtaagcccgttgttttcatcgccgggccgatgaccggttatcacaactataaccgggatgagttcaacgccgaggcgcggatgctggaagaccggggattcaccgtccttaatccggcaatcctgccggacggtttgctgcattcgcaatatctggccatcaccctggccatgctggagacagccgatgcgattttcatgctggacggatgggaagaaagtgatggtgcaaatatggaatttaaacgcgcacgggaactgggactgatgtttatgtaccagtcctgggcaaacgctaaacgttccattttgttcaaccgtgaattacgcatcgaacctgttgaggtgaaccatgaataa

SEQ ID NO: 81544 - DNA, 216 bp, Citrobacter koseri
atgaataacgtaacaggttgccggtttcaggataacggctctcgccgtatctggttcttccgcgataacagccaggccgttgagaacatgaccctgccgcttaagctgcgcttcaaattctgggatgccagcaatcgcccggtaagagcgaaagaccagcagtctgagatgaaaaaggccattgagcagtttaaaaaactcaggggaataaagtga

SEQ ID NO: 81545 - DNA, 189 bp, Citrobacter koseri
atggataccggattaattctgatgctgattattttctatttgcatctggggtggtgctgggtgagcgttcttcaacgtgttgaacccgacattatcacttcacgttttaagtattcccttgttctggtgctgtggcctttgagcttgattctctcagacgccaatatggaggatgacgacgatgaataa

SEQ ID NO: 81546 - DNA, 612 bp, Citrobacter koseri
atgaataagaatcttaccgacgagcaattatcagaaataacatccggagttgttgacggtatgcccccgacaacgcaggaaatagcaatggcgcgggaattacaggaacgccgtgctgctgacaaaaattttttcatgtatggcatagctgaacctgacggcagcgcctatatggaggaggtttgtgtatcgaatgatatcggcatacttgaggtcatagccaacgagcttaatctcactgaaggcactgatggttatcgagtcgttgctcttcatgctgcgttaccgttgatcctcactgagcgccaggaacttgcggaataccggaatacctcgcaggccgctcgtgatatttgggctgaacgtcagcgacagcagtcagttaaggggttcagtacccggcaggacgatacttatactggctgtgaactggctgcggcagccatcagttatatcgagccaatggaggccgctgattactggcctgccgactggcatgatggcagcttcagaccatcagactatcgtcgcaacatggtgaaagcagcagcccttcttattgccgaaattgagcgtattgaccgtgctaccagaatcagcaagggggaatga

SEQ ID NO: 81547 - DNA, 270 bp, Citrobacter koseri
atggctaaacgagcaaaaattgaaagtatgtacctggttatatcatcttccgggtacgtgcatggtgctggattagaccccagcgatgcctggaaggatgctgtaaacaataacaacaattatagcgatataaagcacatggctatgtctggcaattatggccttgttgaagcctgtgccagtgcaacatatgacccggaagcgctaaagaatagcttcgacggctggaaaaagattgcagacgaattttatgggaggactaacccatga

SEQ ID NO: 81548 - DNA, 375 bp, Citrobacter koseri
atgaccgtattaaccagtcgcgaacgtgcccggctgcgcaaacaacgttcccgtgcgaggcaggccagtcagacaggtatgaaccgactggagatcaactttaatgatcaggagctggccatactggacagtggccgcgaacgccgtaaccccggccgcacaccatacagccgtaacgagtatctggcgatgctgatcctgggagacagtaagcggctgagcgcacaggaaaaagcgattcctgcctgtggtaaatgcggttctcgtccgccagcacattgtggcggcgcgttccgtggtgagagcaactgctggctgaccatcgatgccctgatgcttaatctgggtgtgactggtcacggtgataatgattaa

SEQ ID NO: 81549 - DNA, 429 bp, Citrobacter koseri
atgattaacggggtgaccatgacagttaaccgtaatgcccttatcggtgccatcaaggctggtcagaactggcttcagtgggatgacgtgacctaccgcagcgtactcagacgcctgacgggtaaggtctccgccacgaaatgttcgctgccggagcttcaggttatccgggagcacatgcaccagcagggatttccccgcacccgttcgcgtaagcatggacgtcgcccgtcggttccatgccgtcgcaaagccgtgctggggaaaattgaggcactgctggccgatgccgggcgtccgtggaattacgcggaggggctggcatcccatatgttccggcagcatgtcattgaatggctgaccgatgagcaactgaccaaattaatgcaggcgcttattattgatgcaaaacgacgggagggaaaataa

SEQ ID NO: 81550 - DNA, 453 bp, Citrobacter koseri
atgaatcagtaccattcggacgacctggagcgggtgaaagccctgcttccggaaacggttttgcatatagcggaactgattggtttcccggcgactgctgcgttgttgaaagcgtttggtggctccaccttcccgataggtaagggcttgcgggcgctgggtgtgcagcgcgttcgcctgctgcatgaggctgtcggggaggaaaacgcgctgatcctgatgaagaacctgggtggtgagcgggtttatcttccccgctgcgatgcggcattaaggaaactgcgcaatatggcgtttcttcaggagtttgacgcgttgcgaaatcaggggacgtcatccctgagagccatgacggaactttgcccgaaatacgggttcagtgaccgctttgcctggaaacttgtttccaggcaaaaagataaagtatctacacagcaaagggctctcttttaa

SEQ ID NO: 81551 - DNA, 495 bp, Citrobacter koseri
atgaaatatattccattaatttttattttaattagtagttgcgcgacagctaagatggtgtccaatgcaaaagaagttgagttatacaaaaagcaacttgatgagactcaaagaattattaccgaaaccaatgagactctgagggtttcaaatgccgtatataaaatgtatgaaaggcttggctatataacgcctgaagttgctactgtaagccggcatttcatgagccttcaggaagatgctaaaaacttgtacggtgaaaacctggtgcttactcccacaccatttaactcatgtgcaactgtccctatggctgcatactcggtgtggatggcaaaggtgagttctgttaaaacgaacaagacagattcgataaaacctcttggtgatgcatatgtcaaacaggcgacagaatgcctgaatgcaataaacaatccgcctccggcagaggttgaggaaagcgaagatcttgagattattgatgtatccccataa

SEQ ID NO: 81552 - DNA, 651 bp, Citrobacter koseri
atgtttttaacactccagcaatttcagcgcgcagcaaacctctccgccgtactggcacagcgctggcacgaccccgtcatggcggccagcgaagagttccggataaacacaccggcgcgtctttctgcctttatcgcccaggtcgggcatgaaagtcagggcttcagccgcctgagcgaaagcctttactacaccgatgcagagcgtgtggcgcgtatcttccgcagtgactttgatctcaacaaaaaccgccggatcgacccgtcagaaatcgagttcgcccgtcgttacctccggaacccggagaagatggccaactacgtgtatgcgaaccagggcgggaacggtaatgaagcctccggcgatggatggcgattccggggacgcggcctcatccagatcagcctgcgcgacaattacctcagatgtggccgggtgctgggactcgatttgattgcccgccctgatttgctgctggagtacccccatgcggcccgcagcgcggcctggtatttcagtgctaacggctgcaacgaactggccgacaaaggcaactttctggccgtcacccgcagaataaatccccccgcgcagggacaggaagaccgcgaatcccgttaccgcgtggcaaaggcggtgctatgccagtga

SEQ ID NO: 81553 - DNA, 267 bp, Citrobacter koseri
atgccagtgaaatccctgcgagaacttatcagcaacccctcatcagggcggctgtccacctccgacacgattgttctcggcgcgttcctggtcagctcgttcgtgctggtctgggccactgtcacgcgtgaagaggtgccgggtgagctgtttctgacctatctcggcgcgtgggtggcccagtgccaggcgtcaaaacatatgtccatcagacgagaccgggaggtaaaccgtgttgagcgcagcgctgaaaatcctgaaggataa

SEQ ID NO: 81554 - DNA, 645 bp, Citrobacter koseri
gtgttgagcgcagcgctgaaaatcctgaaggataactggcgttcgttgctggttgtcttcgtcctggtgggtgccggcgtctggttcgggatgtctgtcacccgccatgagctggatgagcaggcactggccttcagccaggaaaggcagcagctcaccgacgactttaacgccagagaaagactgtggaatgcggagcgtcttgcgacggccggtcagtatgccagtgacctgaaagccgcgctggcggcgcagcagtcatggaaacaaaaagccgacgaactgaccgttcgcctgacgcagcagaaaaccgcccatgagcgtgagcttcaggccctgaaggagaaactgaaagatgcacttaaaagcgatggccctgcttataccggtattggccctggcgggttgcagctctggcgcgaagccctcggctacaacggcagcgccggcgtcgcatctggtgatggtctgcgacagaccgccggcagcgctgctggtgatacctcccatgccgcccgccccggaggcggactctccccggccggaatagtgatgttcagcggggagtacgggaaatggtgcctgacgttgcgcgatcaattacaggccgtcagtgactactacaacaacaggaaaaaggagtga

SEQ ID NO: 81555 - DNA, 246 bp, Citrobacter koseri
gtgctgacactggacacagcgtttcagatagcgctgggactggtcgcgctgtttggcggcattgtgatacgccggctgcattcagacattcatgacctggaaaaggccgttgaacggatacgtgatgagtaccagcgccgcgaggatgcccggaacaatcacaatgccattatggacacgatgcgcgagctgcgtgcggcgattgagcgcatcgacaacaaactcgacaggaaggcagataaatga

SEQ ID NO: 81556 - DNA, 285 bp, Citrobacter koseri
atgaaagccagacagaaacgccgtaaccgcaggacgcttatcagccatgacgagcgcgaaaccctgaaccgcatcgcgcaacagcttgaccgccttcagacccccgtcagccctgacattctgggcggtatcaatgacaagttgagtcgtatcgagctgcgcctggaagatatcagcgatgatgcatcccgtcgtggcgcgatggctggcgcgggtgccggagcggtgaccggtggtcttatcacgctggcgatcatgtttatccgcgcaaaactggagctctga

SEQ ID NO: 81557 - DNA, 501 bp, Citrobacter koseri
atggcgcatccgcaggaaacacgggaaaggctgcgacgttcatacatctttggccagatgtcgctggagattgcgtccgcacaggccggcgtggcattcgcgaccgcgcggcgctggaagaaggaagcacaggatgcgggggatgactgggacaagctgcgtgccgcgcacatcatggcgggcggcgggctggaagatatcggccgcgccatcctgaccgggctgatgacgcagtaccagaccacgcttgaagcactgaccacgaatgccgacctgtctcctgataaacgggtcgagctgctggcaagcctggctgatgcctttaacaaggccgtggccgccaacaagaaaatcctgccggaagtcagccagcttgccgtggcgctggatgtgatccagcggctgagtacgtttgtggccgaaaactacccgcagcatctggccgcgttcgtggagattctggagccgttcgggcaggaaatggagaagcactatggctga

SEQ ID NO: 81558 - DNA, 198 bp, Citrobacter koseri
atggctgataaattgatccgcgttaacgaaaaagtcagtgtcatggccagttccgtggcctctgtatacatcgcgtccggctactgctttgtctcaaccgtcgatggtgaacaccatgaggtttcattcatgggggattgttaccgtacaaaagacagctttgaaaaggcagttaacgatgccttaagcgggggttaa

SEQ ID NO: 81559 - DNA, 1653 bp, Citrobacter koseri
gtggccggaagtaacaaactctccagaaaggagttcctcgccgggctggccgaactctccgccagcctgcgccgtaccattgaagcggaagatgtcggttttgatccgtcgcctgctgccatcgccggacgccgggaggccgttgctgatccggtgaccggttttgagtatttcacggagcattatttcccgcattacgtgcgtcatacggcgaaaagcgagctgcataaatacctgtacacccgtctgccggaaatcgtgcactcgacgaaaagcgagaatgatgcgattgccgccccgcgtggcgaggcaaaatcaaccatcgtcacccagctgtttacgctctggaatatcgttcaggcgttcaagcactacccggtcatcattatggactcgattgaccaggcctatccgatgcttgaggccatcaaggccgagctccagtttaacccgcgtctgctgatggatttcccggaggcgaccggcgcggggcgcgtctggcaggccgggactatcctgacccgcaacgatatcaaggtacaggtggcaggcagcggcaaaaaactccgtggcctgcgccacggcccgtaccgtcctgacctcgcgatactggatgatatcgagaacgatgagcaggtacgtaacccggatcaacgcgacaagctggacagctggctgaagaaaacggtgctgccgctgggcggtgccggcgcaaagtttgacgtggtgtacatcggtacgatcctgcactacgactccgtgttgtcccgcaccctgaaaaatccgctgtggaaacgggcccgctttaaggcgcttatcagctggccgcacaacatggaactctgggaaaagtgggaggagatcctgcgcaacaatgatgatgacggagagctcctcgcacaggcgttctatgaccagcaccgtgacgaaatggatgacggcgcggtggtgtcctgggccgcccgtccgttgtacacccttatgcttatccgtgcccgtgacggccacagcacctttgacgccgagtaccagaatgacccggtcaatggtgaggatgcgccgttcgccggctgtatcaatttctgggtgaaccgtctggctgagtggcgcttctacggcgcgtgcgacccaagcctgggaaaagccggcaacagccgcgacccgtccgcattgctggtcggcggtttcaaccgttttaccggcatactcgatgttgtggaagccagtatccgcaagcgcgtacccgaccggatcatctccgatgtgattgaccttcagcgggaataccgctgtctggtctgggccgtggagtccgtccagttccaggagttcttccgtaccgaactggtgaaacgctcggccattgccggtattccggtgccggcccgtggcgtcacgccggcggcggacaagctgctgcgtatcgagtcgcttcagccgcacatggctaacggcctgatacgcctgcacgcgtcccagaccacgctgacagaccagctccggcactttccgaaggccgaccatgatgacggcccggatgcgctgcacatgctctggatgctggcggtgtccggagccggtcactttgattttaaacccgttccccgtcgcggagaccacggggatcgttttggtgtttcaggaggatggtaa

SEQ ID NO: 81560 - DNA, 1581 bp, Citrobacter koseri
atggttcagatccttgatcagtatggtcgcccgctgaagcgtgaagcgctgaaaaaaccgcagacagcgcaactggtgcaacttaaccgggactggtcgacgcatccctccagggggatcactcttgcgcggctaccgcgcattctggaagcggccgagcgtggcgatttatccgcccaggcagacctgtttgaggatatggtggagcgtgacgggcatattttttccgagatggccaagcgcaaaaatgcattgctgacgcttgactggagtattgagccaccgccgaacgccagagcggaagagaagaaagtcgcggaaatggtggcctcatggtttgccgatctccaggagatggaagacattacccttaatgcggcggaagccatcggccacggtttttccgcccaggaaattgaaaagtgggatcgtgccgacgggatatggctgccggagaaaatcaagctccgcccgcatcgctggttctgcaccaccccggaggccggcgatgacattcgtctgaacaacggctcaatggacggtgaagaactctggccgtttggctggctggtacacacccacaatgcgaaatccggttacatcgcgcagtccgggctgtaccgcgtactggtctggccgtacctgttcaagaacttcagcgtgcgtgacctggccgagttcctggagatttacggactgcccgcccgtatcgggacatacgtatccggtgccacgcaggaagagcaggacaggctgtttgccgcgctggtgtcgctcggccataacgcgtcggggatcgtacctgaaggcacgaagattgagttcaaggaagcggccaaaggccagtcagagccgttcatgtcaatgattgactgggctgagcggactgaatccaaaattatcctgggcgggacactgacgtcacaggcggacggcaagagctcaacgaacgcactcggtaacgtccacaacgaagtccgtcacgatcttctgacgtccgatgcgcgacaactggaggggttctatcgcggcttcatccggatgctgctggccatcaacggccatgacgtccgcccgcgccgtcagccgcgtctggtttttgatacccgtgaactggaaaacatcaaaagttttgcggaaggcgtgtcgggactggtcaccgccgggatgaagaccattccggtatcgtgggttcacaagaaggtcggcattccggtgccgaaggataacgaggacgtgctgacgccgcctgccgcccctgcgccggtgcaggcgctggcgacccggacgccggctccggtttaccgccagtttactgcgctgacgaccacgggcgagattgccgacccggcgcaggacgcgctggacagtgctgtgtcgccgggacaggccatcggtgaggccatggaaaagctgattgcgccgctggtcactgccctgcaacaggggcagacgccggatgacgcactggatatcatcgcggccagctatccactgctggatgattcgcagctacagcagctgttgcaccaggcgctgttcgtcagtgaggtctgggggcgtctcaatgccgaaagctga

SEQ ID NO: 81561 - DNA, 1251 bp, Citrobacter koseri
atgccgaaagctgaagtggatctgggctacgccatcgggctgaagccggaagaagccattgaatactttacgtcaaagggttacgtcattggctttaactggcatgacgtggatgcccgcgcccatgccacatccttcaccgctgcgggtgtgctcaaacaggacattctgaccgatatccgccaggcctttcaggcacagctcgatgacggcggaaccctgcgggactttgaacgccagctcacaccgacgctggttcgcaagggctggctcgccgataaagcgcggctggttgcggatgaggacggcgtgctggaaggtaagcaactgacgccgcgccgtctgcgtaccatctttgagacgaacatgcaggcgtcctatggtgcgggtcgctatgcagagcagatggccaacgcggcgtttcgcccgatctgggagcgcgtggcggtgatggacatgaacacccgcccgcttcatgcccggctccacggttttaccgcccgttacgacgacccggtctggcagttcatgtatccgcctgacggttaccactgccgctgccgcgtgcgggccagaacggaggccgacgcggaacggctggggattcaggtcagatcgtgggcggatgatatcgtaaccgtacagcaggcatgggggccgaaagagacgcgcgaggtgaaggcactgcgtttcaacggcgaactctacacaccggatgcgggattcggtcacaatccgggtcagggctggctggcgtccctcggtcagcgcctgatggataaggcggcaaccacgtccccgcgaatctcctcgcaggccatcaacgaagccctgtctgaacctgctgtactggccgccgtgagcgacgacgtccgccgctgggtggatgcggtcagcgttcgccggcagttgcgcggcgacctgaagcgtgtgggtggtatccggccgtcactgctgaaccggcttgaggcgcacggcatcagccagcccgtaccgctgagtatccatgaggaagatgtccgccaggctccggggccgttctgggcggagctaccggctctcgtcagacatacagatgagacctggcttgacggtcatgacctgttctggctgacggatgacggccgggctgtgcgggggcttcccgttgaagatggctggcgactggtgccggtgaacggcggcgcggccgtccggccggaagacattctgacggacagcgcgataccactgcgggagccggcatcatga

SEQ ID NO: 81562 - DNA, 543 bp, Citrobacter koseri
atgagttaccgaatcatttacgacaccggcgactttgagaatgctctgggggaactcatcaaccggcttgagcaccgtgagcctctgatgcgtgagatggccgccgccatgggggacgccgtggaggagaactttgcgcgtcagggacgtccggaatggatgggctggagtccggcctacgcccgtcgtcgccgtggcgggaaaatcctccagaagtccggccggcttgcagcgagcattacgcagtacagcgataatgacgaggcggctgtcggtacaaacgtgaagtatgccgccattcaccagttcggcggtgaaatcagtatcgccccgcgcagccagcaggcctattaccggcggaaccgggatggttctgtgggaaaccgctttgtgaaaaaatcccggtcggacttttcacagtggaacaccatcggcgcgtataaaatcaacatgccggcacgcccgttcctgcatctggcggaagaggatgtcagcagaatggagaagaccgctgaagactatctgaagcgtatcctcgactga

SEQ ID NO: 81563 - DNA, 1137 bp, Citrobacter koseri
atgaaaaagacacttatcgcttcattcgtcgcctcgctgacacagcagcccgacagcaccgcaaccggcgtcatccagcttttcccggcgggtgaattccgggcgcgtgatggacgtccggctgagtgtgccgcatggatcatgacgcgggaggtcgccgaacggctgattgccgccgctgatgcccgcgacacgccctatgtcctcgactatgagcaccagaccctgcgggcagcgaaaaatggtcagcccgcgccagcagccgcgttcttcaaaaagctggaatggcgcgaaggtgaaggtctgttcgccgttgacgtggaatggactgttgccgctgccgcgatggttgaggcgaaagagtaccgctttatctcccccgttttttcctacgacaaaaccggccaggtgctggagcttctcaacgccgccctgaccaacaccccggctcttgacgggatggacgacgtgttacttgcggccgcctccctgatggccacccacctgaccacagagggtaataccgaaatggatgaagaattcctgaacgagctcctgagcaatctgcgctggatgctgaaccttcccacagcctccacaccggaagaggtgcaggcggaactggaaaaaatcattgccctgctttcgaaaggcgaaggcaccgcagcggcctcggtcagcctgctggatgtactgaacgagcgagagcagaccattcagaccattgctgacctgaccgcgaagctggacacccctgacccggctaaatgggtgtcagtggatgtgatgcacgcggccgtgcagcaggcagcggaaaaagcctccaccaccagtcaggcggcgctggccacccaggaagcggaaacgttgatcacggcggcgcttgatgacggccgtctgctgccggcacaggaggaatgggcgaaatcactggcgaaaactgacccggagagcctgaaaaccttcatcgggaaagcgccaaagattgcggcactgacaaccagtcagacgctggggcaaccgccaaagggcgcacctgagcgtaagacggtggaaaacgatgacgacgccattgatccggccatctgctccctgatgggtacagacccggaagacgtggcgaagtatctcaaataa

SEQ ID NO: 81564 - DNA, 393 bp, Citrobacter koseri
atggatcgcaatacccctcataaggacggtcagttatttgccgttccggtcgccgcagccaccgagctgtttggcggtcatatcatcgcagccggtgctgacggcctggccgtcgctgccaccgccactgccgcgaacgtcacgctgggcgtctgcgacggctgggtggataacagcgcaggtgaagccggtgaccaggatgttctggtgcgtcgcggtaaggcctggttgctggcgaaccacagcaccgacccggtcagccaggcatccgtggggcgtgactgctatgtcgtggacagcacgacggtggcgaagaccagcggcgacgatgcccgcccggtagccggaaaggtgcttggcgtggaagcggacggcgtctgggtgctgatttaa

SEQ ID NO: 81565 - DNA, 918 bp, Citrobacter koseri
gtgatcatcaacgttaaaaacgtcaaacaggttttcgtcaacctgaaagccaccttccagaaagcgtttgaccagaccccgtcggactggaaaaaaatcgcgatggtggtgccctccacgggtaaacagaatgactacagctggcttggccgcttcccgaaaatgcgtaagtggatcggggataaggtcgtcaaggcgctggcagcattcaactacagcatcgtcaacgaagattttgaagccaccgttgaagttgaacgtaacgagcttgaagacgatcagcttctggggctggctttacaggcgagcgaagcaggccagtcagccgcagaacttcctgccgacatggtctttgccctgttgaacaagggatttgttctgccctgctatgacggtcagccgttctttgatactgaccatccggtaggcaccaacaatccgcactctgtttccaacaaaggaaccaaaaagctgaaggtgggctcactggctgaggcccgtgccagctacggtgcggcccgaaccaccatgcgcacctttaaggatgatgaaggcgcatccctgaaaattcgtccgtcagtgctggttgtccctccggcgctggaagatgacgctaactatctgatgacggcggagaagttcccggatggtacgccaaacccgtaccgcaataccgctgaggtgctggttgcgccggaactgacctctgacacagcctggttcctgctggacaccacgcgtcaggtcaagccgctcatttaccaggagcgtaaaaaaccgacgttcgttgagcagacggactacaacagcgaaaacgtctttatgcgcaagaagtttctgttcggtgctgaagcccgtgtggccgcaggctacggcttctggcagatggcgtatggctctaccggggaggctgaataa

SEQ ID NO: 81566 - DNA, 426 bp, Citrobacter koseri
atgcccattctgatcactgcacgccgtgaaggatttcgccgcctcggcatcgcccacagcgcgaaaaccaccacgtatccggacgatcactttacaccggctgagcttgtcgtccttgaaagcgacccgaacctgattgtgatgcgggtggacaacgtctctcaggatgacgccgctgcatcactggcacaggcgcaggcccgtattgctgagctggaatccggtatggagcaacttgacagggatgccggcgagctgaaggaacagcttgtgcaggccggcaacactattgccgcgctgacggaagaacgtgatgcgttgcaggcgaaggtgtcagccgtggcgtcggccccggttcaggacaatgaaccggcagaagcgcaggaagctgacaagcctgccaccaacggccggaaaaagggctaa

SEQ ID NO: 81567 - DNA, 429 bp, Citrobacter koseri
atgtacgcgacccgtgacgacatggtgaaggcgttcggtgagaaggagtgcgtgtcactcaccgaccgcgagttcaccggggaaattgacgacggggtactcaacaacgcgctggcacaggccagcgcagagattgacggctacctctgcggacgctacccggtgccatggacggacacgccgcgcgtgctgacgggccgctgctgcgatatcgcccgctaccagctctgcggcgcgggaacccagatgacggaagaaatccgggtgcgctatgaggatgcgatccgttttctggagcgcgttgctgacggccgtatctcgctgggccggacgtccggcggagaaactgtccgcagcgaaaccggcgcgagggtcatatccggtggccgggtgttcggccgcgaccagactgacggagggggattctga

SEQ ID NO: 81568 - DNA, 660 bp, Citrobacter koseri
atgctggtgactgatattgagctggccattgttgaccggctgcggcgcggcctcggaaggcttgcgcgtaacgttgagagttatggcggtgaaatggacggcgaaccggctgaagtgctccgccagttgccgggcgtgtgggtcacattcggcggcgttctgaagacggagcgctacagcaccgccagaaaccggtttgtcacgcacggacgctttgtggtgattgtcggtgaccgcagcgtgcgcagtgaagcggccagccgtaccggtggagccagtccgaacgaaccggggacataccggatgattgccgccgttcgccgcctgctgtccgggcaggacatggctgatacggggctgaagattgacccgctgacacccggtcgcgtgcgcaccctgttcaacacgcaactggaaaaacaggcgttctcggtctttgcgtgtgagtttgacacgaaatggatcgagaccgcacttgaaaacggccgctacccgctggagaacccgccggatggccatgaagacagcctgttccggccgtatcacggcgagaccagtccggatgacccggaatggctgagaacgcgcctgagttacgacctgaaacaacaaccggatgccgcagaggacattgttaaacatgagccaggtaacagttaa

SEQ ID NO: 81569 - DNA, 228 bp, Citrobacter koseri
atgagccaggtaacagttaaggcagcaccaggggtaatggtgccgcgcgaagacaatccgcgccgctatatcaccggtgaggaacccgtcacggtggagtgcaccgtttattaccagcgtcaggtgatggccggtgatctgctgattgtcggcgataaaaaaagtaaaggcgggaaagccgccaccacgaaggacagcagcccggaggtaaatgatggccagtcctaa

SEQ ID NO: 81570 - DNA, 1419 bp, Citrobacter koseri
atggccagtcctaatatcagctttgacaccatcggctcgaaccgtaagccggggcagtacattgagttcaactatcgtctggcggtacgtaccctgccgggcaacacccagaccgtacttattgttgcgccgatgctcagtaccggtcagtcagcaccgctgaccatccaggatattttctccgatgaagaggctgcggtttattttggtcgtggttcactggggcatctgatggccatggccgccattggcgcgtatccgtacctccagcttcagatggtgggtgtcccggatgcggacacggcgacggcagcagaaggaacggtcaccctgaccggacagtccgcatccagcggcacgctgagcgtcaccattaacggcacgcgcatcgacgtggggatttctgcggcggacacggcagaggtcatcgccgcagagcttgtcaggctggcgggccagaaagacagcctgccggttacggccgtggctcagggtggcgtggtgacgctgaccagccgtcataaaggaacatgcgggaatgatatcagcctttccgccagcgtgacggccacgggcgtgacagcggaagtcgttgcactgtcaggcggtaacgttgacccggatatttccccggcgctggcggcggcctatgcagcgggccacaacatcgtcgtcagcccgttctccacccaggaggcgctgaccaccctgcgtaaccacctgaccagcgtcagcagtgcgatggaacagcgcggtgcggtgggcgtggcgggctggcgcaagtccctgtccacgggctcgacgcttacggcatcgctcaatgaagggcgtatcactgtgggctggcacaacggttcggcgaagacgccggcgcagattgcagcggcctacgccgccgtcatcgccagtgaagaagatccggcgcgtccgctgaacacgctggccatgagcacgctggacgtcaccccgctggaaagccggcctgggcgcaccgagcaggagaatgccctgcgtaacggcctgacgccgtttgaaatcggccccggcgacaaggtgcagattgtgcgggccatcaccacatacacccgcaatgcccagggcgtggatgatgtttccctgctggatctgaccactatccgcacgctggattacgtgcgtaaggcctgccgcgagcgtatcgcgctgcgtttcccacgcgacaagctgagttcgcgcacgccgccaaaagtgcgcagcgaactgcttgacgttctctacaagctcgaggaactggagattgttgaagaagtcgaggccaacaaggacaggcttctcgttgagcgggatttgcaggatgtgaaccagcttgacgcccgtattccggcggatgtggtgaacggtctccatgtctttgccggtgttattgacctgctgctgtaa

SEQ ID NO: 81571 - DNA, 375 bp, Citrobacter koseri
atggctcttgaagaatatgtcggcgctatcgtcatggaagtcgacggccaggaaatcgaggtcactgacctgaaggaagacgtcaccaccgggcgcaaactggtgaaaaccatgaaccgtaccgggcgtgcgaaaggcttttcgcgtggtatcgaagagattcagctgaccgtttcggtggtcatccctgaatccggcgacctgaactggggcggtattgagggcgcgaaaatcacccagtatccgctgaacagttccgggaagcgtatttcctacctggactgcttcacgacgcaggtcgggtcgcagtacaccgttgataatgaagcgaagcgcgatatcaccatgaatgcgctgcgccgcgtggaggaatga

SEQ ID NO: 81572 - DNA, 384 bp, Citrobacter koseri
atggagaagccacagcttttatacggggtcaggtgcgaggatacggtgcattacgactttaccgtccgcctgcctgttgtcgctcacactgttgaagcgctgcgcctgacggatgaagcctgcggcacgacggaaggcgcggcagccggtatgtattacagggtggctgtgatggcccaggcgctggaatcgctgggaacgctgacaaaggaagaaatcactccggaactgttgttgcacgagctgaatgatgatgacttcgacatcattgatgcggaaatcgaagccattaaaaaaaagcggatgcgttcgaacagcgactcaccggataccgcacagtcgtcctcgccctcggacgatacgggatcacagagcagcaaatag

SEQ ID NO: 81573 - DNA, 2253 bp, Citrobacter koseri
atggcgcgtaatcttcaggtagcgctgtccctcattgcccgtgatggtggttcaaaagccatccgccaggcaatgcagggcattctgaaccagacgaaggtcaaccagaaagccgacgatgaacaggcgaagtcacagcagcggaacacaaacacatccatccgggcatcgcgctcgttgcaggatgaataccgccgcgccagtcaggcccgttcaacgctgggtatccgttcggaacgcgacatccagcgggagatacggcagacaatggccgcttacaaccgtctgacccgaaccggcaccctgtccgcaaacgagcagtcccgcgcattccaggccatgagctcccgcgttcgccagttgcgtaccgagctcacagcggtcaataccggcgtggcgagaatgaaggccatcggtgccactatgggggccgttgccggcgggttaacggctgcgggaatggtagtggcacaaccggtatcccgacagatgagttatcaggagcgtctgtccatgatggccaataccgcctatgccgatcaggggctggaaggccggcgcgcggggatgaaggatatggattcccttatccgccgttccgtgcgtgaagggggcgggacaaaagagtcagcagctgaaacactggatgcgatgctggcatccggcgcggttgatatggattcggctaacgtaatgttgcctcttgttcaacggtatgccacagccaccggtacagcgcctacagaccttgcaaacatcgcgataaagctgaagcaatcctttggaattgaagacaatgaccttgagaaagcgctaaatatggcaatcagcgcaggacagtctggctctttcgaactgaaggatatggcccgatacctgccatcgcaactggcgtcagccggtaatgccgggatgaaggggcttgatgactttgcggttcttcttggctggaaccaggcgtcggcaattaccgcaggtactccagatcaggcggggaataacttacaaaatctgcttctgaaacttaccagtaaagatgctgcgacagcggcttcgagtgtaaaactccccagtggaaagggtattgatcttcctggcagtatgtccgctgctgccggcaagggtattaatgctcttgatgctttcaatgccatcgttgacaaggttgttgccagtagttctgcataccgggcgttggagaaaaagtatcagtcagcgtcagaggatgagcgtaaggggatactttcctcacagttgaaaatacttgaaggttctggtgtcggtaaaattatcgctgatcagcaggcgttaatggcactgctggcgttccgtggaaacaaacaatacaccggcgatgttatttctaaggcaaatgaacagcgggctttggaatcaggtaaaacagcgggcgatttaaattttgcactaatgtcagagcaggcaggctttaaagtcaatcaactgaaaaacgagcgtgaattttcggaaatggacgcggttaaacccttgtccgatgcgctcggtgatgtttccgataagctcgtcagatatgcccaggaatacccggaactgacaacggccgtatccggagccacaacggctatcaaggccatgacagccgctgcggtggcgtttgccggactgagtatcttaaccggtggtggcgggatcaaagcgccagggaaatccgtgctgggaagactctggcagcgtatacgcggcggtgtggagaaagtgccgggcagcagcggcgcatcacttgccggagaggcggctgctaccgccgggaatgccacggcaacaaaaggtctttcatgggccttaaaagcaggaggaaagttactgggaagagcggcacctccgttgatgttgtatcagggcgcacaggatgcaccactgattccggttaagcgtggcgatgcgcaggcccgtgagcgcctggagaagaatgactattccagcgatgaaacacggatgctggatgcggttaaggcgcgaccgggcctgctggacgtttttgatgagctgaaatcctggtggagtccgccaaccaccatcgggcagtcagctgagactccgtttaaccctgcaacgacgggggtgccttcttacctgctgccgcagcagaaagagaagccccagcctgtcagtatcaccaccaatctgatgctggacggacgggtgcttgcacaggtcgtcaatgaatacaacggtgaacagtccgttcgtggttcaaccggaggtatgcagtga

SEQ ID NO: 81574 - DNA, 1389 bp, Citrobacter koseri
gtgagctgggaagatgccttacaggatgcgtcgttccgcaatgtccgctttgacgttatcaatacccgtgacagcgccagccgtgacattgccacgtatgaatatccgtatgtggatggcggcgatgttgatgacctgggtcgcaagccacgcaatctgcgcgtaaccgcactgttctggggcgatgattacgattcccgccttcaggcgtttctggcggcacttgatacccgtggcagcgcggagttgatccacccggtctttggctccatgccgtatatgcagtgtattgaatacagcgcggtgcatgaggctgagaacgtggattactgcgtggtggaggtggtttttattcaggcccgcccggagatcccttttttcaacagcgctttccctctgtcccgtgccgatatcattttcaaccaggtacaagcaggtcttgaccgcgcccagacggctatcgacaacctgctgtctccgctgcgaacggcgaagaagatgatgcgcagggccaaggcgctggccacgtcggcactgaatatggtgacggttctgaaaggcgatcttactgattttgtcagtacgaccacggattttattaactatccgaaagcgttcatgaatgacctgcaaagtgcgctgagcctgacctcgctgtcttcccgctcatccgtcagaaacaataccggcagctacagtaattcggcaggtacgattgttaccgaccagacaggcagttcaggcagtctggtgacggcatcatcagacacgctcgccacggcgggtattgtgatggccgactggaagagtggccatgcccggctgaagagcgtggcggagatgccggaacaatttattaccggcaaaaccactgcaccggtggccctgccgtccggaaccacgctgagcgatgttacggagctggagacagccgtcagcattcaggttgcattccagctggcgctggacgcggcggatgtgctgagtgatgaagaagtgattgatctgctttcgccggaagacgtcgaggtgattgccggcgatacgcgcacggccatccagtcggcgatcagcctggtcagggagacttatgccggtgccatgcagtctgtcagtaaggagccggccgccagcggtgtgacctggcagcctgtggttgacagcatgaaagacactgcgctgagcgtccaggaacttgctgctgcggttatcacgcgccggccacccctgaccacccggacggtggagtcagagagcaaccttcatctgcttgctcaccagtggtacggcgattattcccgcgccgccgagctgctgcgcctgaatccgtccctgcgcaacccgaaccacctgaaagccggagacgtccttaatgcctactcaagataa

SEQ ID NO: 81575 - DNA, 1203 bp, Citrobacter koseri
atgcctactcaagataacgaggtaagccaggatgccgtcagcctggtgattgacgggaaaatccacagtcactggagccggtatcagattgattccgattttctgatcccctccgatgcgtggagtgtctctctcgggctccctgatggcgagttcccggcgggtatccgacgcggcgtccccgtgatggtgcgtgtcggttcggatgttgtgatgtccgggcggattgataccgctcagcggcgtgtctcgcgcagccaggtctccctgtcagtttccggccgtgatggtgcagccgtactggttgactgcgcctctccggtattcacctcccgccagctaagcctggaagaggtcatcgcaaaagtggtcaggccgcttggtgtgaagaatatccggatcaacgcggaatcttccggtcgcaatgacaaggtcagcgtggagcccggcgaacgcgcatgggacacgctggagcgtgccgctgctgcacgcggactctggccatggtttgaacctgacggcacgctggtcattggtgggcctgattatacagccgacccggtggcaacacttgtcctcaaccgcgacgggcggggcaataacgtgcttgaactgagtgaccggtcatcagtaaacgggacattctctgaactgacggtactcgcccagggacacgctcagggcagcaagtcaggcagtgatactgagattattgatatcgatgcagatgatgatgccggtgatatacagactgctgtcggctcaccggaaaacggctttcatggtctgcgctctgtcgttcgtgacaccaccgtgccgtattaccggccgcaaattatggtcgttggcgatgccgataaccaggcgcaggtcgattaccgggcaaaaaaagcgatggcggatgcccgtctttccggctatgaacttacggccatcgtgaaaggccaccgtatgccgggcgggaaactgtggacgccgggccagcgcattcgcgttcgcagcgagtcgcacggcattgatgacgttttcttcctgatgggacgggagttcagcggcgggcgtccggataacaccatcaccacactgaggctgaaggaagatggtatctggataccggatgcgtatccgaagaaacgtaagacccgtaaacgccgggctaaggtgaacaaagagctggagattatcgatgtggaaccgggttga

SEQ ID NO: 81576 - DNA, 558 bp, Citrobacter koseri
atgtggaaccgggttgatttccgtattaatacggcgttaaaccgtatcagaaaggctttcaggggcgtgttaaaacgggttaacagcgccggtggcgtccagacggttcaggctaacgcgctggcaggtgaaccccttcaggatgtggagttgttccagcattacggcttcacctccagtcccctgaagggtacgatggcgatctttattccacttaatggcgtgaccagtcacagtgttgctgtagccaccgaacacgccagataccggctgaaaaaccttaaacccggcgaagtggctatctacgatgacctggggcaaagtgttacgctaacccgtaatggtattatcgttaatggtgcgggtcggcctgttctttttactaacgcgccgaaagcacgatttgaaatggatcttgaagtcaccggggaaataaaagaccactgcgacagtgacggtaaaaccatgcatgaaatgcgcgtgatatataacgggcataatcataaagaaaacggcgatggcggcggcaccacaaatcaacccggccagaaaatgtaa

SEQ ID NO: 81577 - DNA, 351 bp, Citrobacter koseri
atggaaatgctcattgatcccaccaccggtgattataccggagacagtaccgacacgctggccaacgcggtttacctgcgcctcatgacaccgcttggatcatggtgggccgaaccgtcgctggggtcattgctgcatacgcttcgccgtgaaaaggataaagcgcgggtgatgacacttgcccgccagtacgccgaacaggcacttcagcctctcattgatgacggccgggcggaatccattgttgttacggcagaacgataccagcctggctggttgctgctgcatgtcacagtcacgtctgcgggccagttgccccggacatggaagcaccctgtgcaggtgagctga

SEQ ID NO: 81578 - DNA, 1068 bp, Citrobacter koseri
atgccttttattacaaagaccgcagaccagatacgcaatgaccttctgcgcgatatcaagaacctgctgcaactgaccgatgaacaaatcggcccggacagcgactggtatgtgcgggcctcatccgtggccagcgtggccgaagggctttaccagcatcaggcctggatcgttcgtcagattttccctgacaccgccgacgcggaatacctttacttacacgccagaacccgtgggctgagcaaaaagccggccaacagcgcgtctggtacggccacttttaaaggggaagccggtgcgtcagctgaagccgggctgactttcaagcgtgataacctctcctggacaactacagagtcagtaaccatcggggatgacggcacaggaaccgcgcaggcgatcttttccgtaaaaggtgcggccgggaacacgacagccaccacaacggccatgctgaccaccacaccggacggttttgacagtcaggtggctgttggcgttatgaccggcggtacagatgaagaaagtgatgcggaacttctggcccgtctgcttgaagtgattcgtcgtccgccagctggcggtaataaatatgactataagcgctgggcgatggaagtgtccggtgtgacagcggcctatgtctacccgttaaggcgcggactgggtacggttgacgttgtgatcacctctgccggcggtcttccgtcacaggacgtgattgaccgcacgcaggctcatattgatgacgtccgtccggtaacagccaaaaacaacatggtactgatgccggcaatacggacgttcgacgttcacgtcgctgtctcactggacgggatcaccctggaggatgcccgtcaggcgattagcgaagcgcttcaggatgacgatttacgccgtgaacccggcgttgcctttatccgcagccaggcgggcacgctggtttctctcattccgggcgtgacggattacgacatgatttcacctgccgccaatattcagccggtgattgatgccgcgcaggttgaatggctgcgtctgggcaatgtggaggtgacgctgctgtga

SEQ ID NO: 81579 - DNA, 573 bp, Citrobacter koseri
gtgagctactacagcctgcttaatttattgctgccaaaggtcagttacagccctgaacagccccgcctgaaagcgtcgctgacggcggaggccagcctttttgaaagtatcgagacttccgccggactggcccgtgatggcgtcacgccattttatgcccgtaacctgctgactgactgggaacgggtactggaattaacaccagtggaaggggcgacctatcaggaacgcctgtcccgcgtactggccaagctggccgaaaccggtgggctgagtatcccgtattttacccaactggcgaagaacatgggctacaccatcaccattgatgagccccagccatttcgggccggtgtcaaccgcgccagtgaccgtctgtgggttgaggacatcatctgggtgtggcgggtaaacgtgttcggttcacgaaccatggtctaccgcttccgtgccggcagttcgtctgccggcgacaggctgaccactttcggtgatccggttattgaggccatattccatgatcttaaacccgctttcacattttgttatttcgcctatcaggagaatgagtaa

SEQ ID NO: 81580 - DNA, 393 bp, Citrobacter koseri
atgttttattccaggagtgccaacggttttttcgattctttatctgttattcccgatgactcgctagaaatatctgatgaaaaatatgctgaaatgatcgagggtatcgaggcgggaaaagttttatcttcagacgataaaggttatccggttttgtcagattttacgttgacaaaagaacagcaaatcgaagaagccacgatcgttaaaaatgggaagattgaagatgccatgtcaaaaattagcgtatggcaaatggagttacatctggggagcataagcgataacgacaaagccagtctgataaactggctgtcgtacattaaagaactgcaagccgtcgatgcctcaacggctcctgatattatttggcctgctccgccagaggtgtag

SEQ ID NO: 81581 - DNA, 444 bp, Citrobacter koseri
atgagcaattacgtttacagtccgtcaaaaaacgctttctttctggtatctaaaatggcagagcacaagttggagggtaattggcccgaagatggcgtggaaattagcgatgatttattcatcaagtacacatcaacaccacctgacgggaaagaacgcggtgtggacagtgatggaatgccgtgctgggtggaactaccagaaccgacaacagaggagttaattgctgccgcagaaagcaaacagcagcaattaatcaatgaggctaatacctacatcaacaacaggcaatggcccggtaaagctgcaattggccgcctgaaaggtgacgaactggcgcagtacaacacatggctggactaccttgatgcactggaaaccgttgatacatccagcgcaccggatatcgactggcctacacctctggcggagcaggccaaataa

SEQ ID NO: 81582 - DNA, 411 bp, Citrobacter koseri
atgcttaaggccttgaaacctggcgacacagtagtcgtgtggaagctggatcgtcttggacgttcgctgatacaactcgctgaccttctccaactctttaagaagatggatgtggaatttcactccctgactgacagcataaataccagtacgcctatggggcgatttacatatcacatcatgagtgcgctggcagagatggagagagagctcattgtcgagcgaactcgtgcgggtctcgctgtggcacgtaagaaaggacgtatcggcggacgaagacctaaattttcggaagagcaatgggaacagatgggaaggctgataaatagaggtgtatcaaggcagcagataaccattatctatgatgtaggtatgtcaacgctgtacagaaaatttccctcctctcaatga

SEQ ID NO: 81583 - DNA, 294 bp, Citrobacter koseri
atgccgattccggtcaaactggatattctggcaatcacctcgaccgccaaaatcattgattacgaaaccgaaaccgagcgctacaacaaagccgataaacgcgcctccttgccgcagttcgccacgatgatggccgatgacagcacgctgctttccgggatctctgagctggacgccgttccgccgcagtctcaggcactcacggagcagcgactcaaatactggttcaaacaagccgatccgcaaacgcgtaataacttcctgcaatgggcggaaaaacaaccgccctcctga

SEQ ID NO: 81584 - DNA, 141 bp, Citrobacter koseri
atgaaactggaaacgatagagatactccgcacgcgctggcagcgcctccgtatttaccgccgcccgggctccgtgctggtggactaccgcatccttcgaaacttaatccgcatttatcagaaaacaggagcatcagcatga

SEQ ID NO: 81585 - DNA, 309 bp, Citrobacter koseri
atgccccgagaattttcctgggagaaaataaggaaaggccaagctacatcattcagctctaactatgaagttttgatagggtatcaaaaagaaattgatgaatggatgaagcataacaagctgcaagatttatattttcaattaaaatatttgggatacgctgtagtagatgaccttggcgctgagcagttagaagctctaaaaaatttggatgctccatttttgaagtattttaattgtcgcactgaaaaaaaacactttatgacacctcttaagcttttcttggaaaaattggaagtatataagtag

SEQ ID NO: 81586 - DNA, 480 bp, Citrobacter koseri
atgcatgatgccctggtctgtggccgtcgttttcgcacgttcaatgtcgctgatgactttaaccgtgaggcgttgtcgattgaaatcgatctgaatctgccagctctgcgcgtggttcgtgtgctcgaccggatcgcggcaaatcgcggctatccggtcatgctacgcatggataatggtccggaatttatctcactggcacaggctgaatgggcagagaaacatgcagtaaaactggagtttatccagccgggtaagccgacacagaacgcttttattgagcgctttaaccgaacataccgtacagaaatactcgatttttatctgttcagaacgctgaatgaagcgtgggaaatcacggagaaatggttatcagaatataactgtgaacgcccgcatgaatcactgaacaatatgacaccggaggaataccgacagcactattatttggccgggatctcaaaaaatgcatggaactaa

SEQ ID NO: 81587 - DNA, 1701 bp, Citrobacter koseri
ttggaaatatcatctctgaaactcaagggttttagaaactttaaagatgcacacatcaattttaactcaaatactctggtcatcggtgccaatgatgttggcaaaagtaatatgttgcattcgctaagaatgctattagataaaagtatatcagattcagaaattgaaccaaatgaacttgactttcatttagaaaacggaaaatcatgtgaagaatttgaaattattattcattttaaagatatcaatgaagatgcagtactttcaattttgaaagggaatgtcagtgactcaggtgaatcgttcattaagtacattgcacaaaaatccgatctcagctataaactttttattggtgagtctttagagtctttacaagaaatcaactctcgctattatcttaaattcgttaatttaaaatatattcaatcacaacgagatttagagaggtttattcgtaaagaaaaaagacaactattaaaaatcgcacagcaatcattgaactctgaagaaagagaagaagatgacgatttgttaggagagataagtatagatttacagtctattaatgataaaatatctcaacttatatatgtagaaagagctacaaaagatgtcaacgatgagctaaaaaaacttgcgcatcattactcagagtattctgtgcaactagatactggggcaattggaataaatgactttattgacaacctacaacttggagctaatacaaatggttctaatgttatgcttggaggagacgggcgaaacaatcaaatattattagctttatggaaagcgaaaagtattaaggaacatgatatcgagaacgaggttatcttctatgttatcgaagaacctgaagcacacctacatcctcaccaacaaagaaaactggctgattatttgatatcagaacttccaggtcaaacgatcatttcatcccactcaccacaaatagctgtaaactttgaaccaggctcagtaataaggttgcttgaccgtgctggacacacagtagccgcaagtgaagggtgttctaaagatatttcagatggctgggaaggaatgagctatcggatgagtatattgccagcagaatcgtttttttcaaatggagttttcttaatcgaaggaccatcagaagttttattctaccattctttagccgaaaatttaaacattgatcttgattatttaaatatttcactggtttcagtggacggaatatcatttaaaatttacgtagctatactagatgctttagagatcccatgggtaatgcgaacggataacgatatatctaaacttaaagatcaagacaagtggcaatattcaggtataaaccgatgtttagatatagccggtttggaaaagtttgaacatagcgacatacaaatagtacctatagatactctgaccagcggtgattggcaaacagtttctgaagaaataaataaatgcggggtatatttatccaaagttgatttagaaactgatctggtaggagaattaagcgcaccaattttaaacgctttaggtaagaaaaatgaccaaggtgcgatagagtacttacaaaagaaaaaagcattaagaatgcgagaacttcttaaagatataaaaacagaccttcacaagcttaatgccggtgaattaattaaaccgttaaaccatcttgtaaaaataattagaggtgaatga

SEQ ID NO: 81588 - DNA, 1626 bp, Citrobacter koseri
atgagtactttctcaccaacacctcagcaagcattagccattgactacactggaagcatggtaataacagcatgtccgggaagcggtaagactacggttataaaagaaaaaatcagaaatattaccgactgtcttccagagcataaaggggtcattgcaattacattcacaaaaaaagcaagttcagaactggaacgtagatgcaaggctgaaggacacaatgtaaaacatagtttctttggtactattgatagtttttgcttaaaggaaataattattccatttctttcaagggtatggggaggaacaccaacagaatgcaaagtcttaaagaaattggaatctccatataaccatttcatagaaagcaattttgctggcacaccatcagttattaatatcaatgaggaccctgggtataaaaaactatacgatgagggaatactttggatggggtcattctcggccttagcattaaaaataattaatgaatcatctgctgcgaagcggtatatcaaagcaagatatagccatatattcatagatgagtatcaagattcgtctttatctcagcatgagctatttctaaaaataaacgaacttggcttatgctccattgctgttggtgatgtttggcaatcaatctatgaatttagaggagggaattcggagcttcttttagaattggtaagtaatacagaatgctttaagcattttgagataaatttcaaccatagatgccacccatcaataagcaattatgcttcaagattgcttgaaccatcctatgttttactacctgcggatgagataagagtatttaggagacgacttaatggaaatcttaaagatgctgctgttacgatttcctcttggatttcaggatggctgagtagtggcgaatggaagttagaaaaagcaaatcaaatagccattttagcaagaaaagaaaaatcactaacattattctgctctggattaaacttaaacttcaggctttatgttgacacacctctagataaaattggtactgattgctcagatctatacaaagatctgttagcatacaagtacggctctataagtacagcacaagagtttattaacaaagtttttgatggggttatagtagatgataacactctgctcttactaagaaaaaaaataaaaacaattagaaatgaattaaaaaatgaagatttaatacataagtttcatgatattgcatatattttagggataaattcaacagaacatactgatggggctgtaataagaacaatctcagacgatattttagtcaaacaattcaaaccattagatgataatgagatacaagtaatgacccttcataaatctaaaggactggaattcaaattagtatttcacctagatttagatgaatggtctttcccatttagagaatataacagcgaagacagatacacacctcgatacccgacgcttcaacaagaacttaacctccactacgttggtataaccagagctgagaattgttgcatccttattaactcatctctcagagaaaatgcatctggggactttaaaaacacagatgaatcatatttcttcaaattacctcagttaaataatctgtatagttga

SEQ ID NO: 81589 - DNA, 909 bp, Citrobacter koseri
atggcacagacttttactcataatttactttatccccgctactggcttacctggtctggtttgggtctgctgtggcttctcgttcaacttccttacccggttttacacattctgggctccggccttggaaaaatatccagaccctttctgaaacgccgggaaggaattgcgattagaaatatcgaactctgctttcccgagatgacaccgtttgcccggagccagatggtcaataaaaactttgtttctctcgggctgggactgatggaaacaggaatggcctggttctggagcgatgcgagagtcaaaaaatggtttgatgtcgaagggcttgaaaacctgaccggtgcgaccagaggagtaatagttgtcgggattcattttatgtcccttgaattgtgtggaagagtaatgggtttatgccatcctatgatggcaacgtatcgcccacacaataatccactaatggaatgggtacagacaaaagggcgtatgcgttcaaataaggctatgattaatcgacgtaatttatctggttttgttcatgcgctaaaagctggtgaagccgtttggtttgcaccagaccaggattatgggtctaagggaagcgtttttgcaccttttttctcggtaaaaaaagcagccacgacgaacggaacgtatgctctgtcaaaactcgctggtgcacacttgatcacacttagcatgatccgacgtagcgataaaaaaggttatcacatgtatatcagcaatccgttgtcaggctatccaggggaagacaaggtcgccgcagcggcttatatgaacaagatcatcgagcgtgaaattctccgagcccctgagcaatacctgtggatgcatcgcaggttcaaaacgcgtcctgaaggcgaagtctctttatacaaatga

SEQ ID NO: 81590 - DNA, 276 bp, Citrobacter koseri
atgatgaaatttaaaaaatctgtttttattgaagggcatatcctgtcgaacagctgtcacgggcaggccggtcaacctttctgtattcaccgggtcaggtttagtaatggtaaatatgcgattatccgggtggcatccgggatatgtttcaaacctggcgaaattattcaacgaaacgattgcgagtggttttataaacttaccaaaattcgccttctttcttttgagtaccttgatgatgatgaatccagaagacaatttcttgagtatcaatga

SEQ ID NO: 81591 - DNA, 288 bp, Citrobacter koseri
ttgaaaactgaacgtctgatttatgatacactacccttccgtgagaaatttatgatgaaatcagaagacacccttgactggtatccggcacaactaccgccagtgaaaattattcttggcgaagccgtgctggctgtgggcaaacagggccgaccgattaatacccgcaccttgctggaataccttcaggtcatgcaggacaaacaaaaaaggcgggatgacaaaatcgccatgcagactgcgattgatgttctcagggataatcagcgcattaacggcagacgttaa

SEQ ID NO: 81592 - DNA, 8583 bp, Citrobacter koseri
atgaaaatgaacccaagagcgtggtttaaccgcacccgtattccgatgaatgctgccgaaaacgtaacgttttcggcgaacgatcctgcgagtgaaagcacaccgcggtcagaactcttttcgaccgtccagatggagcgctacggtcagaagctggcgcagactcataaagtatcgccggttaaacatccttattatcttctgaaacggcttggcgacaatgaggacgtcatcacccaaaactgctatgagcttaacgcgggtaaaaagaccagtatcatgcccgccggtgaatggttgctggacaattattatcttattgaggaacaaatccgtaccgtccgccagcacttgccgaaaagttttggaaaaggtctcccgtcgctggtatcgccactgaattgcccacgaatttatcatatcgcatcagaggcagttgctcacggtgatggccgctgggatgccgcgagcctgaccagctatctcactgcctatcaacaggtgacaccgctgacgctaggtgaagtctgggcactaccgggaatgctgcgcctggcgctgattgaaaatcttcgtcgtatcagcatggaagtgataaatgcgcagcaggacagaaaccttgccgatacgtggataactaggattttcgaatgtgcaaagagtgcacctggtaatttaatcatggtggttgctgatatggcgcgctctcgccccccgttaaccagcgcgtttgtcgcagagctgatgcggcgcctgcaggggcatggcaacgcgctgtcgttacctctgacctgggttgatcagtgccttcgggaacaggggctcaccaccgacgttctcatacatagtttcaatcaacagcttgccgccagccagctgtctgtcagtaacagcatcgcgggtctccgattagtgagtgaaacggactgggctgatctcgccgaaacgataagcgtcgttgaacaggcattacgcaatgatcctgccgggatctatccccggatgcacttcaatacccgagatcattaccgccacgttgtagagatcctggccagagacagtggtctcagcgagcatgaggttgctgacagggtgctggcgctttcagaggaaaaagcacccaatacaccggaacatcatgttggttattatctcgcgggcgaaggtcgacaggcgctggaaattcatctcctggcagacacttcaggactcatacgcttgcggcacagtttcaacagaataaccctgctgtcatggcttggcagcctggcattgttgacaaccgcagcgaccgcggcaatattgcacgaaactgccatgcagggcgcagactggctgttaatcgcggtgatattgcctctggttatcgctttaactcagttaatgagtgatttactcagtgacgcaaccacccgttttcgcgttcctcgccccttgccggggatggatttttcaaccggaattcccgctgacagtgccaccatggtcgtcatcccctgcatgctgaccagccacgaaagtttcagccagctcctctccagtcttgaagtctgctggcttgggaatgaaaacgaaaatctcaggttcgcgctgctcactgattttgctgattctgaaaatgaaccctcgccggaaagtcacgcgctgctcagacaggcgatcgccgatacgcaggcgctgaatcggcgctacccctccggtccaccacgtttttatctgttacaccgccagcctgaatggaaccccgaggaaggaatgtggatgggctatgaacgcaagcggggaaaactggcgttactgaacagctggttgcgccatccggggacgcaattcgtcagcgttgcagacatgcctgctcacattttaccgggtcacattaaatacgttattaccctggacagtgatacggtgctgccgcgcgatacggctcacaaactggtcgcggcgatggcccatccgttgaatacgccagagtatgatccggtacgccagagggtggtcaaaggatttggtattttacaacccggtcttgcggaggagataccacgcaacggtcaggggcgttacgcaggcctgcgaagcagcatacccggcaataacccttattcgatgatgtcttcggatatctatcaggatctctttggggaaggatcgttcgtgggcaaagggatttacgatgttgacatttttatgcaggccactgccaacacctgcccggaaaatctggttcttagccatgacctactcgaagggtgctatgcgcgctcgggtctgctgagtgaggtgttactctacgaacagtaccctaataattatctgtcggatgttgcgcggcgttcacgctggatccggggcgactggcaactgcttaactggctgaaaccacgtgtccgaaaagccgatggagcccgggccaggaatccgctgactgcgctttcttactggaaattacttgataatctgcgtcgcagtctggtcgctccctctttacttgtattgctgttcttcaccctgcttggggtacccaatccggtttactggctgggcatcttatcactgatttggctgttgccagccatcctatgcatcacccatgaccttctccataaacctctgcgccgccgcctgaagccgcatctgttactggtggggtcgggcgcgctgaagcgtctgtctggaatcggtcttaatgttgcgatactgccgcacgaagccggatattcactgaaagcgatcgccgtgacgctatggcgattggggataagcaggcgtcacctcagccagtgggtcagccacagccaggacagcaatcaggccagacccactgttgcacgtttttatcaggcgatgtggctgaatgttgtcggtggcgtggcgctgataatactgaccggacaatttgccccccagctactgtggattgcgttgccgatcggtttgttatggtgcgtggcaccgctgctgatgagctggttgagtcgccagcccgtgcgtaaggttttttcgccaaatcagaaacaaaaacagctgttacgccagacaagccgtgaaatctgggctttttttgaaacctttgccacagcaaaagagaactggcttccgcctgataattatcaggaaataccacaaccgacggtggcacatcgaacttcccctaccaatattggtctttcgcttatggctaacctgacggcatgggactttggctacctgcctggcggagaggtgctccggcgcgtgtcgctcacgctcgacacgctggataaaatggagcactaccggggccatctctacaactggtatgacacccgtacgctggtccccctcagtccacgctatatctccagcgtcgacagcggcaatatggccgggcatttgttgacgctgcgtgcagggctgtccgccatgcgtcatcagcctgttttaaacagccaacagatactggcaggactgaacgatacgctggatattctggaaaaacagtggggtcagaacccacctgacaacctgagactgctgcgcaaacactgcctgagcgcggtgtcactctctccacaggcatttttcagtgaactgaaaaacatgagcatccagtgcaaccatctgtccacgttatgtcatcagggggcgccccttcagattcgctgggcaggacatctggagaatcaactggttcagttctgcaatgagtggtcgttattgcttggctggttacctgtatcgtggaacgaacagacgctgccgacgctgagcgagcttgcccgtcagacatcaaccggtacaggaacatcacaggcgtcagcgacggagcaggcccgaatgcgactcaatattatcaccgagctagaacagcggctggatgagcatgcgagaatggatttcgcctttctgtacagtgaagcaaccagtctgctcagtatcggttataactgtgacacgaatacgcctgacaagagccactacgatctcctgccgtctgaaatccgcctgaccagttttcttgccattgcgactaatcagttacctcttaaaagctggtatgcgctggggcgattgtttaccacgattgataatgaaactgccctgatgtcatggagtgggtccatgtttgaatatctgatgccgaatctggtgatgcccacctggcccggcagcctgctcgatgaaatgagtcagtcggcggttatgcgccagattctctgggggaaagaacgcggggtaccatggggtgtttcagagtctggctatcatgcttttgatgttcagcataattatcagtatcaggcatttggcgtaccgggtcttggtctgcgcagggggcttgccgatgacatggttgttgctccttacgccacactgctggcgctgatggtttccccacagagagcctgtgagaacctgttcaggctgcaaaaaaatggtgcatgcggcgaatacggtttttatgaagcgctggactataccccctcacgtcttgcaaccggccagctttatgcggtcgtacagtcctggatggcgcatcaccagggtatggcatttcaggcgctggctcatgtgctgcttgacgcccccatgactgaacgctttatgtccagtacggtattcaggtcagcgagtctcctgttacaggagcgcgtgccggatgcggtcgatctgtacagtccgcgccgtcactttgaatctcatgagggcagggtcaaacccgttcgctatgaaccccgtattttctatagcgtggatacaccagctcctgatattcaactcctgtccaacggccattatcatctgatgttgaccgcgggcggcggtggttacagtcgctggaatgatattgcactcacacgctggcgcagtgataccacccgtgataactggggagcattctgctacatccgtgatacacagacgggggatgtatggagcaatacctggcaaccgacaggcaacttcagcggacaagacgaggaagttttcttcaccgatgcgggggctgaattccgacgcaccttcggagaacttagcgtcaaaactcaggtggtgatctccccggaggatgatgttgagttgcgacggctcacactgatccatcgtggtcgccagccccgctctctggaactgacaacctatgctgaagtggtaatggcacctgatgccagcgatctggctcaccctgcattcagcaatctgtttattcagactgagctggatcctgagcgtggcgccattctttgccaccggcgcccgcgctctccggatgaagcgagcccctgcctgtttcacatgatggtggtgcatggcgataaccgacataacgtctcgtttgaaacggacagggcaaaatttcttggtcgtggcagaaaccctgctgatgccctggcaatagagacgggagggacgctcagcaacacgtcggggtcagtgctggatccgatactggcaatacgtcactccatcactctacaaccggggcatccggtcacgattgatatcatttatggtatcagcgagacccgccagcagagcctggcgctgctggaaaaatatcgcgattaccctattgccgatcgcgtctttgaactggcctggtctcacagtctggtggtattacgccagatgaatgccagtgaagatgatgcaactttgtttaatcgtctcgccagcgctgtgctttaccctgcccaggagcttcgcgccgaaggtctggtgatcagccgcaaccggcgtggtcagtccggtctgtggggctgggcaatttcaggcgatctgccgatagtgctgctcagtataaccagcgaagaaagtattgcctcagtgacaacactgattcaggcacaccgttactggagacagaaagggctggatgttgatttggttatcctgaataacagccccggcggctaccagcagggattacaaaatcagattatggagttaatttatgccgggtctgaagccagtctgctggataaaaagggcgggctttttgtccgcaacggtgagcatctctccgctgaggataagttgcttttgatgagcgtggcctgtctttatcttgatgaccgcgctgggggtattaatgagcagcttaatcagcgtattcataccctgaaatcgccggctagggcattcattccgcgtgctgtgcgtgaacgtaatcaacatacggactggagccctgatatcagtcagctatgccatttcaatgggtacggtggattttctcaggatgggcgggagtatcagatcgtccttcgggaaaatgcgcttacaccggctccctggtcgaacatactggcaaattcccgttttggcagcgtgatctcagaggcaggacaggcctactcttggtatgagaatgcacatgaataccggttgacgccgtgggagaacgatccggtgagcgatcgcagcggcgaggcattttacctgcgcgatgaagagagcggggagtgctggtcgccaacggctttacctattcgcggacacggtgattacctgacccgccatggttttggctacagcgtttttgcccatcgagagagtggtatcgacagcgagttgacggtcctggttgccgaagaggatccggttaaactggtgctcctgacgctcagtaactcttcgggacggacacgtcaactttccgtcacaggctatgtagagtggacgctcggagaaacacgaactcgctcagctcctcacattgtgacacatgtggccagaacgcccggcggctgcggggtacttgcgaacaacttttatggtgataatggtggcggccgaactgcattttttgccgtcagcggtaatgactgttctctgacaggggaccgccgggagtttattggccgtaatggttcccttcacgccccgtcggccatgaaactgcaaaagctttctggtaagacgggggccggtctggatccctgcggagcggtgcaatcggcggtgacattaattgacggggaccagaggacatttatttttatcctcggcgcagaggagaatgatgtttatgctcaggagacgctggcccgttacatgaacgaggatacggtccgccaggagctgaaccggattcataatcactggcacaatgtgctcgataaaatcgtagttaacacccccgacacgtccataaatttactggttaatggctggctgttgtatcagacggtagcctgtcgtcttatggcccgtagtggctactatcagtctggcggtgcatttggttttcgcgatcagctgcaggactcactggcactgagccatgccgatccgaaccggatgcgtgaacagataatactctgtgcctcccggcagtttatcgagggggatgtgcagcactggtggcacccgccacacggcaacggtgtccgtacccgttgttccgatgactacctgtggctgccgcttgccgtttgccactatgttgaaacgacgggggatatggatgctctgggaatatgcattccttatctggagggacgcccgcttcagcctggtgaagagtctgtctatgacacgccggtcatcagcggcaccgaagagactctctggttacactgtgtcaaagctattcgacatgggctgcggttcggggagcatgacctgccgctgatgggggctggtgactggaatgacgggatgaaccgggtgggtatcgaaggcaaaggcgaaagcgtctggctgggcttcttcctgtacgatattttgcaacggtttgctgcgctggcggagcgcaggctggatgaaagtgtcgcctcgatgtgccgttcacaggctctgcgcctgcaaagcaatctcgaagcccacgcctgggatggtgaatggtaccggcgtggatattttgacgatggtactcccctggggtcgaaagcctcacaggactgccggattgatgcaattgcgcaaagctggtctgtattgtccggggtcgcgagcgcggggcggtgtgcaaaggccatgcgggcgctggataagcatcttgtggataacgaagggggactgattaaactgttaacgcctcctttcgatggacacggtccaaatccaggttacatacaggggtacctgcccggtgtgcgggaaaacggagggcagtatactcatggcgccatctgggccgtgatggcatttgcccggatggggaatgccgaacgtgcctggcaactctggtcaatgctcaaccctataaatcatactctgaatgcggactctgtcgggatttataaagctgagccttatgtcatgagtgctgatgtctacagcgtcgctccccataccggacgcgcaggatggagctggtataccggttctgctggctgggcctggcgtttgcttaccgaggaattactggggataaaacgcaccggcgctgactttactgttcatgcccggttaccggatgagtggccgtctttttctatggcctatcagtatgccgaaagccattatcagattagtgtctcacgcggcgatgcagaatatcgcgtgacactggatggtgttctcctctctgatgacagaataccgctgaagaatgatggacaaaaccatacggttgagatcattcagaaataa

SEQ ID NO: 81593 - DNA, 219 bp, Citrobacter koseri
atgacctcaagaattacaggcctggtaaaatggtttgacgaagacaaaggttttggcttcatatctcctcttgatggcagcaaagatatctttgtccatttttctgcacttaatggcgacaactttaaaactttatttgaaggacagaaagttgaattcgccattcatagcggtgacaaaggtcctgctgctgcaaacgtaatactttgcgataaataa

SEQ ID NO: 81594 - DNA, 384 bp, Citrobacter koseri
atgactgatgcaacaagacataaggataaatgcgaggattttgagcagcatcgcgatgattcacgtcgtaacctggaattctttggcgcgccccatgttgtgctgctttttatgccagaagtgggcgataacgttcgtgttgcgggtgacataggtatgtacgctcagacgcttctgctgtctctcaccgctcccgggttaggaggcattccgcagaacatgctgggcttttatgccgaaaccatccgcaaagaactgcgtgtggaccccgcgttgaaattactgttcggcatctctctgggctacccgggccgggattaccctgcaaatcaagacagaattaataaagcgcccctcggtgaaagtgtcatcttccatcagtaa

SEQ ID NO: 81595 - DNA, 390 bp, Citrobacter koseri
atgtttccgacaagaaatttcttgataaaaaggcctccaatttttgatgccgaaataaaatattatttggtgatgttatgtaaggttaataactttaaagtgttagtgtttttttcgactttcggcatgtctatatctcaatggtggcaatttgtattttttagagaagactctcgtaaatgtttgctgggaatcgaatccatatttataggctatacccatcactggctcattagtctcgatgagatctttagctgcaagtttaagttttttatctcttatatattttccaaggctgacttcttttacctgtacaaaaatccgctgaagatgccacttggagtatcctgcccgcgcagcaacatcctctatcttcagcggcttatgtaa

SEQ ID NO: 81596 - DNA, 513 bp, Citrobacter koseri
atggatacttctgaacactgtaaagaggtctacgcatactttggtcttgcgatgtatagagcacaatgtgtagagcagtcgatagttcaacttcttattttcttcgatttttttacgaaaaatgtacccacatttactacccgcgataagtgggaattagagtttgacaagtttgataaggtattatctgagaaaacaatggggcagcttttaggcctgattagaaaacttgagcttcttgatggtaatattgaaatcatgctttcaacaactttaaaaaaaagaaactggctagcacattctttttttttcgatcatgcagtagatttcattaataaaaatggacgggatcagatgattagagagcttaatgattcaatcgagctatttaattctgttgaagatatcctctaccctatagcacgtaacgctgcactaaaatacggtttaaccgatgagttattggacaaaattcaaagcgaactgtgtaaatcttcaacgagtgattattag

SEQ ID NO: 81597 - DNA, 300 bp, Citrobacter koseri
atgacagattatatttataattcaaaaggaagcgccgtaggctttatccgtgggaaatatatacatagcatgaacggtagtgctgtcgggcaacttcgcggaacacatgtccacagactttctggtcaatatgttggtgaactccatgaaagcatggtactaaacaagcatttggggaatctagggaatataggtaatccgggaaacccaggtaacgtgggaaatccagacaacccaggtaatagagggactcgtaattacggatttcctgatgtatcaattgacttgtttggcgaatag

SEQ ID NO: 81598 - DNA, 276 bp, Citrobacter koseri
atgaaaaaagtattagctctggttgttgccgctgctatgggtctgtcttctgctgcatttgctgctgaaacggcaacgtccacgacggctccggctgcggctgcggctgcggcacccgctaaaaccgcaccggcaaaaaccacgcatcacaaaaaacaccacaaagcagcagcgactcagaaagcgcctgaacaaaaagcgcaggcagcgaaaaaacacaccaaaaaagcggtaaaacatactgcggctaaaccggcagctaaaccggcggcataa

SEQ ID NO: 81599 - DNA, 135 bp, Citrobacter koseri
atggttctgtgtgtacgacattctgtcttaccgcgtctgaaaacagacgctggactgccgtttttcttcccgttgctcacctattccaggcccctcattgaggggctttttttttgcccaggcgtcaggagataa

SEQ ID NO: 81600 - DNA, 4710 bp, Citrobacter koseri
atgagaaaaagctggactatagaggaagattgtaagctgctaaccttggtgcgtcagcacttttccgcgctggtcagccataaccggctgaatgccacaatgccatttagccagcagctccacgatgcatttgacttacctgatcgcgatgccgcagcattgttgtatcgactcgaacaggcaaaaatcctgggatttgccagccgtcctggaggcgatcccactaaacagcagtttcgctgtctgataaacaatgatttggcgctatacgattacagcctcaccttccccactctcagaaaagcattgcatcctgatactgttgcagcagtgctaaaccacttcacgattagcaatccacacgaaactctatccaatactatcaatgaaattgcaagagccttgcatcttgcccccatgcaagtggaaaagactctgctcgaaagcggccaaataaccatcaatagttaccgtaaatgtgagcgtgttggagagaaaactatcaataataatctgcaagatctcatctccagacaaattcctgacataacgctggttaaagagattaacgcctgtcgcgcccaagtctctcaactttaccacgtgcatgaacgtgatggcgctgaggttattttcagttccgatggcacgggtttcggcaaaagctatggcgtgattcaagggtatgttgaatatctggaacgtttcgccaaaacccagcagccaaattacctgtttcccgaaggcggctttaccaacctgttgttcatgtcgccgcaaaaatcacaaatcgacctggacagtagccagaaagagaaaattctggcctctggtggcgagttcatttgcgttctctcccgtaatgatattgccgacctcgactttatggactgggccacgggcctgaaaaatcgcgaccgctatattcagtggtacgaaggggcgaaaggtagcaaatatattggcagcgcaatgcgttcgctcaattaccatgtctcacaaattgatcgctgtgaagagcagttaaaaaagctgacaacatacggttctcaggataccaactacgaaagagaaattcttgaagagcagctaaaaaactgtcgtcatagtatccgcaatacgattgagtcagcctgtaaattactatttggaccagatagtgaaaaagcttccattaaagagtacattcgtcgcgggctccaggcgcgccaagagcgaatgcaacacgcggagacagcacgaaaaccaagcaagtctgaactaagcgtacacgaagtctacttcgagcttatcaaacaggtattgcctttcgaagtttgccagtaccgcccgtcggtgctattaatgactacaaataagttcgacacatcaacttaccgactggcgcctcgtcagcgaggtgaaggcgtgcattttgagtccgtaggtttcgacttgctgattggtggcaagctggctcccaaagatccacagatcagcaccgttgcggcagctggccataccgggcaggttgcttatcttcgtgatgaacacttcagacgtaatccagactgcccttttcgccagaaaaatattcgctttacggtaatcattgatgaactacatgaagcctacacccgtcttgaagaaacatgccatgtaaagctaatcacacaggaaaataatctggcgcatgttatctctgtcgcgggacgtattcacaatgcggtactcagcctggagcgccggaaaaagcccaaagaagcgcaaacgacctttgagcaagagatggtcaaattcatcaccatccttcgagacctactggcgaaaaagtgcgaattatcacccggtacgacgctgggctcgatcctggagatgtttcgcgaccagttaggagcattcgaagttaacggcgacgccgccgaacgcatcatttccattacccggaatgtgttcagttttaaccccaaaatgtacgttaatgaagaggggctgaaacgcattcgtatgcgcaacagcgaaggcgacataacgcgcaccgagctatattacgaagtcgaaaatgatgccagcgacaccaatcccaccctgcacgatctgttccaattggtctccgtcatcctcgccgcctgttctgatatcaccaaccgacactttaagcgctgggtaaaaaatggtggccaggataactccagcagccagaatacacctttgggccaatttgttgacgcagccaataatgtagctggagtggtgcgacatatcttcgatcgcaccaccgataaaaacttgttgattgatcatttctacgcttatctgcaacccaaaaccgtattcacgatgacgccgatagttgaactcaattacgtgaacagtggagccgagcgtacaattattctggcgtttgagatggatctggtacaagagttgcctgaagccatgctgctacgtttattaacgggcacgcacaataaagtgattggacttagcgccaccagtggttttagccacaccaaaaacggtaacttcaatcgtcacttcctggagcgctatagccgtgaccttggctatcgagtcattgaacgtaaaaaaacagatatcgatacgcttagagcactacgcgcgttgagagccagtatccgcaacgtcgacttcagggtgttcgatgataagcagttaaaattgaccgatatctaccaaaattgtgagatctatcgcaggacgtatgacaactttttcgacgcgctgaagaaaccgctggagtacgacctgaaaaatacctataaacggcgtcagtaccagcgggaacttgaagcgttattgcttgccgcctacgagggtaaaaacagcctgattttgtccctttcagggacatttaagcgggcctttatcagcgcctggcgcactcatcaatcagcctggcgtcagcagtacggtatgcactcccggtgcgatgaaaaaacggataacgataagaaacatgaccagatcctgacctttaccccattcaaagggcgtcacacagtccatttggtctttttcgattcaccactggctaatgtcgaagatattaggcaagaaacctatctcaagaacagcaataccgtactggtatttatgagcagctacaaaagtgcaggcaccggcctcaactactttgtgaaataccatgacggcgatattaatgatatcaatgcaccacgtctggatgtcgattttgagcgcttagtgctcatcaactcctcgttttacagcgaagtaaaggacaacagcggcaaccttaatacattacctaactacgttaccgtgcttaaacactacgctgatgacgatattaccgtccacaagctggccgatttcaacgttaatttcgcccacggcgaaaactatcgcctgttaatggccgaacatgatatgagcttattcaaagtcgtcgtgcaggccgtagggcgagtcgagcgtcgcgacactctattgaaaacagaaatctttttaccccgcgatgtgttccgtaatgttgcattccagttcgccgctctcagtgaagatagcggtaacgaggtagtatcagaaagcatgtccttgcttaaccaccgcctaatggaggagtgcgaaaagctgagtcagaaccagtcatttagtgatgcagaacagcggtatgcgtttgaacaggctatcgtagaaaatggtcgccgcatcgatgctgttcataagcgagtcctgaaaaccgactggataaatcaggtacgcgccggcaaccttgaatatctcgaattatgtaatttattccgcgattctgactcctttaccgatcccatgcgttggctggaaaaacttcaggctaattccttgtatgccgccaatcggcaaatgcaatcaatccaccacgccctgtttatcgaccgccatcagggcaaccaaactattttactttgccacaaacgcggcccggatggacttgtccacagagattattccgccctgtcggatttcgctggcggcgcaagagagtaccggcctgagctcaccctctttccgcagtatagaaacgatgtcgattttacccccggcaacctggtcggcgagttgattcgtgaatgtgacaacatccaggaaacggcattcaaaaaatgggtacccaaccccaggctagttccgttgctcaaaggcaatgtcggtgaatatctcttcgataaagtgctaaaaagctatggcgttaccccactttctgatcaacaggtgtttgaacgccttgaaccgctagtatatgagttttttgaccgctttattgaagtgggtaacgacctgctctgcatcgacgttaaacgctgggcgacgcagttggatgatttaacgcgggcagaagaaacgcttgagaaaagcaacaacaagattcgccagatccgtaatatcaccagccaaaaggcggatacagaggggcagaaacagcttcaggctgtgctgtcaggccgttacgaacgcattcgatttgtctatctgaacgtcgcctacagccagaaccccaataatctgatgtggcaagataacgtggatcacacgatccactaccttaacctgttgcaaaccgactatcagtactatcagcccaaaaatcgagagagcggacgagctcaggaaaactcgaaactgagcatgacattggacattaacccaatgttactaaccctgctgggtgtagaaaagttgccgactaaaggaaaagtctcatga

SEQ ID NO: 81601 - DNA, 2232 bp, Citrobacter koseri
atgatccctaatttgaatgaactgacggatactccgattgcccgaaccaatttgatcaagcttgaagaagatcagctgacgaccatccagcgtctattggcccctgtatctaatatctatacgatagacttcatggttcagcgctttactaaagagcgaaaagaaaaatccgctgattactatgcgcgaattcatcaggaggtaaaatcttgcgtgcggcagaagcttgggctggaggccgggcaggaggtaaaatatgaactgcattgcttaccaaattaccatcacgtcttttttttcctggcgcctgcaactaacccgaacagtcaggctcataggacgttggcagaacgtattgaaaagctttgtcagcaactcaccgctgaaaatcatgacctatctcgcctgattcagggattatttagcctgcatttgaaaatggtaatgctggaaaaagccagtgagcgcttttcggtatcgccgacttacttcaactcaacgctttaccttaacgctcgtctgagtcagcccgtcacacaaaaaaaaggcaccggggtgatggaagcctttgagctcgacatttatgcctcagaatataatgaactcgcttttaccctgcacaaacgaaaattcttggtcgaaccggcggatgagatgcacctatccctggacgataccagcgtgtggtttagcatcgataatcgtcggcttaaagctcggcgcaaacttgatgcccgtgatagcaaactggatttttttcgtgagcgcagcggttatggcgaatgccaggcctatacctataacgtagtcatgaatgctgcctgcgagcggctcagtgaactagagatcccccatcaacctatcccatttcaggctacacacgaggtcaatcagtttgctaccgaccttgatcaacagctggctaatacgctgttggtggttaataacggcgtcgaattcagcgccacgcaagaagcttatttctttgacgcattagccaaccagttccccgggtataaactctggccgctggcatcgcttaaacattctcagcaaaccagatttgctgggctgcctgccaatacatctattcttgtactcaatgcggtagatgaagaacgaagcaacagcatccggcagcaagagaatgaatctgttgagtacaatgatttctatgcagcttttgccgacgtccgaaaacaacctgaactcaactgggatatttatacccagcttaagttagatcgtttgcaagggtggctaaatcaacaaccactgcctgtggttttacaaggaatgaacattgatcgtaagttgctggatgcgattgattttattaatgaacaattgataagcaaccctgctcaatacgaaatcgaacttacgaaaccacacagtcgtctcaagtcagcagttaccttattgaaaagtaaggtacgccgaacgaaaactgaactatggttcaaagagagcttactcaatcaacatcacattccactgccagacttggcgaacgggcactataccgcctatgcggtacgcaaaacgaaaagtaatatccacctgcttgggtatgttgaactaaaaatagagcacggccaacttagggtggttgataccgggatcgtcgaaggtgaattcgagtatctatctgttgatcatccagctctgggacgactaaagaaattattcgataaaagcttctatctctacgaccatacagcagatgtgctacttaccacctacaacagctcccgcgtgccgcgcctgattggcccggcgcaatttaatatcgtcgattcatacgcttatcaggaacaagaaaaagcgctggcggagcgtcaaggtgataaatttaacgggtatactatcacccgctcagcaaaattggagcaaaacgtactgccctatctgatatcaccgggccgctcgaaatacgactcgttgactaaaactcaaaagatgaagcatcaccatatttacctgcaaccgcatgagaatggagtgtttgttctggtaagcgatgctcagcctacaaatcctactattgcacggcctaacctggtagaaaatctgctgatatgggatgcccaaggtaaggccgtagatgtatttaatcacccgttaactggtgcttacctcaatagcttcaccctggatatgctaaggagcggcgaaagtagtaagagttcgatttttgccaagctttcacgattgatggttgagaactaa

SEQ ID NO: 81602 - DNA, 2826 bp, Citrobacter koseri
gtggttattcgtgatgcagagtggcgcattcgccgggcggatgacagcggagatggtggttacctgctgacctgtgatggcatttcggagctggtacgcggtaaagaagggctgtttctaacaaagctggagcaaaaagtcgagattcttgatccagcaaaaacaaacctggtggaagatgagtcagccaattaccaggcggctcaattgtacatagagagccagctacgccaacgcgtcccgactgacagcaaagtccattttggacatcaggctgcgatggactccatgccctttcagctcgatcccacacgcatggcactggcacagccgcgccagcggatattaattgctgatgcggtagggctgggtaaaacgcttgaagccggtatcctggtttcagagctgattcgccgtggacgtggcaaacgcattctggtgctggcggttaaatccatgctcacgcaattccagaaagagttctggagccgttttgctattccgttgacgcggcttgactccgctggtttacaaaaggtgcgtaaccgtatcccaaccaaccacaacccgttccattatttcgataagaccattatatccatcgataccctgaaacaggacatcgaatatcgccatcacctggaaaacgcctggtgggatattattgttatcgatgaagcgcataatgtcgctgaacgtgggaccagctctttgcgcagcaaactggcaaaattgctcgccgggcgcagcgatacgctgattatgctttcagctacgccgcatgacggtaaggctgaaagttttgccagcctgatgaacatgctcgacccgacggccattgccaatccgaaagagtatgaatacgccgattttgccgataaaaatctggttgtgcgtcggttcaaaaaagacgtaaaagatcagatggctggtgagtttccggaacgtaatatcgtcaaattgatgcgcccggcaaccggagctgaagaggaagcctaccgccgattggttgagagtcagttccgtgacgatgatgatgaagactcgctgtcaaataaaggccgcctgttcaaaattacgctcgaaaaagcgttgttctccagtccaatggcatgtgccagcgtggtggctaaccgcctgaagcggcttgagaaccgcaaagaaataaacagtcagagccagattaacgaattagagtcactgctgctggcgctcaataatattgatgccagccagtttagcaagtatcagttgttgctggagaccatccgtaacgatctctgctggaaagcgaataacacggaagatcgtctggtgatctttaccgagagtatcaaaacgctcgagttccttgagcagcaactgcgctccgatctcaagctgaaagacgatcaaattgccacgttgcgaggcgatcagggcgatacagttctgatggaaaccgtcgaagcgtttggcaaaacccagtctccgctacgcctgctcatctgctcggatgtggcgtctgaaggtatcaacctgcatcacctcagccataaaatgattcacttcgatattccgtggtcgctgatggtattccagcagcgtaacggacgtattgaccgctatgggcaaaaacaccagccacagatccgctacttgctgactgaagccagcgaaccgcagatcaacggtgatatgcgtgtgctggaagtgctgatcaataaagacgaacaggcgcagaagaatattggcgacagttccgaatttaccggcaaatttacccaagaagaggaagaggagcaggttgctgaattcatgatgcaggacgatggcgccagcctgttcgacgacctattgaatagcaatgtcactgaaaattctgaacacgacctgtttggcgaaatctgcagcgcagtgtccagcgatgcttcgatcgtgaccgaaagcgacattagtctgtttgataatgagcaggcatactgcgaaaaagcgctaggctatctgaaggcctgcggccagaccgtgcaatacaataccttgcctgataacaccttatcgctggtcgcaccggaggagttacgccgtcgctttaaccagttaccgccggaaattgcgccggaaaactggcagctttatctaagccaggacaaaaccgttatcacggaagccatttcgcgtgcgcgcggtgagcaacatgcctggcccgatgtgcagtatctctggcaaattaacccggtcgtgcagtggttagacgacaaaattcagtctgcctttggtcgccaccaggctccggtgatgcgcctgccgcacctgtttgaacctgatgaggatcatttcatcctttccgggttgttcccgaaccgtaagtcgcacccgatggtgaacccgtggctggtggtgagctttaaccgcgaaacgttaagcggtagcctgccttttgctgagtttctgaaacgacatccgcaactgagaagcaaactgactaacagtggtggtaaagatcgtaaccaccagcgccagcaggatctgctggaagcggcaatctcccatgcgcgggatgtgtttgttcacgatcgaaatgcttttgaggagcatatcaatcagcagctcaatgaacatctacaaaagctggaggttctgcgtgggcgtcagctgagtcaactggagctggattttgccgataataaacagctgctttcagtgaaacagaaccgcaaagaacaacgtctgcgcgaaatcgaacacaattttgacagctatatccaatggattgaggacaccatgaccaccgaaaaagagccctacatccaggttattgcagtaatcaccggagcggagggctaa

SEQ ID NO: 81603 - DNA, 4296 bp, Citrobacter koseri
atggcgctggtcggtattaataacgaaaacgaattttactctaaccactatttgggcgaagtctttaccagcgatattcgcgatgtactggaaccctggattgagcaggaaaatgccgctcgcgaagctgaacgcgcagcccgtgaacagggcaaagaggttgaggcgggctaccgcgcgccgtggaaccagcttaacagcctggcgacagagtttttccgtaaactcactgaacatgaaaaacagcgccagatcccgctgcgtctagccgatcagcgcagtcgctggcagccgctgttaaaggcattgggttatgaactcaatccgcacattcagatgctggatgacgatacgcctttgccggtactggctcgttacaacagtaccgacggcagcccgtggctgtggattgttgaagcacatgatcaggatgaaggaacgctggatccgctggcgctgtcgctgctgaccgcgcagttcccggcagataccgataaacataagcgcgacagtctgcgtaaaaaagcgaacggcgaataccttagctggcaggatctgctctccacggtggtcttcacgcaaaatgaaccgccgcgatttgtactgctgcttggcaatcgccagctgttattgctagatcgtactaagtgggcgcaaaaccgtctgctgcgttttgattttgaagaaattttaagccgtcgtgaaacggatacgttgaaagcgacgtcggtgttgttacacaaagactcgctgttacccggcagcggtgcgccatacctcgattcgctggatgacaattcgcacaagcatgcgtttggcgtgtcggaagatctgaaatatgccctgcgtgagagtattgagctgttgggcaatgaagcgatgcgttatctcatcgacaacgagctggcttattataccgggaaacgtgctattaacccggatgagttgagccgcgaatgcctgcggtatatgtatcgtctgttgttcctgttctatatcgaagcgcgcccggagctgggctatgcgccgatgaccgccaaaacctatctgcagggctacagcctggaaacgctgcgcgatctggagatgatcccgctgaccagcgaagaagatcgcaacgggcgctacttccacgatagcctgaatatgctgttcaaactggtgcgtgacggctacagcggcggcgtgaaaatgcagagtgacctggagagcggcgaccggatcactattcatagccatcagttcagcgtgccgcgtctggaaagccatctgtttgaagcgagtaacacccgcattcttaaccgtgtggtgttccgcaacgaaaccctgcaacaaattattcaggcgatgtcgttaagccgcccgggtaaaggacgtttcaaccgccgggggcgtatctcctatcgtcagttgggtatcaaccagttaggtgcagtgtatgaagcgctgctctcctatcgaggattctttgccagtgatgacctctacgaggtgaaaaaagctggagaagagtttaacgagctggagactggctatttcgttagcaaagacgagatcggtaaataccacgacgatgagaaggtctacgaaaaagacggcagcctgcgtattcaccgtaaaggcagctttatctaccgcatggccgggcgagaccgcgaaaaatccgcctcttactacaccccggaagtactgacccgatcgttagtcaagtatgccctgaaagaactgtttaaagagcagattgatccgattaccgatccgcacgccaaagccgacgcaatattaaacctcaccgtgtgcgaaccggcgatgggcagcgcggcgttccttaacgaagccatcaaccagctagcggaagcttacctgttccacaaacagcaggcggaaggtcgccgcattcctcaggatcgctacacccaggagctgcaacgggtgaaaatgtacattgccgacaacaacgtattcggcgtggacttaaacccggtggcggtggagctggcggaagtgtcgctgtggctgaacgccatcagcggcgatgcatttgtaccgtggtttggctaccagctgcactgcggcaactcgctggttggggcgcggcgtcaggtgttcaacaagagcgaactgacctacaaaaaagcgaaagatccgagctggcttaacagcgagccagccgagctggcgatgaatattccacgcgaagagaagcagattttccacttcctgctaccggacagcggcatggccaactacagcgacaaaaccgttaagcagcgctatccggatgatttcaaagcgttggatagctggcgcaaagagtttactaaaagctttgctccacatgagattgttgatgtgcagcgcatcagcggcaaagtggaagcgctctggaacacgttccgtcagcagctgaaagctgagcgccagaaaaccgccgacaattatccggtttggcctgcggaaaatacgacccaagcccgctcttctttaagcagtaaagatgaaaccttcagcggccgcctcgaagataacagtacctatcagaaactgcgctgggtgatggactactggtgtgcgctgtggttctggccaatcgacaaagcggatgaactgccggatcgcggtatgtggctgatggagatggagactctgctcgacggcattgtcatcacggaaagagttactgaaaccgcagaacagaccaccggcgatctgtttgccgacgagggcgttgtgcgtgaagagtcttcgctgttttctggcgtcggtcgcctgaaaactgatgtgctgttccgccatttgccgcgtctggcgattgttgatgcgctgaagaagcagcaccgtttcttccattgggatcttgaattctgcgatctgtttgccgaacgcggcggctttgacctgatgctcggaaacccgccgtggttgaaagtagaatggcaggaagctggcgtgctgggcgactacgagccggagtttgtgctgcgtaaactgagcgcctcgaagctggcgatgttacgtgttgacacctttaagggcattccggcgctggaagcggcctggcgcagcgagtatgaaggctgtgaagggatgcaaaacttcctcaatgcgcagcagaactacccggtgctgcgtggtgtgcagactaacctgtataaatgcttcctgccgcaggcatggcgtttaggtgcgcagaaaggcgtggcaggtttcctgcacccggaagggatttatgacgatcctaaaggtgggcagctgcgtgcatcggtgtatcctaggctaaaagcgcattttcaatttgccaatgaagtaaaaatatttgctgaagtggataatcacaccagatttagcatcaatgtatatggcccttattcccagatagtagcattttcaaatatagcaaatttatttattccacaaacaattgacgcgtgttttgaacatcaaggggacggtattgttccggggataaaagaggaaactgaaatcgatggcaaagttaaagttaaatggaatttccaggggcatttcgatcgagttgtacctataaatttaaaacagttgggtctttttgcgcgtctttatgatgttgtcggtactcctgcccaggaagcccgccttcctgcgttgcatgctacacaattggttacagtacttgaaaagtttgcgaaacaacctcagcgattaggtgatttgcatgggcaatattattctctagaaatgtggcatgaaactaatcagcaaagcgatggcacaattgagcggcatacccaatttccggaagactcatcacaatgggtattgtccggtccacatttctttgttggcaatccgttctataacacaccaaaatcgatctgcgacacaaataaagcatatgataatctcgaccttttaacattgcccgacgattatatgccgcgtactaactatattccagcatgtgataagctggagtatgccaagcgtactccgcgagctatttgggccggttcgggtgaagatgaaccgaagaaggtaacagattattatcgcttagctattagagctatgttagctcaatcgggggaacgtacactaattagtgctatttatccgccagaaataagtcacatgaacgctgtgcgttcttactgctatagctcagagaatctgttactcgaacattcaggtatgtgttttctttaccttttgattttatttgtaaatctactggcaaggcaaacttacatcagatgcttgatggtttctcatatgtatcattcaatccgagacaaaaggcattattatactgcttag

SEQ ID NO: 81604 - DNA, 438 bp, Citrobacter koseri
gtgtttgtcgctcaggccttaggtttaaccctcgaagagctgctgactatctaccgcgttcagttcccggtcatgcgtcagtatgaagccgatacctggtacgatcaaaacggccgcattatctttaccccaagcaaaggcctggtgggcgttggcctgccgcgtaccgcgcgtaaagcggacctgaaaaacggttttgtctttgatgtcgacagccctgaatggaccagcggcgactgcaccgatcaagctatcggctgggatgatgtcaagcatctgcaaaccggtaccgtcagcgtcacttttgatgactatacccgaagcgacgaaggcgagcgccgtactgtcacttggcaggctccgtttatcaaacccgaccgcgaagacgactacaaagtggcctgggcattctttgcacaagataaggagagcgcctga

SEQ ID NO: 81605 - DNA, 6342 bp, Citrobacter koseri
atgctgccttctgttgtcagtcggcaggttgccgacagcgttgcctcctttttacgggcagccttcccgcttaacagcccgctgtttaatggtgaagaaaataataacgtctcgatgctggagcaatttctgtcccagccggaaacgctgctgaaagggccgtatctttctgctcagctgccgtttcgtaaaagtgatttaccgctggatttctttcccaacctgacgctgccgttcccgccgcacgcgcatcaggcgcaggcgtttcagcgcctgggtatcgaggtgcctcagtcgacgctggtagcgaccgggacgggttccggtaaaacggaatgttttatgttcccgctgcttaaccattgtgctggggcatcagaggccagtgttaaagcgatcatcatctacccgatgaacgccctggcaaccgatcaggccagccgtttcgccaaaaccatcgccagcgatccgcaactgcatggcaaagtgaccgtcggcctgtttgttggcgacagtgaaatcgaacccagcaaaaagatgtctgcggataaagtcatcacctgcaaacataccctgcgtgagaacccgccggatatcctgctaaccaactataagatgctggattacctgctgatgcgccccggcgatcagaagctctggcgctataaccagcctgggtcactgcgttatctggtggtggatgaactgcatacgtttgatggtgcgcaggggtcggatttggcctgtctggtgcgtcgcttaaagcatcatattggtgtcgatgacaagcgttttgcctgtgtggggacgtcggctaccgtaggtgacgaactgggacaactactcgattatgcgaaaacgatctttgatcagccgtttagcgatgacgcggttattcgcgaagatcgctacacggcggcggaatatctgcaaggttataccatcgagtacagtcagtatccgggccaggatgtcagcgctgcgctggatccgcaaacgtacgccagcccggtagattatctgaacggacaaattccactatggtttccggatagttcactgcaattacctgccgatctggacagcgatctcggacgtgaaaagcgtattgagttgggctcattgttacgtcgccacagcatcctgcacgtactccttgaggatttgcaggggggaattttgtcggaacagcagtgcctggaaaatctccaggtgatgctggcggaaagcgccgggcatgcaacccgcgtgctgcaaagcattctggcactaattgcccaggcacgcctggaggttccagaaaaacaggaagatcgggaaaagcgcctacaggtgaacaaagcgcggcccgtactgccttttgtgcaactacgttctcagctgtggttgcgcgagatgcgccgcctggttgccagcgtgtcaaaaacacctgagcttgtttttgctgatgatgtcgcggtggaagatcgcgaacattatcttcccgttattcactgtcgtgactgccatgctaccgggtgggcgagcctgcgccatggtcagagcgttcaactcgaaactgatctggacggtatttatcgtcagttcttcgaaaaaggccgttctattatattggccttcccggataacaacgataaacctgtcagcggtgttcaccagaagctgtgcccttcctgtttaaagctcaataagcaatctaacgtgcagtgcgggcattgtggccatactggtctgctacaagtacttatcccggatatgctcaaagagcgtaaggatgagctggaatttgccaacgaatgcccgtactgcaacagcaaacagggtatttcgattcttgggtcacaggcagccagcctgtcggcggtgatgatccatcagctttatggcagccagttcaacgaacataaaaaactgattacgttttctgactcggtgcaggatgctgcacaccgtgccagcttctttaccgcccgcacgtggccactgatggtacgaggtcaaatcgccagcgtgttgggtgaaaaagaaacgttaccgttggatgcctttgcggcacgtgtctgccagcagacgcgtgaacgttcaccggatgatgcccattttgccgcgagcttcatcgcgcccaacatgcagtggatgaacgattaccagacgttgaagaacgaaggccagctggcagagagttccgatttaccggagctggtttctcttcgtctcgactgggaggtatacagcgaatttaccctacgcgcacgaattggacgtacgctggaggccaccggttacgcagctgcaggaattgatgttgcacgtttcaattcagcgataacggcgcttcaccaacagcttgtcgaagagctgggtgatgaaatggttggggtcagcgttgagcaggtggcacacctggtgattggcgttctttggcatcagcggcaggcgggagctgttctgcatccggcgttcgaaagttatcgtcgtgagggtaagacctttatgatgacgcagaaggagcgaacttcacgctatatgccatctattggtccgaaaacgcgtaaaccggcctatgcctcgtttgaaaaaataaatggcttccatcgattgattggtgcgaaatccaaccccagctggtatcagcattggatcaaccgcacactcagcaacggtaataatctgtttatcagcagcctggcagagacggttttacgacgtctgtttgcggcactgaaaatggccgggttggtaaaagattttgatacaaaaggcaaagaagcatgggggctagtaccttcggcgctggtggtgagccgcgatgttgttcagctaaactgctcttgctgtcgtgaggttgtttgggcaccggccgatcaggggtggcactggcgaaacgcgccatgtctttctctgcgctgtgaaggccgctatcaggaaactgaaaatacagtgacctggcactgggataatatggacatcgctcgtgttcagggggcagagcataccggattactgagccgtgaagatcgtgaggctacggaacaatcgttctaccgcggtaatcagccatggaatatcaacctgctttcggcaacaccgacgctggagatgggtatcgatgtgggtgacctttctacggtattactctgttctgttccacccgcgcaggctaattacttacagcgtattggtcgtgccgggcgtaaagacggcaatgcacttaacatcactgtggctgaggggaacccgcacgatcagttcttctttgaagagcctctggagatgatgcaagggcaggtacaggcccctggtgtgttcctgaacgcaacggctatcctggagcgtcagctggctgcattctgcatggacaactgggtgaaaaccggcgtcccggcatctgctatcagcaaaaacgtgaagcagatgctggacgagctggagtttggacacaagtctgggttcccttataacttcctgcgttatattgatcagcatcatgtgtatattgctcagcagttctcatccatcttccctgatcttacggaagacactcgtctacagttactgtcatatttgcaaggggcatcagggcagcgttctctggttcaacgtatcgaacaagcattaaaactgctggtggaagatcgcaaatcgttgcgttcccggattgataaactcaagcgcagtatcgacaagctggagagcgatccgcacgatcaaaactttgacagcgatatgcgcgagttgacttcggaacgtcaggcgctgatggccctggtgaaccagatcaataacaagcaaacgcttaatttcctcaccgatgaaggattacttcccaactatgccttcccggaggccggtattacgctgcgttctgtgctgtggcggcgtaaagacggtggggagacgcgtgagtatcagaacacgacctacgaatacgaacgtccggcatcaacggcgctggctgaactggccccgttgaataacttctatgcgggcgggcataaagttgaaatcgaacagattgatcttaaattgtctgagcctgaaaactggcgtatttgcagccactgtaactacagcgagaatatcgatcagaccggcgatcagcataaatactgccctaaatgcggcacaccaggttgggctgatgccggacaaaaaacgacgttactgaagcttcgccaggtttatgcccgctcaagcgcccgggacagccagatcagtgatgagagcgatagccgagaaccggcattcttccagcgacagctgctggtcagcttcgaaaaagaggatgtatcggccgcttatgccattgatgaaggagaaatcccgtttggctttgagtttttgagcaaagtgactctgcgagatatcaactttggcaaaatggcggatgatgccaatgaactgatgatcgcaggagaggcaaagaaacgcaccgggtttaaagtttgcctcggctgcggcatggtgcagcgccctcgcgatcatgaacctcgtcatgacctgagctgtaaatatcgcgctgaacccgaaaaagcgaagtttgaagattatctctacctttatcgccaactggaatctgaggcattgcgtatcctgctgccagtgaccagctacagcaacgatcgcgtggtggaagcctccctgggtgcagccattcagcttgggcttaaacattacttcaaaggtaacgtggatcatctgaaaggcgtggtgtatcgcgagccggaaaatgagggcgaatcctggcgtcagtatctggtgatttacgacaccgtaccaggggggactggctcactcaaagaattgatgcgtacacctgacaaccttctgaaattacttgagctggcctacaaggcgctagtggaatgcagctgcaaccatgatacgcataaagacggctgctatcgctgtgtttacgcttaccgtgaccgcgggcgtatgaagtatgtatcaagagatcaggcgcgtctcttactggcgaaaatcctgaaggccagtgcttctatacgcgttattgattccatcaaaaacatttcgcttgatgccatgatggggagtgaactggaaaaacggttcattcactgcctgcaggataacaaaaatcttctcgtgagccggagttatgcccatcagaatgcaggctggattattaatacccgtacagaaccggcgatgagctggcatctcaaagcacagattgatttaggggttaaagaaggggttggcatccttagccgaccagattatgtgctctaccctctgatgcagtcagaaaagataaaaccggtagcaattttcctggatggttttgcttttcataaagatagcgtgtcggatgatgtccaaaaacggcaggcgattaaagacagcggtaatttttgggtatggacactgacctgggctgaccttcaagaacaaggcattaaacatgtacagaatgttatggggcttggccataatccggatatgaaacagcctaagttttataacctgttccatgatacaaactttgctacgcttgaaggttcattccgggagagaaacagttttgcactgctactcgattatctctctgatcccggtaataaaactctgctatggcagaaaatggctgctgcctttgcttgggtgtggctggatcctaaaaagtcgcaggatactggagccaaacaaaagtacgcctatgaaatgcaggagaacgctcccgcttatcggttgaatgcacttttgcctgatgaaccttttgtatttggtggtttactggatagctgtagttcatcacaacagttcattgagctggcagctgttgtaccgcaacaagccattaaatcaacgacaagcattgaacaaatgcgaaattggttgaggctgcatatttgctttgacgatcgttattcccaggatgatggctatgaagccggatttaacggtttctggtggatggtgaatttactgcagttcctgccagatatgacatttaccagccgtaaagcggttcatttaccgcaggaggctgaaacggtaaaaatgcagacttcggttgtagtggatattcagcctgacgagagctgggcagaaatacttgagtttggcttattgggcgcagaagaaatcgctttgcttcagtcgttatcgcttccggcaccgacggttggatatgaattgcaggatgacgatggcgaaattattgcagaagccgatctcgcctggccattacaaaagcaagccttgattattgataatcaggagtttactgctttattcgcaagtaagggttggcacgttgcattcgggccaattgacgaaaatacattgcagcatctgtccggaggtgacaaatga

SEQ ID NO: 81606 - DNA, 2124 bp, Citrobacter koseri
atgacgattccaacgccaaaggtggcactttctgatggttttctgggggcttttgcgcggattcctaaagcgcagcaaaaaaaggtccaggaattcatctctaagttccgccaggatccgacgagtaatgggctgaactacgaaaagatccacgatgcacgcagcaataatgtgcattccgtgcgtatagaccaaacctaccgggggatcgtcctgaaacctgagcagggtgctctgtatatgctgatgtgggtggataagcatgacgaagcctacgactgggcgcggcgacacgaatgtgcgattcacccggtaaccggtgcgattcaggtgattgataccagctatatcaaacctacccccgagccgactgttgttgataaacccaaactctttgctgcgtatacggcagagcagatcctcgcgctgggtgttcctcctgtgtttattgagcaggtgatggctcttgtggataccacagggctgaatcagctggaaagcgtgatgcctgcagaagcctgggagcccctacactggctggcagaaggtctggattaccaggaagtgctggaggagtttaacgatcaccgtgatgagcctgttgataccaaggactttattgaggcaattgagagaagtaaacgtcgtttccatgtcgttgaaaatgaacaggagctactgcaaatgctcaatgcgccactggaaaaatggcgtgtattcctgcacccgagccagcgaaaactggtggagtctccggcaaatggtccggtacgtgtattgggtggtgcaggcacgggaaaaacagttgttgcgatgcatcgtgctcgttggttatcccaacgcctggccgataaacccggtaaaaaagttctgttcacaaccttcacccgtaacctggcggcggatattcgcgccaacctccagcgtttgtgtagtcgtgaggagatggcgcgtattgaagttgttaacattgatgcctggatgagcgagcaactgaaacgccatggatatgatttccgcgtggtgtatgacagcgatgaagggcgacgtaaatgctggaactatgccttgcagcaagtccctgctgaactgggtttaccggaaaacttttattctgaagagtggcaacgtgttgttcagccgaatgcagtttacagtcgtgaagaatatctgaaggtgagccgtattggtcgtggcacggcgttatcacgtattcagcgcgcgaaaatctggcctgtgtttgaagagttccgggcacaaatggcgcgagccaaactgcgagagatgggagatgccatgcatgaggcaatcattctgtttaaagaaaaacaggtgcaattgccttatagcagtattgtagtcgatgaagctcaggatataggcgcaccggcctttacccttattcgtagcctggttccagagtctcctaacgatctctttatcgtgggtgatggacatcagcgtatttaccgcaataaagtcgtgctcggtcagtgtgggattaatgttcgtgggcgtcgtagtaaaaaactgaaaattaactaccggactacagaagagacgcgacagtttgccgtcgggttattaaccggcgttaaggttgacaacctggatggtgaaactgattcctgcaacgattatttatcattgcttcatggtgaaaaacccatgattactaatgcttcagattttaaggaagaggctgagacgattatcaagcaaattcaggcgctgttagccaatgatgtccgttcccaggatatctgcattacttcccgcacgaggcatacgaatgagcgctatgtgtcagctctgaatgaagcgggaattgaaacttttaatttagggaatgatagtggcgacagtgatcaacgggccggtgttcgcattgcaacaatgcaccgcattaaagggctagagttccagtatgtgttccttgcgggtatcaacgatggcgttgtaccggaagtaaaagccatagcatctgacgatcctgttgaacaacgtgatgcattatttaatgaacgtgcgctgctccatgtggctgcaacccgcgcggtaaaaggactgtttgtttcatcttacggtaaacctagtttcttactggagcctgaaagcgagtaa

SEQ ID NO: 81607 - DNA, 1383 bp, Citrobacter koseri
atgtacatcgagaaatttctgactgaatacgatgactcgctaacgggtgagttgaatgtggatccgcttgggcaattagtcatctggtcgtcctgggggcaggacatctttcatagccgtattacttctatcgcaaatgatgtacggcaatatacgctgaatctgctgcatcacagcgtattgcgccagatactggtcgatgaaaagctgcaaacttcaggcgtgatgaaaggtctgtatcccaaaaagcaattacatgagtttagagttgcctgtctgatccatttggaaaatatttatatctactccatgctggcggctgaaaaaagaggtgtcactctcactggtgtgcagggtattaataaagccagatctaaatggaacgctgcaaataaaaatcctcagatactttttggtcatgagaaaagtagtgagttactgactaatcagatcgctcttggtaccaatgggcgctataaatcgccaatgatgaaaatgcattttttctctactgattatcgctatgatctgccggaaagcaagccagtgtggcaggcagcagaggcatttattcggaatgtaccagagctgaaaaaattacatgcagcggcattgacttacatgcaattgaaaatgcaggcctcacataagcgcgacctcaacccatttttcgaagatattcctgtcggcctaaaaaaggcgtatgtaaaggcattccgcgacccgaaaatggtcggggattattcgcgggaattttggctacaaagaacggggttagataaatatgcggcaggtgctatttatcgggtactcaagcaggagcgttcggatgagttagagcttacagatgctgaagttttcaaacgtgccatgcaacaggcaaaaagtgtgcctgaaatgaatgaaagtgaccttaaggcgttacaacatatcagtcaggcggagccatttttatccctgatcgacctgatgttttcaggcttacgccgacagagtagtcagactttggcagaatttcgtcaattctggcagtcgcgcggtcttacggaacttgatctgccacaaaaggcggctcagcttctggaaaatgatgtgctcctttcctcgctttccggtacgcccgccagacgttttcagcaactattagcactggcctgtatgccgtcgctggaagatcaggttcgaggcttgctggattatcatcacaagataatggagtcaagggggcagttcccgtggctcctgcttgaaggtgatgatattttgctgcaggtaccaccatgttcgctacgcgaagatcgtcagaatagcgactgggtaaaccgttattatctaccacagttcagacatttgctgaacggtttatgggggcattctgcatga

SEQ ID NO: 81608 - DNA, 1902 bp, Citrobacter koseri
atgaagctgttagatgtcttcaaaaagcaaattgctgatatgggtatgttgaaacgtgtctggctcaccacctttaatctggatatctcttttgttgaaacgtgggtacttcctgctgtgttgggtatggacccgcccgttagtcgtatggattacgaaggtctgcagcgtgcgctgaatgagagtggtattgatttccgcatctactgcgatccgcgcatgattgcgaaagaaaagccgaaacgtacctccattgcggtatatccggtgtcggtgcgtaagctggctcaaagcgaagagtcttatctggataaagagcgcgggctgtttcacccaaaagtattttatctcgaagatcactacagaaagattattgtgggtgcgggcagtgccaaccttacgcttagtgggtgggggcgaaatcaagaaactgtggattttcgttgtgttgcaagtaatgcccaataccagcaggtaaaacgattttttaccacaattgataacagtctgaatgatgaagaatttttcccaacccgtcgcaagtttctcggtgatgatcctgattggtcatttattcacagtctggctggttgcacactgctagatgcattaaaaaacggcggtgagattcatacactcagtgtttggtcgccttatcttgctgaggatttagcagggtttatcgacaatattgggcatgaagtgctcgtagaactggttccggatttggttgagggacgttatatccgcactcgatggagtgacagtattcaggcaatgattacaaataaaaagcttaccgtgtatcgctctccagtgcccaaggacgatagggcattgatgacccacgccaagctctggctggcgaaaagcaataccggtacgcaacttgccgtggggtcctggaatttcaccaacccgggttgcagcagcttacctgaggcaaactggaatgtagaagcgggaattgtgcatccggtctctcgtaacatcacgatttgcggcaaagaatgggatgatgttaatgaagagaatttcgccagtgaagcattgttggaggaagaggcgctggagcctgatgaacttcaacctttcgatctgagcgttatttttgactggactcgatgtgagtatcagatttccgggcaatggttcggtggtaagcctgcgtcaggttatcaactgatattgcccggtatcaacggggcaaatgaattggtatggaaagctaccggtataggtctgaaatcgccccggcaattgacggtattaaaaagcaatgccgtattggataaccctttttatacccttcgtagaactggaataaccgactggcagggcatgatcgttgaaagcggtattgaacaccggcgtgcgttgagctttaagtcgctagatgacttacttaacagctatctgaattcagtggatcccgcattgagtgatcgccttatgctgcgctgtgctggagcgcaggatgaagagcaaagtgaggggatggcgcaagccatgaatttagatgccactagctatttccgcctctttcaggctatccaacaacggcgcaactggctagcagacgcggacgatggcactcagctgtatcgtcgtttgttcagtgaaccaggttgcttacaggaattggctgaaatagccagggagcgtataaatcaaccgactcagctagtatttaactggtttctggcccaagaagttaacactctggccgctctggcaagaaagcgtgttaaaagcatacgtcacaaacaaggggctgaagccatatctgtggctgtgcacttgtgggagtctctacaggttgcaattccccccctaactagcgatgccactagcctacgttatctcgctgctatcatggaagactgtagttatggcgaataa

SEQ ID NO: 81609 - DNA, 1674 bp, Citrobacter koseri
  misc_feature (1619)..(1667): n is a, c, g, or t
atggcgaataagttaaaacagatcattaccccggttgaggtttcagccgtgatgaatttcgatgcgactgatacgcactggcagtatcaatccggtgcttccagcatggcggcgaagcaggcagagggggtggctgggttgtggaatttgctgaataaacaacgactggcactccttgctgatgaagtcggcatggggaaaacttatcaggcgatgggagtaatgttgttgttatggcaggcaaaacctgatgcacgcattctggttatggcacctaacaggacgctctgtgataactgggagagagaatttagcattttcacagagatacactatcgggctgaacataatgcctttaccactttagagggtaagacaaaatatgccccacaaatttatggcagactggcggagctggcggccgctgtggagaaaaaatctcaccatttttaccttactactatccattcactaagcggtctggtccctccagatgaaaaaaaagatgctttaaatgctgccgcgtcttatggcgtgttatatcgtcagcagattaagcaagctcttggaaaaggagggtttgacttaattataatcgatgaggctcattactttcgtaaccgaagcggatcacagcgtgccgccgccgctcaggccttctttggtgatgcgcaggaccggctggggagcaatgtactgttgttgacggcaactccaaatcactcagcatcgcgaaatgtttatgacatatttagctacttcagtgacatgccaaaacgttatgcagaggatgatgtccgtgcgctgatgaatgattttgccatccgccgactgcgcaaaatgcagggcagagagagcagccacagcaaatatgaatatcgtcatgagcgcgctagcatttccagttttactaataagatggatgctgagttgttttttgctctatatcagaaacaactcgtggttcaactggacaaagagaaaaaggcaggtggcggcaggcgcatgctatatggctatcttgaagggtttgaatcaacgggcagtaccgcaagtgagcgggataatagtagtgatgaagaggggcaaatccataatgacttcaactacgcgccggattctgctctgctcaatagcttgacccggcagtttcacgatatctataaccgctttccagatcatcccaaatacgacactctggtagaggcctgctttaccagtgatccgttcaagcagtctcagccgctacattgtagtaagcatttggtttttgttcgtcgaataccatctgtacgcgaaattactcagcgcatcaacgcacgttatgatgaaataatggctgagcgattgatgaatgtctggcagctacctgcaaaggcgctggcagaatggcgagagtcgggttggtcccgagatatttttgttaagcttttatcggaaaaatccaatgaaaagtccgattttgatgagcatatgctggaggacggggagacagatgagcctgaaacggataacgagctaaagctttcaagtaaaattgccgagctatttgttatgaagaaaacgggcctgcgcagtaccgactgcgccaacgttagtttgcgtttccgtcgccctgnnnnnnnnnnnnnnnnnnnnnnnnnnnnnnnnnnnnnnnnnnnnnnnnnttcttga

SEQ ID NO: 81610 - DNA, 843 bp, Citrobacter koseri
atgtttcatgagctgccgcggccagcaaaagagcaattgattaagtggcgtgaccagcctaacggtatggcaattattgggaactttgccaactatcttcgcacgggttacctgtttgccagccctgtgatcattgagctctattgctggtttacagagttcaaccgtcgacctcaaacaggtgaggtccagcagcgatatcagcattttgtagaatgggtcaccccaaaattgaatggatcactgatgctacgttattttgtggctgccattgaaactttcgaaacgctatgtgtgaaaattgttggccagaaactagataatactcaatatacttggcgcgagttcactagcttgagtagtccaagttggtatgccagcgggcagtcaaaaaatcgcgaacgtttaattcgtggatttaattcacctttcttccctaatgtgctggtagcaacctctgtgttgcaggaaggcgtgaatcttcatcttcaatgcaatcaagttcatcattatggcatcgcctggactcctggtgataacgagcagaggaatggacgggttgatcgcctctttggtcgaatcaatacaatgcttcaagtccagggggcggctgagatgattatcaattatccctaccttgcaggtaccttcgaccaggatcagttggcatcatttatacgccataaacacagtgttgaagagaagttagatagttgcgagctggaggattttgacagcgaaattgatattcaggaggatcctcaaggttggcaaaaatggctacggcatccttgtaaggataaagataaagaagatccttacccagccaagtttgatcagtag

SEQ ID NO: 81611 - DNA, 573 bp, Citrobacter koseri
atgcaaaacaaacaacgatgggagccagactggtttctacaatcactcctgaacaaccatattgacaaactggtagagcgctattcctgcctgctggcactacgaacagatctgttttaccaggatcataccgctaagtatttcctgcagaatcaccagcagctcgaatgggatatccgaaagctgatgaaccgtatgatgcaactcgaagcggtggtcggtttcttctgggttatcgaatggacagaagaccaccactaccatgcccatgtcgtgttctggctggatggtagtaaaactcagaatacctatacctgggcacagcaagccggtttgtactggagcgatatcactgaccgggaaggctggtatcacagatgtgagtttaaagagcattacgaggccaacatctacattccggtacgttacagcgatccggacagtatcaccaacatccgacaggtactggcgtatatgaccaaaacccagcagaaacatgggctgctactgttcggttgcaatgaggtccccgaacgaccttcaagcggacggccacgtaagaatgtcttctga

SEQ ID NO: 81612 - DNA, 579 bp, Citrobacter koseri
atgcacacaccttaccctttcaattccagatacacgatgaactggtttctactgtctctactcaatgaccacctgaatcagctactgaaccgatactcccgaatacaggcactcagactcgacctgttctatcagaaaggtacagagcgctataaacgtcattcctggaacgaaactgagcgagaagtacgcatgctggttgaacgcactctgcagcacacaaatctggcagggtatttctgggtactcgagaactctgtagaccacggatgccatgcccatatcgtgttctatctcgacaggcaccttaaccaagctacctacccaatagctgaaagagtaggaacaatatggcgggaaataacgcaacgagaaggctattacaaccgctgcgagtacaaaccaacttatgaagtcagtattaataggccggtgaactacggtgataccgaagccatcgataacctgcgctacatcatcagctacctcgccaaagaagagcaaaaacacggtcactatcactacggagccagtgaggtaccgtcgcccagcggactggggcgtcctcgcgcggtgtaa

SEQ ID NO: 81613 - DNA, 918 bp, Citrobacter koseri
atgttgcattacgatatgatccgttacgagatcatgtatctaaaaatgctgggagcactttccaacactgatcactccttacagttgagtacttatgattcgccagatcagtttcgacttttaatctctcagatccttgaacggcatttcctgggcgatcaggacagaatcaaaattggccggaaaactcttaaagaatgggctgagctgctactaattgataaagattattttgattgtttcaaaggtacaccaagagcattgtggtttgctcaccattatatttttgaatacccagtattatctgcagggctgacgcttggtgggttggggaatgacgtcggttgttcaggaagttttaattctcttttaatggataataatatcttcgcaaatcttgatttccctaatttgaatatcgacttggacgatatcgattgggacctgataaaaaatccacaggccactacttcgaaaaaaccgaaacgcgttttctcccgattttatctgaacgcgggagcaagtaccgatctgtacaacccctccccggtaactgagcgtgaactcatcaatggtgtgatgagatacattgatgaagctccatgctcacttggagataagatctcttatttcaaaaaactgcatgagcgctggcttgagcaatatgatttttttctgacagattttgactggatatcacgtgaaaatgaaactcagttagtatatctctgggactatctcaaaggaaaagaacgaatagcaggctatcttcgcccatataacacgtctatgcgttatgacatgattattgcggctatagatgtgtggaacgtccaacctgaagagaagctggagtttattgagaagatgaaacatgcctggcagtcatcaaaatcttatcggcgatccgctaaatag

SEQ ID NO: 81614 - DNA, 1530 bp, Citrobacter koseri
atggtatttaaaagttttatacgcaaggaaaaaaatgccctctatattggtgcacctgaagcagaggcagaatcgttgccaacttcaaaagtcaatttgcgagatgtttatgaagatcttcacaatctctacgaagaactttctgacgagaaatttatattgattggacgcaaaggttgcgggaaaagtgcatttgcggaatatacatatttgtcagcaatcgaacaacccaatttattttgttcatttgttagccaagataatttaagtttggaaaggctcgttcagttaggcaatgaacataactcggagcatacaaaagatcacttatttaaatggctaatttacactaatatcatcaagatgttttttgagaatgaagctgctgctcaagcagatggatacaaattactgcaagaatttctcaaaaagaatagtggttacattgacataaatacaggtgaaatagttgagctaataaagaaacattcctttgaggtcagcattgagcaatttaagagatttttcaaagggaagtttaattctgatatacaaattaaagaatcaagggcagcattctataaattgatacctcatttggaaaaagttgttgtagaggttttgacgagtaagctcaatagagagaatcaaaattcttacgctttgttttttgatgatttagatattgactttgatgccaatgataataactcaacagacacactgatacagctaatcagaacatctaaacatgtaaataataccgtgtttgctaaaaataatgcatcagcgaaagttataatactgattcgagatgatgtggagcgacttttatccacgcaagcagctgatatatctaaagttttctcatcttactccacaaggctatcctggagtgaggatgacaatgcaggaaagtctgatgaaaacgatctcgccattaagaaaatgataaataagcggattgcaaatgctttccgccaagcaaacctacagttcaaaaataaaaatacaccatgggaaagtcttatagatgatgacttctctccaaagacaagttttaagtatgtatgcgaccacacactaattcggccacgagatttgatacttttcttcaaaccacttgagtccggttactactcgataccattaaataaaacggatgttaataagttattggggctgtattcagctgaacttgttaaggagttaagtaacgaactttcgtcgttctataacccctttcagattcaaaacattttcgatgctttaaaagacattagtttgaagtatgactgtacttattcggaagctgttgaatttatagaaaacaattgtgtaaacttgtcatctgtaaaattactgcaagagctatatgatcgttccatgattggttgcattaatggcactaatggttatgcgcactttaaacatcggacaagtaaaaaagatgctcatgagtatagacttgatcctacagggctagttatagtgcattcaggaataagtataaacctgcgcaaccggtag

SEQ ID NO: 81615 - DNA, 3624 bp, Citrobacter koseri
atgactacaaggcagtatgcgcaaaaatcaatcttcgatctggaggaaattttcgagcggtcacggaacaatgctagtgaacttgaacggctgttgaacgaactgaccttccgcaatactgccaaggcccgaacgttgaggactaaaatcgagcaagcccgaactgtacttagtggtcactgcgtgatctcaatgtcggattccagtccatcagcgcgtcatcctggctcgtcgtccacacaatcctcccaagttccgccccgtgatgagcctgcagcggtagtgcaacagcaacccaaggctaatccagctcctgtcatgcaacagcaattcggcgaagaccagatcgacctaggtccactcccatctttctctccgacaggtaagtcgaatgatgcgcgagcaatactggcagcatggacagccctcgaagcactgtcgcctcaaggttataaacgcccagaggatatggcaaccggcgaccgctctagggttgccctattggagcgaggtgtaccatggggaccaaatgcccgcagcaagcccagccataagctttatttcgaggtcgtcctcggctccatcgctctcgacaaggcgacggacgagctggtcaaggtttttggcgaggatgaggagcgttcacgcccggacggtaagaaagcggccatcggctcgatcctgatcgacaaagaaggctatgtgcttgaggaaaaaggcgttgccgtgtccagttttgcctgggcactcaagccggctctcgatcttaagcttgggagtttagggaattggccgaatgttgagccgcgcattatcgagcatctggatcgaatggttcgccaccacaacaaagatggagaacccataccgatcgatctgaatgttgttcataacgcttataaatggcttgtatcgcagttcagtgtacccgagcatttggttgagccacccacattcgcgattaaggtgtttcatcatttcaaggctaaggcgccgcctgaaccttcgttactgaattccttctatcttgaagatctcggtgaagcaaccaaattgctcgagacgggcaaagccggaaccggtttgcgccgctacatgggaattggcagacctgaccagaaaatcgacgtgctatcgcccatttccgcagttgagccgttcgtcgcaccgtcgctcatgccgcaggctcgttggccttcgaaaggcggccatccactggtgttgcttcaacaggctgccgtgaatgcggcgcgtgctgagctggatgatgctccaggtatcatcggcgtcaatgggcctccgggaaccggtaagaccactcttctccgggatatcgtcgttggatgcattctcgatcgggccacggcgatgtccggcttcaacaaaccgcaggatgccttttccacaacaggcgagaagctggcattcggttccaatgcattcctgcacttctacaagttacatgcatccttgaggggccatgagatcgtcgtagcctcctccaataacaaagcggtcgaaaacgtcagtaaagagcttcctctcaaggaagccaatggtcgccatgaacagatcgcctacttccggtccatcagcgacctgattgcgaatcccaaacgcgccggctatttcgaagccgagggggacatcccctccgacactgtcgaaacctgggggctgatcgccgctgctctcggcaagagcagcaaccgaggcgcgtttcagcaaggtttctggtggaatgaagacggtggtttccttacctacctgaaagcagctcgcggcataaatgtcatgcgtgagatcaaggacgagcgaactggcgaaaccatcgatcgtgtgatgcccagcgtggttgtcaatgagcggcccagcaccaacgaagcggatgctgctgcggcctggctgaaagcgcgaaccgcctttcttaaacttaaggagacggtagacgccgaaatcgccagcatcgaagagatgcgacgggatatccaggcgctcaagggagcgatcaccgaacttcaaagggctgaacagcgtcgaccgagtctgaatgaagccgtcgaagaggcacacaagactgctgaatcctgccaacgagagcatgagaaggcaaaatcgcagatcgagcaggacaagatcatgctcgacagccatcttgcttgccgtccaggtttcttctcccgtttgtttgcgactgcggcctggaagtcgtggagatcgacactgcagaagctctcgacgaccttgcagcaatcagtcatacgggcgcaggggacggacggtgccctagagcttgcaagggctgagtggagcaatactgagtcccagttacagcaactcgaccaggaaatttccagcaaatgtcaggctgtctcgaaattgaaggcaaccgaggcacaggcacgaaaccgtatgggagacagggtcgttgatgagaggttcttcgagcgcgagcacgaggctatccacctcactgcgccatggcttcccgatgaggttcatcgcctgcgggaggatcttttcgccgctgccctgactgtgcataaaacgttcatcgatgcttcggccagccgcttgcaacacaatcttgggttattgatgtcaggcatggtagctggtgccttccagtcttccgctcaccgtgaacttctccccgacctttggtcaagccttttcgtggttgtgccgaccgtgtccacgacattcgcctctgttcggacgatgttcggggatctgccaccagagagcattggttggcttctggtagatgaagcgggccaagccgttcctcaggcagcagttggagctatcatgcgggcaaagcgctccattgtggtaggtgacccgttgcaaatcccacctgtagtttcacttcctgaaaagctgaacgccgaaatctgcaagttctttgacattgaccaagtcgaatggtctgcccccgcagcatctacgcagacccttgctgatcaggcatcgcgcttcaaatccaccttcgtcatggacgtaggtgatcgagaagtcgggctgccattgctcgttcacaggcgttgccagaacccaatgtttgatgtttctaactccatcgcctatgccgggcagatggtccatgctgtcgggcctaaaaaacccggatctataggctcggctttggggagatctcactgggtggatatcaatggcgatgctgagacgaagtggtgtcccgacgagggcgaagcggttgtgcgaatgctcaaagagctggcagcatcgggcattacaaatccggacgtatttatcatcacaccattcaagatcgtagagcagaacatgcgtcggcgtctcgacagtgaaactgatctgctgcgaacgttcggcgtaaagctggatgaatggtgccgtgatcgtgtaggcacaatccacacgttccagggccgagaggcggacacggtaatcctgttgctgggtgcgccgaaagcgagtcagcaaagagcacgtcagtgggcggcaagcccaccaaacataatcaatgtagccgtctcacgcgccaagcaaaacctgtatgtggtcggctcggctgctgcatggacaggggcgggaactagccttcagatcctgcatcggcaattggcgaaatcagcctaa

SEQ ID NO: 81616 - DNA, 606 bp, Citrobacter koseri
atgtctggtagccacaatgatagtaacattagtgcacactctggaaatgcgcagaacaaggctgaagttgttaaagcatctttaaacataggcagtgcgctattggtcgcaataatcgcagctttagggggaatggccggctcatatctcacgggttcaaagttagttgaaagtacaagagtcccagcactcatcaatgccagaacgatttgtactactgctgttaacgaagatgaatacaaatttcgtgaaaaagcctctgattttttggctgcggtagctgcatttgatgctgataaatctcttttatataaagctaatcataatcaactttaccaaccagcgaaatcagccataactaaagcaatgtcgataagttcttattcttctgaacgtctatcagtactggcagtaaatattgcatcatctataaaacaacttgcaatttctgatatggattatgttatttcagatagtggcgcttataaaaaactatcttcctcaatggaggaatggccagaggcatataatgaatatatgaaaaccttcgatgtaaaacgtgcttcttgcaactccgatgctataagctataaatcagaaaaataa

SEQ ID NO: 81617 - DNA, 876 bp, Citrobacter koseri
atgaataaacctgatggccttcaggcccttgaacaaccgctcgcgtcgcttcctcacacgcttcgtcagcttattcttgaacgtatccagaacctgacccactacgagccgttgattggcatcatgggcaaaagtggtgctggtaaatcctctctttgcaacgagcttttccggggcgaggtgtcgccggtatgtgacgtgaacgcctgtactcgcgacgtactgcgcttccggctacgcagcgggcgtcacagtctggtaattgtcgatttaccgggtgtaggtgaaaacgggcggcgggatcatgagtaccgggccctgtaccgtcgtatgctgccggagctggacctggtgctgtgggtcattaaggccgacgatcgggcactgaccgtggacgagcagttctggcacggcgtgatgcaaccttacaggcaaaaggtactgtttgtgattaaccaggccgacaaaatcgaaccctgtcatgaatgggatagcgcgatcggcacgccctcgccacaacaacaggtaaatcttaaagcgaagcaggttgcgattatggcaatgtttaaaccgcatcatccggtctgtgtggtgtccgccagcactggatggggcattgaggatatggtggcaaacatgatgtgttgtctgcctgaccgcgccaccagcccggtggtgacacaactgcaagggagactctgcacagagccggtaaagtcgcaggcccgcgacagtttcggtgaagctgtgagccgggtttttgatacggcagagtcatcgtcgttcctgcctgcatcgctgaaaacggtgattcgtaccgtgcgtgatgtggtggtgtccgtcgcccgtgccgtctgggactggattttcttctga

SEQ ID NO: 81618 - DNA, 465 bp, Citrobacter koseri
atgaaaatgaggtttgcagtttttgcgctggtcttctgcgtcagtctcagtaccgcggcacgggaacgggtcgatattccggcgaacactatctggtcgtttaaggaccctggtggtcgggtgttatgggatgtctgtgggggaaaacaaagctcctgcaccatcgtgttggcggcaacgaacagggtggccatcgttaatcgtaaatccactaacggctgcgccctgggggatttttacgtagtgggtaaacccgaaaaagcctggaaccagtacgacacggggacctgcagcagcaatgcttacttcagtcaggggaccatgaacaacgggcagtaccggactatcgatgtccgtctcaacggggaactggtaaaacgattcccggtggaatactggtcgatggtgaaatccttttcgggtagcaaccggccaaaatggaaggacaaaacgacagacagataa

SEQ ID NO: 81619 - DNA, 474 bp, Citrobacter koseri
atgcgtttatctcatgccgccctggcgttcgttatgctggcctcagcctccgttgcacaggccatccccaatatgtggagcagcggcttcgctcagggtgtgaccgaatacatcatcaccggcccggagaaagtggtctttaatcttaactgcaccaccagccccgatgagcagaatgtgctgcagcacagcgtatacctgaccctgcccgacggtaccttgctgaattctcacgatgacggaaccgacatcaccgtggtgatggatgacagccagtatccgttaccgtcattcctcggctggcgaaacggtgacaatgcctgggtgtcatttattgacgccctgagccaggctgcgaattttgatgtttacgtcaacgataaaaaagtcggcaccttcagtccggggctgaagaatacggagaaagaattatctgacctcagtggctgcagaaccacccattacagcgattaa

SEQ ID NO: 81620 - DNA, 822 bp, Citrobacter koseri
atgcgattagccagccgctttggccgtataaaccagatacgccgtgaccggcctctgacccacgaagagctgatgagccatgtccccagcgtgttcgggagtgacaagcatgaatctcgttcagaccgttacacctacatccctaccattaccattctcgaaagcctgcagcgtgaaggctttgagccgttctttgcctgccagacaaaggttcgcgaccagagcaagcgggaacacaccaaacatatgcttcgcctgcgtcgtgccggtcaactgaccggacatcaggtgccggaaatcattctacttaacagccatgacggctcatcaagctaccagatgttgccggggctatttcgaggcgtctgtaccaacggtctggtctgcggacagtcatttggcgaagtgcgggtaccacataaagggaatgttgttgagagggtgattgaaggggcttacgaagtgctcggtgtgtttgaccgggtggaggagaagcgcgatgcaatgcagtcactggcactgccagaaccagcccgtaacgcactggcgaatgccgcgctgaagtatcgctttggtgaagaccaccagccggtcacggtatcgcagttgttgaccccacgtcgccgggaggactacagcgatgacctgtggaccgtctatcagcggctacaagagaacctgatgaaaggaggtctgtcagggcgaaccgctctggggaaaagtagccgcacccgtgctgttaccggtattgatggcgatgtgaagctcaatcgcgccctgtgggttatggctgaaaacatgctcgaatttttcgggcgttaa

SEQ ID NO: 81621 - DNA, 444 bp, Citrobacter koseri
atgaatacacaaaatcatcagttcgcggagcataccgcaattactgcctcagtggtcccggacgagttacgcatcggcttctggccgcagcactttggctccatcccacaatggataacccttgaacctcgcattttcgcctggatggatcggctgtgtgccgataaccacggtggtatctggcgtttttcgacactcagcaacggcggcgcttttatggctcccgagtcagatcacgatgagaagtggacattgttcaacagcatgaacggcaatggcgcagagcttaccagtgaagctgcagggatggtcgcctgtctgatggcttacaatcaccacgcctgtcgcaccgagtgtgacgcgatgactgagcactattatcgcttacgcgactacgcgctgaaccatccagagtgcagagccattatgcatctcatcgactga

SEQ ID NO: 81622 - DNA, 789 bp, Citrobacter koseri
atgatcgctttctcagggagccacttccgcctgccgctgctgttgcgagtgtcggataagcgcgtcgaaccgctgccggaaagtgaatactccgccccgctgcgtttccagctggctaattttgccccacgcgataacttcgtctgggtcgatcgctgctacaaaatggcgcaactgtgggcgccggagctggcgctctccaccgactggtgcgtttcacaagggcaactgggcgggcaacaaagcgtccagcacgtcgataaagcacagtggaaaggcaaaacggcgtttaaagatacggttatcgatatggaacgttacaaaggcaacgttgatacgttgaagatcgtcgataacgacattcgttataaagccgacagttttatctttaacgtggctggcgcgccggaagaggtgaagcagttcagcggtatttcacgaccggaatcgtgggggcgctggtctaatgcgcaactgggtgatgaagtgaagattgaatacaacacgccgttaccgaagaaattcgatctggtgatcaccgccaaagcctttggcgcgaatgctaatcgccctattcctgttcgcgtaggcaaggaagaacagacgctggtgttagaaaacgaagtcaccacaacaacgctgcattttgataacccgtcaaatgccagtacgctggtgattgtgccgcccgacccggtatcgaccaatgaaggcaatattctcggccactccccgcgtaagctcggtattgggatggttgagattaaagtggtgaatgccgaaggctaa

SEQ ID NO: 81623 - DNA, 1203 bp, Citrobacter koseri
atggcagtattgacggatacgaaagcaagacatatcaaacctgatgacaaaccattgccccatgggggaattaccggactgacccttcatccttcttcagtaaaggggcgggggaaatgggtttttcgttatgtaagtccggtgacacaaaaaagacgtaatgctggattgggaacttacccagaggtcagtattgctgaagctgcacgtactgcccggataatgcgagagcaacttgctgcaggtgatgatcctctggagattaaaaaggctgaatctgagaaagtcgctatcccaacatttgccgatgcagccaggcgtgtacatgcagaactgtctcctggatgggaaaatccaaagcatgtaaggcagtggttatcgacgcttgagaattacgcgtttcctcaactgggagcaaaaacgctggattcgattacggctgcggacgtggcagaaacactgcgtccagtctggttaaccttgtcagaaacggcaagccgggttaaacagcgcattcatgttgttatgcagtggggatgggcgcacggtttttgtgtagcaaatcctgttgatgtggttgaccatttgcttcctcagcagacaagaggacgtgatgaacaccaacccgcaatgccctggaggcagttaccgctttttgtggcgaccagtgtgtataccgatgaaccttataatgttacccgcgcactgttattaatggtgatacttacagcaactcgctcgggcgaagccaggggaatgcgctgggctgaaattgattttcataagcgggtatggactatacctgcagaaagaatgaaagctaggctacagcatcgtgttcctttatcccggcaggctatttacattctggaaaatatacgtggcctgcatgatgaactggtgttcccttcacccagaaagcagcagatcctttccgatatggtgttgacaagttttctgcgtaaaaagaaagccgtcagtgacattccggggcgagttgccacggcacatggttttcgctcaacattcagggactggtgtagcgaacaggggtattcgcgggatctggcggaaagggcgctcgctcatacgctgaaaaataaggttgaggcggcatatcatcgtactgatctactggagcagcgtgtaccgatgatgcaggcatgggcggattatgtgatgtctcaaattgtgaataaataa

SEQ ID NO: 81624 - DNA, 1818 bp, Citrobacter koseri
atgtataattttatcactataatgtatgatgtcttttcatgttttggtgttctggctaaaaaccagaatagccgtgacatccgaaatattaaaaatttttcctcacatcaacattcactgggcgacatgtttgatgaattaataaacattattgataaagaacaagtattgagtaaagaacaacgaaaagttatatttaggagatatgaagatctctatgttaagctaatgcactattctgtttttacagacaaaacacatcaaataataaaacaaaaatattttaatgacattgtaccaatgattctcgcactcgacatcaggaacacatatcgcccggataatgagatggcattttactatcatattcattcttttctcactcagataccggataatgaggatgatatatatcatgctgcaaggacatatctgcgaaattacgttaagttatgtttatccggatacacgccagcgaatgcgcatttcaaagatatctttgatggcgtatatgaattcattcgtaatattcgcaaaaacagtacaccaggaaaaacaaaacttatcgcaactatcaacacatgcaaagaaacctgtaaacatctgctttatttaagtaatgaagacaaggaaaaaataatttctgacttagataaagttcaggttgcatgttattatctcactatattactggctttcgaaagacgaacttcattaacaagcaccctggcaactttatataaaatgctgataagcgaaagagaagtttcagaatatgaatgccagttattatatttaaccaacccaatagatgtaatgaatatactgaacaaatacatatattactttcctaatgagaactcaccattttatacaatgaaaattgacagtgcattatcgtgggatgccattgacgcaatacgagactatagtatttctgatatttatctttatcctgaacaaaaaacaataaattgtgtcgttgagattgaaaacattgtctttggcggttacatttatacattgaacaacggcgtcacattacaaaacatagaaaactctttaaaagattcttcatgccattatgtcttaaatggctatacagaatttgttaactgtttgagacaacttacttcaggaaagactgaaagtgttcatcgcaccatcaataaactgaactatgagaaattaccttttggatttatcattgccgcgtttgctatactaaagatagcatttaaaataaaattcagtaaaaatcatgtaaatatccgagcattattaaatgacatcaattattttatgacttatcagggcgagtccattaaccttatttcactggatcacgaatacccagagtcctgtcttcaaaatgacacaaacacatatttattaggaagagtaatatttctgtataactcaatgatttataagttcataaactgtcaggaacatgaaaccaataacattcactcagctatgataaataacctattacaggaagttgatatagcccttggtaaaataaatgacattatagacagcagaaacatatcagccccccatgaactggcaaatattcttacccgcgaaaaaatacttacaacacgggaaaaaaaaggaaacctgataagcctgtttgatggattcactttattccattgtgttggaatgataacctttcttatccattatctcagaacacctgaagaaaaagttgaaaatatatttatgttatatggtgcagataaaaacaataaactacgcagaagactgatttatgacgcactaggaataattcagtctcagcaggagtga

SEQ ID NO: 81625 - DNA, 1182 bp, Citrobacter koseri
atgagtgccttgagttatctggaaaagctgctggatggggttgatgttgagtgggttacactaggttcaatagcagatattggtacgggcagttcaaatcgccaagatgaaagtgataatggaacctacccattctttgttcgttcaaagaacatattaaagtcagatacttttgaatttgatgaagtagccatagtgattcccggtgagggcggagttggcgacatctttcactatgttgagggtaagtatgctctacatcagagggcgtataggattagtattcaatcgaactccttgattacgaagttcgtatatcacttcatgttatccagctttaagcagtacattttgatgaagagtgtgggagcaacagccatttcgattagaaaacccatgctggaaggatttcaagtgccaataccctgcccagaccagccggaaaagtctctcgccatccagtctgaaatcgtccggattctggataagttcacagcccttacagctgagcttacagctgagcttacagctgagcttaccatgcgtaaaaaacagtacaactactatcgcgaccagttgctgagcctggaagaggatgaaatagagtggaaggcacttgatgatgtttgtgctttaatatctgctggcggagatgtgcctgaaaatagtgtgaaaggtcaggtaaaaccaactaacgaatatccctatccaatctacgctaacgcaacagatgaaaaggggttatatggctacactgattcgtacaaaattgatagcgatgcggtgacaatttctgcgcgaggggcaaaagtaggataccatacagtcagagacgcaaaattcacgcctattattcgcttaatagtattagtcgccaataagaatttagtcagaacacgatatcttaattatgttttagatatgacagctatcgggggtacagatgggggaatcccacaacttacagttccgatggttaagaaaattaccgtcccaattcctttcgcaagtaatcctaatagatcgcttgccgaacaagatcgtataatcgcaatcttagataagttcgaaatcctgactaattcaatcagcgaaggccttccgcgcgaaatcaacctgcgccaaaagcagtacgaatactaccgtgatttactgctcagtttccctaaatcaaatgtatag

SEQ ID NO: 81626 - DNA, 414 bp, Citrobacter koseri
gtgatttcactcgcgccaaacctgttcttcggcaccactattgccgttaacattctggtgctgtccaagcacaaaacagatacccgcgttcagtttattgacgccagcgggttgtttaagaaagaaaccaataacaatatcctgactgatggtcatatcgaaaagattatgcaggtctttgccagcaaagcggatattgaccacctcgcgaaaacaatcccttatgaaacagtatctgccaatgactataacctgtcagtcagcagctacgtcgaagccatggatacccgcgagattgtcgatattgcagagctgaatgccgagctaaaaactaccgtcagcaaaatcgatcagttgcgcaaagacattgatgcaattgtggctgagattgaaggtgacgaggtgcgagcatga

SEQ ID NO: 81627 - DNA, 1083 bp, Citrobacter koseri
  misc_feature (988)..(997): n is a, c, g, or t
atgacaagccttcagcagcgtgcagagctacaccgtcaaatctgggccattgccaatgatgtcagaggctccgtagatggatgggattttaaacagtatgtactcggtgcacttttctatcgcttcatcagtgagaatttttccagctacatggaagcaggggatgagagcatacattatgcagcacttgatgacagcatcattaccgatgacatcaaagacgatgccatcaggactaaaggctatttcatttacccgagccagctgttctgcaacgttgccgctaaagctaacaccaacgacaggctgaatgcagatttaaacagtatcttcgtcgctattgaaagctctgcctatggttatccatccgaggcagacatcaaaggcctctttgccgatttcgatacaaccagcaatcgactgggtaacacagttaaagacaaaaacagccgtcttgccgccgttctgaaaggcgttgaagggctgaagctggggaattttaacgagcaccagattgatctgttcggtgatgcctatgaattcctgatttctaactatgcggcgaatgccggtaagtctggcggggagttcttcacaccacagcacgtctctaagctaattgctcagcttgcgatgcacggtcagactcacgtcaacaaaatctatgaccctgccgcaggctctggctcactactgcttcaggcgaagaagcactttgataaccatatcattgaagaaggtttttatggccaggagataaatcatacaacctttaacctggctcgtatgaatatgttcctgcacaacatcaactacgacaaatttgatatcagactggggaataccctgactgagcctcactttggcgatgaaaaaccgttcgatgcgattgtctctaacccgccgtactcggttaagtggattggtagtgacgacccgaccctgattaacgatgagcgttttgctcctgctggcgtactggccccgnnnnnnnnnnctgtttccctggcattttttaccgtggcggtgcggagcagaaaatccgtaaatatctggttgacagtaattatgttgaaacggtga

SEQ ID NO: 81628 - DNA, 1866 bp, Citrobacter koseri
atggctggccagtatgaaaaagcaataacgataaaacaagcgatagattcaattaatttacgccactatcttctgcctgcaattcagaggaagttcgtctggagcagtagtcagatatgtctgctgtttgattccatcatgcgagactacccgataaactctttcatgatgtggggtatccgtagtgccagtattaaaaacgattacaaattctatgaattcctgaaagaatactgtcagcgatttaatgaagaaaacccctgcgtagcaacaaatgctggatttcatgatttcaaggcggtgattgatggtcagcagcgtctcacatctttatatattggattgtgtggaacgtatgcgtataaacaaccgcgggtgtggtggccttcggcacaggatgatcgcatcctgccgcccagaaagctttacgtcgatttaacagcgccacttaagtcagacgacgagctcatgatgaagtacaacttcagatttctgaccgacaagcaatatactgattcacttaccgataacaagcatcactggttctgccttcacaaaatattcaaatacgagcagtatgattcccctgatgatattttatttaacgttgtcgtaccagagctcgaaaaaagagatctcatttccaatgagttttccagaaaaactctgctgagactttatacaaaaataagaactgagaacatcatccactacttcaatgagagcagtcaggacattgaccatgtgctggatgttttcatccgcacgaacagcggggggacaaaacttgagttctcagacttactgatgtcaatagctgtagcgcactggcagggtgatttcagaagagaactggatgaactaactaaaaacatttatcagaataatgaaatgggtttttatattgaaagagactggttcttaaaaaccagcctgatgcttattgactctgacgtccggttcaaagtaaaaaacttcacttccgaagaggtcggtaagatacaacagcaatggtctgaaataaaatcctgtatcaaggagacttttattcttatcaggcgattcggcatcaatccacagtctttgatatctaaaaatgcagtcattcctgtggtctactggctttacaaaaagcaaaccagtggacatccattatatacaacgattaatctcctgaataaaaaccacaatgaacgctcagtaattagccagtggttttacatggtacttctgaaaggaatctttggaagccaggcggatgcgctactcacaagcatcagagacgtaatgaagaatagtctttcagatgttcattttcctcttgagaaaattattgacagatataaaggctcgaataaagaccttagatttgacgacgaatacatcgaaagccttctcaatatcagatatggcgaaggtcgttgccgtgcactattgcatcttctgttccctgaaatgaatccaaccgaggtgtttcatattgatcaccttcacccgagaaatcatttttcaaagaaatatcttgaaaaattagattatattgcgaattcaccagagaacctcagcttttatgaaaatccggaacactgggacaccataccgaatcttcatttactgaatcactctcagaatataagtaaacaggatacttccctgaaacaatggctatctcattcatcaaacaactatacgccatcaatgctgttagtttcagatgaaaatattgagttcagtcgcttcccggatttctacaatcagcgaagaagcgccctgaagcaaagactactgaatcgggtgtttcttacaacaaaaatagattcatcaccatccacaatggatacggatgaagaaattctcaccgactga

SEQ ID NO: 81629 - DNA, 312 bp, Citrobacter koseri
atgattatcgaaaaaaagtatgcgcttgttgatacaactgcaagattcaacgctgacctgagagattatgaacgtgaaataaacaacgccgccagtataacatttggcaatgacctcattgaggtaatcgtatatcagttcagctttgtcatcaaagtcagaacgaatagtgaaaaaatcaagcatggtcttcttgttaactttggtaaaaatatagcaaggcaagtttcatccctttgtgaatccgcaatgcgatgctacccgaatgaaaaacacaagcccagtcgtcagctcttccgttgcataaattag

SEQ ID NO: 81630 - DNA, 714 bp, Citrobacter koseri
atgacgctgataacacaagaaaacgaacatgacagactggcaacccgcctttccatcatcctgagccgtttgtttcagggtgaaaagctgcatatcgggacgctggcagaggaatttggagtgacgacgcgaacgctgcgacgggatttcaacgtccgtctgacgtaccttgatattgaacagagcaacggcgtgtatcaactcgcctctcattactttcgtcgccgcacggaacgggatatgaagatactggcgaggttgctacatcttgaccgtctgttacccgcgatggacgccaaactgctgagcctgatgcttgacggggaacgcccctcgccctacaggattatgcttccggagccgctccaaaaacccacgctgttcggtgatttcagcagactgacgctcgctataattaaccagacgcaggtgcgtatcagaaccgacgaaaacgtcagccataccgttcatccctatcgtctgctttgcagccatgcggagtggtttcttgctgggtgtgctttatcgggcgtgttcgttatttccctgtcccgaatcaggctagtcgaggtaataccggatacaacttttgagatcgataacactctcatttcgctgattgaacagtctgactttatggaagcgttaccccacatgaacattattcatcaaatcatggattacggggtaaaacaaccgaataatcgcaattaa

SEQ ID NO: 81631 - DNA, 750 bp, Citrobacter koseri
atggctacctaccgacacgaccctgaccttgagtttctgcgccactgccatcgtgacgatctggatttactggtttctgtgcttatctgcgatccgaaagacggactggcacgtatcacggaaacgctgacctatgatcctcagtataaaaaacacaagcccaaccacccgcgctactgggatgccattgccgccgaggttcagacgtttggggcgaacagctttgccacgctgctccgctggggtaaaggggtgctgtaccgggaaattctcaccgatgcctgcgataaaatgaaggtgaactacaacaacaaatccagcgttgaaaccattgaaatgaatctgctgatgaagatcctggagaaaagccttgagaagatgacgcccgatcagctaaagaccgtggcggaagaattgcagacaggctacagcaaccccacgccggagttgctgaccatggcactccaggcggggataaaaacatccgggtttgcggcctatcagatggcacttgttgtcacaaatggtgtggcgaaagccctgttaggcagagggctgaccgttgcaggaaatgccatgctgacgcggactatgggcgcttttgccggtcccgtgggctgggtgctcagttctctctggctgctgattgatttagccggtcccgcataccgggtgacgctaccatcctgcatttttattgcctacatgcgccagaagcatctttattcacctgagaatactgacgtttag

SEQ ID NO: 81632 - DNA, 384 bp, Citrobacter koseri
atgaaaatttttaaactgttaaccgccacacttctgctttcagccctcagtcacagcgcatttgccgacgagcaggctgacgctcagatgataaccaactcgaccttctgcgcgatgtattccacccgcctgacccagaccagtgacagcggccttcaggtaaaaggcgtcaatctcaatgcccgcattaacggaccggtattcaacaaggtacttcaggtgatgaacaaaacctatggcagaacctggctcgaatcaaatgcccgtaacggcagcatgaccgccatgcagctttcgcagtcggagctgctctataacccggaatatgcccggcagtgcgatgcctttgcggataaagtggaaagggaatggcgtaaaaagtaa

SEQ ID NO: 81633 - DNA, 240 bp, Citrobacter koseri
atggcgcgtatggcaacgatgaaagccagccgttgcaggcaacgtgtcaccggacagggagaacggcttatccggctgaccatgaccctgttttacggtcagacaatatctgttcgctatatcacccgacggtttgacgtatctccccgtacggcaagacgggacctcacccatctggcctttgtgctggaatccgctggtcctcaccgctggcgactggcttcctcactaaaaccctga

SEQ ID NO: 81634 - DNA, 465 bp, Citrobacter koseri
atgtaccggcttctgctgctgaacttcgtggattcatttatcgataactgcattctctcctgcgtcgatgaaccggcttatggcggtatcgtgcagtgcgaactgctttttggccttgccgcacacagcggtatctatgtgggtaacggtgacataattcatcttgatggagacggcattgttatccgaagtaatgctcgtgagtttcttgaccggctcgatggctggaactccgctatctcggtgtataccgattgtatggatttgatgcctcatggttgtgcgcaggcggctgaacgggcaaaggcggcggtgggtcagcgctatccctacagcctgctcgactttaactgccaccggttcactgcccgctgtgttaccggcaactcatgctctgatatctggcttgtcaggcacctcgattcatttcagaaaggggaccgatggcgcgtatggcaacgatga

SEQ ID NO: 81635 - DNA, 429 bp, Citrobacter koseri
atgtcatcacccgccatattgcagggcggctatgttctgcccctctcccggtcgttcacccaaatgcttctggatatcgtcgcgcaaaaaccgcctcatcgtcaccccatcaccggattaaccattaactttcgtgaccctgaatactcaccggaaacgggtggctggcatccggtcgaaatacgcctcatccctgccggagaggactggcagctcgattacgtcaccgattttcactatgcagggcatccgtggcctgaacttgaaaaagatgtcgatgtgagctggacgcaacaatacacgtggctttcccgttgtggcgatatctctcatgccgacgcccgtgagttctggtcactatgggaaagtaactttatggcttaccacgatatgggggttttcgcgcttcgtactttgtgggaaagctga

SEQ ID NO: 81636 - DNA, 432 bp, Citrobacter koseri
atgagtaagaaaaaaggcgctaccgaagccgctgtcaccaaaagctataccgtgttctacagtggtgaagccgagaaaatcagccccaacaacaaggggctgctgacgtatgagctgggtaaagaggatgaaaccggaagccttgccctgcgcttaaccgccaatggcgaaggaggcctgttctcccgtgaatggatagcgcttgatgcgattcacgccattctggaacagcagcaggacagctttccgtcccgtgtatttcgcccgctgtttggtcagggcagcaccaataacgccgggtttcttgccgctgtactgagaagcccggatatctgtcttatcgaggcgaacagcagcaaactctttatgcaccgttgttatgccgactggcagcatcgtatgacgcagcttgctgcgctcagccaggactaa

SEQ ID NO: 81637 - DNA, 354 bp, Citrobacter koseri
atgtttaaactcactacccccaccagtcttccccatctcaacctgcccgcctccgcactggcgtccctgagcaatgaaatcctcggccccgtcgatgatatcaacctctttaccgctttctggaacgaaacgggaaccctgctctggcatctcaaccacgatgacacgctccccgaagacccgctgctggcagtcgcactggctaacccggaatacgtcaccgcacttgatgatggctggtatctcctgctcggtatcgtctgcgataacggacagggtatctatctggtgttcccggacacgacagttatcactcaactccagaacctgattgaggcgctgaaccatgagtaa

SEQ ID NO: 81638 - DNA, 1179 bp, Citrobacter koseri
atgaagttatatccctccacaaaaaaggcgaatcagccattaactaaatccgttattgcggaaagctgtgcccgtgcattgcatgaaggccggtcagtcgaatccagtgatagcaaactgacgggtctgaagatcattgcctctcctgctagtccaggtgaagccacttttatcgttcgcaaaagtatctgtggcgaaaatatctataagcgtattggacgatatcctgagctgtctattgcagaggcccgagaaattgcgtctgaaattatcaccggcctggaagagagcgctaaaaagcacggtaaagattaccgtaagattaaaaaaatggactttaatgacctgctgaaaacatacgttgaagaggttctgaacaaaggtattaagcgttcagcaaggacagacctgtctaaaattcacaagtatctactccctcgtcttggcgataaaaaaatcgccgatatgacggaggcggacattgtggcctatctgcatgatctcgatctcaagcctgccacccgcaatcgccatctggcactcattaaagcggtgtttacctgggctatccgcatgggatatatcagccgctctccggcgctttatatcaaagcgctgcctgaagtgacgtcagatagacgcgccatggatgactcccagcttcagtgctggatggatgtctgtgagcgctggcgtaatggtaatcccgatcatgaagctcttgctctgctcatgttccttgccctgacgggactgcgtctgggggaaacccgtcatcttcgccttgaggatgtggactggagccgaaaggttatcactcttcgccataccaaaaacggcagactccgccgtgtaccggtatgtgataaggctttcgttcttctgacagaacagcgtcaacatctgggtgatgaaggctgggtatttccgggcaagggggccgacaatccggtttctgagccgcgtcgcctgcaaaaaaggctttgtgaggctgctggtattccaacgttcaccatccatgagatgcgtcatacctttgcgacaaagctcattgagagcggggccgacattcacaccgtcaaagacttactgggtcatagcacgatcaaagtgaccgaagtgtatttgcattcgagccctgcgcgttatcacgaagctgttaatcgggcgatgggataa

SEQ ID NO: 81639 - DNA, 1926 bp, Citrobacter koseri
atggtgatacacatgaataaaaaagcgacaactaatgttcctccggtttccgggattaagcgtatccgcgcttttgctgaccgcgataaaaatttcaacaaaatgtcagaggcaactatcaggcgtgctgaaaacactgacgtcggggaagatgatatcgcttcactcggtattggtgatgggctgccacggcattatgtgaatacggctgatggtctttactacatcggcggacagaaaccggtgctggtttgcggcacgccagttgtgcctgtcgccctgttttgtgggaaagataaggagtccagtcttgggatccgcctgatgaccggtaacgggctgggtaagtatgttaaggcccaagtgagctttgaggatattgttcagagcggtgctcaggttttaggaaaactggcaggtcgtggattttgtgttggcccatctccccagcagcttgccctttttgaccgttttattcagcggtgccggagtttaccgctgcctgtctatctgatggctgatgcaatgggattcgtttcggaggatatggcctttttacatggtcatgagcccgttgtgacctctctgaccgggtttgattatctgctgccgggattccgcgtgcgtcccgggctgcacaaaggtggggctctggaggagtggattaacctcatccgggaaaatgtccatggctgggcgcagatctttgcgctgagtgcgtcctttgcttcgatgcttttggttcctgccggtatggatgtgggcatgtttcattttcacggcgtatccacgacgggtaaaacgcttctcctgatgttgggtgcatcggtccatggcgatggcagcgagccgggcagtggggggaatgtgaatattattcgctggaataccacgccgaatgcgatggagcgccttctcgctgactattccggtctggttgcctgcgtcgatgaactgggtgcgagtaatcataagcaactttcctcactgctatacaacattacgtcaggtacggcaaaagagcgcctgacccgtggccttacggcagatgagccgtttaaatggcgcatgtttattctctccaccggtgagatgtcaatctccgaaaagctggctgaacagaaagctgtgttacagggagggcaggagcacagggccatcagtatggaactgctgcctgaggatgctcaaaaaccggatgaaccggtatcagaaacacgtgcccgtgcagatgcactgaagacggggctggcagaggcttatggtcatgccgggcctgcatttatcggcaaactgttatccgaaaaaaaagcggctggcagtctttgcacctacgcagagttttcatcctggctccaggaacagacagatgcgtgctgtaacgcactggaagaggccctgagggatgaagggcgtgatattacccgcgttcagcgacgtggactgaaaaggtttgcgctggtatggctggcaggagagaaggcgctgaaatacggccttttacctttcgaaagcgatgcggtggctgaatccgttatgtccgctgcacgacgctggctggatgataaccagaatcagtataacccggtgcgtaacatgctggaggagcttcagctgacgctggtgacaaaaagcagcaggcactttatcaccctgcgtgaggaccatgcccgatacccgggggatatgtggggattcgttcaccataaaaccggcgacttcctgatttatgaatcggtgtttgaaaagctctgctctgaaaaggggcttaagatcgttgatgtggccagaccgttagagcgtacaggttatctgcttggcgaaagtgcggggcactataaaaaaagagcgctgaagacgatggcgcagtcttactaccaggtcaaaaaagcgtttctgaaatgcaatatgatgaccgagttttaa

SEQ ID NO: 81640 - DNA, 369 bp, Citrobacter koseri
atgatttttgaatcagaccagtactatgacggttttcctcacgctatcagcagcgaaaatgaagaaaaaacctcattcaatgattacgctctgtgtaacacactggcggagtgcctgtatcacgacatttctcgtgaaatcttcgatggcagtgagccggcgctccgggccgtcattgccaacggtcagattaaattcctggctcgttatacgcttgaaggggcctgctattatgaacccctcggcacgtttccacgtatgcccgttaacgtcgcgcgtgaacgagcacgtgaagtctataacagatatgatgataaccgggtgccggatgaagaatatggggccgcttatgagaatatcccgttctga

SEQ ID NO: 81641 - DNA, 1188 bp, Citrobacter koseri
atgtccattccgaaacgcttccgttttaccagccagctcataaaatcccttcccccgaactcatcagattcacgcagtaccgatgccgaatacagcgataccgagatttcaggtctgaagtgtctggtcagtaaaggagagggacgaaaaaagttcttgctccgctacctctatcatggaagaaaacgtgccatagccattggtcactggcctgaagtggatgtcactcttgcgcgtaagattgccatggagcataaacgctcacttgcaaccggcacagaccctaagcaggagcgtgaaaacaagagaagggagctgacgttcgatgaactctttaatcagcattatctgccatgggcaaaatccgctaaacgcagctgggggaaggatgtacagcgctaccgcgatcatatccgccccgccattggtcagaggctgctgagcgatatcacaccagccagcattattcgcctccagcagacgttaagcatttcactgtcagcagcaacctgtaatcgtgtcattgtactggttaaagcggtatttacctgggccggaaggcaaagcattacctctgtccatccggcaagagtggtacagcttctcagggagaacaacgccagacaacgctatttcaccgaggacgaaattcgtcgtatttttctctctgccgataacgataccagccccgtcgcggcccgctatgtcaaactgctgttactgaccggccttcgtcgtgatgagctgcgtcttgcaaggtgggagcatgttgacccggttaaacgcactctgtggctccaggaaaccaagaatggctatggacggattgttcatcttaactcactggcgatggacgtaatcagaacgctgccaacacagcgtggaaatccgtggttgtttatcggtaaaaaacagggcatgccgctgagtaacccggtgaaagcctttcagcgtatcgtgcgtcgggcgggaattttcgacaaagaagtgtgcattcatacctgccgccattcggttgccgccctcatcgtgtcctacggcggaacactgtatgacgttcaggctcaactggggcaccgcagcagtcagtcttcacaacgttatgcgcatcttcaccctcagcgcttacaaaacaccagtcagcttctggcggagcgaatcaccgctcagttaccttccttgcgataa

SEQ ID NO: 81642 - DNA, 702 bp, Citrobacter koseri
atgaataccacagcagactttaaccgcctctatgccgacgtttcacgcaatattcagcagacgctgactgatatcgctgcacttcatgttgaaaatgaagagggaaatcagcaactgcaatcgatggtcactcagttacaatctctgcatgatggctttaaccagaagctcacgtggctgcaaaagcacgccgaatgggacaagtttaccctggcattctttggcgaaaccaacgccggtaagagtacgataatcgaatcgctgcgcatcttgtttgatgaagaatcccgccgcaagctgctgcaaaaaaaccacaacgacctagaaaaagccgagctggagctacaggaaatgtcggaacggctgcgcagcgacttagggcggatctatagcgatgtagtggataaaatcaccgatatcagtttttccgctctgcgtctgacgcaaattctcgacaatgaaagcgccctgcgccacaaacgtgaagaggaagagagcaaggagcgcctgctggttgaacagacggaaagccagctccgcctccagcttgagcaaaacgaaagccagtcgcgattgcaaattttgcaaaaacacaccagcgccaaaacacgcttaaccctgtgcattaccgccgtcatctcttttgtcgcaggcgcaggcgcgagcgccgccgtggtgttcaatatgatggcggggcaatag

SEQ ID NO: 81643 - DNA, 1701 bp, Citrobacter koseri
atgagtgacgcactggatcttcaggctagtaccacgtcagtacgttcgcaacgaaagtcctcattgaatattcaggagctcctgaataaaacgctgcctcacctggttcagaccgtaatcaggaatgagagattaaaaaacaccctacttcaggttgatggtctcattatcggtaccggcgaggcggattttaccaaagggaatacccgctacgccttacatattgacgataagaccttccatctgctggacgtacccggcattgaaggcaatgagtcacgctatatcagccaggtgaaggaggctatcgccgaagcgcatatggtagtgtacgttaacggtaccaacaaaaagcctgaaaccgccaccgccgaaaagatcaaatcatacctcgaatacggtacgcaggtttatccgctggttaacgtgcgtggatatgccgacgcctatgaattcgaagaagatcgccacgatctgatgcagcaaggaggcgcaggagaagcgctgaagcaaaccgtcggtgtactgcaaccggtgctgggctccgatgtgctgcttcccggtaactgcgttcaggggctgctggccttctgcgggctagcctatgacgatgcgacgcaaagcaccactatccaccccgcgcgcgcgcgcaacctcgccacgcaacagaaacgctatttccagcacttttcttctcgtcgggagatgcaggaatttagccagattgacgccattgcccgcgtcattcgcagtaaagtcgccacttttcgcgaagatattgttgaaagcaacaaaggcaaagtgcgagagtcactgggtcagtatctacaggtactaaacacgcaactcaccaatcatcacgcatttctaaagaaaacagagccggaatttgacaaatgccgcgtcgcctttgctaacgccattgcagcctttgagcgccgaatcatcaataaccgccgtaaccgctggaacgactttttcaatgatctgatggaaaaaagcgacgacattgttgaagacgattttggtgataaagaggcgattgcccggcgtattagccagcagtttaaatcgcgtcgcgtcgaggtggaaaaattaatgctccaggacactgaggagggcgttaaggccttacaggagcagatgattcaagcggtggctcgtttgttgcaagatattaagcacattgagttccagcagcatgtcgatttcgcccacggcggtgaattcgaatttggtcgcgagatcgcgctgggttatgaccttgggctaagggatttcggctcaatggcctttaaaatcggcagctacgccttaagcggcgccacagtcggtagcgccttcccggtgatcggtacggtcattggtgccgtagcaggcgctttagtcggcgtcgtcatgaccgttgtcggtttctttaccagcaaagcgtcgaaagttcgcaaagcgcaggggaaagtgcgcgacaagctagaaagcgccagagataaagcgctggacggtattgatgatgaggtccgtaacctggttgcggctatcgagaatgaactgaaaagcagcctgctgcaaaaagtgaatgccatgcatacggcattgcagcagccgatcgccattttcgaacagcaaatcacgcaaatcacccatttaaaaaatcaactcgagaacatgccttatggaacaattcaaacagttcagtattga

SEQ ID NO: 81644 - DNA, 1728 bp, Citrobacter koseri
atggaacaattcaaacagttcagtattgagaagcaggctgccattaactcgctgctacagctgcgcggcatgctggaagcgctgggcgaaatggagatcgatgtcaacgacgatctgcaaaaaatcgcgtcggccatcacagccgttgagtccgacgtgttgcgcattgccctgttgggggctttttctgacggtaaaaccagcgttatcgccgcctggctcggcaaaatcatggaagatatgaatatctcgatggacgaatcttctgaccgtctgagcatctataagccggaaggattacccggagaatgtgagatcgtagataccccggggctgtttggcgataaagaacgagaaatcgacggcaaacaggtgatgtatgaagatctcaccaaacgttttatttccgaagcgcatctgcttttttacgttgtcgatgccactaatccgcttaaagagagtcacagcgccatcgcaaaatgggtgctacgcgatctgaataagctgtcatcgaccatcttcatcatcaacaaaatggatgaagtgactgatttaaccgatcaggcgctgtttgcagaacaggcggccatcaaaaaagagaacctaaagggcaagctacagcgcgcggcaaacctgaatgcgctagagcttgaacagcttaatattgtttgcattgcttcaaatccaaacggtcgtggccttcctttctggttcaacaaacctgaacattacgaaagccgctcacgcatcaacgatctcaaaacagttgccgctgagattctgaaaaccaatgttcccgaagtgctgctggcgaaaaccggcatggatgtggtgaaagatatcgtcacccagcgtatcaccagcgcccagctgcatctcagcaaactcagcacgttcgttgcgaaaaatgatgaagatacttcgcgttttacaagcgatatccagcaaagccgtaacgaggtcaaacgtctggctggcgaaatgtttgaagaacttagtttgctggaaaagcagctgatgagccagctacgcccgttggagctggatggcattcgcccctttatggacgacgaactgggctataacgatgagggcgtcggctttaaattacacctgcgtattaagcatattgtggatcgcttttttgcgcaatcctcctccgtcacgcagcgactgtcggacgatattactcgtcagcttaattccagcgagagcttcttaagcggagttggcgaaggggcatttaaatccctcggcggcgcgtttaaagggatttccaaaattagcccggagacgattaaaaccacgatttttgctgcacgcgataccattgggcaattaacgggctatgtctacacctttaaaccgtgggaagcgaccaaactggctggcggcatcgctaagtgggctggtccggccggggccgcatttaccatcggctctgatctatgggatgcctataaagcgcatgaacgtgagcgagagttggaagaggcgaaaaatgagttgacccggatgatcaaagatccgttcagcgatatctatagcgtcctgagttcagatgaaaagacgttcgctttctttgccccccagattcaagagatggaaaaggtcatttgcgatctgacagaaaaaagcgacaccattcggaagagccagcaaaagctaagcatactccagcagaagctcgagcagtttaaccgttcgagcgagcagcaagtgtcctga

SEQ ID NO: 81645 - DNA, 147 bp, Citrobacter koseri
atgttatccacagaaagatgggataactgtgaaaaaccgccactactgtttcaatttacagccttgacgtgcgacgaaaatcgaatttttacacaaattgtgcctaacttattggcacaatctgtggataaaagcgacggtggttga

SEQ ID NO: 81646 - DNA, 684 bp, Citrobacter koseri
atgaccactattaccagagagccagtaacgcacgaattgaagatttttcctgaattcttctctgcggtatgcactggcaataagcgtgcggaattgcgaaagaatgaccgtgattatcgagtcggagataccttacatcttatggaaactccgcgcggtagttgtcgcgcaactggagagtttatcaatgtggcaataactcacattgcagatgttagtgactggatgcctggttatgtactgctgagtatcgcgctggcatcgcttgacgctggcagtgacagccacccggcgcaaggccctctctcaaattaccgcctgcaccgcatcagcgatattctcagaaaagccgcagcacaaagcgacggcggtaacatcggttacgcaatgtctgatgctgtgaaagcgattgatgaattgctggaagggaggaaggcggagccggttgctttcatcaatggagcgtggacgctggtttattatcgcccgccgaaagaatctggtctgaagattggcgataagctctacaccgccccgccagcgccggtagtgccattgaccgatgaacagatcgacgatgtgctcgattctcgcggcaatattttatacgtcattgccgacaaacgggagcgcctacgtatgtttgcgcgtgaaatcctccgcgctgcaatggaggtgaaatag

SEQ ID NO: 81647 - DNA, 627 bp, Citrobacter koseri
atgagcaacatcgacaaacaggcgctacgccaattggcaactgacgcgcacgatctgggcatcatcaagcggtattcgaagggactagaggcgcagagaaaattttacgccgctgcaacccctctggtaattcgcgcgctgctggatgagctggaagcgctccagtctttccgtaccgcattcaatgagtggcacgataaaacagaatggatgcagggtgataagcgatttgacgtcattaagccttggggtaagcaccgcgccgacgttctgaagctctatatcgatcatctggagtcaaagctggaagccaaagaagaacagcgagctaactggtttcagatggcgcagaagttaggcgaggatttggactccgcagagaagtgcatagcagaactgcgagagtggaatgcaggacttgcgcaagagtcattcgaacgacagcagcatattgctgagctttctggtcagaaacggctgattgggtggcgagcatcagattacaccgatgagacatcagaccctgagttagctaaaaactgggctgctgctattggcgtactgcctatttttgaaggtgacgtgaataccaaacttagcgccgctggcatcggcaagggggagtga

SEQ ID NO: 81648 - DNA, 258 bp, Citrobacter koseri
atgagcattctggacgttctaaataccggactcgccttaatgggatggctattcatcatgttcaaaacaggccagtggtttgtttctattgcgctaaagcagtgggataaacgcagaaagcaatctcgtcgtcaaaaagcagtaaacgaattttacgatgcgtttgacctgtcaagcatcgaacccggaacaacggttcgtctggctactaaaggcgatctgacaatcatgatgtttcgccaggaggccgcccaatga

SEQ ID NO: 81649 - DNA, 378 bp, Citrobacter koseri
atgaaatcaacagtggaaacaaaaatcattgagttagtgaagtcaggacatgagttggcgaaagaactgcattttgctgagcctgccgcgctggtgagcgacctggcgtctcagcttgatgtgcagtttgcccgtagcaatgcgctggctgcaaagctgagcatgattaacggcctcatggatgctgctgaacaggccaacaaacttgcgcaggaagcaacggaaaagctggtacaagagcgtgatgcgctggctgcggagaatgcggcgctgattagtagttctgaatgtttacttcatgaagcgagcgaagtgtaccgagcttataacaaaacacaattgccagatggcgaccttgttgacgaacaatgcttgtaa

SEQ ID NO: 81650 - DNA, 225 bp, Citrobacter koseri
atgactggtattgaaaacgcaatccgtacgtccggctcagcaagtgctcttggagcagcgatcggtgtatcaaaaatggccgtttctttgtggcggaaaaatggggtgcctgccgatcgtgttttcccaattttcaacgcaactggtgttactccccacgaattgcgccctgatctgtatccgaacccaacggatggattaccggcgcaggaagcgagggcataa

SEQ ID NO: 81651 - DNA, 393 bp, Citrobacter koseri
atgagcgaaaacaaatcgataaatggtctggttgccaggcttgcagaactgaacgcgaaaggcttttcgaaaaccgaaatggccaagatagctggtgtcagcaaacaggctgtttctggttggttcaaaacaggacggattagcaaagaatcagcactggctttggcagacgccgctggtgtttctgtaccttggctgcttggtgaagatgtcggagaaaaagacggacttaagcctgatgagcaacgtctgcttgaactctatcggcaattaccagacgaagaagagcggcagaatatattacggatcatgtcactacgactgaaacatcttgacgaactgtacgccaagtatatgggaaggcggattaggggtgatggagaatcgcaataa

SEQ ID NO: 81652 - DNA, 273 bp, Citrobacter koseri
atgaaattagtaactctggcaacctgggcagccatgtattacccggataatccaccagcgcgcgtgaccctcaggcgctgggcaaggaacggcaatatttatccgccaccggagcttcacggtcgtgaatatagagttaatcctgaagcgttttacatcaaaccgaacaaagctgaaaagaaactaaaaaagcacgaccctaacgggcgtaccggcaagatgagtccattactggagaagttgatcgatgagtcgcaaaaagtacgatgctaa

SEQ ID NO: 81653 - DNA, 1080 bp, Citrobacter koseri
atgagtcgcaaaaagtacgatgctaacctaccgcgtaatctgacgtaccggaatgccagcaaatcattcttctggcgcaatccggttacagagaaagaatttccgctcggtcagatttcccgtagggaagctatcgcacaggcgattgaggccaacaacttcatcgcgcataattacacccctgttgcgctgattgaaaaacttaaaggtctggactcgcttactgtcacaaagtggatcgagcgctatgaggtactgttgcagcgtcgtaatctgtctgtgaacacatacaagatccgtggcaaccagttagcgactgtgcgggagaaaatgggagaaatgatcctgtcagaagtaaccacacgacatattgcatcattccttgagtcatggattgccgaagggaaaaacaccatggcaggagctatgcgctcagttttatcagatatgttcagagaggctgttgtggaggggcatattactcaaaacccggtagaaccgacccgagcaccaaagattgaagtagcacgggaacgcctgcaactggaaacctacatcgccacccgtgcggctgctgagcaattacccacatggttcccgctggcaatggatctggcgctcatcactggtcagcgtcgcgaggatgtagcctgcatgcagttttctcatgttattgatgatcgattgtacgtaaagcagattaaaaccggaatgaaaatcgcgttgccactatcgctatctctcccctctatgggattgcgcctgagtaccgttatcgaccgctgccgactggtgagtagaactgacttcctcatcagcgccggggtcaggaagaacagtcaggacggaaggattcacccggacggactaaccaagaaatttgtagccgccagaaaactggctggcgtggagttcagtgacaacccacccacttttcacgagatccgcagtttatctggaaggctgtataaagacgcgtacggcgaggagtttgcacagaagcttctgggtcatacttcagaagccactacgaagatgtatcttgatgagcgtgatgaaaaagcatatatgatgctctga

SEQ ID NO: 81654 - DNA, 891 bp, Citrobacter koseri
atgctatacaatactggaaccatttctgttagcggtaataacgccaccggcacaggcacgaactggaccgcgccagccagccagattcgcgtgggtcagactatcattgtgctgtctaaccctgtccaaatgttccagattacgacaatcaatagcgccacttccctgacagttacgccagctgcgtcaccggcactcagtgggcagaaatacggtattctggtatcagacaatctgtctgttgacgggctggcgcagagtatttcccagttgattaacgaatatgatgagaatatcagcgcatgggaggcttttgctttaacgagcgctaaccaggcgatcaatgtcaccataaacggcacacctgtttctattcctgccttgggtaaacttgtacagaaaggggtaaacggtgcagttcctgttaaccaggggggcaccggcgcaaccactgctgaagacgctcgcacaaacctcggtttaagaaatgctgctctggctgacattttaggcacggtttctcagtctggtggggttcctacaggagcaattattgagaaagggtctaactcaaacggtgaatacattaaatttgctgacgggacgctgatatgcagacgggtaataacaaccgccgatgtcaatatcaacatgaatgtaccagataatcttggtggttatcgtggaggacagacgctaattgcattccctgcgaagttttccagtcagcctgttggatgcggagacgtggttaacaaccctgatggcgccaggtgcaatgtgacggcaggtaacacgtcaacatggaccgttggcctgcatacgattaatagcgggaatgttggcaccacatacgcaataaaccttcttgcaattggccgctggttctga

SEQ ID NO: 81655 - DNA, 267 bp, Citrobacter koseri
atgactaaatatttacgtttaaccatctcaggcctggaacgtgttgttgatgggattttgattggtggaaccgcaaccgtcaaagtaacccgtggtgaagagattatttgctgtgagaatttttcagggaagatttccgggaaatattcaaagctatacgaactactggatactggtgttccagtgtcggtaatcgctgtaagtgattgccagtttttcaaagcagaagctgattttataaatccctttagcaagttaaccgcttaa

SEQ ID NO: 81656 - DNA, 600 bp, Citrobacter koseri
atgccggaagtgatgacgagaattgagcttggtggtgtgctgggtaaaacttatggcaaggttcatcatcgcttaattcgtactactgctgaagctattaattcgctcacaaaaactatcaatgggttagaaaaatttcttaatacaagcaaaatgagaggtttgacttacgctgtttttaaagggaaaaagaatattggcgtagacgatttgggttttcctgtctctggtgaggtcatacgtattgtacctgttgtgattgggagcaaaaaagctggcgtattgcaaacaattcttggtgctgtgcttgtcgtagtcggtgtggttattggatatttttctgggggcaccctgtcggctgttggttatggtgccgctaaatttggtgcagcaatgatgcttggaggcgttgtgcagatgctttctccgcaaccagccgggttggcaagcaaacaagatgccgataaccgcgcatcatatgctttcggtggtgtaacgaatacagccgcccagggctatcccgttcctctgctttacggtaagcgtcgtattggcggtgccattatttcagctggtatctacgtggaagatcaacaatga

SEQ ID NO: 81657 - DNA, 618 bp, Citrobacter koseri
atgaacgcaagaatttttatggactactgtcatgcaattgacgttccgtcactactgtcaagagcgacactaagcgatgacgacacaggaacggcattacgtcttcaccttctctgtgagcggatggttgaggcgtggatatgttcatgttgtgattgcgtcgagctttttggtaacgataaaaacaaagtgcgaatcgaatgtgatgcaaaaattgcgatggcagggaaccttggcatcccctcagaattagtaaagacattaaaaacgttcaactcactaagaaatgatctcgcccataacccatctatagaagagataccaaattcaagaatccagagcatgaaggactctttgaatagttatctagtcaaattaccggatgaagaaccagtagaaaaaacacgtgttggctttataggcgaggacgaaaaaacaatcagtgagcactcattcaatagcaatgagacaccaaacagactgaagctatgcttgatattcgccaaactaatgaaattattatttaagcaagtagcagccaatcacaaaggaaactgggataaccaattcagccaattcgaatacaacgtcaccatgaatgcaactaaacccgtataa

SEQ ID NO: 81658 - DNA, 738 bp, Citrobacter koseri
atgattaatttattgagttgcggtgcattctcgtgttcgaaagagcttgatcgagataatcaggatgccatactgctgcctcagttacgtaatggatcattcattttcgcgattgctgatggtgttggttcttactacggggctaaagaagctgctgaacttgcagtgaaacaactttcggttgttacagatgaggaattactccaccctgaaactacccttaatgtaatcaagcagaagatttctgaattaactgctataagtaatgaatattcaaaggctgcaactactctttcatattgctttataactcctgatgttctgaatattgtgcatgtgggtgatacccgagtatatgttaaaaaagggatgaagctcattctgttgactaaagatcatactcagcatcaagagcttctggatgatggactttatactaagaaagagctggaggcacttccaggtaagaatacgctgacggcggctcttacacgaagcttgactcttcggtatcaacataaagttatgccacttaatgaagtaaccgattcagatggcactataacgatctttataatgtcagatggtgcccaccatccttgggagcaaagaccgcggttttcattaaatacgcttagtaacgtaaatactttttcttccagtttatttaagcgcattcaacggctatcaccattagacgattattctcttattgcggcacaatttaggcctgaataa

SEQ ID NO: 81659 - DNA, 780 bp, Citrobacter koseri
atggaacccagagggaattacttaattaggccgattcgtgagcttggacatgggactttcggtcgtgtcgagatggttgaagtcttcaacactagaggccattacagtggcaggtatgctagaaaagttctctcagtaaacccggcattaattggcgagctattcagtcttgacgactggaagagacgatttgaacgagaagtgagataccaggctgcatgcagtcatgataatgttgttcctgtatgtatccaccatttaaccatagaaaatccttggtttgttatggggcttgctgaatcggatcttagaagcgagatggttcagggacagctttctgatattaataagttaataattcttagaatggtttttaaaggtgttgaatacatccattctcgaggatatttacatcgtgatctgaaaccagagaatatccttagatattccgatggctgctataaaatatcagattttgggttggtgaggaatattaattcagaagctcagtcagcttttttatcaaatatattacaagaccgggctattggtattggaacacctgagtatatgtcaccagaggcccaacgcggaacgtatacagaaaagtctgacatttatgctcttggcgtgattatcaatgagcttaatgttagtcatatacatggtattggagctttaattgatagatcgactgcatatgtacctaatgcaagatacgaatcagtaaaacaaatgattgaggtattagacagcatcattgcgaggataacaggatga

SEQ ID NO: 81660 - DNA, 1068 bp, Citrobacter koseri
atgttactacatagaaaaaatatagatttgtgtcgttctttaaagctcggaaaagataagcatggacacgctctaaagataaggattgataagttaactatagttagttatttttcaaccatagaagaaaaagaggaggtatataatagattcgaagaaatgaggcaaggaatacatgaaaagtatcgggtgaagtacattagaaacaaagaaaaaaaaccttatcgaaaatcattaaacatttacagaaggaagaaacaaactccagctctattgcatatcgattatgtaccgatacatcctaatactggagaagtacgttttgattttcatcctcagcatatgacaacagaaagaatagatcatctactatcatgggtgaatagtgtattaggcgagacattctatcagctactcgttcgagcttggatcacgcgagtagacgtagctcttgacgtgtataactgcaagctagatgattatatatggggattaaagcgttcaggaataactaagtattacgatactgaaaatggtttaccaggagtcagaataggtagccatcgctccatattacatatccattgctatgaaaaagttaatgcgcgccgcgacagaaaactcattctgaagaatcgtgccaaatacattaatatcaacctggatgaacataagcgtttcttgcgtatcgaagctcgatacatgccgggtgctaaaccaaccagtaagaaaaaggatgccttgatgctgtcccaacttctggagatgagaaaccccttcaaacgactccaggtctactctaagaacttagggaaggagctgcttaacaaaggataccttcatgccctgcccaaagagcccagcgtcatagctttgaagagtgctcttaagcaacagccagggcgttcacgcttgactgccatgcttaccagacataaaacagtgcttttcgatgaacgtgagatctggaatctgtggccacgctgcgttgagcaattaagcagcatatacaacatagcatctgcttacggtgtacttaagggtgtagctaatcgaaaagacgattag

SEQ ID NO: 81661 - DNA, 585 bp, Citrobacter koseri
gtggttaagaaggtaaaaaagcgagaggaatctgagctgattcatcgccgtgaaaaatacattgaatatcaaaacagacgtaaggaaaaattggataagcttggggaatataagctttcactgagactggaaagatcggactacgataaacttgcagatttatgtgagaatttgggttatcgacgtccagtgtcaggaaaatataacctcgttgagacatattctgaggttatgaaatatttattacgaatctccgagagcttaatcagctatcagccaaaatcagaagaagcaattggattacttcacttacaccaatttgtcactcatttaaagcatgataaaaattcggatgatgaaaatatcttgcaagaactaaaaaccagaggtgttaaaatcccactttcatccctaagaaatgaagtgaaggagacaatcagtgatgaacttcagcctttggataacaaagtgaccagttatgatcacgaaaagtttattgaatatcttttgagtgaaaaattagtggttaaaaaaatcatggaaatagataaaaaatttaccattagctcgaaaaaaaatggctga

SEQ ID NO: 81662 - DNA, 174 bp, Citrobacter koseri
atgacttctcccgtcaatgtggacgtcaaactgggcgtcaataaattcaatgtggatgaagacaatccgcacatcatcctgaaaaccgaaccggataagcaggcgctggaggtgctgatcaaggcgtgtccggccgggttaatgggatggactacctcctcccgctgcggttaa

SEQ ID NO: 81663 - DNA, 249 bp, Citrobacter koseri
atgagcacgccaaccaagaaattgcggctggggccgctgccgtccagcagcagcgtcaagctgacctttgcctgccccgccagcctgaaagccgacctcgaccgctatgcccagctccatgcgcaaacctatggcgaagctgtggatgcagcgacgctgatcccgcacatgctggaagccttcatggcgggggatcgaggattcaggaagggtggcgcgggcaagcccgcgccaccaaaaccaggctga

SEQ ID NO: 81664 - DNA, 1293 bp, Citrobacter koseri
atgagccaggacgacacgcccgacctcgccatcccgccagcgggcaaggtcgcacccgaggcggtggcgctgcgcgcccagccgcgcccggtcacgcgcctgaaccggcgcgtgctggccatccttgcaggtggcctgtcgctcgccgtgctcgtggcgctgatgtggtcgctgcaaccgcagcggcgcggggccaatgagcaggccgagctttacaacgtggatcgcgtctcgcgttccgaagggctggagcggcttccgaccgactattcgcaactgccgccggccttgccgcccgaggtgccggaactggggccgccgttgccgggtgatcttgggccggccatcgtcaatgcgcagcagcaaccggcggtcggctatgcgccgccgggccacgacccggccgaggccgagcgcctggcccggttgaaggaagccgaggaagccgccgcctcatccgtgttcttccgcacgggcacgcaaggcgccgcgccggtggcacagtcacaggccgccgctgcgccgggcttctctgccaatgcggcctttgatccgatggcggccgggccggcctcgacggcggcccagcctgccgatccgaccaccgtacagaaccggcaggaacaaaaggaggcgttcctgcaaggcgcttctacggaaacccgcaattcaggcaacctgaccctgccggcttcgccgtatcaggtcatggccggcacggtggtcgccgctgcgctggtgacgggcatcaagtcggacttgccgggcgatgtcatcgccacggtgacggagccggtctatgacacggccaccggcaagttcctgctgatcccgcagggctcgcgcatcctgggccgctacaacagccaggtcagctacgggcagagccgggttcaagtggtctggaaccggatcatcctgcccgacacgtcatcgctgacgctcgacaacctggtcggcactgatcctgccggctatgcgggtctggaggatgaggtcgattggcattggggtcgtatcttcgccggggcggcgctgacgacgctgctgggcgtgggcgccgagctggccgcgccggagaaccgccaggacggcgaccgcatcatcatcgccggccgcgacagcgcgcaggacagcatcaatcaggtcggccaggagatgacccggcgcaacatgaacatccagccgaccttgaccagtcggccgggcctgccggtgcggatcatcgttgcgcgcgatttgacgttgcgaccttaccagccgctcatgttcaatcgaggaacatcacgatga

SEQ ID NO: 81665 - DNA, 993 bp, Citrobacter koseri
atgacgacccctttgcgtttctacgcttttccgctgatcgccttcgccctggcgggctgcgccacgcagggcaagccgccgccggtgatcccgctcgatgagccggtcgaagcgcagttcatccccgaaccgcccgcgccggtggaagtcgtcgccttgcccgaaccgctggcgctgccggcgcagttgaagccgctgccggacggcgaggacgcccagcctgcgccggagccggccgacgaaaccgtgcgtgtctcgcgcgccaacaccgaggcgcgcgtcgcgccgacgcgagagggcttcgtcaatgcgatccaggtctggcccttcaccgatggcgcgctgtaccaggtctatgccgcgccgggtcgcgtgaccgtggtgtccttgcagccgggcgaggaactggtgacggtcgccgccggcgacaccgtgcgctggatcgtcggcgacacgtccagcggtgccggcgacgaactgcgcgtcaatgtgctggtcaagcccgtgcgctcgggcctcaagaccaatctggtcatcaccaccaatcggcgcacctatctgctggaactgacctcgaccgaacgcgcgtggatggcgtcggtatcctgggactatccgcgcgaccggatgctggccttgcagcgccaggcgcaggccgcgcaggcgactgcgccggtcgataccggcctgtcgctggagcgcatccgcttccgctacgcgatcagcggcagccatccgccgtggaagccgctgcgcgctttcgacgacggcgagaaggtctatatccagttcccgccgggcattgcgcaaggcgagctgccgccgctgtttgtcatcggcgcgcagggcgacgggcaactggtgaactaccgcttccgcccgccgtactacatcgtcgatcggctgttcggcgcggccgaactgcgcctgggcggtgacaagggcgacgtggtgcggatcgagcgcaccgacggcgtggcgcggaggaactga

SEQ ID NO: 81666 - DNA, 705 bp, Citrobacter koseri
atgcgattcaagaaaccgcaggtgcgctacgccgacacgccgcagcctgccacgccgtaccaagcggccggccaggtgtgggacgaccgtatcggcttgccgcgcgtgcaagcgaagaactggcgcctgatggcattcgggtgcctgacgctcgcgctgctgatggccgctggcttggtgtggcgttcggcgcagtccatcgtcacgccctatgtcatcgaggtcgatcaggcgggtcaggtgcgcgccgtgggcgaagccgccacgccataccggcccggcgacgcgcagatcgcgcaccatctggcgcgcttcgtgacgctggtgcgctcgctgtccatcgaccccatcgtggtgcggcagaactggctggatgcctacgactacaccaccgacaagggcgcggcggtgctcaacgactacgcgcgcaccaacgaccccttcacccgcgtcggcaaggaaacggtgacggtgcagatcaccagcgtcgtgcgcgccagcgacacgtcgttcaacgtgcgctggacggaacgccgctacgtcaacggcgcggccgcagggctggagcggtggacggccgtggtgtccatcgtgctgcaaaccccgcgcaccgaggaacgcctgcgccgcaatcccctgggcatctacgtcaatggcctgtcgtggagccgcgaactggattcttccgatggagccacgccatga

SEQ ID NO: 81667 - DNA, 1221 bp, Citrobacter koseri
atgaatgacgtgacggtcatcgaccgctttctggatacgttctcgcgctacatcgactccgggttcgggctgttgcagggcgaggtggcgttcctgacggccacgctgatcgtcatcgacatgaccatcgccggtttgtactgggcgatgagccacgccaccggccagggcgaggacgtgatcgccaagctcctgcgcaaggtgctctacgtcggcgccttcgcctacatcatcggcaacttcaactggctggccggcatcgtgttccgctccttcgccggcctggggattacggccaccggctcggccatcacgatggagaactttcttcagcctgggcggcttgccaagaccggcatcgacgcgggcgcgccgatcctggagaagatcggcgacctggcgggctttcctgatgtgttcttcaacctcgatcccatcgtggtgctgtttctggcctggctggtggtgatcctgtgcttcttcgtgctggcgatccagcttttcatcacgctgatcgagttcaagctgaccacgctcgccggcttcgtgctggtgccattcgcgctctggaacaagacatcgttcctcgccgaaaaagtgctgggcaacgtggtgtcgtcgggcgtcaaggtgctggtgctggccgtcatcgtcggcattggttccggcctgttcgccgagttccaggtgcatcccgacgagccgtccatcgaccatgcgctggtcatcatgctggcttcgctcgcgctgctggcgctgggcatcttcgggccgggcatcgccaccggcctcgtgtccggtgcgccgcagcttggcgcaggcgcgatggccggtgccgctgtcggtgccgcaggtacggcggtggccatcggggcggccgcaaccggcgtaggtggcgcggtggcagccggggcacgcatggcgccgggcgccgcgccgcgtccggtgcatccgccgtcgggcagaagatggctggctctttccgcgccggctggaacggcccttcggccgatgacggcgcgggtgccgcatccagcggcggcgcggccgatgccaccggctcgcagaagcaaacgcagcccgcctgggccaagcggatgcaccgccgccagcagatcacccatgccgcgaccaccgccgcccacacgctgcgcggtggcgacggcggcggttcgggttccggcccgagcctgcgcgattccgactcataaggagaactga

SEQ ID NO: 81668 - DNA, 729 bp, Citrobacter koseri
atgaagaagcgcctgatcgctgctgccgttgcggccatgctttgcactgccaccactgtccatgcgcaatgggtcgtggtcgatcccacgaacctcgtgcagaacacgctgaccgccatccgcacgatggagcagatcaacaaccagatacagcaactccagaacgaagcgcagatgctgatgaatcaggcgcgcaatctggcgagtctggacttcaacatcgtcaaccgcctgcgctcgacgctcgccaccaccgaacgcctgatcgccgaggcgcaggggctggcctttgatgtgcagaacctcgatcgcgacttcgcgcggctgtacccggaacagtacgccgccacgatcagcggcgatcagatgttccgcgatgcccgcgagcggtggaagaacacgctcgacggcctgcataccgcgatgcggatgcaggcgcaggtgtcgcagaacctgcgcgaagacgaaggcgcgctggccgacctggtgagccagagccagtccgccaccggcgccttgcaggccgcgcaggcgaccaaccaactactggctttgcaggccaagcagtcgatccaggcccagcagctccagatcacgcaagaccgcgcagcctcgctggaactggcgcggcaggcggctgccgccgagcgtgcccgcgaagtgcggcggcgcttcctgggcaccggcacgccgtacacgccgcagcgcgtggacttctacagcaactga

SEQ ID NO: 81669 - DNA, 2448 bp, Citrobacter koseri
atgctgaaccttgccgaataccgccagcggcccgccttgctggccgactggctgccctgggctgggctggtcgcgccgggtgtcgtcttgaacaaggacggcagctttcagcgcacggctcgtttccgtggcccggacctcgatagcgccacgcaaggcgaactgatcgccaccaccgcacggctgaacaacgcgctgcgcagattaggttcgggctgggcgctgttcgtggaggccgagcgccagccggcagcggactatccgcattccgacttccccgagccgctgtcgtggctggtggacgaggaacgccgcgccgccttcgaggaatcaggccaccacttcgagagcacctatcacctgacgctcgcctatctgccgcccgaggaatcccgcgcccgcgcggccaagctgctctacgagcacgcgccaggcgacggcgtggactggcgcgagcggctgcaagccttcgtcgcggaaacggatcgggtgtttgatctgctcgatggcgtgatgccggagatcgcctggctcgatgacgcggaaacgctgacctacctgcacgcgaccgtttcgacgcggcgctaccgcatgggcgtgcccgaagtgccgttctacctcgacgcgctgctggccgattccgcgctggtcggcggcctcgcgcccatgctgggcgaggcgcacttgcgcgtggtgtcggtgcggggtttcccgacctcgacctggccgggcctgctcgatgacttgaaccgcttgggcttcgcctaccgctggagcacgcgcttcctgtgcctcgacaaagccgaggcggaacgggaactgggccgcctgcgccgccaatggttcgccaagcgcaagaatgtcatcgcgctgctgcgcgaaacgatcttccagcaggaaagcccgctggtcgatacggatgccagcaacaaggcggccgatgcggatgccgccatgcaggagctgggcagcgatcaagtcgccttcggctacctgacggccaccgtcaccgtgatggacacggatgccgctgcggccgacgaaaagctgcgcatggtggagcgcgtcatccagggccggggcttcgtcaccatccccgaaaccttgaacgcggtcgatgcgtggctgtcgtccattccgggcaacgcctatgcgaacgtgcgccagcccatcgtctcgacgctgaacctggcgcacatgatgccggtgtccgccgtgtgggccgggccggagaagaatgcccatctcgacggcccgccgctgatcgtcacgcgcaccgatggcgcgacgccgttccggctggtgacgcacatcggcgacgtggggcacacgctgattgcagggccgaccggcatgggcaagtcggtactgctggcgatactcgccttgcagttccgccgttatggcggctcgcgcatcttcgccttcgacatgggccgctcgatgcgcgccaccatgttgggactgggcggcgagcactacgacctcgtcgccgatggcggtatcgccttccagccgctcgcccgtatcgacggcgagggctaccgcacctgggcggccgaatgggtggaaggccgcctgctgcatgagggcgtgaccgtcggccccgacgagaaggcggcgatctggtcggcgctgggcagcctcgcgggtgcgccgccggaacagcgcacgatgaccgggctttccgtgctgctgcaatcgaacgcgctgcggcaggcgctgtcgccgtatgtgctcggcggcgcgcacggcaagctgctggacgccgaccgcgatcggctgggcatggccgacgtgcagggcttcgagatggaagaactgatgcacagccccgccgccgtgcaggcggtgctgcgctacctgttcgcccgcttcgacgagcgtttcgacggtgcgcccacgctgctgatcctcgatgaagcctggctgttcctcgatgagccgtcctttgccacccgcatccggcaatggctcaagacactgcgcaagaagaacgtgtcggtcatcttcgccacgcagagcctggcggacatcaaggattcgactatcgcacccgcgatcatcgaaagctgcgcgagcaggattttcctgcccaatccgcaggccaccgagccgcagattcgcacgatctacgaaggcttcgggctgaactcgcgacagatcgagatcgtcgccaccgcgcagcccaagcaggactactactaccaatcgcgcctgggcaatcgcctgttcgacctcgacctggggccggctgcgctcgcctttgccggcgcatccacaccccaagaccaacgcgacatcgaccgcgtgctgacgcaggccggcgcccccggcttcgccggcgcgtggctgcgccatcgcggccttgattgggccgccgatctgctgccgtcctcgccggcggcggcttcttttctttcccagccacaggagaacccatcatga

SEQ ID NO: 81670 - DNA, 285 bp, Citrobacter koseri
atgagtgccgccgatgaaggcacgccgggcttcgcgcccggcttcgaggtgccgctgcatcgttcgctgaccgagccgattctgctgggcggcgcaccgcgtaccgtggcgatcgccaacggcacgctggccgccgccgtcgggctgggcctgcaactgtggattcccggcgtcgtgctctggatcgtcggccactcgctggccgtgtggggcgcgcgtgtcgatccgcagttcatgcaggtcttcgcccggcacatcaagcaccgcccgctgctggacgtgtga

SEQ ID NO: 81671 - DNA, 384 bp, Citrobacter koseri
atgacgcagatgcacgttcctgctttccgcctttccgtaaatccggttcccatccttgcgcgcctgcggcgcctggcccggccggcccatcgcggcctgatgctggccgccatcatgctgatgacggccggcaccgcgcaggctgccggttcctcgatgccgtgggaagggccgctgcaatccatcctggagtcgatccaggggccggtggcgcgcatcgtcgcggtcatcatcatcattgcaacgggccttgcgctggccttcggcgacacgtcggggggcttccgcaagctgatccagatcgtgttcggtctgtccatcgcgttcgccgcatcctcgttcttcctgtccttcttttcgttctccggcggggccgtcgtatga

SEQ ID NO: 81672 - DNA, 1071 bp, Citrobacter koseri
atgagcgccgttccgcaactcccacccgaaccccgctcatccacagcggcttcgctggatcgccgcatccagatgctgcgcacggcaatggggccactgatcgccgccgcgctggaagacccggacgtggtggaaatcatgctcaaccccgaccgcaccctgtgggtggatcgtctgtcgtcgggccgcgcgccgctgggcgtcgaactgcccgaggccgatggcgaacgcatcatccgcctggtggccgcgcatgtcggtgcggaagtacatcgcggccagccgctgctgacggccgaactgccggaaaccggcgaacgcttcgagggcattctgccgccggccgcgccggggccggccttcgcgctgcgcaagcgggccgtgagcatcatcggcctggatcgctacgtcgctgacggcatcctgtccgcgccgcaggccgagttcctgcgctgtgccgtgcgcgagcggcagaacatcctgatcgccggaggcaccagcaccggcaagaccacgctcgccaacgccttgctcgccgagatcgccgccaccggcgaccgcgtgctggtgctcgaagacaccatcgagctgcaatgcgcggcccgcgaccacgttccgctgcgcacgcgcgccggcgtcgtgtcgatgcaggaactggtgcgcgccacgatgcgcctgcggcctgaccgcgtgatcgttggcgaagtgcgcggcggcgaagccctggacttggtgaaggtgtggggcaccggccaccccggcggaatcgccaccctccacgccggttctgcgctgggcgcgctgctgcgcctggaacagttgatcctcgaagtggcggtgaacccaccgcgcgcgctgatcgccgaggcggtcaacgtcgtgatccacatcgccgggcgtggccgcaagcgccacgtcgagagcatcgcccgcgtcgtcggcttcgacgccgccggctaccaactggcggacgcgctggaaacgccgtttcccgagctgccgccggtttccttcgcagccgccgccgctgcgccttccccgtccctcgacccacctggagaactgccatga

SEQ ID NO: 81673 - DNA, 477 bp, Citrobacter koseri
atgagccaataccgcctcaacctgttcatccagcccgagcacgccaaacgcctggacgagctggccgccaagaaaggcgtgtcgaaatccagcatcgtcgcggcggcgctggcgtcctggctgtcgccggacgcgggcgaccagcgcgaggccgccatcgccaagcggctggatcgcctgtcgcggcaggccgagcgcctggagcgcgaccagaacatcgaaatcgaaacgctggcgctgttcatccgctacttcctaacggtcagcacgccggttcccgaagcccatcaggacgcggcccgcgcacagggcaaggcgcgcttcgagcagttcgttgagcagcttggccgccacctgctgcgcggccgcagcctggtgcgcgacgtggtggaggaactgcatcccgacccggtgcggatggacgacgcggcggcgctggccgaagcgcaggaacgtactgcggagcgtgcctcatga

SEQ ID NO: 81674 - DNA, 2004 bp, Citrobacter koseri
atgcaaggtcagggcgtgttgttcgggcagatcgccgccgtcttcggcatcgtgatcgccggtgtgtgggctgccacacaatggacagccgccgccctgggctatcaactacgccttggctcgccctggttcgacttctttggaacgccggtctatcacccctggcggctgttcgaatggtggttcttcttcgatgcctatgcgccgcatgtcttcgacatcggcggggccatcgcgggcggcagcggccttctggccgtggtggtggccatcgccatgtcggtgtggcgctcgcggcaggccaagctggtcacgacctacggttcggcgcgctgggctgaagcggacgacattcgcaaagccgggctgacgcagccggccggcgtgttcctcggcaagtaccgcaacgagtatctgcgccatgaaggcccggaacacgtcctgaccttcgcgcccacgaggtcgggcaaaggcgtcggcctggtcgttcccacgctgctgtcctggcccgcatccgctgtcatccacgacatcaagggcgagaactggcagatcaccgcgggctggcgctcgcgcttctcacactgcctgctgttcaacccgaccgatgcgaagtcggccgcctacaacccgctgctggaggttcggcgcggcgcccatgaggtgcgcgacgtacagaacatcgctgacatcctggtcgatcccgaaggcgcgctggagaagcgcaaccactgggagaagacttcgcacgcgctgctggtcggggccatcctgcatgtgctgtacgcgggcgaggacaagaccctgcgcggcgtcgccaacttcctgtccgacccggccagcccgttcgagctgaccttgcatcggatgatgacgacgaagcacctgggcgatgcaccgcatccggttgtcgcgtccgccgcgcgtgaagtgctcaacaagtcggacaacgagcgatcgggcgttctctccaccgcgatgagcttcttgggcttgtaccgcgaccccacggtggccgaggtcacgtcacgctgcgattggcgcatcgccgacctgatcgcatccgagcatcccgtctcgctgtatctcgtagtgccgccttcggacatttcgcggacgaagccgctcattcgcctgatcctcaatcagatcggccggcggctcaccgaatcgctcgacggcagcgacggcattgagcgccgtcacaagctgctgctgatgctcgatgagttcccggcgctgggcaggctcgattttttcgagacggcgctggcgttcatggccggctacggcattcgcagcttcctcatcgcgcagtcgctcaaccagatcgacaaggcgtatgggcagaaccattccatcctcgacaactgccacgtccgagtgacgtttgcgaccaacgacgagcgcaccgccaaacggatctccgagacgctgggcaccgccaccgaactgcgtgcgcagcgcaactacgccgggcaccggctcgcaccgtggctggggcacctgatggtgtcgcgccaagagacggcccgcccgctgctgacgcccggcgaagtgatgcagcttccgaccgacgaggccgtggtgatggtgtccagcgtggcgccgatcagggcgaagaagctgcgctactacgccgacgccaacttcatgcggcgcgtgctgccgccgcctgcgctcgcggccgggcgctacgccgatgcgccgcccttgcgcccggacgactggagcggcctggcgatcccaaccatgccaacggccccggctgcgggcctgtccagcgatggcgcaggcaccgccgatgacggcggcccgcgccgccagccggagctatccgaagtcaccgaatacagccccgagccgcagcccgcaggcaacgacctggcgctgcttgatgacgacgacgacctgccgctgccgcttcccggccagctcgacccggccatgcagcgcacggcccggctggcatcgctgaatcccaacgacggaatcgacttatga

SEQ ID NO: 81675 - DNA, 294 bp, Citrobacter koseri
atgaagaaggtgatcccgctcatgctggccgtggtgttgaccgcctgcggcccatccgaaacacccaagcaggccgacgtgccgactgttgaagaactggcatccgatcccgcgcgcgcctcaaagagctgcgccaacagtgcagaaccgatcgcgccacgctgggcgacgtgctgtgcaaccgggtggccgaagccacgcgcaagcggttttatggtgatggaaacacaccttatacgccgccggagaacccgcccaagttctaattgcaagcgattcgccacgaactgttaa

SEQ ID NO: 81676 - DNA, 945 bp, Citrobacter koseri
atggagcttcgtcatctacgctgcttcctggccgtggccgaagaactgcacttcgcccgcgccgccgagcgattgcacatcgagcaatctccattgtcgcgcgccatcaaggaactggaagaagaattaggcgtggtgctgttcgcccgcactacacgcagcacgcggctgacccgtgccggcaagttgtttctcgatcatgtgccgcgcgtcttcgccgccttgcagcaagcacgcgatagcgtgaaggcggcggccaatggattccacggccagttgcgcatcgcgctgtccgacggcatcacgccgtcgcgcctgccggctttgctggcactgtcccggcaggaagaaccggaagtcgaaatccgattcttcgaggtgccgctggcacaacagatcaaggggctgcacgatgacttgtacgatgtgggctttgcacgcgccgatgaagtcggcgatggcatcatcgccttgcccgtctggaacgatccgctgatggtggccgtgcccgcgcggcatcccttgttggcccacaagcgcatcccgctcgaagaactactgcgctatccgctggtgctgtgcgatccgcaggcgtgcgaaggtcattgccggcaggttgatcgtgtgctgcgccgtgtggacatggaaccactggtcgccgaacgggtggcatcctgcgacctgatgatggcgctggtttccgcgggcttcgccctgggcctgaccggcgccgcacatatcgcggcgagccaggaacagggcgtcgtcgcgcggtcgctggtcggccgctcgccgatgctcacgacctatttgctgcgcctggatggcgaactttcggaaacgctggcccactttatcgagcgtgtgcaagccatcgagttccccgaagttgccagaccagcgccaacccatttccctgatcccccggaggaatccaggccatga

SEQ ID NO: 81677 - DNA, 429 bp, Citrobacter koseri
atgaataaggctgcgctttacatcacatccgccacgtccacgggcgacgggcgcaacggccacgtccgcagcgccgatggattgctcgatctggatctggcatttcccaaggagtttggtggcgctggcggcaagaccaatccagaacagttgtttgcggccggttatgcggcctgcttccattccgcgttgaaactggtggcgggcaaggaaaaggcagcgctgggtgaatcaaccgtgactgcccaggtcaatgttcatcccgccccggacaacggatttcgtctcagtgtagggctgcacgttgcaatcgcgggactggcgcaggaagacgcgcaatcgctcgtcgccaaggcgcatcaggtgtgcccgtattccaatgccgtgcgcgggaacatcgaagtcacgctggaaaccaccacgtcttga

SEQ ID NO: 81678 - DNA, 744 bp, Citrobacter koseri
atgtcgtttgaaaacaaaatcgcagtggttactggcggatcgtcgggtattggcctgggcattgccaaggagttggtgcggcaaggtgcgcaggtggtcatcaccggccgcgacaccgccaagctgaacaaggctgtacaggagatcggtgcaggggcatccggggtggccgcagacgtcaccaaggtcgtggacatcgaacgactgttcgagacagtgcgccgcgatcatggccaactcgacatcctagtccccaatgcaggcggtactgtcccgcaaaccttgggttcgataaccgaggaacgattcgatgaaacgctcgcaaccaatgtcaagggcgtgttgttcacggtgcagagtgcgctgccactgatgcaggcgggcggcgctatcgtcattatcggatccgccgcctcgattgacccacctgttggcatgggcgtttatggcgcggcgaaggctgcggttcgcaatctcgtgcgagcctggattcaggaaatcaagggctccggcatccgtatcaacgtggtcagccccgggccggtgcagacgcctggccttgatggctcgctccctgctggtcaggcggatgccgtcctggcctttctccttggcaaaagcactgttggtcgtattggtgtgccggaagatattgcgcgggcagtcgcgtttatcgccagcgatgctgccagctatatcaatggtgtcgagctgttcgtagacggcggcgcgtcgcagatatga

SEQ ID NO: 81679 - DNA, 1014 bp, Citrobacter koseri
atgagccggttacttatctatggtgccaccggctacaccggccggatggtggccgagcgggcgaaggcggtcgggctggatgtcatgatcgccgggcgcgatgccgaaaggcttggggcgctggcccaagatttgagtgtgccgcatcgagttttcgcgcttgatgacgacacagtcgtgcgtcaggccctgggtggcatcgccgtggcgttgaattgcgcagggccgttcgcacggactgcgcagccgctgatgcgcgcctgcattgcaagcggcgtccactatctcgacatcaccgcagagatcaatgtctatcggctggccgaacggttgggcgaggaagcggcccgggccggcgtcatgctgctgcccggtgtcggctgggatgtggtgccaaccgattgcctggcccggcgggttgccggacgtgtacaaagtccccggtcgcttcgcatcgcgttgcaagtcgccggttcgatgtcacgcggttcggcagtcagcgccggggagatcgtcgccgccggcctgttggcgcgtgtggatggcgaactgatcgttacgccggacgccgagccggtcgatttcgattttggcgaagggccggtggcttgcgcaccgctttccttcggcgatctggtcacggcctggcattcgacggggattcccgacattgccatgtacgtcagcgttaccggggatgcctttccgcaaggcgatctgtcgcgtcttcccgacggcccaagctccgaggaacgcgacaagcaccgcgcgcgggcggtggccgaggtcactggcgccgacggaagcgtcgtgcgcgccatcatcgaaacggtcaatggctattcctacacgccgctctcggcggcggaagccgcgcgccgcgtgcttgacggcgaatatcggcctggtttcgagacgcccgctcatctcttcggtgccggttttgccgaaaccatcaccggcacatgcatcacagacctgccaattgaagaaggaacacaacatgtcgtttga

SEQ ID NO: 81680 - DNA, 417 bp, Citrobacter koseri
atgctcgatcatatttttttgaccgtgagcaacctcgctcgatcggtcgccttctacgaggcagtgcttcccacgctcggcatcactgcgcggcacgactacgagggtaagaatggcccgccgggccacccggatctggaagggttcggcgccaatggccgcatgttcttctggctgcgcgagggcaatccgcaccccgaggccgtgcatgtcggcttcgtcgcgcactccgaggcggaagttcgccaagcctacgcggccgcgatcgcagcaggtgccacggacaacgtggcggcaggaggcgctcctggcgcccgcctgcactacgacccacgctactacgccgccaacgtactggatccggatggctacagtctggagatcgtgtacaaatcctggcagcacccgcagccatga

SEQ ID NO: 81681 - DNA, 744 bp, Citrobacter koseri
atgaaaatcatcgtcatcaccggcggcagccggggcatcggagccagtgccgccgtgcagtgcgccaggcgcggcatgggcgtcatcctgacctaccggagccatgcggcaggtgccgaatccatcgtccgcacgatagccgccgagggtggaaaggccgtggcgctgccgctcgatgtcggccagatccagtcctttgcgggctttcgcaatgacgttgccgcagcgctggcatccacttggggacgggagcgtttcgacgggctggtcaacaacgcgggctatggcctgttccgtccgatcgaggcagtgaccgaagccgagttcgacggattgttcaacgtgcatctgaaaggcccgttcttcctgacccaggcgctgctgccgctgctggccgaaggcgcgggcatcgtcaacctgaccagcgcgaccacgcgggtcgccacggccggcgtcgcgccctacgcgtctttcaagggcgggctggaggtgttgacccggtacatggccaaggagttcggcgagcggcgcatccgtgccaatgccgtctcgcccggcgcgatccgcaccgaactgggcggtggcctgaacgatgagttcgaggccctgctcgcgtcgcagaccgcgctcggccgtgtcggtgagcccgacgatgttggccgagtcatcgcccacctgctgtccgacgacagtggctggatcaacgcgcagtcgatcgaagtcggcggcggctacatcatctga

SEQ ID NO: 81682 - DNA, 879 bp, Citrobacter koseri
atggaagatcaactgaaagaactcagattccttgccgcaaaggcggaaaatcggcgcacggaaaccgggattccgcgcgtggccatgattcaaggcgcgatccccgagcacgaacttgcggctgtctatgacccaatggtcaacctgatcttacagggcagcaagtcgatgaccgttggcgaccgcacactgcactacgacccggccacctacttcgtcatgtccatcgacctgcctgccattggtaatgtgcggcccgcgccgaccggcgaaccgtatcttgcggtcgccctgacgctggatcccgcagtgatagcaaccttgcttgcggacttgcccgaacctgcccacagcgaaacaagcgcaagcggattctcggtagccgcagtgacaacggaattgatggatgcttggatacgcatgttgcgtttaatagggcgaccggcagacatcgcggcgctggcgccggtctacgagcgcgagattctttatcgggtgttgcaggggccacatggcgccatgctgcgcgccatcgccacgccagacacggcgatggcgcgggtgagccttgccatccagtggatacggcgcgacttcgcgcaaccgctacgggtcgatgcgctcgcagacagagcggccatgagcgtgtcggcttttcaccgccatttcaaggctgtcacggcactcagtccattgcagtatcagaaacgcatccgcctgctccaagcacgtacactgctcgtcgctgagggcaagagcgtcaacgcggctgcctttgatgtcggctatgagagcacgacccagttcagtcgagagtacacacggctatttggcttgtctccctcgcgggatgcggcccaactccgctccaaggcctag

SEQ ID NO: 81683 - DNA, 2007 bp, Citrobacter koseri
atgaccgaccgccgcgacgacgatttccgcgtgcgccccagtgccccgaagaaccggggcaagggccagggccagagcttcgtgtccaaggtactcaagcaggccggcaaggctagtggcggcaagtcctcgatgcgccattccgcagccggtggcaatggcgcacgcgtcggccagcgccccggttcgcgcctggggcgcggccacacggcggcgcgcttcgcgggcgcgaagctgacgcccatgtctcggcgcgtgacgatcaagaccctgctggtgaatcaacgcaacgccagcccgcagtcgctcgccaagcacctgcgctacatcgagcgcgacggtgccggccgcgatggcgaaccgggccgggcctacgggccgcaggagggcgttgctgacctcgatgccttcaaggaacgctgcgccgacgaccggcaccatttccgcttcatcgtttcaccggaggacggcgccgaactggacgacctgcgcacctacacccggcatctggtggatcgcatggaagccgacctgggcacgcggctggattgggtggcggtcgatcactggaacaccgacaacccgcatacccacctgatcgtgcgcgggcgcgacgacaccggcaaagacctcatcatcgcgggcgactacatcgcccacggcttccgccatcgcgccgccgagctggcgaccgaatggctggggccgcgcaccgaactggagatccagcagaccttggggcgcgaggtggatcaggagcggtggacgagcctggatcgcaccttgcaacgtgaggccgacgacgatggccgggtgcagatcgaacgcttcaacgaaccctggctgcaacgccagcgcctgctgctgatcggccgcctgcaacgcttgcagcgcctgggcctggccgacgaggtgcagcccggcacctgggctgtccatgccgatgctgagaagaccctgcgcgccctgggcgaacgcggcgacatcatccgcaccatgcagcgggccatgcatggcgagcggcgcgagctggcggtgttcgagccgggccagaatgacgatggaagcggccgcagcatcatcggccgcgtggccgccaaggggctggctgacgagctgcacgaccgcggctatctggtcatcgacggcacggatggcaaagcccactacgtcgccctgaacacccgcgacgaactggcgaactaccccacgggcgcagtggtggaggtgaagggttcggccgacgtgcgcgccgccgacaagaacatcgccgcgctggcgagcgatggcctgtaccgcgccgaccatcacctggccatcgaacagggccgggccacgcccggacgcgacccgcaggaggttgtcgcggcgcatattcgccgcttggaagccctgcgccgagccggcatcgtggagcgcgtggccgaagggctatggaaggtgccggacgacctggccgagcgtggccgccagtacgatgcgcagcgcctgggcggcgtagccgtggaattgaaatcgcacctgcccatcgagcggcaggcgcgggtgatcggcgcgacctggcttgaccagcaattgatcggtggcggcagggggctgggcgagctgggctttggtggcgaggccaagcaggccatgcagcagcgtgccgacttcctcgaagaacaggggctggcacagcggcgcgggcagcgcgtgatcctggcgcgcaacctgctgggcacgctgcgcaatcgggagctggcgcaggccgccaaggacattgcagccgaaaccggcctggatcatcgcccagtggccgacgggcagcgcgtggccggcatctaccggcactcggtcatgctcgccagcggtcgctacgcgatgcttgatgacggcatgggattcagcctggtgccgtggcgtccggtgatcgaacagcggctggggcagcagatcgccgcgacggtgcgcggcggcggggtgtcgtgggaggttgggaggcaacacggcatctctatcgtatag

SEQ ID NO: 81684 - DNA, 456 bp, Citrobacter koseri
atgatggccgccgactcgctgcacgttgcggtgcatcttgtcgtgccatcaggcgtgtcgttctgctgggcgtcgccgtgtcgtcgcgcgtgcagtgcgggtgcattcgcaccgcacttcgcgctgccttcggcgcagccgtcccacgtgcaggcgtcttgcctcgaacgctgccggcctgtggccgtggccgcgttcgccggcgggctggctgcgggtgcagcaacgccgccgggtcgccgaggcccggagcgacagcgtagggcaaaggcggaaggcaagacaaaaggacgcggcaccgggccgcgtcgaaagcctgtctgcacatggggggaacgcagcacggagcggcttcgccgccgtgccgcgttcggcgcgagggtcgcgccaatgcaggcatgtccgcgtgcttcgcacgacaggacacgccagagcttgcagggagcgcggccatga

SEQ ID NO: 81685 - DNA, 600 bp, Citrobacter koseri
atgaccgccccaatcagcacggccagcaccacaggcaccgcgccacgtcctcactcgcgcctgcgcgctcgcatcgtcgtggcgacactggccgccatcggcttcgctgcgctggcctgggcggctttcgtgtcgccgctgccgcgtctgatctacaacccgtccgacagcgtggccgtcggttggtatcgcatcgccccgttcgacccgcgcaccgcctcgctgccacatccgttgtccgtgaacagcatcgtgctggtgccgctgcccgacagggccgccatgctggctgcgcagcgcggctacctgccgacgcgcgtgccgctgctcaaacgtgtgggcgcggtcgcgccgcaacacgtctgcatcgtcgccgggcaggtacgcatcgacggcgtgcctgcggccgccgcgctgcctgccgaccggctgggccggccgctgccatccttgcagctttgccgccgcctcgaaccgggcgaactgttcctgttgagcgtgaccaatccggcgtcgttcgacagccgctatttcggcccggtcagcgcatccgccgtgatcggcgtcgcgcatccggtttggctggagacacgcccatga

SEQ ID NO: 81686 - DNA, 546 bp, Citrobacter koseri
atgaccgcatccgcttcgcctgccgctggcgcggccacggctgcgctgtcgctgcatcccgcagcactcgccggccaagccggtaacgtgccactgacccgcgtatcgctcgcctacatcgaaccgcaattcaaactctatctgcgcttcggcgaacccgtgcgcaccgttcggcttgaccgctggcggcgctgcgcggtgttcctgccgggcgcgatgctctgccgcatccgctggcaggcgaacgactacggcacgatccgctggcagctcatggtgatgcaggcttgcacaccactggacgccatgcagcgcattgccggcgtgcagccgggcgcgcgcctgctgctgcacgccgaaggcgatgccaacgtgcgcgccgtgctggaacgcatcgacgccatcgaggcgctgggcgtcgccgccatcgacgtttcgcccgcgtactggcgcactctgggcaaccgtctggcggcgcgtctggcgctgcccgaatacaccgccgagcgacacgccgcctggctggccgggaaggtgttgccatga

SEQ ID NO: 81687 - DNA, 288 bp, Citrobacter koseri
atgagcagcgacagcaccacccgcaacggttctcgtgccagcaagcgcgtcggcatcggtgcgcgtccaccggcgaatccgcacgccgaggcgtggattcgccagggcgatgccgatgcgctcaacaagggcgacctctacaccgcacgcctgaccctcgacatcacgcccgcgctgcgcgcgcgcatcaagatcgccgccttcggccagggcgtgaccgtcgcggaactgctgcgcggtttgctggaacgagagtttccagaacaccggatggagaacacaccatga

SEQ ID NO: 81688 - DNA, 639 bp, Citrobacter koseri
atgatcgttgccttgctcaaccagaaaggcggcgtcggcaagaccacgctcgccacccacatcgcgggcgagctggcgctgcgcggccagcacgtcatcctgctggatgccgacccgcagggttcctcactcgactggacgcagcgccggagccagcagggcttgccacggctgttcagcgccgtgggcctcgcccgcgagacgctgcaccaggaagcgccggagctggcccgccgcgccgatcacgtcgtcatcgacggcccgccacgcatcgccgccctggcgcgctccgcgctgttggcggccgagcgtgtgctgatcccggtgcagcccagcccctacgacctgtgggccagcgccgagatggtggcgctgatccgtgaggcgcaggtgttccggcctgcgctgcgtgcggccttcgtcatcaatcggcgcgtcagcaccaccatcatcggccgcgaagcccggcaatcgctggcggaacagccgctgccagcgctgcgcgccgaggttcggcaaaggatcgtctttgccgacagcgtggccgctggccggctcgcccgcgagacagcgcctgacagcgccgccgcacgcgagatcgctgcgctggtcgatgaactgctgcggtggccggcatga

SEQ ID NO: 81689 - DNA, 858 bp, Citrobacter koseri
atgtccagtcccgcgctgccgtcccggcagcggccggtgcaggagcgcgaacagctcgacctgttccgtgccttgccgggcgacatggcgccgcgcgacagccaggacttgatggcctatccgttcttctcgctggcgaagtccaagcgggtcaagcccatcgacttccgcgccggcaacgtgacgatccgtgtggagggcacggccgagcacggcatcgccacgatttgggatgcggacgtgctgatctgggcggcctcgcagatcgtggaggcgcaggacgcgggcctgcggccgtcgcggctgatgcgcgccacgccctacgagatcctgcgctttatcgggcgcggcaagtcgctgcgcgactaccagcgcctcaaggccgcgctggatcgcctgcaatcgaccacggtggccacgtccatccgcgagacgaccgggcggcggctgcaccgcttctcctggatcaacgaatggaaggagctggccgacgccagcggcacgccgctgggcatcgaattgatcctgccggactggttctatgcgggcgtactcgacgccgccctggtgctgaccatcgacccggcgtatttccggctgaccgggggcatcgagcggtggctgtaccgcctggtgcgcaagcacggcggcaagcaggcatacggctggcagttcgacttccactacctgcaccagaaatccggcagcaccgccaagccctacgacttcgcctgcgatctgcgcgcgctcgccgcgcggcagtcgctgcccggctacgtcctgggcatcgagcggatgccggacaacggcatggaattgctgacgttccggcccgtgccgcatacggcacggggataa

SEQ ID NO: 81690 - DNA, 285 bp, Citrobacter koseri
atgcgacccgctcccttgcggcctgccgccgctgccgtcgctgcgcccgcgcagccccaacgctacctcaccaacgacgaggccgccgagtatctgcgcctcagcccgcgcacgctggagaaacagcgcgtgatcggcggcggcccgaagttccgcaagttcggccggcgcgtcatgtatgcggtggccgacctcgacgcctgggccgatgcgcgcagtttcgatgccacgtccgacccggagtacgccgagcgccatgcgggtgattaccgtgatcgccgctga

SEQ ID NO: 81691 - DNA, 771 bp, Citrobacter koseri
atggccgagccgagcattgaacattggtatccgaccgccgcatatctctacgtcttgcacctcgatggcctggcgctggcctgggagtacctgcgccgcaaccccgactaccgacgcgactggctgcgccgtcgccgccggccggacgcggcacacgcttggggcctgcgcctgctggaagacccggccttggatgcgcgtgacgcgcatccagcctggttccccgatcacgatgcggtggtgcagctttatcccgatgccgacccaccgcccgaagcctacgccttcgagttctggcgcgtccccggccgcaagcacctgatccacgatggcaagcgcctggtgctggtgtcgcgctggcccggctgctgcatgcggctcgcgctggcgccgggcctggaagacggcatggcctacctctacgccacccgcgcctgcgccacgccctgcgcgcgctatcgcacgctcgcggcggaactggacgccttgaccgccgccatggtcgccgaacctgcggcgtcggcccgctcccggcccacgtctgccgcgctgctggagctgtacaccttgcaggcgctcgacgcgaccctggcgggcgcgtccttgcgtgaggtcgccgaagggctgttcggtacggatgcagtcgcggccgattggcacgcggacagcgccttgcgcgcccgcgtgcgccgactggtgcgtcgtggcgatgcgctgatgcgcggcggctatcgccgcctggcacagcttccgccagcttcgtcgcattag

SEQ ID NO: 81692 - DNA, 348 bp, Citrobacter koseri
atgaacccgctcatcaccgatgaagaacgcgcccggctgctggccaacggccaagcccgcgccgccggtcaggacaccgacccgttgccggtggtgcggctgttcaccccggacgcgcatgtcacctggctgctgtccgaactcgatcccatcgacggcgacaccagtttcgggctgatcgaccttggcatcgggttgcctgcgctagggacggtgaagctgtccgacctggccggcatcgtcgggccgaacaagcagccggtgatgcgcgatggctactttcaggcgacgcggccgctgtcggagtacgtccgactggcgcaggaaaacggctcgatcacggactga

SEQ ID NO: 81693 - DNA, 294 bp, Citrobacter koseri
gtggcggcagcgtactcgttggcgaaggcattgaagacagtcaggaaagcgcgtggcttgagccaggaagcgttctccgacgtgtcgagccgtacctatatgagcaccctggagcgcgacctgaaaagcccgaccatcagcaagctggacgaactgtgcgaggtgatggaagtccacccgctgacgttgctgacgctggcctatgccggcgacagcgagcggcgagccgatgcgttgctggcgcaagtgcgccaggagcttgaagccgtcttgaaggaacgcgacgcgccgtag

SEQ ID NO: 81694 - DNA, 315 bp, Citrobacter koseri
atggctaacatcggcaccttcaccgcagacaaagacggctacaccggcacgttccgcaccctgacgctcaacgtcaaggtcaagctggttcccaacgacaagggcgacaccgagaacgcccccgacttccacctcctggcggccggccacgaagtgggcgcagcgtggaagaagaccagcgaggccgggcgcgattacctgtccgtatccatcgacgatccttcgttcccggcgacggtgtatgcccgcctgatcgagaacgcggacggcacgcacgacctgatctggtcgcgcagcaagcccaaggcggcctga

SEQ ID NO: 81695 - DNA, 2055 bp, Citrobacter koseri
atgaacgccgttacccacaccgaagcccgcgccatcaacaccgccgccgctgtcccgctggaagccgccgacccgaccaagaacctgattctggttccgctgtcgcggctggtgtcgcgtcctgctgggcgcaacgtgcgcaagaccccgcgcatgtcgattcccgaactcgccgcgagcatccagcgggtcggcctgctgcaaaacctgatcgtgattgccgctgccgatggcgagcgttacgaagtcgtcgccggtggccgcaggctggccgcgttgaagctgctggcgaaaaagcaccgcatcagcaaggaatgggaggtgccttgcctgctggtggccgatggcaccgcccgcacggccagcctgaccgagaacgtgcagcgcgaagccatgcaccccgctgaccagttcgaggcattcgccgcgctggtggccgaaggccgacccatcgaagacatagcagcggatttttccgtcacgccgctggtggtgcagcgccgcttgaagctggcaaacgtgtcgccgcgcctgctggccgactaccgggccgaggccgtaagccttgaccagttgatggcccttgccatcaccgacgaccacgccgcgcaggaagccgcgttctacgatgcgccgacgtggcagcgccagccttccgcgttgcgcgaccgcctgacggaacgcgaaatcgacgcctaccggcatccgctggtgcggttcgttgggctggacacctacgaggccgcaggcggcggcatccgtcgcgacctgttcgcggaaggtgatgcaggcgtgtatctgaccgatgccgcgctgctggaacgactggcgcaagacaagctgaccggtatcgccgccggggtgaaagccgaaggctgggcatgggtggatgccacgcccggcgtgacccatgccgacctgcacgccttccaacgcgccccgagggagcgccgcgaaccgaacaagcgcgaagccgcccgcatcgagaagctacaagccaagctgcacgaactggccgaggccgtggataccgcgctggacgccgacgacgaggataaggccgatgccttgcaggaagaaggcgaagccgtaggcgagcagttgcaggcgctggaagatggcttgcaggactacggcgcgaacgtgaaggccgcagccggggccatcgtcaccatcgaccgcagcggcgaagccgtgattcatcgcgggttgatacgcgaagcggaagccaaggcgctgcgcacgctggaacgcttgcggcagggttttggcagcgcggaagatgacgcctcgaacgatgatgaaggcgagaacgagcagcccaagaccgccaccatgtccgaccggctggcgcagcggttgagcgcccaccgcaccgccgcgctgcaaatcgaagtcgcacggcatccgcagatggcgcttgccgcgctggtgcatggcatggtgcagaccgtcttgcagggcagtcactacggccacgacctgccgctgggcgtgagcgtgaaagtgcaagaccggctggaaggcatggccccggactggccggagtcgcccgctgccgtggccctgcgcgaactgcaacaggtggcaggcgaagccttgccgcaggacagcgcggaactgttcgccacgttgctgacaaagccgcaagacgagctggtgcggctgctggccttgtgtgtggcgtccacggtggacgtggtgacgcctcgcaccacgcagcaccagcccggcgcggaactggcgcaggccgtgggactggacatggccgcatggtggaagccgaccgccgaaggctacttcacgcatgtatccaaggccgcaattctggaagccgtggccgagttcgccccttcgcacgtcacccggctggcgaagttgaagaagggagacattgccagcgaagccgagcggctggccgatggcactggctggatgcccgccatcttccgcaccgaaggcccacagcaggacgtggcgagggatgcggacgcagaggcagcggaggaagccgccgccgtggccgatgagtcggccgaagcattggccgcgtga

SEQ ID NO: 81696 - DNA, 828 bp, Citrobacter koseri
atgcaacttgcttcccgtttcgcttcccgttccccggccctgcgcagcgataccccgctgtccgatgaccagattcaccgcgtggccccgtccatcttcgcggatgccccgcacgaaagccgttccgagcggtacgcctatatccctaccgccgccgtgctgaccgaactgcgcaaggaagggtttcagcccttcatggtggcgcaaacccgtgtgcgcaacgaagaccggcgcgacttcaccaagcacatgatccgcctgcgccatgccagccagatcaacgatgccgaagccaatgaagtcgtgttgctcaattcccatgacggaacgagcagctatcagatgctggccggaatgttccgcttcgtttgcagcaatggccttgtctgcggcgacaccgtgacggacgtgcgcgtgccccacaaaggcgacgtggccggttccgtcatcgaaggcgcttacgaagtcttgagtggcttcgagcgcgtgaaggaaaaccgcgaagccatgcgcgccgtcacgctggacgatggcgaatccgaagtgttcgcccgcgccgcgctggccctcaagtacgacgaccccgacaagcccgcgcccatcaccgaatcgcaaatcctgatgccgcgccggttcgatgaccgccgccccgacctgtggagcgtgttcaaccgcacgcaggagaacttgaccaagggcggattgcgtggccgcagcgccaacggacgccgccagcagacccgtcccgtgcagggcattgattccgatgtgcgcctgaaccgcgccctgtggctgttggcggatggcctgcgccagttgaaagcctga

SEQ ID NO: 81697 - DNA, 465 bp, Citrobacter koseri
atgagcaatgatcggattcggattccgcaagaccctgattactttcatgcaatcggcttggccgctgtagctttttcgcgattagaatgggatgccgtatggtgctgcgaaaggctggaaattggctacatcaataccattgagcctcgaaagaagacggccggcaagattgccgaagaccttgaacgacttatctctagaatcactgatgctgatctgcgatcaaaggttgctccgtttgcgacagagttctcggagatagtgcaggaacgaaatggtttgctgcacggcaaaccagggacagcacccaacggcgatcaacgactgtttcgacatggggccgaatggacgatcgacaaaattaacgagttttccgaccgctgtgtaagagctggatctcctttgaacgccttactctatgatgagtttaaggaaccgtgcagcattgcactccatccagcctga

SEQ ID NO: 81698 - DNA, 1164 bp, Citrobacter koseri
atgagcaagaagatgcctccggcggcggggaatccccccgccgccttgcctgccggctacgccggcatccacagcggcattgttgaagtcctcgatgccgcccgccacgcggcggcacgcagcgtcaatgcgctgatgacggcgagctattgggagattggccgccggatcgtagaggccgagcagcggggcaagcggcgcgccggctacggcgaacagttgatcgaacggctgtcggctgacctgaccgcgcagttcgggcgggggttcagccgcccgaacttgcagcagatgcggtcgttcttcctgacctggccaattcgccagacagtgtctagcgaatcttccgccgcgccgtcgccagggcgttccctgctggcgcaggagcgaccttcgcggctggacgaactggcccaggtgttcccgctgccgtggtcggcctatgtgcggctgctgatggtcaaggacgaccatgctcgccagttttatgaaaccgaagccctgcgcggcggctggagcgtgcgccagctcgatcggcagatcaatagccagttctacgagcgcacggcgctgtcgaagaacaaggcggcgatgctggtcaagggcgccgtgccgaaggccgaggatgccgtcacccccgacgatgccatcaaagacccgtatgtgctggagttcctcgacctcaaggacgagtattccgaatccgacctggaacaagccttgatccagcggctggaggatttcctgcttgaacttggcgatggttttgcctttatcgggaagcagcgccgcttgcgcatcgaccagacgtggtatcgcgtcgatctgcttttctaccatcgcaagttgcgctgcctggtcatcatcgacttgaagctcggcgcgctgacccatgcagatgtgggccagatgcacttgtattgcaactatgcgaaggaacactggacgttccccgaggaaaacccgcccgtgggcctgatcctctgcgccgacaaggggcatgcgctggcgcgatacgcgctggaaggtttgccgtccaaagtgatggcggcgaattacaagatggtgctgccggatgccgaagtgctgcaaaaggaactggagaatacgcggcggctgatcgaatcgcgcacaacgattgttcccaagaagcgcaagcgataa

SEQ ID NO: 81699 - DNA, 1200 bp, Citrobacter koseri
atggcaagaatcaagctcaccaagtccgccgtcgatgccgccaagccccaggcgcaggccgtcgaactgcgggacaccgtagtacccggcttcctgtgcaagatcaccccggccggccgcaaggtgttcatgctccagtaccgcacgaacgctggcgagcgccgcaagcccgccctgggcctgtacggcgaactgaccgtggaacaggcccgcgtcatggcgcaggagtggctggccgaggtgcgccggggcggcgaccccagtgcggccaaggccgccgcccgcaaggcgccgaccatgaaggagtattgcaccaccttcatggaggactactccaagcagcgcaacaagcccagcacccagcgcggctatcagggcgtcatcgaccgctgcatcatccccatcatgggcaagatgaaggtgcaggacgtgaagcgcccggacgtggccgcgctgatgaagaagctggcccacaagccggccgaggccaaccgcaccttcggtgtgctgcgcaagatgttcaacctggccgaagtgtgggggctgcgcccggacgggacgaatccgtgccgccacgtcccgatgttcccgcccggcaaggaaacccggctcatcgtggacgatgaactggtgcggatcttccgccagttggagacgctggaggcggaaggactggagaactacgtcatcccgctggcgatccgcctgcaattcgagttcgccgcccgccgctccgaaatctgcccgctcgaatgggagtggatcgacctggaaaagcgccgcgtcgtctggcccgacagcaagaccggcgggatttccaagcccatgagcgaggaagcctatcggctgctgtccaccgcgccgcgtcgggaaggctgcccctacgtcttgccgtcgcccaacgacccgacccggcacctgacctttggcgagcactacggcggctggaagcgcgtgctcaaggccgccggcgtgccgcacgtcggtacgcacggcatccgccaccgatcgaccaccgacattgccaattcgggcgtgcccaccaaggtcggcatggcgctgacggggcacaagaccgtggcgatgttcatgcactacgtccacaccgaggacaagccggtacgcgatgcggccgagctggtggccagccggcggctggcgatcaccggggcatcgcgtcccgtggaggcgacggcatga

SEQ ID NO: 81700 - DNA, 1164 bp, Citrobacter koseri
atgagcgacatgaatgattttgaaacattagtaaatgctatcttatcggcaaaaattgaagtcgatagtggctatatgttgctcgaatttgaagaccaatcaattgatattaatataatatctaagttaatcaaagattatggtttagacgtagaacctgaagttgaaagtaaagaaattattttcccgttgtcttctggggcatttcgagatgattcaaatatatatagtacgctagattcctttttgagaacatgtatttctttaggttatgttcctaatgattatattattctcactgagaagatttcttcactattaattgatgataaaattggtagtattgatatttacttaaaatggacttcagtattatccagtgttgctaatcatcaaattggagggaagtttatactttatataccaagtgataatggtggtaaggagttagttattaattcctacgaaagattggactatattataaaagctccctatagcaaggttgctgtagactcagttgataaaataataaaggtacttgatgtcgaggatgctcagtctcccgaaagaaaatctattattcgtactgctatatatgatttgattaataacattgagagtaaagatgtttcagcgctaatcacaataagcgagagggtttttaaccgttataacgatcttttggaattatatacaaatagattctccgttaacaaactattgtctgaattggagcaaaaaaaccttgagtatacaaccaaaataaatgattttgtttcatctagccagacaaaagcttttgcaattcctggggccttgattgcggtcggtggattagctaaagccagcggcttctgggattctttattgatttttataggtctctttctcgtatattacataacttctatgtccaatcaagttttatatgaatcctatataactttaaaaaatagtcttaatgactctttttcaaggtattctaaatttgatgaaggggtagaagttagggatgcagccaaaaaaatctcattagagctttaccataaaatagataatgcaaaagaacggttgaaaaaagttaatagcattgcaaaatggatgctttggataggcggggggtatttggtcttaaaaatgatatttattgatggtaaataa

SEQ ID NO: 81701 - DNA, 1188 bp, Citrobacter koseri
atggctgatagtaatgaaaatttaaataataattgtccctcatgcggtagcaagcttgattctgatgaagtatgtgcttgtggctatgacccaagcttggatgtgcaggaggaaagttatgtccctcagtttgcattgacagcaactctggataaagtgtcaggagactccggccctatttttaaagagtctctaggtgaagtttggacattagatacagaagacgttcagcttttcattaaacaaatcgagaaaaaatttaaacttaaaaggaaacttcatggtgtaatcgatgaaaataaaatgccattaagtgcacctaattctttcagtaaatatctaaatcaaaatatagattttaaatcctttgttcagtcaatgatggatagaatgagaggtgaagcgaataatgataaatcaaggctttctggtggggctataatatttattcactacaatgtagataatgataaagaaagtagtggtcgtctttttattatcatggtggatagaaagggagtctttaattttgataagaatcttattccagagaaattaccatctatagatatagactccttgcgacaagctgtccttgttgatttgactttattcaaagcaagctacccagaaaataacggcgacccttatctgcactttatatctggtcggtctagtagcgaattctttaagcgagcattgggttgtaacccaaaaattgataataatagaagtattgatgaaacaaatagagctgttgatgattttgttaaggtaatgaagttaaagcacatcgatagagttaaagtgaagaaagcagtcgaagctttgatgaaatcaaaagcaaaagatcccaatgatagaaagttaacgattgaagatatagggaattgcatagagaaaacccttcctgaaaataaagaattaaaagggaagtttgtacagttcgcggatgttaatgaatatgttattgatgattttttcgaaccaagtagattttctggaagtagctttggggaaataaagatttctgatgcggaacaggaatatgaatgtaaaatatctgttgatgcaattagcgaggatgatacatcaaatgcaaaagttatatatgatagagctaatggccaattaataatacgattgtcgcataatgcagtaactgaaatcgagaaaatagttggttaa

SEQ ID NO: 81702 - DNA, 426 bp, Citrobacter koseri
atggaattacaggactggcgaaaagaacctcgtaaaaactattcgaatgaattcaaacttcgtatggtggaactggcatcacaacctggagcttgtgttgcacagattgcacgtgaaaatggcgtcaatgataatgttattttcaaatggctcaggctctggcagaacgaagggcgtgtttcgcggcgtcttccggtaacgacctcttctgacactggcgttgaattattacctgtagaaataacgccgggtgagcagaaagaacctgtggcggccattgcgccgtctttatccacttccactcagaccagagtcagtgccagttcctgcaaggtggagttccgtcacggtaacatgatgctggaaaatccatcgccagagctgctcacggtgttgatccgcgaactgagcgggaggggaagatga

SEQ ID NO: 81703 - DNA, 183 bp, Citrobacter koseri
atgtataattgtggtgaatcatattcagaatacgacatatcattatctgacgatgaaaactatgacgatgactattatcgtgaacgcccgtgtccgggggaagttttcggctatgataatagtgaggataatgatgaggcggcatctgattatgcactaaaaataaatgaaagctctgattaa

SEQ ID NO: 81704 - DNA, 873 bp, Citrobacter koseri
atgaatccgtctgatgccattgaggcaattgaaaaaccgctctcctccctgccttactcgctttcccgtcacatcctggaacatctgcgcaaactcaccagtcacgaacccgtgattggcattatgggtaaaagcggggccggtaaatcctcactctgtaatgcactgtttcagggggaggtcaccccggtcagtgatgttcacgccggcacccgggaagtgcggcgcttccgtctgagtggccatggtcacagcatggttatcactgacctgcccggggtgggcgagagccgggacagggatgcagagtatgaagccctgtaccgtgacattctgcctgaactggacctggtactgtggctgattaaagccgatgaccgtgccctgtctgtggatgagtatttctggcgacacatactgcaccggggacatcagcaggtgctgtttgtggtgacgcaggccgacaaagcagagccctgccatgaatgggatatggcaggtattcagccttctcccgcacaggaacagaacattcgcgaaaaaacagatgcggtattccggctgttccggcccgtacatccggttgttgccgtatcggcccgcaccggctgggaactggatacgctggtcagtgcgctcatgacagcgcttcccgaccatgccgccagtcccctgatgacccgcctgcaggacgagctgtgcacggaatctgtccgggggcaggcccgtgaacagtttaccggtgcggtggaccggatatttgacacggtggagagcgtctgtgttgcctctgttgcacgcacagttctgcgtgccgtccgtgacacggtggtctctgttgcccgcgcggtatggaactggattttcttctga

SEQ ID NO: 81705 - DNA, 2850 bp, Citrobacter koseri
atgaaacgacatctgaacaccagctacaggctggtatggaatcacattacgggcaccctggtggtggcctccgaactggcccgctcacggggaaaacgcgccggtgtggcggttgcgctgtctcttgctgctgtcacatcagtcccggcactggctgctgacaaggttgtacaggcgggagaaaccgtgaacgacggaacactgacaaatcatgacaaccagattgtcttcggtacggccaacggaatgaccatcagtaccgggctggaactggggccggacagtgaagaaaacaccggtgggcaatggatacagaatggcgggatagccggaaacaccactgtcaccacaaatggtcgtcaggtcgtgctggaggggggaacagccagtgatacggttattcgtgacggcgggggacagagcctgaacggactggcggtgaacaccacactgaataacagaggcgagcagtgggtgcatgagggcggggttgccaccggtacaattatcaaccgcgacggttaccagagcgttaaaagtggcgggctggcaacaggaaccatcatcaacaccggcgcagaaggcggcccggattctgacaactcgtatacgggtcagaaggtccagggaacagcagaatccaccaccatcaacaaaaatggacggcagattatcttattttccgggctagcccgtgacactctcatttacgcaggtggtgaccagtcggtacacggaagggccctgaataccacactgaatggcggttaccagtatgtgcacagggacggacttgcgctgaacacggtaattaacgaggggggctggcaggttgttaaggcaggtggcgctgccggtaacaccaccataaatcagaacggtgaactgagggtacatgccggcggggaagccactgcagtcacccagaacacgggcggtgcactggttaccagtactgctgcaactgtcatcggcacaaaccgtctggggaatttcacggtggaaaacggtaaggctgacggtgttgttctggaatccggcggtcgtctggatgtactggagagccattcagcacagaataccctggtggatgacggcggtaccctggcagtgtctgccggcggtaaggcgacaagtgtcaccataacatccggtggtgccctgattgcagacagtggtgccactgttgaggggaccaatgccagcggtaagttcagtattgatggcacatccggtcaggccagcggcctgctgctggaaaatggcggcagctttacggttaatgccgggggacaggctggcaacaccactgtcggacatcgtggaacactgacgctggctgccgggggaagtctgagtggcagaacacagctcagtaaaggcgccagtatggtactgaatggtgatgtggtcagtaccggcgatattgttaacgcaggggagattcgctttgataatcagacgacaccgaatgccgcgctgagccgtgctgttgcaaaaagtaactccccggtaacgttccataaactgaccaccacgaacctcaccggccagggcggcaccatcaatatgcgtgttcgccttgatggcagcaatgcctctgaccagctggtgattaatggtggtcaggcaaccggcaaaacctggcttgcgttcacaaatgtcggaaacagtaacctcggggtggcaaccaccggacagggtatccgggttgtggatgcacagaatggtgccaccacagaagaaggtgcgtttgccctgagccgcccgcttcaggccggcgcctttaactacaccctgaaccgtgacagcgatgaagactggtacctgcgcagtgaaaatgcttatcgtgctgaagtccccctgtatacatccatgttgacacaggcaatggactatgaccggattctggcaggctcccgcagccatcagaccggtgtaaatggtgaaaacaacagcgtccgtctcagcattcagggcggtcatctcggtcacgataacaatggcggtattgcccgtggggccacgccggaaagcagcggcagctatggattcgtccgtctggagggtgacctgatgagaacagaggttgccggtatgtctgtgaccgcgggggtatatggtgctgctggccattcttccgttgatgttaaggatgatgacagctcccgtgccggcacggtccgggatgatgccggcagcctgggcggatacctgaatctgatacacaacgcctccggactgtgggctgacattgtggccctgggaacccgccacagcatgaaagcgtcatcggacaataacgacttccgcgcccggggctggggctggctgggctcactggaaaccggtctgcccttcagtatcactgacaatctgatgctggagccacaactgcagtacacctggcagggactctccctggatgacggccaggataacgccggttatgtgaagttcgggcatggcagtgcacaacatgtgcgtgccggtttccgtctgggcagccacaacgatatgacctttggtgaaggcacctcatcccgtgacaccctgcgcgacagtgcaaaacacagtgtgagtgaactgccggtgaactggtgggtacagccttctgttatccgcaccttcagctcccggggtgacatgagcatggggacagccgcagccggcagtaacatgacgttctcaccgtcccggaatggcacgttactggacctgcaggccggactggaagcccgtatccgggaaaatatcaccctgggcgttcaggccggttatgcccacagcgtcagcggcagcagcgctgaaggctataacggtcaggctacgctgaatatgactttctga

SEQ ID NO: 81706 - DNA, 2385 bp, Citrobacter koseri
atgcacgaaaagaacatcgccctgctttgtgatgaagccgaccggcttttgcaactgaatatcaatctgctccggcaaatggttgatgagccggatgtgttatctgacagtaagaacgaaaacgggctgctttttgataaacggaaagcgctgaaaagaattgaggagctggagggcgaacaaatcaaaaccgcccgcagggagatggtgctggctgtggtcggcacgatgaaggcgggcaaatcaaccaccatcaacgccattgtggggcaggaaattctgcccaaccgtaaccgccccatgacctcggtaccgacattgatccgccacgttcccggaaaaacggaaccggtcctccatctggaacatattcagcccgtccgcaatttattaatcacactgcaggaaaaactcgccaccccggcagggcagcaagtcgcacagtccctgcagcaaaccggggatacccgcgaactactggatattctggcggatgatgtctggcttaaaaatgaataccacggggaagacgaaatctttaccggactggcatcgttaaatgacctggttcgtcttgctgcggcaatggggtctgaatttccttttgacgaatacgcagaagtgcagaaactaccggtgatcgacgtggcgttcagccacctggtgggaatggatgcatgtcagggaacactcacactgctggatacccccggccctaatgaagccggacaaccacagatggaaatgatgatgcgggatcaactacagaaagcctctgcggtgctggcggtgatggattacacccagatgaactcgaaagccgatgaggaggttcgtaaagagcttaatgccattgctgacgtctcagccggtcgtctgtttgtgctggtcaataaattcgatgaaaaagatcgcaatggtgatggtgcggatgccgtacgccagaaggtgccagcaatgctgaacagcgatgtgctgcccgcctcccgcgtttatcccggctcatcacgtcaggcgtaccttgctaaccgtgcgcttcatgagttacgaaaaaacggtgcgcttccggttgatgaagcctgggtcgatgattttatcagggaagctttcggacctatggtggaagaggacgactggaaagacagcactaaggtaaataaaaaggcagaaaaactctggaatatatctctgatcgatcaactgataacggaagtcatacagagctcccattccagagcggcggcactggcggttgactctgccgccgcaaaactgatgcagaatgcagaaaatgtcagcgaatatctgtcattacgtcatcaggggctgcagcaaagcattcagtcactacaggcgcatattaccagcctgctggcggatatccaggagattgaggaatgtcagaatcaggtgaccggtgatgtcagaatggccatggaggacatcaataccaaaaccggggaattactgacgaaggtctgtgcctcactggaggaggagctgaacgactatttcagaagcggtaaacgcaaagaacagcaaatgctggaggaagaaaattcagcgcagccccgggagagaaacgcattcgctttctttcacgatattttcggaaccggaaatcagcatgacaggatgcgggactttgatccggacagccccgaaataaaattcagtgatcgcagggcagcccttgaactgatgacgcaaatcgaatcgaccgtgaccagcctgcaccgtgaggctgaagcacagttccggcctgagctggagaaaatcgtcagcgggattgaaacaggttttcgtggcacggccctgtacgccacagaaaacattgccggtcgcatcaatgcccgcctggaggatgagggctttaccgtaaaaatcagttttccggcagtcagccagttacagacccggctcgcggtaaaaataaatctgagtgcgcttatggaggaaagaacggagaccgtcacccgtcgccgtcggcagagtggcgtatggggaaccgtttgtcgatggtttggcaccagtgacctgggctgggaaaactatgacgaggatgtgagtcgcagcgtgatcaatatcaacaaggtcagagaggaagttatgtcactgacccgggcatatttcggggagctgcaggcatccattgagcaggatattaaccagcccgtccgccaggaaatcgatgcctttttctgcgcattcagggagaaagttgaacaactgcgtaacacgctgattcagagctctgaagatcataaacgcgatcagcaggcgcaggaacggcttaccgggcgacttcaggcattaaatgaaagggttcctgagctcattactgacagtaaggcgctgagggaagagctggagacaatgctgtga

SEQ ID NO: 81707 - DNA, 906 bp, Citrobacter koseri
gtgacttcaccatttattcaacaaattgctgataaccgggtatgtcaggtactcacctgtcttcctgaaaaatttgtggttgatttcgcaaacggaatcgatgttgcacaggagcatatccgcacggccggagagcgcacgttcttccggcgtttaaaagaggggctgaccagcgaaggcgctgcacggcagaatgccatcaatgcgtcgcttgcacagggcgttgaggcgtccctgcgctggctgacggagatgacaacgtcacttgccaccacaaactacgcgattacccgggtaaacgacagggtcagttcactggtcagtgatacagccaggctggcgcattattccgcagatacgcgggagcagttactcaccctggccgatcaggttcaccataaactgaatcatcttgaagaaaaactccaccgtgttgaccaggttcagcgggcgcagttacatcttgagcagatattctcatggtggagcgccgggcgatatgcgtcattttcccctgccggacgttgttatgtggcacttgaagagcttcgctggggcgcgtttggtgatgtgatacgtcagggcgaaacaggccaggttaaccagctactggatattctcagacataaagcattaacgcagatggcacaggagagtggcggtagtgcaaccgtgcgtctgaacactctggactggcttggtggtcagggccgggagcaggcagataacgagtggcatgacgcgattaactggctgggagactggtgcagtgaagagcagcatccggtgatctggtcaaccacgcaggctgcagaacacttaccggttcgcatgcctcgcctctgctctgcagaacgcctctctgaaagtatggtcgatgaaatatttcagaagggggctgcatga

SEQ ID NO: 81708 - DNA, 1071 bp, Citrobacter koseri
atgagtacagaaatgaaaacggggctggtgctgtccggtggcggggcggtgggcgcttatcaggcgggagtggttaaggcactggcagagtgtggtacacagatcagcatggtttcagggaccagcattggcgcattcaatggtgccattatcgcggcctctcccgatctgtcagaagctgccgtacgcctggaggcgctctgggagcatctggggaataatcaggtgctgtcggtaaacagattggtttacttttcattgctgaaaaaattgttccaggcaatgaacctctgccagatccccggacgagcaggagcactgcttacgacgcttcttcgccatatatcgacaatcaacgggtttgacaatctgatggctcagccgttgttgtcagatgagcccctgacagcgctgatggatcattatcttgatactgatgctctggcagacgggctaccgctgtatgtgtcgctgtaccccacagaagggggcatgcaggatattattgactgcattcgtgctgaactgggtgtcggaaccacgaaaaacgccgtttttcagcatatccagagcctgccccgcggacagcagaaagaggctctgcttgcgtcagccgcgctgcccctgctgttccgtccccgtgaggttcaggggacaatgttcggtgatggtggtatgggaggatggcgaaatatgcagggaaatacccctgtgacgcctctggtcgatgccggatgcaatatggtgattgtgacgcatctgagtgacggttctttatgggatcgccaggcttttccggacaccacaatccttgagatccgtccccggaaaaggctgaaatatgcaggtgatggtggcaacagcggcggtctgctcagttttacatcggcacataccgacgcctggcgtcagcagggctatgaagacacgatgctggcgatggagcatatccggaaaccgctggcagcacgtcaggcactgacccggtcagaggcggtattgcagaaaagcctggatataacggaagaggcagatttggcactgagaaacgcgatggcccggattaaataa

SEQ ID NO: 81709 - DNA, 819 bp, Citrobacter koseri; identical to SEQ ID NO: 29837

SEQ ID NO: 81710 - DNA, 486 bp, Citrobacter koseri; identical to SEQ ID NO: 29836

SEQ ID NO: 81711 - DNA, 477 bp, Citrobacter koseri
atgcagcagctttcctttctgcccggagagatgacgcccggcgagcgcagtctcattctgcgggccctgcaaaccctggaccgccatcttcatgaacccggcgtggccttcacctccacccgtgcggcacgggaatggctgattctgaacatggcgggactggagcgggaagagttccgggtgctgtatctgaacaaccagaatcagctgattgccggtgaaaccctcttcaccggcaccatcaaccgtacggaagttcatccccgggaagtgattaaacgcgccctgtaccacaatgccgctgccgtggtgctggcgcacaatcacccgtccggtgaagtcacacccagtaaggcagaccggcttatcaccgaacgtctggtacaggcactgggcctggtggatatccgggtgccggaccatctgatagtcggtggcaaccaggttttctcctttgccgaacatggtctgctttaa

SEQ ID NO: 81712 - DNA, 222 bp, Citrobacter koseri; identical to SEQ ID NO: 6179

SEQ ID NO: 81713 - DNA, 375 bp, Citrobacter koseri
gtgtcagacaaactctccgggataactcatcccgatgacaatcacgaccgcccctggtgggggcttccctgcacagtgaggccctgttttggcgctcgtctggtgcaagagggtaaccgcctgcattaccttgccgaccgcgccggtatcagaggccgcttcagcgacgcagatgcataccatctggaccaggcctttccgctgctgatgaaacaactggaactcatgctcaccagcggtgaactgaatccccgatatcagcataccgtcacgctgtatgcaaaagggctgacctgcgaagccgacaccctcggctcctgtggttacgtttatctggctgtttatccgacaccagcacccgcaaccacctcataa

SEQ ID NO: 81714 - DNA, 375 bp, Citrobacter koseri
atgaaaacattatccgacacacatgtacgggaggtatctcgctgcccgtctcccgtcaccatctggcagacactgctcatccgactgctggaccagcattatggcctcacactgaatgacacaccgtttgccgatgaacgtgtgattgagcagcatattgaggcaggcatttcactgtgtgatgcagttaattttctcgtggaaaaatacgcgctggtgcgtaccgaccagccgggattcagcacctgtccccgctctcagttaataaacagtattgatatcctccgggctcgccgggcgaccggcctgatgacccgcgacaattacagaacggtaaataacattaccctgggtaagtatccggaggcgaaatga

SEQ ID NO: 81715 - DNA, 492 bp, Citrobacter koseri
atgatgaaactggccctgacactggaagccgacagcgttaacgtacaggcactgaacatggggcgcattgtcgttgacgtcgatggtattgagctcgctgaactgattaacatggtctgcgataacggctactcccttcgtgttgttgatgaatctgaccagacctcagcagaatgcacgccaccatttgctacccttaccggcatacgctgcagtaccgcacatatcacggaaacggacaacgcctggttgtactcgctgtcacaccagaccagtgacttcggtgaatcagaatggattcattttacaggtagcggatatctgttacgtaccgatgcgtggtcatacccggttctgcggcttaaacgcctggggctgtcaaaaacgttccgtcgtctggtcgtcacactcatccggcgttatggcgtcagtctcattcatctggatgccagcgctgaatgcctgccgggtttacccactttcgactggtaa

SEQ ID NO: 81716 - DNA, 198 bp, Citrobacter koseri
atgaaatcattaaccacggaaacagcgctggatattctgattgcgtggctgcaggacaatatcgactgcggatcgggaattatctttgacaacgatgaggataaaacggattcagcagcactgttgccctgtatcgaacaggcccgggaggatgtccgtaccctgcgtcatctgcagcttctgcaccagaaccggtga

SEQ ID NO: 81717 - DNA, 843 bp, Citrobacter koseri
atgtcagatatcacaatctcccgtccggaagtggtcaacgggcatacggacgttatctgctcaaccagcattcgccacattctggctgtacgaaagagtacactgttgcaaatcgacacacttatccgacaactggctgaaatctcggtgctgacggaaagcatcggaggtaaaactgccccggactgggccatgaaacaggattttcgctgcggctgctggctgatggagaaacccgaaacagcaatgaaagccattacccggaatcttgatcgcgaaatctggcgtgacctgatgcaacgttccgggatgctgtcattaatggatacgcaggcccgtgatacatggtaccggtcactggagtacgataattttccggaaatcagcgaagcgaacattctgagcacatttgaacaactgcaccagaataaggatgaggtgtttgagcgaggggtgatcaacgtcttcagagggctgaactggaattacaaaaccaattgcccctgtaaatttggcagtaaaattatcgtcaacaatctggtgagatgggaccggtggggatttcatcttatcaccggacaacaggctgaccgactcgccgatctggaaagaatgttgcacctgttcagcggtaaaccaatccccgacaaccggggaaacatcacccttcgtctggatgatcacattcagtctgttcagggtaaagagagctatgaagatgagatgttcagcatcagatactttaagaagggctccgcgcatatcacgttcagaaaaccagaactggttgacagactgaatgatattatcgcaaaacactatcctgatatgctggcagtatag

SEQ ID NO: 81718 - DNA, 1098 bp, Citrobacter koseri
  misc_feature (1031)..(1040): n is a, c, g, or t
atgttttctgttgatgtctcccctgatatgaatatgtatacgttactcgttaaccaagcatatgattcttcgtttgctttatgtgaatttattgataacgcaatacatgctcatctgatttctaaaaaagcatcacctcttagtatagaattagaattttacaacaatgaaacccccgatcctaatatgcgtaataaaattataattcgcgatgatggtcctggcattagtagaaccttgcttgaaaaagctctaaaaccagcaagtaaaccggttgcaaaaggattaagcgaatttggtataggcatgaaagcagcagcagtttggttcgcagatgaatggaatataaaaacacatcctgataaagataaaaatcaatatatgtgtaatttcaatttaaatgaacttcttcaaaagcaacaatcccaaattactgtctttgataatgcgtacactggtcaatggactggaactgaaattgtactttctggtgtacgtcgagacatcagtttagaccgctatcagaccattaccgatgacattacacatatttatcaaagattcatatatggtaataatccacaagttgtgattacaacaagttacaacggctcccctaaaaaactattttttataccatttaatccccaaacacttctttctccgaagcatgtcaaaaagggggctaacgttatggcagaaggagcggatagaatttggcgtgtcccagttaattttcaatatataggcgaaaacatccacggatttattgaaattaaagaaactggtagttatatcaaaaatccgggtctagtgatgttcagacacaaccgagtgatctgtggtattcccaacaaaaaatatcttcctcttgggatattcaaaacatctaataagcatagggcattaagagtttacggtgaactgaaccttgataattcccccgtatcctatacaaaggatcgttttacttttgataatgatgagttctgtgaagcgcttatagaaggaactccagggttgagtgaacnnnnnnnnnncttcttagccaagctgatgcatttagggctaatatcaacacaaattcaactccaataa

SEQ ID NO: 81719 - DNA, 1350 bp, Citrobacter koseri
atggtctataacgaaaatgtagcacaccaagaagaaagaactctatttttcaataagttagaattatgttctcctcttccatatacttcatccgagttaaaaaaaggcttccgtttcattgacctttttgcaggactgggcggattccacactggcttgtcaaggcttggaggtaagtgtgtattcgctgctgaacttgatgtggatctacgtaacctctatttaaaaaattacgggattatgcctgaaggcgatattcgagccgttgacgagaatcatgtcccagaccatgaagttttatgcgctggctttccttgccaaccattttctaaagcaggtaaaaagaaaggtgccgagtgtcctgagtcaggtaagttaattgatgatgtgttacgcatcatcagaaaaaaacggccactttatgttatattggaaaacgtacctgatatattaaaagttcagggcggactattttgggagtacatcgaaaatagcctaatcaatgagggctatatagttcaatatcgtgtatacacgccacaggattttggtatccctcaaaagcgaaaacgtatttttgttgtagcatcaaaacacgataatatgtggttcaattggcctcagccaagtaaaataccattatcagtatcagcaatcattgaaaagaaaccgagtaaagtcagaaaattagaaacagcaaaagaggaagcactagagctttggtctgaatttattaaaaccactaaagaatactcaacattacctatacttgctcctgaattcggggctacttatcctttcaatatatctatatctgatccctcatttgcaaggcaatttaaaggaggattcggtaaagacatgtcatttgttgaaaacattaatgatattatcgaatgtctaccgagatatgcaaaagaaaatgtaggtaaagtcagttcacgtctagcagacgcgattcaagcctcgcgtgaaatttatatacgtcatcgtgattttttagatacatggaagttacacctacaagtatttcctcttagttggcaaaaacttgaatggcagggcgatagaaatggtctggacatatgggatcacctgattcagtttagagcttctggaatccgcataattaggccaacatctgcgccatcactggttgctatgtcaacgacacagacaccaataattggcagtcttaagcgatatatgagtatcagagaagccgcagcattacagtctctcgataaattagagtatttaccggaaacagacagtaaagcctacaaagcgttaggaaatgctgtgaatgcacatattattcacgaaattggtcaaaaactatttatgtaa

SEQ ID NO: 81720 - DNA, 588 bp, Citrobacter koseri
atgatcccgacattgaattatgacgtattaaccgacgtccttcatgctctgaaagaaggcaatattcgttactgcgagtccctcggattcactttcgacgaaatgaatgctcttaatgagttatcactcgatgaactgtttgctgtcagccgggcggcggctccctttgtttcggtcagtgtccgccatgatgttctgcatcatttactggcgcaggtccgacaggaataccgacaacagcagcagattaaccgggctatccggctgggcggttctattgcgttgctcaaccactactttggcctgacgtctaatgacgtctgccttcgccgacggttgctgggtgtcagcgtgccatatggacgtacacctgagccggatgaagagacggatgccaagatctggcggcaatggcagcaatgccgggtgggcaacctcgaatcgcctgatgcactgattgccatgatgcaggtaacggaagccctgaagcctaaggtcgaagggctatcactcaccatggtctggaaacgtatcgcactgtgcgaacaggacgctgccgctgacaggaggacgccacatgccggatga

SEQ ID NO: 81721 - DNA, 672 bp, Citrobacter koseri
atgcttgaaagcaatagttttacaagcggcagaaatttaattttaagcaccaatggaaaatatttccttccctctcaaagggttatcgatactgatttatctagttatgaatatgttctagtgcaacgattgctcgctttagcattgggtattccattacctgttaaatgtgcgaatgatgaaaattatggaataactcttatcttcggaggagaaacatttcaactctttgaaaagacgaattgggcatcaagaatacagcatcaacttgaacgattacctcaagcaaatgcacttgatattactgcaaaaataaaaaatagcaaaatacagatcaataatcgcactgggtatttccctttacatagtttacctgcagatgcctgctttgttatccggcattctgaactggaaaaactcatcgaaatatattgcggaaataaggaaaaatctttaacgtccacccgaatttcgacaccattatctcgtcttttctggctcgcctgcaaacataatcaggcgatcagcccactaatccggcaaccctacaaacttctgtccatttttgagcagtgggcttcggatgacggtatcactgatcgtctaagtggcgatacgttgaaaaatgcgctggagcggggttctccttcttccgcatccttgcctcactaa

SEQ ID NO: 81722 - DNA, 213 bp, Citrobacter koseri
atgtcaaaaaacgaaaaaaccgttactattcgagaaagctcaccggaatggtttactgtaagggaggctgtaatggtagccaaacgtaaagcaaacgttcatattacagagagtgatatttatcgacatgcattaaatagcagaatttacctatccatctactttcaatcattaattgtattacgtcgtgcaaaaaaaaagatcgaaaattaa

SEQ ID NO: 81723 - DNA, 717 bp, Citrobacter koseri
atggatataaaagtagttgcctttacaatcgcatcgttattaagtgccaatgctttagcagttagtatagattatagacatgaagtcaaggatacagctgaaaattcgcaaaaggatcgtttgcttatttcgcaccgattcagtaatggtttcggattgtcttccgaagtaaagtggaaaacgggtgattctgacgctgagagcgataaaatttatcatgaaaatgtcagcgatggctatgaagtggttccgagttatttataccgactgaacaaaacatttgctttagaaggtggtatcaacctggcggttgacagcagttatacaaattacagaccctacgtaaaaagctacgtatattttaccgatgatcttaactggtctttacgcctgcgtccgttttacaagcgttacagcggaaatattaatacagaaaaagacacgcaggaaaagggcattactgtaacctccgtggtcagttatcgcctgccgggaaactgggggatggaatatgaactggaataccataaaactaattctgaatattactcaccagttgcagacaataaagattatcagtggacccacgatattaaagtttcttacgcgatagacaaaaactggaaaccctatgtggccgtggctaacgtcccgggcagtaagtatacggacgagcgtcagacgcgttatcgcgtcggggtaacctacagtttctga

SEQ ID NO: 81724 - DNA, 1629 bp, Citrobacter koseri
atgaaagtatctgattactttacaccgctgtacttatccagcgtgattgccagcgcgttgttttttactccttccggattttcagctgagacttctgctcagactggcactgatacggttgtcatcctggagagctacgagcttggccgctacaatccggtgctgggccacggacgaagtggcgagtcacatatctaccagggactctaccgggtagaaacgggggtttttgaccgccagcctcagttgaatccaaaactggcatccggtccggcagttgccagtgaaaataataaggtttggacagttcccttacgcacagatgtgaaattttctgacggaacggcttttggtccggaagatgttgtcgcaacctacaaggcactgattgatccccgttcagcttccactgaaatttccacctgggataatatcgaaaacgttgaatcagaaaaggatgctgttaaatttactcttaaagagccgttggctaatttcgaccgtcgtctgattaatggtattgcgccatcagaagcttttgacttcgctcatctgggccgcgcagaaacctctccccttaataataaacccgtgggtaccggcccgtatgcgctcaccgagttacgaccggatcaggcaatcctgacagcacggcctgattactggggaccgaagcccaaagttaacaaaattattttccgttataccgccgatgataatgcacgtgcccagcagctcagagccggagaaggtgacggaaccgttctgcccgcagagctggcttctacatttaaatcccctgaatttaatgtcatttcggttaaatccggagactggcgtgcaatcagccttccggccggaaaccctgtcacaggggatgatgctatccgactggctgtaaactatgcggttaatcgtgaaaatatggttaagtatgtactgaaaggatacggtgtcgctaattctacattcctggcccccttttatggtgaagcatacgatccggcgcaggaatttacctacaaccctgaacgggctaaaaaaattctggatgaagctggctggaaacccggaccggatggtattcgggttaaaaacggtcagcgagccgagtttgaggtcatttattaccctaatcgcgatcgctcccgtcgggatcttacgcttgctgcagtgaacgacttaaaggaaatcggcattcaggtgaccccttcagcaagggactccaaatctgttacgcgtgaagtttacgcaaacacccctgtcatgttgggcggcggcgtggtgccgtattctgttgacggacagatttaccatatcctgcactcaaaatatgctgaacccggtgttggcgcaaactgggataatgcctctgattaccgtagtccggtaatagaccgtttactcgatgaagcccgtgcccagaccgacagccataagcaggcagaactctaccggaaacttcaggaggaataccacaaaaaacctgccgtactgcaactggtttatctgaaccatgtttacgtccagcgggaacagggcttcaagaatgttaaagaaatcctggagccgcattcccacggtgtaggttttggcccctggttcgcgattgaggaatggggaaagtaa

SEQ ID NO: 81725 - DNA, 1005 bp, Citrobacter koseri
atgaaagtatctgccgggcggtggcatcgccgccgccatgaaattctattgatggtcagcaggcgcgtggctttcctggtacctttgctactgctggtgacgctgggcatctttgccctcgccaccgtcagtccttacgatccccttgatgcgtatctggggggacttgccgggggaatgacacatgagcagcaggccagtctggctgcaacattgaatcttgatatgccctggtatttggcatggtgggaatgggtcaaaggcatattttccggcgatccgggaacctccagagcgtatcagcaaccggtgatgcaggtcatgcatcagcgtctgccctggacgcttctgctcggactcaccgggttgttcatcagtgtgcttctttcgtttacgctcggcgttcgtgcagggcttcacccgggaggctgggtggatcgggtcatttctgtgctggcgaccattttacagaccataccaccttttgtgctcgcgctcgcgacactgagtattttcgcgttgtacctcaactggcttccgacagggggactgacctggcccggtcaggaggccaccctggcatccaccgtgatacatctgatcctgccgggcgttgtactgggaatcacgcaacttccctggctgatcctgagcctgcgggagtcaatactggatgtgctggcttctgatgccatacgcggggcccgtgtccgtgggatcccttatcaccggataatcagtcatcatgtcataccgacagcgctgccaccgtttattgccctggtggggtcaaggctaccggaactggtggcgggctctgttctggtggaagccatctttgcctggccggggctgggaagtgcccttgtacggagtgcacagtcactggatttcccgttgctgacattcctgaccgttgccataacggtacttgtccttgccggcaatcttttatccgacgttctgtttgtaattcttgatccacgggttgatgctgatgcttaa

SEQ ID NO: 81726 - DNA, 852 bp, Citrobacter koseri
atgctgatgcttaaaaccttatcgctttctccgcgccacctgaacatttccctgtatgtgacatgggcggcatttttcttcatcatcggctatgccgtcattgttccctgggccagcgatatcgatccagtgatgacggatttcacaatgtcagggctgcctcctggcgagcaggctgtttttggaacggattctgacgggcacgatctgtttgtacgtattgcacagggattgcgtatttcactcgttatttcaacaataacggccgcattttcatgtgtcttcggcatgatacttggcacgcttgccggaatgagcggaggatgggttgaccgcgccattatgcgtacaaccgatggcgtaaatgcgcttcctcatctcctgattgggatactgatcgtctcgctttttaagggctctgttatcgccattattgcttcactggttctgacccactggacttatatcgcccgggtggtacgggcccagatcattggcataaggcatgcagaatttattgaagccgcgtggctctcgggtatgaaccggtggcagataatatggcaccacctgacgcctgcggctctggggcaggcactgatcgggttagtactgcttattcctcatactatctggcatgaatcgacactatctttcctcgggcttggacttcctcctcacatgccatcgctgggaacattattatccgatgcgcagggcgcgatgcttctggggcactggtggatgttacttttcccctgtatgtttctgataggcgcaacattatccgtatcgatcatcggcaatgatttgaaaaagcggatcaccggtaaacaggagtcattcagatga

SEQ ID NO: 81727 - DNA, 855 bp, Citrobacter koseri
atgatcctaatgattgataaattgactgtacgcataccgctaaggcaggggggaatggtgcattctgcaacgaatatttcgttgaaccttgaacggggaaaaattcatgcccttattggcgaatccggatgcggaaagtccaccattgcgcaggctatcacaggtctgttacctgcaaccgcacgggtaacaggaaaagtggtttattccggacagaatatacttggaaagcaaaatcatttctctggaagacacattgcgcttatccctcagtctgctgccacttttctgacgcctgtccggaccgtaggcgcacaactggcggaaaccatcgccatactaaaaggttccttgtcgccggaacagttaatggttcaggttgatcttgaccctgatgtactggaactttatccacatgaaatttcgggagggatggctcaacgtgcggcagtggcatttgccctggcgggtgaacctgatattgtcattgcagatgaacccacagcgtctctggatccggaacgtaaagcgggaatgtttcgtctgctacgtgagattgccgatcacgggactgccgttatgttgattacacatgacatcagtgcgcttgttgataccggcgtggcagacagggtgagcgtctgttatgcctcacgaattgttgaaagtggcgaggcaaaaatagtgttaaagggcggtgcacaaagccgatatacacaagacttactggctgccttgccccgaaatgggttacaccggatgcctggaacaccgccggaactgacaaaccttgccgatgattacacttatgaaacacggctcgctttatcggaggaggcgcaatgcagggtttag

SEQ ID NO: 81728 - DNA, 636 bp, Citrobacter koseri
atgcagggtttagtagccagtgatgttgttgttgagttcagacgccctggcgggcaacaaatgcgtatccttgatcgggttgaccttattatacctcccgggaaaatagtgggattaactggaccgtcaggacggggaaaaacaacgctcgggcgggtaatggctggccttgttatccccacggccggccgtgttatctgtaatggtattgaggtcaaaaatgtccggacccgttccggtgcagcgacccgtggcaaaatcggtatggtatttcagtctccccggcgttcatgcgatccccggctgacgttaaagaaaacgatcatgcagacagccaggcctgatgctgatattgaagccattctggcaagagtggtcctgacgccagacctgcttaaccgatatcctggtcaggtgtctgacggacagctccagagagcagcaatggcaagggcactggcaacgaagcctgactttatgattctggatgaaatgtcgtccatgctggatcctgcgacaacggcaacactgatggatgcggtaacacaatttgttaatcaaggcggtggcgtgctgatgataagtcatgatcatgaacttgttgatgcggtttccgatgagttcagacagctttga

SEQ ID NO: 81729 - DNA, 1350 bp, Citrobacter koseri
atgaatacagataatcgtattcccgttaccgttctgaccgggtttctgggatcaggcaaaaccacactactgaacaatattctcagccagcagcacggcctgcgggtggcggttattgagaacgaattcggtgaaatcggtatagatgatgcattggtcatcaatgcagatgaagaagtctttgagatgaataatggctgcatctgctgcacggtgcggggcgatttgattcgtatcctgagtcgtctgatgcgccgccgcgataagtttgatcgtattctgatcgaaaccaccgggatggccaatcccgggccggtttcgcagactttcttcgttgatgatgaagttagttctgcgcttcgtcttgacggtatcatcacagtggtggatgccaaacatgccggtttgcatctggaggacagcagtgaactttgcgaacaaatcgcatttgccgatgttctcctggtgaataaggccgatcttgtctcgcccgctgaactggacgaactggaggttcgcctgcgcagcatgaacgccctggcgcggatccaacgcaccgtgaatgcagaagttgatatccctacggtgctggatgtcggtgggtttgatttacagcgcgtcttacaggaacgtccacagtttctggaacctgaatatccgtttgagtgggcaggcatttggcatttaccggcgggcgtaaccgaactgcattacaccaccgggcctgatccgtccatcgatgttttgtttactgccgtacctgaaagcaacgaacacacctttatgcagcttatcgcgcaggctgataacgcattttcccgtgacagtttgcggggggaagtagatgttgaactggttccttcatctcgggtggtatcgctcctggcccctgaaaccggagcacagacgctgagaattgcgatccccgaagagggaaactatgcactggtaaccgagcatctgcccgaagagtttgagctggcgctgtactgcaataatgtggcgcaaaagcctgtcttatcccgcgccttcagcgcagcacacagccatgacgaggaagtgacgtccgtaggtattaccgtggaaggtgcgttatcggaatataaactgaacaactggttacgattgctattgtcatcgcggggacaggatatcttccgctccaagggcatcctgaacctggcaggaaaagaccagcgggtggtttttcagggggttcatatgctgatggatgtcaatgttgatcgtgactggaaagtcggagaaccaagacgcagtgagatcgtctttattggtcgcaatctggatcgtcaaatgttgatccggggagtacaggcatgtctggcgtga

SEQ ID NO: 81730 - DNA, 1038 bp, Citrobacter koseri
atgtctggcgtgacagatagtactgaatttcaacagcagctggttccattgtgggcgacgaatgctaatgactatatcaacctgttagcctggtcgccgtctgggggattactggcttgcgctagcgcagatggcgaggttgcgctttactcgggggatgacggtcgtgtgctatggcggcattcagcacatgaattaggcacgacggcgctggcctggtcgccggacgggcagaaactcgccagcgggggccaggatgattctattgtgatatgggagccggtaaccggcgaaccctccgcctgctggaaagcgggacggggctgggtggaaaaactggcctggtcatctggtggtatgcttgccagcattgccggtaagcaactcaaactgtgggatgaccgggggttacttaagcatgcttttgagcctgtggacagcacgctgacagggctggaatggatggctgacggcagtattgtgacgtcgtgttacggtcaggtcagccactggcaacccggcaaagcagagccaatacgaaattattcctggaaaggatcattactcagtctggccgccagtccgggtggtgcgtggataacagcaggcagccaggaaggtatcgtgctgctttgggggaaatctgtagaaaaatcgtgccagatgagtggttataactcaaaagttcgtcatctctgttggagccatgatgggcagttgtttgctactggtgctggggaggaaatactgatctgggattgcagtggcgaggggccggaaggcactgagcctgattacctgccggtacatctgggaacaattacggcgctgtcgttcagtcccgtccgtaagtggcttgccagcggtgcggaggacggcatcctgttcctttatgatgctggaacacggcaggaactggcgattctggctgatgacgaagcagttagcgcgctgtgctggcatccggagggggaatatctgaccgcaggttatgcggacggaacagtcaaattgctgcggctgaccggtcacgactga

SEQ ID NO: 81731 - DNA, 828 bp, Citrobacter koseri
gtgaagcgcaatatcgtaagtaatctgatagaaaaagatgattttgatacgctggaaagtattctcagcgttaatatccattctctgtcgcggccgggcggcgggacgttgctttcagacgtccattttgcggtcaaagcaggagaatgtctggccattatcgggcctaacggcagcggtaaaacttccctcgtgagagcgattagtcaggaactgacccatctaaacggtgacattcttctgcggggccgctctatgtctgctttatcccgtcaacaacgggccaggctggttgctgttttggcccagaatgatacacctgatacgagattatcccttgaggattatgtagcgctggggcgtatccctcatgccggggatgtaccgcgtaatgtacatgacgcgattgtagcaaatgccattaaagaaaccggattacaacggctacgcaggcggtcacttttatcgctttccggtggcgaaagacaacgggcagcgctggcacgggtactggcacagacgcccgacctggtattgcttgatgaacccaccaatcatcttgatcctcccgggcgcgaggaactactttcccttgtaaaaaccaagggaattaccgtcgtggcggtattgcacgatctgacactgacagaatcatttgctgaccgtgttctcctcttgtcgcaagggcaatcagtgatctgtgacacaccggagagggtactggtatcagaatacctttatcccgtctttggcttgaccagctttaccgtaccgcatccccatacaggaaaggcgttgcgtatttttgaagttccgcattgtgcataa

SEQ ID NO: 81732 - DNA, 303 bp, Citrobacter koseri
atgaagattggggttgttgacgccaattatgaaagcaaccgacaacccttgttgacggttatatttattatggagtcaggtaatagtctgatggcttttagatattttaaaattgatttaccgcctggctcgatttcaataattattcgtattggtgatttaacccttccctcgacaatcagggcaaatcactttaacttcaatatcttttttttgtacagcacaaccataatctattgcttttttctcaatgtaagtatgaatgaggtggtcagtatgttgaattattgttccgcaatttga

SEQ ID NO: 81733 - DNA, 168 bp, Citrobacter koseri
atgatccccaaaaattaccagcaatggtaccggtgcattacagaagaatgtggcattcccctgacgcaggcattcattacatcccgcctggctgttcttcaggaccccggacaccaggaaaccaggaaaccagacgctttgtctcgttatatggacaatctcatctga

SEQ ID NO: 81734 - DNA, 822 bp, Citrobacter koseri
atgagccgggcggcaggcatcacagtagcggacttaactgttgtatatcgcaatggtcatatggcattacagaatgcctcattcagcgtcccccaagggtcgattgcggccctgctgggggtaaatggttccgggaaatccacattattcagggcaatgatgggattcgtatccccttcatgcggaacgatttcacttctcgggatgcctcctgctcaggcgcttcgccgcaatattattgcctacgtacctcaatccgaggaaattgactggtcgttcccggtactggtggaagatgtcgtcatgatgggccggtatggccatatgggtatgctgcgtatagcgggtcaggaagatcacaggatcgttaatgatgcgcttgaacgggtagatatgcttccttaccgtcaccggcagattggtgaattatccggaggccagaaaaagcgggtgttcctcgcccgcgccattgcgcaacagggaaaagtaatccttcttgatgagcccttcacaggtgtggatgtcaatacagaaaagaaaatcatcacgctgcttggcgagctgaaagaagaaggctgtaccctgctggtttcaacgcataatcttacctccgtatccgaatattgtgattacgccgttctggtgaaaggtaccgtgctggcaagcggaccactcgcaataacattcacgccgggaaatatcaaaaagaccttcagtgcaatcctggacactgagccgaataaattgcccgtaccagggaaatcaacacaaccagactatctgcatcccactgaatatgaagagaaaggcaggtcatcatga

SEQ ID NO: 81735 - DNA, 852 bp, Citrobacter koseri
ttgattaagcaaagcggaagcgatatcccccggcgcgagaacggtcgtcacgtctggtcagtgatgaaggatgatacccaaagcaacgatatcgcattttatgaaacagccttcagagaacaatccaggcgatgggggctttacgagattgttttgggaagcgttgttgagggcacaatatcattgtatcagtccgtcaatcagggggccgacgttccgcacattctgattgcggcagggtttcatggagaagaacccgcgggatgctgggggatgctggattttctgcgcgagggctcccctgaattgtttgataacgtggccgtgagttttttaccgcttgtgaacctgtctggcctgagtgctggctgtcggctcaacagtactggacagaacccaaatcgcggctttaccaatggggcagaggtcgagccttcagttgaaggaaaagtactgcttaattatgaagcgcttctgaaaaacgcagccagacacggtgtgctttgttgtcacgaggatattcttcgccaccaggcgtatctctacacctttgaacatactgccagtccaggccattttagcgtggcattacgtgatgagcttgaacgttttttcccggtcatggaaaaagagcgggttgatggctgtgaatgtgaggatggcattatttttaaccatttcgattcgtcatttgaatcatggttgttttctacaggttccgacgtcgcagtgtgcactgaaacgccggggttgcaaccctttgcaaagcgaacagaggcaaaccgttatttaatcggcgcgtttatctcatccatactggagcgcaacagtatcgggggcgggatgtcatga

SEQ ID NO: 81736 - DNA, 147 bp, Citrobacter koseri
atgcatcaggtaccgattatcccgccattggatttggtgataactaatgttaaagaacatggtcgtccgcgcgacctaaacctgcagtttaatttcatagagtactcgcatgaaaaatctttcattaatgcctggcacagcgtttga

SEQ ID NO: 81737 - DNA, 441 bp, Citrobacter koseri
atgaaaaaagatagtcgcctctcaaccgtgctgcacattcttctgcacatgcatttccatgcgaagccgataacttccgagcaactgtcgcagtgcgccgcgaccaacccggtcgttatccgccgcctgatgggccttttacgcaaacagcaactggtcaagtcaattgctggtcatggcggcggatggtcgctcacaggaaaacttaacgatgtcaccctgcgccagctgcacgacgttttgggcgaaccggcgatattcgcgattggaaatcgtcatgagcgacctgaatgtttgatcgaacaggccgtcaatgccgcaatgaccgatgcctttgaagaggcggaagcgcttctgctggcccatttcggacacattaggctggcagatctgctggcagatgctgaaaaacgcaatacaagaggtaagtatgaaatatga

SEQ ID NO: 81738 - DNA, 882 bp, Citrobacter koseri
atgaaatatgatgtgatcatcattggtggcagctacgcgggtatggctgcagccctgcaacttgtacgggctcgccgtcaggttttaatcattgatgctggtcagcgacgcaaccgttttgccagttattcacacggctttctcggtcaggacggggtcgacccagccttgattttcgaaagctcgcgcgaacaactgctgcgttatccttctttgcgatggcatcagggagtggcggaaagggtggacggtgaaaaagatgcctttaaagtgcgcacgcactccggggaatgttttgaaacccgccggatactgtttgccgttggcgtaaaagatatcctgccaccgatagacggcttacagcagcgctgggggcagcatgttttccattgtccctactgtcacggctatgaactgaatcagggcgaactggcggtcattgcaacgggggaaatgtctgtacaccaggcacaggtggtcgcagagtggggccacgtgaccttgttcacgaatgccgtggctgagccagccgaggagatatgtgctgatttgcatcagcgcggcgtgaccattgagaccacaccgataagtcgtctggttaataatgcggacattgaacttgccgatggccgcattttgcctttcgccggaatatttattggttcgataaaccagcccgccagtgacgtcgcagagacctttggctgcgaactggaagaaacctcttttggaacacaaatccgtagtgatgccatgaaagaaacatcggttgccggtgcgtttgcgtgcggcgatgcggcgcgagtaccacattcggtctcgctggcggtgggggacggtgcctgggctggcgcagccatacaccgatcgttaattttttag

SEQ ID NO: 81739 - DNA, 804 bp, Citrobacter koseri
atggccaataatatgacccagctcgccaatacattattcgaccctgacaccacatcgtgcttggctgtcgcgcgtcatcttgatttcgttgattacgaagctgaagtgccggttcattcacaccgtaaagggcaactgattattgccttgtatggtgcggttatctgtcgtgcggaaaatgatatatggatagtgccaccagattgcgctgtctggatccctggagggatcccgcatagcgtcaaagccacatggaatgcacatctcaactatctatttattgaacccagcgcggcagctctcccggagaaatgttgtacactggggatttcacaattaattaaagaattagttaaccgcttaaccctcgagggtattgattatcctccggatagtcatgttgctaggctggccagagtcgctctcgatgaattaaccgctatgccgcggcagaaatttagcctgcctgtctcgtctcatcccaaaatacgcgccatggccgatgcgctgataagccaccctggggatcggagtacctttaaaacatgggcgaaacagctggctctcagtgaacgttcattagcacgtttgatgctgcgtgaaactgggctgacattcggtaaatggcgtcagcaactgcatctgattattgcccttagggaactggcaagcggtatatcggtgcaaaatgtggcggctgaactggggtatgagtccgttaatgcctttattactatgttcaggaaaacgatgggcagcacgcctgcgcattactttgctgaacagaaaataagcgcgcgataa

SEQ ID NO: 81740 - DNA, 2049 bp, Citrobacter koseri
atgagcaaaatcaacgtccatcactttcattttttgcgcgctataagcgatcggttacgccgtgtggcctctctcacgatgctgaacgatgccagtgccctgttctattctgccaaaagctttgctgctgcaatgctcgcttattacatcgctttatcgataggccttgaaaggccatcatgggcaatcattaccgtttatatcgtttcgcaaacctctgtgggcgcttcactgagcaggagtctctatcgtctggccggaaccattgttggagcgggcgcgaccgtgttgatcgtgcccacgttcgtgaatacgccaatcttttgcagcgtgatgctcaccggctggatcaccttctgcctttgtttgtccctgcttgaacgcacgcctcgcgcgtatgcctttttgttatctggttataccgcgagtctgattggctttcccgcggtttttgaccctggctcgattttcgacatcgctattatccgggtgcaagagatcatgataggtatattctgtgcggcgcttattcaccggtatgttttgcccgcgcgtatatccgggctcttcaaaagtaagttatctcagacgctgcgctcggcccggcagaggggggccgacacattagcaggcaaacccgatgaggcttcaggaggtttgcacctggctctggcgctacagttcctgcagggcataagccaccacatcccttatgactttactctctccgttccggtacggcaggccagaaaagctattcatgacaggctggcgcgattaataattgttaactgtgaattacgcgatcgtttacagatgatagacgtgatgccatctgacctgcagatattgctggacgatgttcagatctggcttgcctgcgaggacgaaggggtacggaaaaccagcgcagaagcgctaaaaaaacgtagtgagcagttaacggaacggttagctgaagatgcgctgacatttgatgatgcaatgcgggtgaaccttacgcgccatctgacggaggccatcatactcatgcaggaatgcgagcgcctttctgagaccatcacccacgcaaaaccttcaccaggacagacggaagtcaacgccgtgaaaggctatgttttccaccgagatccccttaccgctgttcgcacggcgctgggtgctttcgtgatcatactgagcggctgtctggtatggatttactcagcctggcctgatggcggtacggcggtgtctatccttggagtctgctgcacgctgtttgccagtttcgacaccccagccccgcatattgtgaaatacattattggctgtgtctggggcgttatgataagcctggtctacagctttgctgtacttccccaggttactgatttcgctgttttggttgcggtgcttgccccggcctatctgctggccgggtcgctccaggcccggccaccgaccacatttatggccatggggatcacactgacactgcctattctgtgcgagttaggtgctcactatagcggagacttctctgtggctgtaaataccgccattgcgttattatccgcaaccggcttttctgcgatcggtatgagtttgctgcaaaccgtccaggcagatgctgcgataaaccgtctgctgaaaatatgtcggcgcgacattcgccgcagtgtaaaaggcatgtttacacccgatgaaacgcactggacaaatctgatgatcgacaggacagccttgttgctaccgcgtttgcagcgtagcgcacaatcatcagacttggcgcttaaccgcatgctgtactacctgcgtattggcctctccgttatgcacttacgacgttgtgatacgcaggcgggcagcgaaacagccggagagatcaatgaggtgctatacctgctcacccacacgccagacctcgaagccttacgggaacgcatagcctccatgactgaactctgtttgccagtggcaagtgcacaatcgcgccagtttgtcgacaggttgatagatttgtactgcgcattgcgggagcacaataaggaacagactgatgattaa

SEQ ID NO: 81741 - DNA, 216 bp, Citrobacter koseri
atgattaaggacgttaatatcggggggggctttgtccccggcctgctgatcgtcgcgctcgttacactggtctgtaccctgttactcgtgccgcttttttctttcagcaggctataccgccacttgccttttcacccgctggttgatttctcaatctatatcattacctttttcctgctcctgcagggcctgaatgcgctgggattattcacatga

SEQ ID NO: 81742 - DNA, 864 bp, Citrobacter koseri
atgaaatcttttttctctctgttgagtcgctatacgctgacgttaatcacagtggcggtagcaaccctgcttgcctttatgatgtggaaacactatgagcaaactccctggacccgtgacggccgggttcgtgcggatgtagtacagattgcacctgatgtttctggcccggtgagcagcgtgtccgtcagggataatcagtgggtaaaccgcggagatattctctattcgatagatccgcgatggctgaagctggcggtggccagcgcgcaagcggacgttgaggctaagcatcacgaaatgctgatgcgtcaggatgcggccagacgacgctctcagctcaaaggggtgatttccagcgaggatttgcagcaaaccggtagtgcggcaagcgtcgcggcggcaaattatcatggtgcgctggccgccctcgaactggcacagctcaatttatcccatgccaccattcgggcaccgacagcgggctatgtcacgcatctccggcttcgccctggagactatgcaactgcgggggagacaacagtcgccatcgtcgatgctcatagtttctgggtggtgggctattttgaagagaccaaactgcgccatattcgtgtgggaaatactgcacatatcaccctgatgggatttgaccccatcattactggtcatgtggagagtatcgggcggggaattgatgacaacaatgatgagacgggcgggcttggcttgccggatgtcgaaccgacatttagctgggtgcgactagcgcagcgcatcccggttcgcattcatattgacaccttacctgagagcgttgaattagtggcaggattgaccgccagcgtgtctatcactccttag

SEQ ID NO: 81743 - DNA, 729 bp, Citrobacter koseri
atggttgcagctgatattatgaatatctcaccttttatggtgactgaagatacttcagtactggaggtggtaagtattttgctcgacttacaaataagtgctctcctggttcttaacatggagggggaaatgacgggaatcatcacagaaggaaatttgttacgtcgaagtgagttgggaacggaaattagacattcgcactggatggagttgctcttaacttccggaaaacttgcacgtgattatatacagaaccatgcactttatgcgggcgatgttatgacgccagtaccattgacagttgaaccgcaaacagcgttggtagatattattgatgctatggaaaaatacagggttaaatgtgttcctgtagtcagggaggggcgggtagctggtattattactcaggtggatattttgaaagcactgagtagcatactcaaatatacgccaacaataaaagtaaagatggataaaaataatgataaactgctcaaggaaagcattgttgaggaaatgtctcttcattcctgggtgcctaaaaacagtattcgcatagaagtaaaacagggaggggtagatatttacggtaccatcttcagtgaaagcttaaggaaagcattaattactctaattgagcaatttgttcagcgacagaatattcgggatcacctcatattttatgagccaatcaccaatctgattattaccgcggaagagaataaatga

SEQ ID NO: 81744 - DNA, 585 bp, Citrobacter koseri
atgacaaacagttatcaaaataatgatgatttattgagcaaaaaatcagatcaaactttgtcagaagagggaattgttcgttttggggaacgcctcaaggaggccattggtgaggagtctattttgtcgttcgccaaaaggtgcggattatccgacacattagttggaaaatatatcaaagggcagtcttacccagggattgataaaatgcctttactcgctaaagctacgggaaaatcaattgcgtggttttttgaagaagatagcaatcagtcctctatagaaggccaaaagcatgacagagaggaactacaggaatggtggaggatgatttcgaagtctctaaccgtgtccgaactagtcgcagtcgttgagatttttaagaagggtggcaaagatgcactattggctaacggcttaaatacctctcaatatacaaatctctcccaaagcactatcaacacagctttaatgcttgaatctctaaaccctgacgttcgcaaagagattttggctcagtatgggattgctgaacaaaacagccccgtagcgcctgacacggaaccacacaaaaaagcagtctaa

SEQ ID NO: 81745 - DNA, 246 bp, Citrobacter koseri
atgtcagtaaaaaaccaagactggcacgcggaacaggtgaaagccgccgttcgcatgaaaggtaagactcttgcacaactatctcgtgaggcagggttaaaacctgacacgatgcgtaacgtgtttcgctgccatatccctcgttatgaggcactcatcgcagcatatctggagatggaaccggcccatatttggcccagccggtatcgcttggaggtgaaagaatgcaatcagctcaatgggtga

SEQ ID NO: 81746 - DNA, 417 bp, Citrobacter koseri
atgaacaacaaactaacaggcctcggcgcgaatcatcctgcaaacggcccgcttacaaccgagcgccttattcacatccgcgacgtgttacagcgccatctcaaatactcaaatggcggaagtatggattacatcatcgctgatgctgtgaaagcgattgatgaattgttagcagggaggaaggcggagcctgttggctactatcgaaaaggcagtgatggattttattttgctagtcctacagagcaaagaccgggaaccattccactctatgccgccccgccagcgcctgtagtgccggatgaggtgacatatgagcaggccgaaaaactcagcggctgggagtcgtgctcagatgcatgggctgacggttggaacgcctgccgcgccgccatgctcaacggaggtaaatcatga

SEQ ID NO: 81747 - DNA, 258 bp, Citrobacter koseri
atggaattcaccaaagagcagttaatctcccgcattaatcagcagattgatattaactccacgataattgagcgactgtgcgacgattccgcagccgtttcagaactggcagttaaaacagcaacgctggatataaaaatacttgatatcgcgctggcatcgcttgaggctgagaaaaaacagtgctgccacggtgctctcgataatgaggatggtgtaattacctgtcggtcatgcggtaaggagtggaatatatga

SEQ ID NO: 81748 - DNA, 216 bp, Citrobacter koseri
atgaccaaatcacaaatgaaataccttgttcgagcctggaataaagagcttaaacagccagagtggaaattgggcgacaggagacggcgtaaggattgcgcccgtgaatttgccgctatcagcgttgcggcttgtaccgagtggagcatcacagtggattgtcaggatgctgctgatgatgcagtagcagaagaagtgagtgactggaacgcatga

SEQ ID NO: 81749 - DNA, 204 bp, Citrobacter koseri
atggctaaggcgttaaaaaaattcacggtagtccttaatactgaccgcggctacttcgatctccaggttaaagcaaaagattacatcgatgcgaaaaaagtcgctaaggacaatttcagtcatggcgaatgcgatgatgaagactggaatgcatcggcggcggttgtcattgtcggatggcctgaaatttggatgggagactaa

SEQ ID NO: 81750 - DNA, 681 bp, Citrobacter koseri
atgagcaaagaacgcggaatgatttttaatgatgaaatggtacgggcgctgctggatggccggaagacgcagacgcggagaattatgaaaaaccagccagcgggcgattacccagacacgccagcactggttagaaatgttggtcctggttttcagtggtacggaagttatggtgaaagcagcattttcaattgcccatttggtgccgttggcgatcgcatctgggtgcgagagacgttccaggggccgcttgtttctgaggagttattcgaagaatacctggcccattctgaaaagttcgaaacgccgcaatactgcgaatatgccgccgatggtggcaccaagcctgaatactgtgatcttgacgataacctccgtcacggttggcgcccatccatacacatgccgcgctgggcatcccgcattctgctggagattatcgacgtgcgggtggagcggcttaacgacattagtgaagaagatgcgcaggcagaaggggtgaagaaactgcgtggtggttactggaagcactaccaaccaaacgagtggacgcagttccagctcagtgcgcgcggatctttcgctactctctggaattttatttatggagaaggtggctggtgggctaatccgtgggtttgggtgattgagtttaaacgagttgaaggcggtgcagcatga

SEQ ID NO: 81751 - DNA, 291 bp, Citrobacter koseri
atgaagttattccagattttaagcgcaaagttcctgggttcaaaagccagctgtcatcgcagaatgggctctttgcaaggcatctatcaggcccggaatatctgctggagaaattttcagctcttgccaagtgccaaggtctggatcttcaacggtaggacattcatcggaaatgatagaaacctcattgttttgcagatcgtaagtaacagttatttctgctcgatgttggacggcaataatcttttccatgcttactcgcttctctcaatcagtatttcggagggatga

SEQ ID NO: 81752 - DNA, 477 bp, Citrobacter koseri
atgagaaaccttatcggcaaaattcgcattatcataacgagtgggatctgtttgattatgactttgccaactaaaacgtcagccctggatgtggctgcgcagtgcttcctgaattccctggttcgtgaaaccaaagactggcggctgacggaataccagccaaccgaattgatcatcccgctgggcgaacagcaggcgctccatttcagagtggcttatttttccccaacccagcatcaccgctttgaatttccggcgcgtctggtcacggcctccggcagtcaccccgtcgatttcgccaccctctcccggcttattgttgataagctccagcaccaactcttgctgcccgcgaccagttgcgaaaccttccaccagcgcgtgatggaaagccacgcccatacgcagtgtagcggttcacaaaaagcgcgaacgcgatccaaaaaagatgcgacaccctgttgtgtcgcattttaa

SEQ ID NO: 81753 - DNA, 228 bp, Citrobacter koseri
atgtcagcaaaaaaccaagactggcacgcggaacaggtaaaagcagctgttcgcatgaaaggtaaatcgctctctcagttgtcacgagaggcaggattaaagcctgacactatgcgcaacgtgtttcgctgccatatccctcgttatgaggcgattattgcagggtatctggagatggacccggcccatatctggccaagtcgttatatggagaaaacatcatgttga

SEQ ID NO: 81754 - DNA, 537 bp, Citrobacter koseri
atgattgatgaaaaagacaccgaaaatgcagagcgcatttttatatatgaaggcataatgcgatttaaagacaggcttgaggaggcgatgggaaatgactcaagtcgcgtatttgccgcaaaatgtggcctttccgatggggttataaggaattatctatctggtaaaacatacccatcactagacagacttgctcaaatagcaagtgcttccgggcgctctgttgaatggtttatacgcgatgaaacagttggtgagactgagcataaaaatgctcaagcctacaaatcaacttcatatgaccgcgacaggctgaaaacaaagttgattgcgattgttgagttgctagaggacagagaactggcctcagctattgagttgttcagaaaaagggggtttgaagctctcatgccagagatatttaataaccctgatgagctcagcgaaaagtgtgtggccgaacgtgattccgttggacatagctcgtcagcggcatcttcaggaaaagagccgctaggcaagaagcatattggttga

SEQ ID NO: 81755 - DNA, 1734 bp, Citrobacter koseri
atgaatcacaaggattgggattttgttaaccgccagttggtggcaaaaatgctggccgagctggagtatgagcaggttttccacgcggaatctcagggcgatggccgctactgcattaacctgccgggtgcgcaatggcgcttcagcgctgaacgcggcatctggggctggctgtggattgatgctcaaacgctgcgctgtgcggacgagcccgttctggcgcaaacgctactgatgcagctaaagccggtgctgtcgatgagcgatgccaccgttgctgagcatatgcaggatttgtatgccacgctgctgggcgacctgcaactgctgaaggcacggcgcgggctgagcgccagtgacctgattgatcttgatgccgaccgcctgcaatgcctgctaagcggccatcctaaattcgcttttaataaaggccgccggggctggggcaaagaggcgctggagcgatatgcgccagagtacgccaacaccttcagactgcactggctggcggtaaaacgtgagcatatggtctggcgctgcgacagcgagctggatattcagcagttgttggcggccgcgatggacccgcaggagtttgcccgcttcaatcaggtctggcaggaaaacgggctggataacgactggctgccactgccggtacatccgtggcagtggcagcaaaaaatcgccctcgacttcatcgccgatcttgccgaaggcaggatggtttctctcggcgagtttggcgacttgtggctcgcccagcagtcgctgcgcaccctgaccaacgccagtcgccagggcgggctggatatcaagctgccgctgaccatctacaacacctcctgctaccgggggattccgggcaaatacatcgccgccgggccgctggcctcacgctggctgcaacaggtttttgcgaccgacgccacgcttaagcaaagcggcgcggtgatcctcggtgaaccggcggcgggctatgtgtcccatgaaggctatgccgcgcttgcccaggccccctaccgctaccaggagatgctcggcgttatctggcgtgagaatccgtgtcgctggctgaagccggacgaaagtccgattctgatggcgacactgatggagtgcgatgaaaacaatcagccgctgataggcgcatatatcgaccgctccgggctggacgctgaaacctggctcacgcagttgttccgggtggtagtggttccgctgtatcacctgctctgccgctacggcgtcgcgcttatcgcccacggacaaaatataacgctcgccatgaaagagggcgtaccgcagcgcgtgctgttgaaagacttccagggcgatatgcggctggtgaaagatgcgttcccggagatggactccctgcctcaggaggtacgtgacgtcaccgctcgcctgagcgccgactacttaattcatgatttgcagaccggccacttcgtgacggttctgcgctttgtttcgccgctgatggctcgccttggcgtaccggagaggcgtttttatcaactgctggcagcagtgttgagtgattacatgcaggaacatccacaaatgtcagcgcgctttgcgcttttctcactcttcaagccacaaattattcgcgtagtgctgaacccggtaaaactgacctggcccgaccaggatggcggcagccgcatgttgccgaattaccttgaggatctgcaaaacccgctgtggctggcaaccagggactga

SEQ ID NO: 81756 - DNA, 1251 bp, Citrobacter koseri
atgtcccttaccgacgcgaaaatccgcactctcaagccttctgataaaccctttaaagtctccgattcccacggtctgtatctgctggtcaaaccgggtggctcacgtcactggtatctcaagtaccgtattaacggtaaagaatcccgcattgcgctgggtgcctatcctgccgtctccctctctgacgcgcgacagcagcgtgaaggtgtccgtaaaatgctggcgctgaatatcaacccggtacagcagcgggctgctgaacgtggctcacgaacaccggataaagtttttaaaaacgtggcgctggcgtggcataaaagtaaccggaaatggtcgcagaacaccgctgaccgtctgcttgccagcctgaacaatcacatttttccggttatcgggaacctgcctgtatcagaacttaaaccccgccatttcattgacctgctgaaagggatcgaggaaaaaggtctgctggaagtagcgtcccgcacgcggcagcacctgagtaacataatgcgccatgcggtccatcaggggttaatcgatacgaacccggcagcaaaccttggcggcgtgaccacacctcctgtcagacggcactatcctgccctgccactggagcggctgcctgaactgcttgaacgtattgaggcatatcatcagggccgcgaacttacccggcttgccgtcctgctgatgctgcatgtgttcattcgctccagtgaactgcgtttcgcccgctggtcagagattgatttcacaaaccgggtctggacgatacccgcgacgcgagaacccattattggcgtgcgttattccgggcacggggccaaaatgcgaatgccgcatatcgtccccctctcagaacatgtcatcgccattctgaaacagattaaagatatcaccggtaataatgaactggtcttccccggcgaccataacccgtataagccaatgtgtgaaaacacggtcaacaaggcattgcgggtgatgggctacgacacaaaaaaggatatctgtggccacggctttcgggcgatggcatgcagtgcgctgatggaatcgggtttatggtcaaaggacgcagtagaacgccagatgagtcatcaggagcgcaataccgtgcgcatggcttatattcacaaggcagaacatctggaagcccgcaaggcgatgatgcagtggtggtccgattatctggatatatgccgtgaagcctacgtcccaccatatttccttatcagaaaataa

SEQ ID NO: 81757 - DNA, 327 bp, Citrobacter koseri
atgacaaaaaacaatcatttttcccccgaggtacgtcagcgtgccatccgcctggtgtttgagagccagcatgaataccactcgcagtgggcagtgatctgttctgttgcaccaaagattggctgttcccaccagacgctacggtcatggatacgccagcaggagcgggatgccggtggcggtgatggtggactcaccaccaccgaacgtcagcggctgaaagaactggagcgagaagtccatgaactgcggcgcagcaacgatatcctgcgccaggcctctgcttattttgcgaaggcggagttcgaccgcctctggaaaaaataa

SEQ ID NO: 81758 - DNA, 690 bp, Citrobacter koseri
atgccactgctggacaccctgcgcggtgaactcggggtcggaccggtatgccatgagctgaatatcgccccgtcgacatactaccggcaccagaaacatcgtcagcatccggacaaacgcagtcagcctgagcagcgtgatgaccatctgaagcaggagatacaacgcgtgttcgcggaaaactaccgcgtctatggcgttcgcaaagtctggcgccaactgctgcgggaaggcttcagcgtggccaggtgcaccatcgcgcggctgatgaagacgatggggctcgctggtgttctccggggtaaaaaaatgcgcactacggtcagccgtaaggctgaagccgcccatgaccgggtaaaccgccagttcgtggcacaacggccagaccagctgtgggtggcagactttacctacgtcagcacctggcagggcttcgcctatgtggcgttcattatcgatgtgttcgccggcgtcatcgtgggctggcgggtgtcatcgtcgatggagacaacgttcgtgctggacgcgctggaacaggcgctgtgggcgcgtcgcccttccggtaccatccaccacagtgacaaggggtcgcagtatgtctcgctggcgtacacgcagcggcttaaagaggcagaactgctggcgtcaaccggcagcacaggcgactcatacgacaacgcgatggcgtag

SEQ ID NO: 81759 - DNA, 312 bp, Citrobacter koseri
gtggacatcggtaattgctcgggagaaacagacgacaaatttgcgcgtttcggcctgacgcccattgccgcgcaatcggtcagtgcgcctctggtagatgagtgcctggctaacctggagtgcagagtggtggatgacagccaagtgcggcgctataacctgtgggtgctggaagttcggcggatttggcttgacagcgcatggcaggaactgcgtctgctccaccatcatggcgatggccgtttcagtgtcgacggagagacgcttgacctcagtgacaggatggtaaaatggcgcgacctgatggattga

SEQ ID NO: 81760 - DNA, 330 bp, Citrobacter koseri
atgcacatttatattgtcagaatggaccatccggacggcaccgggtggaatacctttgtgcgcgagcatgtgatttatctgaaggggctgatagaacagggcaaactgttagcgtccggtccactcaaaaacacgccgctgcgggcgggatttcttattttcagggctgagacgcgcgatgaagtccagtccatgatcggtgcggacccttttgcacgtgaaggcattattgcccaccttgatatccagcaatgggacccgctgttcgggcaattcagcagttactcaagccataatgcaaccggggatttgaaggatttaattgattaa

SEQ ID NO: 81761 - DNA, 246 bp, Citrobacter koseri
atggtaaattctcgtctggcgattaacgactggggagcaatccttgaggcggcattaagaggcacaggtgtgctggttggttatgaaaagggacttgaacgatttattaaaaatggaaaactcgttcctgttctggaaggtttcaatattccatcgcgggaaatgcatttattgtacgacccttctcgggctaacgaaaaccggtataaagtttttattgacgaattgtatgaacatcttagctaa

SEQ ID NO: 81762 - DNA, 180 bp, Citrobacter koseri
atgacctttatcctcatattttctttatacgcttcagcatgggctgataatgattttgccagcgtccgctcacaggagttttcctcacgggagacttgcgaggtcgcaaaagccgaattcctgaaaaactttgagaccgctcgatcaaccaatacgcaagctatctgcgtgaagaaatga

SEQ ID NO: 81763 - DNA, 1233 bp, Citrobacter koseri
atggcttcaggcataaacaagctgactgacagaaaattacgggctttgcttggtattgcttctgaaaaagaggtgaagcttgccgatggcggcggtttaatggttaggataacgaaatccggagcaatcagttggttcttcaggtacaggattggtggcagggatagcgaaccccatcggttaaccctgggtaagtatccagatatgagccttaagcaggccagagatgttcgcgaccagtgccggacttggctggctgaggggcgagacccaaagctgcaactgaagctaactaaaagcgaaacgcttaagcctgtgactgtaagagaggccctggagtactgggtaagcggatatgcagaggacaaccgggcgaacgtcgaaaggcacaaagctgagctaagaaaacatatttatccgtacattggtgatatggctttggctgactgtgagacccggtactggcttcagtgctttgaccgcatgaagaagaagactcccgttgctgccggctatgtgttccagatgtgcaagcaggcgttaaagttctgccgggtgcggcgctatgctatcagcacggcgctggaggatttaaccattcccgatgttggtaaaaagcaggcaaaaagagatcgtgtgttaaatgacaaagaggccggtgatttgtggagggcgatcactgccggggatcgtttcatgccttactacacttggttgctgaaaatagtaatggcgtttggttgccgcactcaggaggcccgtttatcggaattaaaagagtgggacatggaagcatggatctggactgtgccgaaggagcacagtaaatcaggggaaaaagttgtaaggcccatcccggaagctatgcgaacggatattgagcgactgcacgagaatcatcggcgatctggattgctgctcggagagattaagacaactgaggcagttagccagtgggggcgtgcgttatataagaagctcggacatgaggagaaatggacattgcatgatctccgcagaacgctgtctacgcatatgaataatatgggtatagctccacacgttgttgagcaactgctggggcactcaatgccgggagttatggcgatttataaccgtagcctgtacttgccggagaagctggacgcgctgaataaatggcatgaccgcttagaacttcttgcgggtaatcatcaaaatgtggttctgttacctgtagcgaatagagattaa

SEQ ID NO: 81764 - DNA, 933 bp, Citrobacter koseri
atggcagaaaaagaaataaagattccttttcaatattgcaatattgaacgagcgtcaaggttgctgagttgcgagattagcgatctgattaatttaggtgttactaaaaaaatacctttatgcctcaatttatttgatgctcgcgctgttttatatatgagaactgatagcaagtctgcaagtgcctggttcgataccagaaaggcaaactccaccacatccatgatggggaacaatattactgagttttccaggcttcatcttttcaggtgtggttataacgaggagaccgatgaaactattcgtgtgcctttatttggtcaagactcagagaacgggtgcttcagttctattggtaaggcttatgggttgtggcgtctttggagcggtctggaagaactccaaaattttggggagtatgccctaagtggttttgaattaactccgtgccatccagaacctgataatcccgcagtgcagcttttaatggttggtgaagatagtgattatgatgaggaagatgatcaggttttcaaaaacaaaatctctataaatgatttatggattaccgcacaggatataaggcgacttcttgactgtggtggcgattatttcacgctatcaaatgattatgaagctgtagaaccacataagatgaacggcacagaaattgtgcaccatactgcggaaagacacgcaagaaaccgagagcaaattttaatggttgccatgcgctttaaagaagagcagcaaaatgcttttaatgagagttgcagaaaaacagatggaactattaactattctgcttgggcccgtgagttgatcgctagacctgactggttcaccagtggagaattgccaataaaaacagaaacgaaaatagcagcaatattaaataatgcgcataagagaccgagcgaaaggacacagtaa

SEQ ID NO: 81765 - DNA, 285 bp, Citrobacter koseri
atgcaaaacatcacctttaccccgcccaatcctgaacagcgtcgcacccttttagaagagtacggctttaagttcgaccgtcgaatccgtgaagaagaatgtagcgagatcaccagcctttcccgttccagccgttggaaaatggagcagcaaggccgctttcctccgcgctgccattttggacgcaatagctgcgcctggcttctttcggatgtgctctggtgggttcgtaatccaccagtagtagaaaacgttaataacccctatcgtcgcaagactgcttaa

SEQ ID NO: 81766 - DNA, 618 bp, Citrobacter koseri
atgaataaattaaatgccctctccgggcagggccttgctcactctgaaatcggtcagggcgttaattgccgcgaactgaagtttcatgaccaggtggtaattccgtttgacaatggggatgggaaaatatggttcactgcaaaacaggccgcggggcttttggggtatgcacaagttaaggccatcaccaacttgtacaacaggaataaagatgaatttaccgaagggatgtcacaggtcatcaatgtgatgaccaatggaataaacaataacttacgtagaaaaaaggtgcgggtcttctctccacgcggactccatttgctggggttccttgctgacacgcaggttgccaaagaggttagaaggtgggctcttgatctcattgagaaagagaattcggctcctcaactggatgttcaccacaccattgaacagatgcgaaatattgttgcagcagcctggaaggcttcagacgaagattcttccgatgctggccgccgtcttcgtaagcgccaggatgatctgcctgaactggttaaggcgcaaaagctggtggatgaaattggtcagattccattcgatctgattggtggcgggaaagtcgaggtatcagtatga

SEQ ID NO: 81767 - DNA, 681 bp, Citrobacter koseri
atgagcggctttactggcagcgcaccccatgtgcataaaggaaatgacgatattccggcgatacgcaggcaggttatttccggcaactggttgcccatcaattgcggcgaatatacgctcaccgatctgggattgcgtcataacggtaacgggctggtgtggctgcgttccggcgtgtccgtgcatgaggcagaccatgatgcagggataagcggcaaggacaagaccaaaggaagggttaatggtcttccttttgaatttgtcggccagtggcaggaatacccgactaaacgcagctttgccgtttcagtatctacggaactacgccgccagtattacccggacgatgccacttttggtaaggcgatgcgtgaggcgggttatatccccgtgcgcacccgtaaattgaccgggaagctggcaagttactggctgtatagagtaacgggtaacgataagggggtatgcacagcagaacccacgccctgcaaggcttccgcgccagttgtccagaccatatctaagcctcatccgtggtttaaacgtgtggcactcgatggaaaatggcagtacgtctacgccgaccacattcgctttttgacgaaaaagcgtcatcgcgtcgatggcgtgcgtgtgcaggggtataccgctggcgggctgaaagtgaaggttatcgcatga

SEQ ID NO: 81768 - DNA, 399 bp, Citrobacter koseri
atgtctgacattcttaaaaccgtaggatcgtgcgttcacctggatcggcagggaaagaattacgtcggattctgccctttccatagcgagaaaacgccatcattcactgtcgatcctgtcactcagacattccgctgcctgggatgtggtgctcatggcgatgccgctgagtttgaaaagcgggtgttgctgaaagggcttcgtactcttctgaacgtaaaccttcatgtcgctccgaattttaccggatgcgtggtggttcagcttaaagaaggccgtcatgtgtgtgactacccgctggtgaatggcgaacacatagccacactgccatcgtttctggaaatggctcgccgggctggctggtctgtcacacctgaacagggggtgtgcaatgcgtaa

SEQ ID NO: 81769 - DNA, 360 bp, Citrobacter koseri
atgaacatggggtgtgcaatggctgaaaattacgaggaatacaccgaaaggctgtgtcgtaagctggcgaaggcttatatccatcatatcgtgcaggatagcggcagacctgttgcttatgtcagcgccgacaatggtcagcgggtgctggtcatgcttgaggaagcgtcaaccgccgtttgtattcgtaaggggctggtcgttccggcagaacaggaagctggaaaggcatttgccatccacatgctgaatgtctgttttgacggtgaagaaatcagcaatgaagggctggaggtgatgcaaagcgtgtttgctgatggtgtggcatccattctggagcgggagaaaaacaatggctga

SEQ ID NO: 81770 - DNA, 831 bp, Citrobacter koseri
atggctgataaaactaagctggtcggtgggggttacgaaacttttgtaacccccggaacgcaggagccggacggcagccggagaaatctgatgattaaatctgaaactgtgacccgtacagaaagtgccggtcagggtctgattgataccgttgaactgctgagcatcatcaatgaggcccgcagggagtttggtgaaccgccaattactcacaataaattcattgcgaaggtagccagagagcttgaaggggagttttatccggaaattccaaaaccctctacggcacggggcgggcggccaacagtcgcatacggactgacaaatgaccaggccatgctggtgtcgatgcgcgaatcgaaagccgtacgtcgctcagctctggcaaaactgaaagcgcgtcatcaacctgcacctgtgcagcgtgaattatccacgatggagatccttcagattgcgatggcgtctgagcagggccgtctggcagaaaaagagcgggccgatcacgccgagagaacaaaagcgcaaatcagccgtaaacgcgaagcttccgccctcggaaaactcagcgccgtaacacgtcgctgccgggatctggaagagcagcttggcgaaagcgtaaaacacgcaaccatcaccagggttgagaaggcaaccagccgcaagggggaatttaaattcgcaccactacgccgctggtgccgcgacaacggtgttgaggccagagatgtgcctgatgagcgctacggcagtgtaaaggcgtggcccgctgaagcatggctggctgtttacgggattgatctgaaaaaactggccggaggtggtgtatga

SEQ ID NO: 81771 - DNA, 648 bp, Citrobacter koseri
atgcgtaataccagacacaatcactttcaggtcaactcaggccagacagataaatatattcgtatgagctgccaggaggcggaaaaaaacttcgtaaattatttctaccgtccacagagtgaaaatagcgaaataattccggcgacctgcattcagaaactcgacagtggagagtatgacaccgatttagtggcgggcctgcgtctggtggcggctctctggcacggtatgcacaccgggggttttattctgagcgatgaacagaatctggtgctctggcgctgggtggtggccgccgtatttgtctgcgagatgttcgataccaacggaagtgtcgaagtgaaaaatgagcagggagagactgaagaggtctctgtgtatacaggagagcatggcggcatcgtcatctatccctggtcggaacgttttgcgctggcaaatcacattgaggggctggcgtacgaaatgttcccggcggacaacgcgccgaaaatggcatcggcaatttaccggagcatgatcgacgtcagcccagtaacaggtattgatatgtcagagcagggcctgaaaggtatggcacttcttcacgacggctttattgaaacgctgcaaacggaaggtattccggcggcaccggtagttcactga

SEQ ID NO: 81772 - DNA, 546 bp, Citrobacter koseri
gtggaaataaccagttctccttatcagggggcctttctggcgttattacccaccggaaaggcatggaataaacagccatccggcacgctcgggcgtttatcgggggcgctcagtgattctgttgagcaggccgactctgccgcgacgcagttgcttaaggagcgttttccgtccaccgccgttatgttgcttggagactgggaaggttttctgggcctgccggactgtacatccgaaagcggaacgattcgcgaacgccagaaagctgccgcaaacaaaatgcggatggtgggaagccttaaccgacgtttttatgaatggcttgccgcgcaatatggctatcgcgttgagctgacggattctgatgaagggcagtacacaacgattgttaatgtgctggatggtatcagttatcgcaatgccacggtgcttgataacgttctgacgcccctgcgtgtttatgattccggtgcgcttgagtgtttattagaaaaatataaaccggcgcaccagatttataaattcgtctatatcgacgaggagtaa

SEQ ID NO: 81773 - DNA, 1083 bp, Citrobacter koseri
atgccatataacgcgccgggactgtctgacttaatagcccgcacagagcagaacattgaacagcgactgcccggaacatggccgcaggccagagagaagacgctgagtgcgctggcctatgctcaggccgggctggccgctggctgtcatgagcacattcagtgggtaagccgccagatcatccccggcagcgctgatgaggttgaactgcttgagcattgtcagttctggggcgttcgtcgcaaacaggcggcgcgggccagtgaggagatcaccgttaccgttacggatgcggtgaccattccggccagaacgcgctggcaacgggctgatggtgaggtgttcgtcagcatggaagatgccagttctggcggggccggtgatattgccgtgaaagtatcggcggtcaatgccggtaaaagcggtaacacccccgccgacacggctctttcccttattacgccgatggctaacgttctgcctgacgctgttgcgacaaagggcatcactggtggtgctgatattgaaagcgccggagagttgctggcgcggcttgaatatcgcgttcagtatccgccgttcgggggcaatcagtacgattatgtacgctgggcgcgggaagttccgggcgtaacccgcgcatggtgcctgccaacatggaaaggtggcggcacggttggggtaacgtttgtgcaggacaataacgacgatatattcccgactgaatctgatgtgacccgtgttgatgattatatttcaggccatccagatccagtaaccgggcttattgtcggaaaacctgacggaataatcgttacgacctttgcgctgacacgaaagccggtggatatggagatttatatttctcctaatacagaagcaatgcagaaagcggtaaggcagtcgctcacggctttattttataacgaagcgtcgccgggcggcgctatggctccgtcacatattatccgttccgttgccggtgtcaccgggctgaatgattttgacgtccgtaagccgcttgatattcagtattctgccgcaacggaattactggtgccgggggtaattacgtggaaataa

SEQ ID NO: 81774 - DNA, 450 bp, Citrobacter koseri
atgacggatttagccattgtatggaaagacggcagcggcgatatcgctcaggacgggatcgacatgctgaccgacgacagccttacgacagaggttgttatttcgctttttaccgatcgccgtgcgcaggattctgacgaacttcccggcaacgatggcgatcgtcgaggatggtggggagacagttaccgcagccgtcccattggatcacgtctgtggttactttcccgtgagaagacgctcccctccgtactggagcgtgccgctgattatgcgcttgaagcgctccagtggctgaaagatgccgggcgtgtcacccgcatcgcagtcggggccagccagcccgtgagcggtacgctacagctggatattgcgctgacactgcctgatggttctgttgagccgttcacttttaaaactgatttaaacggggttttaaatgccatataa

SEQ ID NO: 81775 - DNA, 585 bp, Citrobacter koseri
atggacgaatctgtatttggtcgcatgatggccccgtttatgcgccgtgtccgcctgatgctgggccgtgccgtggtcaatgtggttaacgatgcgctgaaggcacagaacgtgcagatcagtatgctggaagacgaggagccggacgacgtggagcgcctgctcaattacgggcaaatcagcgtcccgttgtcgggttctgaggccattgtcgcctgcatcggcgcacaacgtgatcatgccgttgcgctggttgttgaagaccgtcgctatcgtccgacagggctgactgccggtgataccggtgtgtatcactatgaaggccaccgtatgcgcctgacgaaagacggacggctgattattacgtgtaaaaccgtcgagatttatgcagacgagagcatgacggtggacacgcccaaaaccatatacaccggcgatgtggagatacaaaaaggactgaacgttaaaggtaaaagtaagtttgacagcaatattgaagcaccggacgccatcattaacggcaaatccaccgacaaacataatcataaaggcgacagtggcggcatgacggggccgatgctatga

SEQ ID NO: 81776 - DNA, 1131 bp, Citrobacter koseri
atgaataacgttgagctgaaagtggacgggaaaatattctcgggctggacgtccgttacggtcaatcgatccattgaaacaatggccggatattttgacctgggcgttaacgttcagacctcaacagacctttcctcactggctccgggaaagccgttcacgttgtccattgacgggcagaccgttattaccggttacaccgatggccgtcgccgccagatgggtgctgacagcatgaaaatcaccatcgcaggccgtgataaaacggctgaccttattgactgtgcggcgatttataaaggcggtcagtggaaaaaaaggacgctggagcagattgcgcgtgacctgtgccagccctacggcgtggccgttcgctgggaacttaccgacgcagaatcagcggccccgtttaccagcttcacgcttgatcattccgaaaccgtatacgaagcgctgggacgcgcggcccgcgctcgcggggtgctgattaccagtaatgccgctggcgatctggtctttacgcgggctgatgaatcccactcagacaggctcgtactcggtgagaacctgctgtcggttgattttgatgaagactatcgcgatcggttcagtgaatacaccgtcaaggggcatggccgctcaaacggcaaggtcggagacaccgttgatgcccgcaccatcgccagccagaaaggtacggccacggacagcgggatcacccgttaccgcccgatgatcatccttgcagacagcaaggttgacgcacaaagcgccacggcccgcgccctgcgtgagcagcgtcgccgcctggcaaaatccgtgacctttgaggcgcaactggacggctggacgcgttcaaacggtcaaatctggatgccaaacattctggccgaaatcgacgcgtcgaaatttgccattcagaccggcccgctgctggtgagcaaagttgtgctgacccttgacgatcgcgaaggtgttaaaaccacgcttacgctggccccgcgcgacggtttcctcgttcctgtcgaaaaagaccgtaaaggcaaaagttcaggcagcaacgccagtgccggtggtatcgatgcgctggccgaagaatattaccgcaatcacccggagaaacgcccgtga

SEQ ID NO: 81777 - DNA, 1437 bp, Citrobacter koseri
atgtttgaaagcactgtaaacagtattaacggcgtgcgtgattctctcggccttaaacgtgctgattcggggcaagggacatttcgcaacgtgccgttccttatcctgaaggaacaaaaacaaagcggtggccgtcgcattgttaagcgcgagtatcccctgcgggagacgggcggcgcgaacgatctcggtcgaaaacttcgtgagcgatccttttccgcctgtgtgctggggaaaaacgcagacaaggcgaaagacgcgctgattgaggcgcttgacgcccccggcgcgggtgagctggtacatcctgattttggttctgtcagcgtcatggttgatacgtgggagtgccgcaacaacgccgacgaatcagactattttgaatttacgatcaccgtttatcctgcggccaccgacaacgcaccggaatcacagcaaaataccgctgcggccgtgagcagccagaaagacagccttttcggctcgctgggcgacacgctcagtgatgcctggcagtacgtacaggaaggcaccgcaggggcgacggctgtactcgatgccatcaccggcgttgtggacgatatctatgacacggtggagaacgtcggcgttttgcaggatgttaacagcctgctttcatccctttcagcgctgaaagggtcggtttccgggctgcttaatcagcccgcaatgctcggggccaacgtgctgggggcgctgtccggcctgtcagatattctggatgcctcgacagcgttcagcgcatacggacgtcttaatgtacatctgaaatcgcgccagtcttccattgatgtaagccataaacccgccgctgcggtgggcaacgtgaccgcattgttccacgttgccggaaatgcgtcgctgattagccaggcggctgcggccagtggcgtactgacacagacgattgagagtggcaacagcgagagcacaaccccgcgttcgccggaaatctccgccagcgtatcccgcaccagttcggtttcatcgccggttacaggcagtcagttaaacaccataaccaccaccggcagcagcacctccgtaatatcaacggatgaagtgcagtccgaaagccacccgatttttgagagctacacggacattgagcgtgtggcgctcgaaatcggggagcagatggacgcagccgcattgctggccgccgattctggtttcataactgacagcaacggcattactcacatgcggttgctgaccgtttatgacttacgtaatcgcgggctgcgcctgccgggtgtgaccacaacaacgctgaaacgcagtgaaccggcgctggttgcgctctatcgggttacgggcaacagccgccagtggcagcgaatggcccgcaggaacggcgtgaagaatcctttatttgtccccggtggcgttgaggttgaggtgattgatgaataa

SEQ ID NO: 81778 - DNA, 438 bp, Citrobacter koseri
atgggcgcactgtcatggatggggaaagccggtggccgtctgttctcccggcttggcgggcctctgctttctgcggcggctgtcgcacctgttctgctcgatgataacgccacccttcaggacaaaagcagtgcagtcggcggcactgccggtgcatgggctggcggtgccattggctcacttgtcgggccgcttggcaccgtcgccggtgccacgctggggggcgtcgttggcgattacctcggcggcttcgtggctgacctgtacagcaagtggaatgaaccgaaagaccagacgccaccgcctgagcagaaagtcagtgcaaatgcctccctgcgcgttgaactggcggacgggctgcgtatcaccagtacgacagttaacgaggatggtatggggatggatgtatttaccggcaataactttttagcgtggtga

SEQ ID NO: 81779 - DNA, 438 bp, Citrobacter koseri
atgcaaaacgaaactgaaatgactccggaagctcaggaaatccacgacagcattatcggtgagctgcaaaacgacgcgtttaatctgattgatggtctgccgttcggcaccggcaatgacaaagagatgcagtatggcgtcacgtttcgtgagttgagtgccggtgatctgattgatgcgcaggttgcctcagaaaaagtggttatgaccaaagaaggccctgtgctggtcagttctccggcactgatggggctggaaatgctgcgtcgtcagattgcgaaagtgggctgcattaacgggccgctgccgctgcatcttatcaaatccctgtcccggcaggatttcgaacgcctgtccattgcgacggaattgcgcgatatggcaatggccgcctccctgagtaatgaccgggggcgagtggttgcggtgtcggaatga

SEQ ID NO: 81780 - DNA, 357 bp, Citrobacter koseri
atggcaggaaatcagcgtcagggcgtggcgttcatccgcgtcaatggccgtgagcttgagtctcttgagggggcgtcattcaccccgtcaggaaccacccgcgaggaggttaccggctcccgtgtgtatggctggaaaggcaaaccccgcgccgcaaaagtggaatgcaaaattccgggcggcggtgatatcgggctggatgaggtgattaactggacggatatcaccgtcgagtttgaggccgataccggagagacctggatgctggcgaacgcatggcaggccgatgaaccgaaaaacgatggtggagaaatctccattacctttatggctaaacagagcaaacgcattgcgtaa

SEQ ID NO: 81781 - DNA, 1500 bp, Citrobacter koseri
atgagcgacatttcctttaacgaaatcccgacgaacctgcgcgttccgctgacgtatatcgagtttgataacagcaatgcggtcagtggcaccccggctccgcgccagcgtgtactgatgttcggtcagagcaacacaaccggcgcgggtgaaccgaataacaagcccgtgcgcattttctctccgtcgcaggcggcggctgcgttcggtcagggttccatgctgcacctgatggcgaaggcatttattggtatcaaccgcgtggccgaactgtggtgcgttgcccagggggacggcaccggtgacgcttccgctgccacaattaatctgcgtggtacggcgacggaaaacggcgtgcttgtcacctatgtcgcgggcgttcgtctgcctgtggccgttctgaccggggataccggtgcggatatcgctgatgcgcttgcggcattaattaacggcaacagcgatctgccggtgacagcggaagttatccctgatgccggtggcgacgatggcgatgattcacatgctgatgtgaagctgacggcaaaatttacggggcgttcttctgttactgacgtgcgctggaactactacggtcaggaagtgatccccggtgggatcgtgacggaggtgacgtatccggcgggcaatacgtccaacccggatattgccccggccatcgccgcacttggcgaactccagtacaaattcatggtcatgccgtatctggatgaaccgaacctgaatcttctgcgtactgagcttcaggaacgctgggggccggtcaaccaggctgatggtttcgccgtaacgtcttatcacggctcgctgggcgatatcacaaactttgggatcagtcgtaatgaccacctgattagctgcatgggtgtcccgccaacgccgcaaccgcaatacatctggtgcgccagtatctgcgcggtggcagcacaggcgctgtcaattgatccggcccgcccgctccagacgctgaccgttcccggactgatgccgccagaaatgagtgagcgtttccagtggagcgagcgcaatgctctgctgtttgacggcatttcaacgttcaccgttgatgacggcgatcaggtgcagattgaacgccttatcacgatgtaccgcaccaacaagtacggcgacagcgacccgtcatacctgaacgtgaataccatcgcgacactgagttatctgcgttactcgctgcgcctgcgtatccagcagaaatacccgcgccacaagctggcagacgacgggacatttatctcacccggtcagcccattgtgacgccgaaaattattaaggccgagctgctggcgctgtttaccgaatgggaaacagccgggctggttgaagactttgatacgtataaagacgaactctacgttgtgcgtaacaaagacgataaagaccgtcttgacgtactgtgcggcccgaacctcatcaaccagttccgcatctttgcggcgcagatccgtttcatcctgtaa

SEQ ID NO: 81782 - DNA, 177 bp, Citrobacter koseri
atgagtgaatttaccgtaaaacccgcgccgggtaagtccgtgcgtgatccccgcaccatgcagctgcttggcgcaaagggcgaaagaaaaccccggaacgcatactggctgcgacgtgttgctgccggtgatgtggtggtggttgaaaccaaaaagaaaggtggtaaggcgaaatga

SEQ ID NO: 81783 - DNA, 537 bp, Citrobacter koseri
atgatcggggaaaccgaaaccgcactactggagcgcgtccgggcgcttttcggggcaaccctgcggcaggtcgatactcatcccggcacctggtctgatatcgatattcgccggattctgaccagcccaccggctgtttatctggcatggctcggcttcggtgaagggagaacgcgccacgaagtggaaagccgctgggtgttttatgttgtcgccgaaatgctgaatggccgtgaatctgaccgcctcggaatctatcagattgttgaacggctggttgccggaattaacgggcagaaattcggtgacaccaccggcatgagggccaccaaagggcagaacctctataccgacgcacagggtaatgccggtgttgctttgtacggcctgtatttcagcggcataacgccacttccgaaacagcccgatgaaagcagtctggatgattacgaacgccactggcagacctggaagtacccggacggaacgcctgagtttgccgcacacatccacgttaacgagaaagccaatgagtga

SEQ ID NO: 81784 - DNA, 426 bp, Citrobacter koseri
atgatttacgccacagtcagcgacatgtgtctgcgctatcagcgccgcaatcttgatttgctcacgaaaggtaaaaccgataacggccagcctgatgatgccctgattgaaattgcgctggctgacgccggggcgatgattgatagctacatttcggcccgctacacattaccgctttctgtggtgcccggagcgctggcgcagcagtgctgcgttattgcctggtatctgatgaatgacgtccgggctacggaacaggccacgcagcgctataaggacgcagttcgctggctggaaagtgtccgtgatggcaaaaccccgctgggggtggatgccgatacggcaacggctcccgaaagtgaaaatctggcgcaggtgcagtctgatccacctgttttttcccgtaaacagcaagggtttatctga

SEQ ID NO: 81785 - DNA, 531 bp, Citrobacter koseri
atgtatgaagaaattaaaagtggcgctggctgtgctggtgacgggactggggaaaatcgggcggtattttacaacgttgaagttaagtgtcctcgcccgatttaccgccgcgccggtttcgcgttcgttcgcggcaaaaacaccctggaaaatgtttcgcctgaacaactggcgattctccgcactgacagcgtgcttcatctcgcgctggtatctgaagcgccagtgtcgccggatgctttaccgggggggatggacgttctggatgtgggcggcctgaactctgtgcatctgaacaccgtgcaggatgaactgcgcgccgttatcacgcctgctgtgacagtagacgtgccggaagcaccttctctttccgtgcgtatccgtcgggctgtcgccagtctggataaggcaaatgccgaccacttcacacagaacggatcgccccgtgtggcggctgtatccggtgtgctgggggaaaatatctcggcggcacagcttaaagccgcgctggaagaggatgccgcagaatga

SEQ ID NO: 81786 - DNA, 921 bp, Citrobacter koseri
atgatcatcaccccggcaagtattactgccctgatgacctccttccgtaaggattttcagggtggtctcacagccgcgccgtcgcagtaccagcagattgcaatgacggtgccttcctcatccaaatcgaacacctacggctggctgggtcagttcccgtcgctgcgtgaatgggttggcaagcgtgtgattaagcagatgcaggcgcacggttacgtcattaacaacaaaacctatgaaggcactgtcggtattccgcgcgatgactttgaagacgacaacctgggggtatacggcccgattttcgcggaaatgggccgcgccgcaggtgtgcagccggatgagttgattttcaacctgctgaaagagggattcagccagccctgctacgacggccagaatttctttgacaccgagcaccctgtttacccggaggtggacggcaccggtgcggcggtcagcgtaagcaacgtctttatgcagtccgaagactggacgggttccccctggtatctgctggattgttcccgtgccgtgaaaccactcatcttccaggatcgtcgcaaagctgaactggtcactaaaaccaaaatcgatgacgagcacgtctttatggataacgaggtgttattcggtgtcagcgcccgtcgcgccgtgggctttgcattctggcaaatggctgttgccatgcaggcagatctgaacctcgacaatctctggacaggctggcagatgatgcgcggtttcaacgctgatggcggtaaaaagctggggctgaaaccaacgcatctggtggttccgactcaactggaaaaagccgccacgcagttgcttgagcgtgaactgatcaccacgcagaacggcaccgccagcaacgaaatgaaaggcaagctgaagctggttgtcgctgactacctgtaa

SEQ ID NO: 81787 - DNA, 1101 bp, Citrobacter koseri
atgaaacgaaacataatcgcaatcggcatcgctgtcctcagttcactctccatcactgatggctggtgtcagcttttgcccgctggtcatttcagcgcccgcgatggtcgcccgttcgatgtgaaaaccggcaaaggctggttcattgatggcgcaattgccacccgtctgattgatgacgttcgtgcgctcggtcaggacgtgctcattgattatgagcataaccagctgcgcaaagacaaaggtctgacgccggatcaactggcggctgcgggctggtttagcgctgacgaaatgcagtggcgcgaaggtgaaggtctgttcattaagccgcgctggacggctgcggcacaacagcgcatcgatgccggagaattcggttatctgtctgccgttttcccttatgaccgcgcaacaggttacgtgctgcaaatccgtttcgcggcgctcactaatgaccccggcgcaaccggtatgcaaaaactggcggcgcttgcggccacgcttcccgactctgataacccccaacaggagaagactcccatgaatgaaaagctgcgtcagttgctggcgcgtctgggcattaccgtgcctgaaaatgccgacgtgactgatgaacaggccacagcagctctgtcggcgctggatacgctcaaaacggatgcaggcaaagtggcaaccctttctgcggaactgagcgccgccaaatccgctggcgacagcgttgacctgaccagatacgtaccggttgaaacctataacgccgtgcgtcaggagctggcagaggctaaggcggaaggtgcaacggtcagcctgagcgccgttctggataaggccgagcaggaaggccgcatttttaaaagcgagcgcggctatcacgagcaactcggtaagcaaattggcgtggccgcactggcggcgcaactggagcaaaaacagccgattgcggcactgacggcaatgcagaccttaacggtgcaagtcccggacacccggaaagaaggtctggccgcattgtcagccgatgagaaagcggcagctaaagcgctcggcatgaccgatgcggaatatcagaaactcaaagaggatgaaaacgcatga

SEQ ID NO: 81788 - DNA, 471 bp, Citrobacter koseri
atgagcattgatttagccgtggttatggatattcgccgcattcagaccgcgtttaaagaactgggcgaaatggtgaacgacagcgacattccgcgcgttgctgcgggggcgttgttatcctccacagagcaggcgtttgaaaaacaggctgacccggtaacgggccagcactgggcgcaatggagtgacccttatctggcgtggcgagaggatcatggttatattccggggcaaatactgacgttgcacggtgatctggcccggagcatcacaacggattacggcccggattatgccctgattggttcccccaaaatttacgcagcgattcatcaatggggcggcacaccgggtatggcccccggcccggcagcgattaaaccccgcccgtacatggggctggataagccaggacgccaggatatttatgctgccattgaaaaacgcgccaaaagcgctgtaaccccctga

SEQ ID NO: 81789 - DNA, 1332 bp, Citrobacter koseri
atgccacagaccgttgatctggcgtatgctgcccgtctgccacccaaagaggccgtggcatacttccgggctaaaggacacaacatcacctggaactggtatgaacaactgaccgacgcccacgcccgcgcgtttaccgtcgcaaaagcggcccgcctggatgtgctgaacacgattcgggaggaagtggacaaggccattcatgacggcattacccgtgaggaattcacccgcacgctgacaccacgcctgcaaaagctgggatggtggggaaagcagattgtggttgatggcgacggcaacgcgaaagaaattcagttaggcagcccgcgccgccttgccaccatttacaacgtaaacacccgcactgcgtataacgcgggccgttacgcgcagatgatgaataccgtggatgagttcccgttctggcagtatgtcgcggtgatggacagcagaacgcggcctgaacacgcaaaactgcatctgatggtttttcgtttcgatgatgtgttctggcagacgcattacccgccaaatggctgggaatgccggtgccgtgttcgtgctttatctgctgcacgtatgaaatctatggggttgaaagtcagctatggcgcatcgtttgtgcatacccacgatgtggacgccggtgttgatgaaaccacgggggagctgttccgtaccacctcagccacatttgacaatggccgcgtgaaaatgacgccggatgtgggctggtcatacaatcctggttcagcggcatttggtactgaccaggcattgatccgtaaacttgtggaaacccgtgatgcgcagctgcgtgagcaggttgtccagtcgctgaacaacagccgcgagcgtcagttgtcgttttcactctgggccagacgtctgatggatacccgtcgcgccggtcacggtgttcagacgctgggctttatgaccgagagcgtcgcgaacgccgtgcgccagcgcaccggtaatgacccgtcacgcctgcttgtgatgagtgaaaaaagcctgatgcacgccgacagtgcgaaacatcacagaagcggtgtggcactgctgccggaagatctgcaattgttacctgcgctgatggccgcgccacaggcggtattgtgggatagcgtgcataaaaacctgatctatctggtcagcgcccgtgatggcgtggcgaaagtggtggtcaatgcaccctatgccgtaaaacgccaggctgacctgcttgatgttctgatcaacgcataccggttgccggatattaacgacataaaatcagatattgcgggcggaaaaattgaagtgctggaagggaaagtggattaa

SEQ ID NO: 81790 - DNA, 1545 bp, Citrobacter koseri
atgggccagattgttgatttaaccggtcagccgttcgattttgacgatgaattacagacagagcaggaagcgctgtcactggtgatgaagcgcacgcaggagcatccgtcgagcggtatcacgccgaaccgcgccgcgcagctgctgcgcgatgccgaacgcggcgacctgaccgcacaggcggatctggcgtttgatatggaagagaaagacacgcatatcttttccgaactgagtaaacgtcgtctggcaatccagtccctccagtggagcatcaagccaccgaagaacgccacagcgcaggaaaagaaagatgccgaaatgctcgacgaactgctgcgtgacgccgcatggttcgaagacggtatttttgatgcaggcgatgcggttctgaaaggctactcgatgcaggagatcgaatggggctggctggggaaaatgcgtgttcctgttgccctgcatcacagggatgccgggctgttctgcgctaacccggacaatctgcatgaattacgcctgcgcgatggcagctatgaaggtgtcgcgttacagccgttcggctggttccggcaccaggccaaatcccggacgggctacgtaggtacgcacgggctggtgcgtaccctgatatggccgttcatctttaagaactacagcgttcgtgatttcgctgaattcctggaaatttacggcctgcctatgcgcgtcggcaagtatccgacaggtgccacggcccgtgagaaagcgacgttaatgcaggcggtaatggatattggccgtcgcgccggtggcattatcccgatggggatgacgcttgattttcagagcgcggctgacggtcaggctgaccccttccttgcaatgataggctgggctgagaaatcacagtcaaaagcgattcttggcggtacgctgaccactgatgccggagacaaaggcgcacgttctctgggtgaagtacacaatgaagttcgccacgagattcgtaacgctgatgtggtgcaactttgccgcagccttaaccgtgatgtgctgtaccccattctggccctgaacagcagcaccccggttgatccacgtcgcctgccatatattgattttgatatcagcgaagcggaggacatggcggtatttgctgacgccatcccgaaactgtcagcagggatgccggtgccggtttcatggatacaggaaaaactgaatattccgcagccgaacggtgacgagccggtattcactgtcgcaccggctgaacctgttgtcatgccgggtcaggcgtctctctccgcagaggatctaaagcatcccgagcaggatgtgccggatcaaatggccgctggtatcaggccggatgaattgcagaacgccatcgacccggtgctcaggccgctgattgccaccattatcaaagacgggccggaatccgccctgcaacaggccggagcactttacccggagatggatgatgcggcgctgattgatgttctgacgcgggctatcttcgtggctgacctgtgggggcgtctcgatgccacagaccgttga

SEQ ID NO: 81791 - DNA, 1683 bp, Citrobacter koseri
atgactgaaaaaaaagcaggaattgaaaaaagtacgaagaaaaaaaggttaattccgctcagtgaaccccgccagattgatcttcaggaagaggcgacaaaactcggcgtcgatattgttaccgatattgccagcgcccagccagctaacgaggcagtcttcctcggttatcaacgcaggtggttcgaagacgaaagccagatttgtatcgctgaaaagtcacgccgtactggtttaacctgggctgaggcgggtcgcaacgtaatgacggcggcgaagccacgtcgccgtggtggccgtaacgtgttttacgtaggctccaaacaggaaatggcgctggaatacatcgccgcctgtgcgctgttcgcccgcgcctttaaccagctggcgaaggccgatgtctgggaacagacgttctgggacagcgacaaaaacgaggaaatcctgacctatatgatcaggtttcctaacagcagctttaaaatccaggcgctgtcctcccgcccgtcaaacctgcgcggccttcagggtgatgtggtcattgacgaagccgcattccatgaatctctcgatgaactgttaaaggcggcgtttgcgctcaccatatggaaagcacgcgtgcgcattatctccacgcataatggcgtcgataatctgtttaatcagtacattcaggatgcccgtgaaggacgcaaggattacagcgttcaccgtatcacgctggatgatgcgatcgcggacgggctgtatcgccgcatctgttacgtcaccggtcaggagtggtcgccggaagaggaaaaagtgtggcgggacgcactgtataaaaacgccacgtcaaaagaggatgccgacgaggaatacggctgcataccgaagaaatccgggggcgcatacctcagccgcgtactcattgaagcggccatgacgcaggaacgtgatattccgattctgcgctttgaggcacctgagaacttcgaatcattgtccccggccacgcgtgaaaaaatcacccaggactggtgcgaaaaagaactcgcgccgctgctggctgcgctgaatccgaatcataaacacgccttcggggaagactttgcccgtaaaggcgatctgaccgtttttatcccgctggaaatcaccgcagaactgcgtaagcgcgaagcgttccgcgttgaactgcgcaacatgacgtatgaccagcagcgccagatcatgctgtttattctggcccgcctgccgcgctttatcggggccgcgttcgatgcaaccggcaacggcggctatctggccgaagcagcacgtctgatttacgggccggacatgattgactgcgtcagcctctcgcagaactggtatcaggagtggatgccaaaacttaagggagaatttgaagcattcaatctcaccatcgcccgccaccagaccacgcttgacgatctgctgcaaatcaaggtcgttaacggtgtcccgcagattgataagggccggacaaaagacactgacggtaaacaccgtcgccacggtgacagcgccgtagcactgtgcatggccgtccgggcgtcgttcatgaatggtttcacgattgatgaagacagtgtgcaggccattccgccacgtaaccgcgacgattacaacgaagacgatcacgacgatgaatatcacagttttgaacgaggaggctggtaa

SEQ ID NO: 81792 - DNA, 489 bp, Citrobacter koseri
atgtcaccaaaagccataaaattacttgagatgttttgtaaggctgaactgaatcagcctctggaaagctcgcaatttgtatcgctgggagggtatgacacgcttgagtgtctctggcccctgaatgagcgattcaaaccacgcatggaacaaatcaaaaccatcagctacagaaaacagtttgaaaaagccgcagatgacgctattgcggattttctgatgaaggacgatcactggtcagaacttccgttagtcgtctggcgtgtgcttattgaacgccatcaacagtcaatccttctgtgcatcgctaatgcagttgccggtaactccgggcttatgcatatccccgtagggctttctcagaccgcgcgaacaaagtttgcagttgcgtttttgtggtatgcaatgaagctcccgtacaaagtgactgatgaatcacagctcgacattgagacaccatttgatcatctaaacgtccggctacagtaa

SEQ ID NO: 81793 - DNA, 579 bp, Citrobacter koseri
atggaaaagaaacccacccgtggccgggcttcaaaagtggatttactgcctgaaaatgtgcgtaaaacgctgcatgaaatgctgcgtgataaggcccttccgcaggcgcagatccttgaagagattaacgcgctgattgaagacgccggtctgccggaagatatgaaactgtcacgatccgggctgaaccgctatgcaaccaatgtcgaacaggtaggacataacctgcgacaaatgcgtgaaatgacgacggcgctcactgccgaactcggcgacaagccaatgggcgaaaccacaaagctgattctggagatggcccgtagccagttgtttaaggccatgatgcagcagattgaaaacccggaagcggccgtcgatatcgacttattgaaaaacgccatgctggccgcgcagcgtctggaatccaccgccatgtcgagccataagcgcgaaaaagagatccgccaggcatttgccgaggaagcggcaaatgcagtcactgaagagttgcgcggtcaggatggcatgagcgaggaactggaacagaagatccgcaacgtattactgggtaaagcgtag

SEQ ID NO: 81794 - DNA, 288 bp, Citrobacter koseri
atgattaacgacattctgaccgaagaccgccgacttgtgatcctgcgttcgttactcgactgcaacaacgaggccaatgaatccatcctccaggactgtctggatgcttacggccataacgtttcgcgtgatgtggttcgcggccagattgactggctggccgagcagaaccttgtcaccgtcgaaaacctgagcggcttttatgtcgtcactctcactggtcgcggtcaggacgttgccgaaggccgtgcgaaggtttctggcgtgaagcgcccgcgcgcccgctaa

SEQ ID NO: 81795 - DNA, 312 bp, Citrobacter koseri
atggattcttattacgcaattcttggcctctggccctatgcgctggcgttgctcggttctgttggtggggttgcatggtgggccatacggcgcacgttcgccagtaccgaacgcgtggagcgtatcgagaaccggctaaccgaaatggaaacacgctatgccaacgcgccgggggctgaggatatgcatgagatgcgcctgcgtatggctgatatggccggagaggtaaaagtgcttacaagcaccatgaaaggcatatcacaccagcttgaactactgctcgaaaacgccgtaaacgggaataaacgatga

SEQ ID NO: 81796 - DNA, 195 bp, Citrobacter koseri
atgaacaaagaccagaacggggcggcgcaggcgctactccgtgaatactggcagggtgacgcgtcaacgtgtccccgtgtggcggcattcgatccgccgcgagtctgcgccggttgtggcagacctttagcgcctgatgtgctgaccattcagccgatggctacacactgtcactactgtcgtgcagggaaataa

SEQ ID NO: 81797 - DNA, 387 bp, Citrobacter koseri
atgacctcaggtgataaagcaatcgtctttctggttctggggctgggtctttttacaggttatgtctggcgccagtctgttctgacacagagtgaaaatgagcaactgacccgtgatcttcaaatccagacacaggcccggaataccgctgagtggctgttgcacgggcaggaacagaccatgcaggtgttttccgccatccgtgcagcaaaccgcgccgcacgcctcattgatgagaatcaacgtaatgaagcgaaacaaactatcagcgccgctacagcgcaggatgattgcggtgatcggcttgttccttctgccgctgctgacgagttgcgcaggctcgaacaatacgcccgcgctcccggtggtcatttctccgcagattga

SEQ ID NO: 81798 - DNA, 513 bp, Citrobacter koseri
atgccaggaattcccaaaaagctgaaagcaaccctgcttgctgctgcgcttgccggtggtggtatgggcggttatcaggaaatgacccggcagacactggttcacctcgaaaatatcgcttatgagccttactacgatgtggccggggtattgaccgtctgtgtgggccacaccgggccggatatcgtgtggaagcattacacccataacgagtgtatggatctcctcgacagtgatttaaagccggtttatgccgcgattaatcgcctcgttaaagtgccgctcacggattaccagcgtaccgcgctggcgacgttcgtctttaacaccggcaccggtgcgttctcctcctcaaccctgcttaaaaagctgaacgctggcgactatgccggtgcgcgtgaccagatggcccggtgggtctttgctgcgggccataagtggaaaggtctgatgaaccgccgtgaagttgaaatggctatctggaacgtcagggggccggatgacctcaggtga

SEQ ID NO: 81799 - DNA, 423 bp, Citrobacter koseri
atgacagaacaacaaacagatatgtttgagcatgacccgaacatgagccagctgctggcgcatatggacagtattcccgccgccgatttagagtcacgctggccgcgttcgctggttgaattgattgatatccttgaagctgagttaaagcgccaggggatttctgacgatccgcgaacgctggcccgcaaacaggcgctggcgctgtcacattacctcggcgggcgacagtattacatcccgtgcggcggcagtatgttaacagcgctgcgcgacgatctgatttactgccagtttaacgggcgtaacattgaagacctgcgtcgcgctcaccgcctttcccagccgcagatttatcagattatcgcccgtcagcgccagttgcacacccgccgacgccagcctgatttattcccttcctga

SEQ ID NO: 81800 - DNA, 333 bp, Citrobacter koseri
atgaaaaaaatgattataggtttggctctctttgcctctctggtttcaccttcttttgccgtgtctaagctacagataaaaggggactatcctgtttgcatttcatctgatgcttttgagcgacttcaggctattctgcaacataaagacgaggctgcttttaagaagataatgactaccgaatgctttatgccacaggaagggatcactgttgataaagttgtttcacggggctggacgaatggggtttcccacataaaggtgtaccatgatggcaggcttcacgacttgtggacaaatacggaaaatgtgggttctcccaccaccaaataa

SEQ ID NO: 81801 - DNA, 504 bp, Citrobacter koseri
atgcagagggctaacttaatcaaactgatccatgtcgccagaagaaagctggcgcttgatgatgaaacctaccgttctgtgctttccgggactgtccccgggaaaaaaagctgccgtgatatgaaagtcggcgagctggaagccgtgttaaaggttatggaacgtaagggttttaaacgagagaaatcattgcgtccatcacagcccaaagcggctccgatagtgacagataaaatccgggttatctggaaaattatgcatcgtcagggctttatcactgatggttcagacaagtcactcaatgcctttgtcagacgcattacgcgctttaaaaacggcggcgaaggtgtcgccagcctggagtggttgcgaggtgatcaggcatcaaccgtactggaaagcctcaagcgctggcatatgcgttgtatgcttgaacggctgccagatataggtgtgaagcctacttatgagtgtgtttgcaagcgtttccagcaatacaattaa

SEQ ID NO: 81802 - DNA, 450 bp, Citrobacter koseri
atgtctatttcaaaagaacagtggaacggtatccagaataccctctgtaggatgtatagcgaagttacattcaggatgccctcaggcgaagaaattgcggttaataaaaggtttattgccgagaataaaatggccttaattgtctgggttaacggggaacgcagtgcggcatggggcttacctacgcatgaacagtttcggccattggtaaagcatgtctggcgtcggcagactcgccgaccaggagcctcagttatccgtaaaatatcaaagatgaaaggtggtaagcgatggttaaagcagaaagaaaatgcccacctgtatgatgtggtcgagtattgggtgtgttatttcaactccgcagcctcgcttgttcgccagtaccgcaaaattgaggggctggaactggtaacgccagtttctgaggtgatgaaaaatgcagagggctaa

SEQ ID NO: 81803 - DNA, 801 bp, Citrobacter koseri
atgagcaatcaacgatatgaagacgagatccgctggagaaatgatgcaattaactgccttatccgggcgattaacggcctggaactcaatgttgatgagcagttcctgcctgatatggtacaggaagcgatccagacggtacgcagtcagcgtcatacggttctgatcctgtcggcgcgtcagattctggaagcggcggagtttgccgggctggatgtttgtgttgaccctgtaaacgatgaacttgatgaagaatattgtatccggcccggcactattgcaggttgtccgcaggaagggctggagccgtatgaaggtctgcttattgaatcccttttgtatccagaagaaggtgctgtaccactgtccggcgaacaaccgtttaaagagtatgagccggttattgatgaaggttttttgcgtcaggctgcgcagtgtaacggctggcctggtgaacttgcatcccgccttctggtggcggctgaaattggtcagtggattgttggcgaagacaccggactgagcagtgaaacaatggcggccatctggcttggagcgaaatccgggcggttcagtttcccgcgcgatccttcggatttcgggcgctgctggcatctggttgaaaaggttccggccatacgtaaggcattcccgcgaatctgcgctgtttatccacctatagcgccataccttgaacactgggatgagctttcacagctttatatggcggcaatagagagcggaacgggtaaagcccctgagctttatcaaaggatgattgccttgcgaggtgataaataa

SEQ ID NO: 81804 - DNA, 264 bp, Citrobacter koseri
atgatagaagatcaacgttcaaatatgactgtagagcaacggttacacgcacttgaaggaacatgcgacaggcttcgcatcgaagtgtgggttttgcgtcagatagtgcagcagcaagtccatcttattaacaaaaaagggatttttgactttgatcaagtgctcaagaagttagcagaaagcatagagaaaaaagaatcacttactaaagaagataaagacgttatagaaacttatctccaataccaaaccaagaaggactaa

SEQ ID NO: 81805 - DNA, 192 bp, Citrobacter koseri
atgcaaaatcagacgtatatgacggaagaggcaaaggccgttttaaacgaacttagtaccacgccagcaacggctggggagattgcacagaatacccacctgagccacgaacgttgccagctcatactcacacagctggtgatggcggggttatcagattaccagtttggatgttataaacgcctccagtaa

SEQ ID NO: 81806 - DNA, 1002 bp, Citrobacter koseri
atgaatttcatcctgtctcttcccgacaattctgtcgatctgatagttaccgacccgccgtactttaaagtgaagccaaatggttgggacaatcagtggaacggggatgaggattaccttctctggcttgatatgtgcctcgcgcagttctggcgagtacttaaacccaatggcagcctttatcttttttccggtcatcgcctcgcatcagatatcgagatcatgatgcgcgagcggtttaatgttcttaaccatatcatctgggcgaagccttctggccgatggaacgggtgtaataaagagagcctgcgggcttactttccggcgactgagcgcatcttctttgctgaacattatcaggggccgtacaggccaaaaagtgatggttacgcggcgaagagcggtgagcttaagcgtcatgtaatgacgccactgatttcttattttcgtgacgcgcgcgaatctcttggggtttcatcaaagcagatcgctgaagcaacgggaaagaaaaacatggtgtcgcactggttcggtgcgagtcagtggcaattaccaaacgaggacgattatcacaagctgcagacgctgttcactcaaatcgcaattgataagcaccaggttaacgaactggcaacgccacaccaccaactggtggctacgtggcactcgttaaacagaaaatattctgaactgctggaggagtacaaaaatctccggcggcatttctccgtatcagtttccgttccgtacacggatgtctggactcataaacccgtccagttctatccaggcaaacacccatgcgaaaaacccgcagatatgttgcggcagattatctccgcaagtagccgcccgggtgatctcgttgctgatttcttcatgggatcaggttccacgattaaagctgcactggagctggggcggcgtgccgtcggcgttgaacttgaagcggacaggttcagcaagaccgttgaagaggtccgggaactgacacaaatataa

SEQ ID NO: 81807 - DNA, 393 bp, Citrobacter koseri
atgtctgcagaaccgatatccggtgccgcagtgacaacagtgctcgctggcgccagtgtgtttggactggctacaggtattgattatggcgtcgtgttcggtgcatttgctggctctgtattctatgtagcgacagcggcagacatcagccgaatcaggctggtttgttattttctgacgtcctttattgtcggcgttctcggctccgggctggcgggttcaaaactcaattcgctcacccattacgataagccgctggatgcgctgggcgctgttatcttctccgccctgtgcataaaggtgcttacctttctcgatagtcaggatctgaaaagcctgtttggaatgctttcccgaatcaggggaggaggttcaaatggtagtgataggtga

SEQ ID NO: 81808 - DNA, 333 bp, Citrobacter koseri
atggtagtgataggtgatccagtaatgatcttcgaccagatgatcaacgcagtgctgaacagcgacaccacagcgaagattaattcgatcatctccctgctgataatgggggcgttgatgttttatcagcgtcgtggctcaagacatcgtccggttgtgtcgtttctggcgtacctgacaattctggtatacgccaccatccccttcaaattaattttcggtctgtaccatgattcgcactggctggttgtgctgatgaatgttctgatctgcgccgccgtgctatgggttcggggaaacgtggcgcgtcttgttgatgtaatgaggcactaa

SEQ ID NO: 81809 - DNA, 927 bp, Citrobacter koseri
gtggcgaacgcagcccaggcaggaaaaacaacggttgagaataattatctgagtagttctcagtccgtcgaatttgataaagagctgacaaactgccggaaatccggagggaactgtcagaatgttattgataaatggaaaaaagtcagtgacgagcagagtgccatagttgatgaacgtctggaaagtcatcctttaacagctgtgggctgggataaagaggttgccttaggcggtattgatatgacagagcgtcctggttggctaggaagtattggcgctgatgtcatgaccagtgatgaggcaaaagcttacgttcagcaatggaatggtcaggatttggctaaaatagacatgaatagtccggaatggatgaaatatgcgctgtttgtgtcagaccctgaaaatcaagtggcagtggcttcattaggtctattggcaaaggatattggcgttgcagctatttcctttatgcgtcgcaatacagcaacagccacagtcagcgcttcagagatcgggttgaagtggggtcagggtaatatgaagcaggggatgccgtgggaggattatgtgggaaccacacttccggcaaactcgcgattaccgcaaaactttaaaacgtttgattattatgatgaagcatcaagagttgctgtaagtgctaaatcaatggatacccagacgatggcaaaactggctaatcccaatcaggtttattattcgattaaaggaaatattgatgcggcagcgaaatttgagaaagcatcactttctggcgttaatattgactcatcaatgattgccagtaaagaggtgagattggctgtccctgccaatacgacgaaaactcaatggacggaaataaacagggctgttgagtatggcaaaagtcagggtgttaaggtaacggtaactcaggtgaaataa

SEQ ID NO: 81810 - DNA, 534 bp, Citrobacter koseri
atgaataacatagtaaaaacggcatgggcctctgtaaaagcgaatgcagattttatctgtgttgaaacttattctggttacagtagtaatcgatgtgatcctcaaggagttcagttactgaatacacctaatattggtgataatgagttaggtattatggtgaagaatgcgttggctcatagtcgctttgtattacccgcgccccgtacagatgtatggatacaccctgaagcaacattcgatatggagctttatgactttaagcgtacagcagaacgctatgctgattgggtaaagaaactcatgaagcagtatggttataaaactaaaaaagccttatttaaaggtatgaaaagctgtgatatctcttgtgctaacggcgtaattacaatctcaccatcgcgccatgagaagctggaagcatggggagctaccggacgtggcggtagcgataatgtcattttgccagcagatagttcacctgaagagatcggcgctggtctcaggctggcgctgagtcgatgtattggttag

SEQ ID NO: 81811 - DNA, 270 bp, Citrobacter koseri
atgcttggttttagtgttggtctgatcatgttagggttcgtggtgttcttcccggttatttatttaatcggctatggttttacttattttgattcgtggcggttaggtaaggaaatacctcagcataaaataaaagttaatgtcgtgctcggtattatccttggggtcatattgggcggggttgcacagcatatatgggatggcctaaatggctgtatgcagctaggttattcctttggtaaatgttttttaatgttagataaaatgtga

SEQ ID NO: 81812 - DNA, 270 bp, Citrobacter koseri
atgcaggttaaaatccgtgtgatgcccgactgcatcgtcatcaccacccagaacagccgcgagctgtggggctgcgccgaggggctgagcgtgacgcatgtcaacaggccgaagatgctccagtggtttaactccttccccggcgcgtttgatcaccggcgatctgccggtgatcaaacgcgggaacgggcattgtgggtaagcctgacggcaggcagtaagatcccggcgctgggccggctggtgattgaggcggagtttaagttctga

SEQ ID NO: 81813 - DNA, 606 bp, Citrobacter koseri
atggtagataccaatgttcgtcaacaggaagaaattaaagctgtttgctctacatttccagagcaatgccagcaacagtatggctatctggttgagcagtgggaagcctttgatacagccatcaaacagcaatggaatggtcaggatttggctaaaatagacatgaatagtccggaatggatgaaatatgctctgtttgtgtcagaccctgaaaatcaagtggcagtggcttcattaggtctattggcaaaggatatcggcgttgcagctatttccttttatgcgtcgcaatacagcgactgcgactgtcaaagcatcagaagttgggattcaatggggcaggggaatataaaacaaggaatgccgtgggaagattttgtaggtaaatcgttacctgctaatgcccgtttaccgaagaattttaaaacttttgattactatgatggtgcaacaaaaacagcaataagcgtcaagtctatggatacgcagacaatggcaaaattaacaaatcctaatcaggtgtacagttcgattaaaggaaacattgatagtgcagctaactttaaaggttatacgctatctaatacaccattaacaccaggatga

SEQ ID NO: 81814 - DNA, 132 bp, Citrobacter koseri
atgattgttaataaagaaattcagttggctgttcctgtgagtacaactaaaatacagtgggcggaaattaaccgtgctattgaatatggtaaaagtaaaggcgtcgaagttaaagtgacgcaggtgaaataa

SEQ ID NO: 81815 - DNA, 498 bp, Citrobacter koseri
atgaaatttaataaagatcaggattactgggctagtgtgtattgtacaaaagaatttttactaattgaaacgcaatcaggtttcggaagaactagttcagatcctctcttccctcctcatttattacagcttgatgctaacgatcaatgtgttggtgaagccgtcttacaagcattatcaaatagcagaacattggttaatttagaggatcgcattgttttttttgaccgtgaaaaaggaaaagaaaaatacacggcatggatagaaatgttgatggatagatatggatataaaacaaaacgagcattattcaaagatatgaaacattctattatacatcttacaaatggtgaaattacaatatcgccaatgcgccatgaaaaactagaagcttgggagggacttgaactgtcggagaatgttattattactgttgataactctccttctgaaatcggtgaaggtctcaggctggcgttaactcgttgcaaagattaa

SEQ ID NO: 81816 - DNA, 564 bp, Citrobacter koseri
atgtataatgctaatcccaattacgaaatggacttcatgattctgaaagacgtgaatgaacacatggaaggtctgtttcaacgtttttctaaactgttacctttcagaattgattttgcctacaggaaagacacgcccagttttggtcattcctgtaggcacagtatgtgtattgaaatgcaccgcttacttagtgaaacccaaacgatgctggcgggatattactgggtaatggaatatacgtcaaacaagggacttcatattcattttatcggctacttggatgggcaacgtcacaagaaattttatcggatatccaggcaactgggagatatctggagtcggatcacggaaggggagggttattttcacctgtgcagtactaaagacaaatacccggtgcgtatcgatcacgtgattcactatagtgataagtctgcggtagacggtttacgttacgcccttagctacctggctaaacaggatcagaaagaacacggtattattctgggccgtagcaggcttcccgaaaaaagcaaccggggccgaccacgacataactga

SEQ ID NO: 81817 - DNA, 702 bp, Citrobacter koseri
atgtgggatggtggcttacaagaacaggaagtattggctatcgagaaaataaaagctgctttttcagtcaacgtatctaagcctgacaagcctttccgtagcggttcaattagtgagcagctaaaaagctatggttttatcggcaatgaaatgttcccttggaaaggttatgcaggttttcgatttgttgaggcaaaaaaagagggggaattcgatttagttattgtaacacactgcaacgtgatcattgttgaactgaaagactggaaccatcagcctgtaaccgcacgcggagatacttggtttaaaggtgataagaacatggggcgctcgccagtaagcgtgactcgtagcaaaaaattcatgctggacaaaaaactcaagcgtctggtagaccgttttacgaacaaaggctatatcccgattgttcatttttttgttgtgatgaccggcaatgcagatttcagcgcgctgccggaggaacaacggcgccatacgatctcgttaaaagatttcctgaagtttgccgatcgcgggagcttcaataactatttcaaaccgcacccagctaccaaggttcttaacaaggatttccatcttttcgatgatttgttcctagggcctcagacggcaccaaaagccttgagagttaatggctatgaagctaatgatatgattcagtgccgtcgccagcgactgtaa

SEQ ID NO: 81818 - DNA, 480 bp, Citrobacter koseri
atgcatgatgccctggtctgtggccgtcgttttcgcatgttcaatgtcgttgatgattttaaccgtgaggcattgtcgattgaaatcgatctgaatctgccagctcagcgagtggtccgtgtactcgacaggatcgcggcaaaccgtggctatccggccatgcttcgtctggataacggcccggaatttatctccctggcactggctgaatgggcagagaaacatgcaataaaactggagtttatccagccgggtaagccgacgcagaacgctttcattgagcgctttaaccggacataccgaacagaaatactcgatttttatctgttcagaacgctgaatgaagtacgggaaatcacggaaaaatggttatcagaatataactgtgaacgcccgcatgaatcgctgaataatatgacaccggaggaataccgacagcgccattatttggccgggatatcaaaaagtgtatggaactaa

SEQ ID NO: 81819 - DNA, 1653 bp, Citrobacter koseri
atgttagccgatgagcttattaactctggcgttaccgcaaaaactgcctttcagacagctgcccgccagtttcaggtaagcacggcctctctgagagacaaatactaccaggtgcagaaatacgctaaatccgactgggtggccgttctcatcgacaaacgcggtggctcaaagcatgaagcaaagaaagtcgagtttgacgaagacgcctggcagttcctgcttgccgatttcctgcgcccggagcaacccgcgtttcgtaaatgttatgcaaggctaaaacttgcggctgagtcccacggctggaatatcccgtcttactcgacggcctatcgccgggtacagcaaaacgttgataaggcaatggctgtggcctgccgcgagggcgaacatgccctgatgcatctgttgccagcccagcgtcgcacggtggagcatctgaacgccctgcaatggattaacggcgatggttatctgcataacgtctttgttcgctggtttaacggtgaagtgatccgcccaaaaacatggttctggcaggatgttaagacacgaaaaattgtgggctggcgctgtgatgtgagtgaaaacaccgattcaatccggttgtcattcatggatgtcatcaaaaagtacggcatcccggaagattttcatgtcaccatcgataacacccgcgcggcggcgaataagtggctgactggcggtgtaaaaaaccgttatcgcttcaaagttcgtgaagacgatcccgtaggtctgttcccgctcatcggggcaaccattcactggacgtcagttgttgccggtaaaggctggggtcaggcgaagcctatagaacgcgcgttcggcgttggcggtctggaagagtttgtggacaaacacccggcactggcgggtgcttacaccgggcctaatccgatgaataagcccgataattatggctcgcgtgtcattgacgcagagttattccttgaaatcctggcagaaggcgtggcgatgtttaacgcccaggaagcgcgtaataccgaaatgtgccagggcaaatggtcttttgatcaggtatttgaacgcgagttcgcaaataccatcgtgcgcaaacccaccgccgagcagctgcgcatgttcctgcttcctgccgaagccgtcacggtaagcaacaaaggtgagttcagcctcaccgctggcggtacgctgaaaggcgcgaaaaacgtttattacagtatggcgttgatgaatgccggggtaaaaaaagtcgttgtcagattcgatcctcagaatctgcatggcaacgtctactgctacacgcttgatggcaaatttatctgcgaagccgaatgtcttaccccggttgcatttaatgacacccaggccggacgtgaatattcacgccagcaaaaacggctcaaaaccgcgaccaaagctgttattgccgcgcagaagcaaaaagacgcgctggaaattgccgaacttatgccccggctggcagaaccggaaccgcctgaatcgcgtgttgtcggtattttccggcccgtgacgcaaggtaacaccgttgcatggccgaaatacgatgaggattcagccactgagaatgatgaactgattaaccactctctggatattctggaattaaataaacgaaagaacgttatttaa

SEQ ID NO: 81820 - DNA, 948 bp, Citrobacter koseri
atggatacggtgaatatttccgatattcgcgcaacacttcgctcatttgttgatgcaggtaaagtgacgtttgcacaggttgcccgtgagacgggactgtccagcggtacgatcagcggttacatgaatgaaaaatataacggtgataacgcccgcgtggagcaggcgcttgcaggatggcttgataaccagaaatccgccgccgaattacccgagccgccgcgcttcgttgaaacgcccacggtgaaacaaatctggacaaatttccgtttcgcccgcctgacggaaagtatcgcggttatttgcggtaatccgggcgttggcaaatcagcagcggcgcgggaataccgtcgcactaatcagaatgtctggatgattacgatcaccccgtcctgcgccagtgtccttgagtgcctgacggagctggcttacgagctggggatgaatgatgctccgcgccgtaaaggcccgctgtcccgcgccctgcgccgcagactggagggaacgcagggactcatcattattgatgaagccgaccacctgggcgcggaaacgctggaagaactgcgcttattgcaggaatcgacgcaggttggcctggtactgatgggaaatcaccgggtttattccaacatgaccggcggcaaccgaacggtggagtttgcccgcctgttttcacgtatcgcaaaacgtactgcgattaataaaaccaaaaagcacgatgtgacggccattgcagacgcctggcagattgagggggaaaaagaacgggaattattacagcagattgcacagaaacccggtgcgctgcgcgttcttaatcactccctgcgtcttgcagccatgaccgcgcacggaaatggtgaacgggtaaacgaaaaatacattctggatgctttccgcgatctggatctggacgtggatgtatcaaccctgctgcgtggctga

SEQ ID NO: 81821 - DNA, 240 bp, Citrobacter koseri
atgattactgaacgtattgccgaacatatcaacatggcggaggccgcgcaggaatggcttcgccagcgtggaagccgtgtgaccgatattcgaatcttcatgcggcgtccgttgcttgaaatcgcctgccctccggtagagctggttaagtctgcaaatcgcattgtggaatgctgtgataccggcacccgttctgtctgggttgctgcattaaatggttgccagattatctggcgctaa

SEQ ID NO: 81822 - DNA, 528 bp, Citrobacter koseri
atgcaacaccttaagaacctgacgaaatacatcccagacgatacttataaactattcctggatgataagcatggggcagaattctttatgtctgacgacggtcgggactggtatgagtcccaggctgattttctaccggatacactgaaagttgcttacgacaaatcaggggttatttgctgtattgacaaagacgtgtcaagaatttatccgctaggtttcagcgttgtagaagtcgaagttaccccggaaaatcaggatgtggacattatgggggggtgggtattcaaggacgggaaaattcagcctcgccagtattcgaaagatgaattgatagcacaagcggaagcaaagaaagctgagttgctctcggtggctacggctgcaattgccccccttcaggatgctgtagatttgagtgaagcaactgaagaagaaacagcgcttttgattgagtggaaaaagtaccgcgtacaggttaacagggttgataccagtgaaccggtatggcctgaagctcccgtataa

SEQ ID NO: 81823 - DNA, 585 bp, Citrobacter koseri
atgagagcacaaaaaatactgattattgaatcccgtagtgatttggatatttatgaggaaagaaatgaaggaagcacactaaagcaaattttggagttacaaggagtctatgcaaaaaattttgaagtagtaaacaggtctatgtttgctaaagcattaaaaatagctcaacgagaacacataaagtatgtgcacatcagtgctcatggtacagataaggggattatattaacagacgagggatttattacctggaaggatttcgatcaaatagcatggccaattttgcgagggaaatgtatttgcttttcaagttgttctgttgggagtggagtttcggagttatttgatcttcataaatcattttgcaatgcaattgttgcaccaacaagagatattacatggagtgaaggccttgtcgcatattcagcgttctaccatcgcgctcaattatctgaaaaatcctcttaccaggatgttcgggtaatgaatcacattgttggtgcaagtacatttaggcttattcaatctccatatgtatcttcaacctatacgatagatggattaagaaagctcagcatataa

SEQ ID NO: 81824 - DNA, 198 bp, Citrobacter koseri
atgcttaacagaaaactccttaataatatcttctgtagatttattgtttttcgcattctcctctttattaatcacatccattgcttcggtatatttaacatattccatttttccgcgaacataatcgaagcactcattccagagataatctatacgcttcgagtacatatccttaatgcattgggtattgccgcatga

SEQ ID NO: 81825 - DNA, 252 bp, Citrobacter koseri
gtgcccaaatgggtaatccgcacacaatcgcctcaacaactggacggcctcttaggccagtataaaaatcaggttccgattgtgcaggtgcaacctgtcaccatttctcagtacgctgcaacttttgctggcagggtcttaatttcacactacctgatactcggtctcatttctcagcatcgaccagattattctcgcgtttttgttagcgaccgccacggtcgttttattaaatccgcgccgttcctttaa

SEQ ID NO: 81826 - DNA, 1017 bp, Citrobacter koseri
atgaatatcgtatttctgggtattgatctggctaaaaatgtttttcagctctgcggattaaaccaggctggcaaaccggtttatacgaaacgcactggccgaaaagaattaccccagacgctggcaaatattccagcctgtctcattgggatcgaagcgtccaccggggcattttactggcagcgtgagtttgagaaactggggcacaaagtaaaggtcatcagtcctcagtatgtaaaaccctttgtccgcgggcaaaaaaatgacggtaatgatgcacaggccatcgcagtggctctgatgcaaccgacaatgcagttcgtgccgccaaaaagcccggaacagcaggatatccaggctttacaccgggcaaggcagcgtattgttaatcaccgcactgcgacagtctgtcaaataagagggctgttacttgaccgggggatccccattggcagtgctgtctccagagctcgccgggctattcctcttatccttgaagatgcagaaaacggtctaagttcccgtatgcgcagaacaattgccgaactctatgatctctttaacgatctcgagcgtcggatccatttctttgataaggaaattgagacagtattcaggcaatcagaagcctgtcagcgtatcgccaaagttaaaggcattggccctaaaacggccacggccgttgttgctgctattggcaaaggaactgaatttaagaatggccgtcactttgctgcatggcttggtctggttccacgccaacactcgagtggcgacaggcaggtgctgatgaatatgacgaaaaaaggcgacaagcatctacggacactttttattcatggtgcccgcgctgtcgtcagggttgccacgaataacaatgatggttatatgaatcagtgggttaatcagttaaaggaacggcgcggatttaataaaacgaccgtggcggtcgctaacaaaaacgcgagaataatctggtcgatgctgagaaatgagaccgagtatcaggtagtgtga

SEQ ID NO: 81827 - DNA, 174 bp, Citrobacter koseri
atgctgtatccgcatcgaatggaggtgttttcagtaaattcgttcgatttaatgaagggcttactctgcgagggagtaaggtcggcgatgccggaatggtcggcattaactttggtgctgacgctgccagttttgatggtgcaaatttattactacaaagctggtatggaatag

SEQ ID NO: 81828 - DNA, 204 bp, Citrobacter koseri
atggtcagatgtagtgaggtcagcagtcgcaccgcctttgagaccaatattatcgcgagttgttttctgtgctgctgcaccggcgtctttaatttcactcaggagattagttttaagcagagcgtctttattgacaatggctttaatcgcgagggccagttgattgaattgcgtttttttaggcgcaatacccgctgctgttaa

SEQ ID NO: 81829 - DNA, 252 bp, Citrobacter koseri
atgaaaaaaatagttgcttacgcatgggcctccggccttattgaattcggtcagacatgtccgggcggagcattaccgattctaatcggagaagagaatagcgtccgggaacgtgtggatgttcttgcccgtcactctcgtacatctgacgacatatttgtaccaggcatacctgaagcagccagtcaggatgaaggaatgaacgctctgacgcgtttcgtaaaagaattgaataaacgggggaataaatag

SEQ ID NO: 81830 - DNA, 198 bp, Citrobacter koseri
atggcacaagtagttattgatattaacgacgacggtcaatcaggtatcgattttaaattatctattaccgatgtccctgatgaaaaagatgtaactgattacatcgctcagggcattgttgctatggggccacaaatgctgaagcaggtactggatatgttgggcctgtcacctaaacaccagaataaagagctataa

SEQ ID NO: 81831 - DNA, 525 bp, Citrobacter koseri
atggcatctaaaccaaaacgtattaaagctgctgcggctctatatgtgtcgcaatcgcgtgaagatgtggtgcgtgatattcgcatgattggagatttccagcgtgagattgttcgccttgaaaccgaaatgaatgaccagatagcggctgtcactctgaagtatgccgacaaaattaaaccacttcaggaacagcttaaaaccctgtctgaaggtgtgcagaactggtgcgaagcaaaccgcagtgatctgacaaacggcggcaaggtcaaaacggcaaaccttgttaccggcgatgtgcagtggcgcgttcgtccaccatcggtcacggttcgtggtgttgactcagtaatggaaacattgcgccgtcttggcctcagtcgctttattcggattaaggaagagataaacaaagaggcaattcttaatgagccaggtgcggtggctggcgttgcaggaataacggttaaatcaggggttgaagatttttcaattattccgtttgagcagtcagcaactaattaa

SEQ ID NO: 81832 - DNA, 495 bp, Citrobacter koseri
atggaccaagaaagtttgaagagactcactgaaaagtatcaatcaaaatatgaaaaacatctaactcctgaactcgatatgacgtcattagtattaaaggcccaccttttcttggaagagattttgtccgaaattgtcttgcttcactgtaaggttcctaaagctttagagggtattcagttctcatttcatcacaaattgaaattagctgaagcgctttacggagttcatatgtataagatagagttccccaggggtatctggcccgtacttgatgcgctaaacaaactcagaaatgagttggcacatagaatagatagtccaaagcttgaagataagattgtgaatttcttaagagcttcagaagaaaacatgatgaaagaaaaaccatcacggcattttaatgaaatattatgcgaccctaagcttttaacggaaaaatgctcaatgtattattgtacgtgcttggatggcttggttatatgcatggtataa

SEQ ID NO: 81833 - DNA, 138 bp, Citrobacter koseri
atgaataatcaaaatactatccctgctggctatcgtgttaacgcgcagggccatttaatcccggagtcacaggttaaacctgtcgataaactgcgtgatgaggttgttatgggcgtggttgccgctgcacgcgaatag

SEQ ID NO: 81834 - DNA, 447 bp, Citrobacter koseri
atgcagaaaattgctgactttactgacctttctgcatctgagtacggcgtggagttcggcggcaccaaaggcaatgtaaccctcgtcagttttgatggccgttacaaacttgtcagggcaatcggcgagcatcgcgtgtttgatgagcgtattcaggcggctaaaaagctgattgatacctgtatcagcgagtggtctggcggcgctgatgaaaagattatggcacttgttgaccacgcttttcgtgttaataaacagggcaagattgatattaaccaggtgctggggttgcgccaactggatattaatgacgacaaatggaacgaagcaatggacgctattgccgatgccattcaggtaaccggcaccagtcagtatctgcggctttatgagcgacagggggatggaagttataaacaaatatcgctggatttagcgaagctttaa

SEQ ID NO: 81835 - DNA, 279 bp, Citrobacter koseri
atgaacgaacaggaattaaaagacacacttcttgagttaattcaatggcaccaaaaatgtgtagaaaattgccgtctcgtaattgataacactgatgcccgtatttgcctggaagctaatgacggtcaggagtttgttattgaggccggtactcaaaaagccagattagtacggctgggtatgatgctggcacttgaacaatttacgccgtttccggtctcggccgttccggtttcagtgacgttgtctgatgatgagaaggatgctgaagatgagtaa

SEQ ID NO: 81836 - DNA, 471 bp, Citrobacter koseri
atgagtaagccactgatttacgatgctgctattgcccgctgggggtatgactctcaggtgctaaccgtagcggaagaatgcaacgaactggccgcagcctgcacccgttttgttaaccacaaggccaacggcaacagcgtcgcggaagaagccgccgacgtcgagatcatgattgaacaacttcgccataacggtatggacgccatgattgagcagcataaagccagaaaattaaaccgcctggcccggcgcgtcggacaggacagtgaacctgacagcgtcttttccccctcggtgcgtgaattactttcggatgcgggtgacgcacttgatatggccgagtcactttatatcgatataaacgccagtaatcgccatgccgcagcgcaaaccagaatggcgatcggtctgcttatgcaggcagcacaaaagatgattagcgaacagcaacggcgggagcaaaaagcatga

SEQ ID NO: 81837 - DNA, 321 bp, Citrobacter koseri
atgcgcttttttatgataaacagactccgccagtatccctattgcttcccctgtcatcgccccggtcgcctgcgccgcaacattctcacctttggccagtgcaagggtggcattcgctataccatgagcaatggtgcgtttcagtttgacatcggtttcttcatccgggatctgtttttttatttcatttgcgataaacggtgctacaccatccgccagcgccgccttcaggtctccgcccatcacgccctgaaccgctgccgttgccgcctgcatggcacgggtatacttaccgccggtgccaaagcccgattccgctaa

SEQ ID NO: 81838 - DNA, 375 bp, Citrobacter koseri
atgcataaagtcgacagaccagctctggttcagcgcttccggtgtggccagtggcgagggattacgcaccggcaaccgctgtttgcccttacggcgaaaattcagtttcagcagacagtaaatacggtggatccttttgtgattccacgggtgtccctgccgcctcagaacctgaaaaagtttcggaaaaccgtattgtgggtatcgctcggccactgcctgcaacgcgacaataacgggttcgtcacgtgtggtatccgggcgataatggtaaaccgttctgctcaggttcagactccggcaggcctgacggatactgagtccaaacgtcgttatcagatgagtgaccagctcacgcttacaggatggttttaa

SEQ ID NO: 81839 - DNA, 306 bp, Citrobacter koseri
atgaatatgctaggtgatgcattcatttttatgcacaagaataatattgaattgcatttatattcggaggatctaaggactgttatagctatcggtaagttagaaggtaaaataacttgggatatagagaggtttcggatattttcaaatggagttgaaattacaaatgaaaaagagaaaattgtttcttattatttgctgactcatgggaaatggaagagtacgttaatggaggaaatggttgagaatgatattatcctactatatggaccacagttattaacctctccaaaattacttagataa

SEQ ID NO: 81840 - DNA, 1161 bp, Citrobacter koseri
gtgagctctggagccaaacgagttaccggatgggtacgtgagaccattcccggcaccacacccacgggcgtaccgtggaatcttttaaaacgttcatccttcgggcttggaccaactcagaacacaaacgataacgatgagatcggcggtacgcgcatggtgcagggcctttcgcgtggcacggtcgatgtaggcggtgacgtaggaacccgattccgctggggccagcatgacgacttcctcgcatcgtgcttcggtgctgagtgggttgatgatgtgttgacgatgggtaatgaccgaatcgcattttccgtggcatcgtatgatagcgatgtcggtatcgcatcaatcgcgcgaggttgccaggtcgggacatttcagcttgacgttcccaatgacggcgatatcaccgcgacagcaaccttcgctggtctggactgggagtcaaaggctgacgataccagttacttcaccgatccggtcgataattcaggggaattgcggtacggatttaaggaagtatcgaacatcatgctgaacggcgtgagcggaggcgatgggttctgcattgactcgttcaacattcagtttgataacaaccttcagactcaacgttgtatcggtacaggctcggcgtttgccggggcaaacatcgcaaccactttcaccccttccggtagcatcacattatcctggtcgaaagcggcttgggcgctttatcagaagcagttctccggtgctactgtgccgttcagctttgatctggtaaacgatgaaggtacttactctttcgacttcccgaaagtgcaggtcgctggcgactggcctgatggcggcaataccgacattatccaggttcaactggatatcactgcggccgacgagtcaccgaccattacccgcgccgttaccatcccggcaaccggtatcacggtaaccccggaaacagcttccgttgatgtgggcgatacaaccagcctcactgcaacgctggctcccgccggtgccacggatactgttacgtgggagtcatccgatcctgaagtggcaacagttagtgcgtcaggcgtcgttactggtgtggcggccggaacggcaactatcaccgctaaggtgcgcacttttaccgatacggcaaccattaccgtaactgaaccataa

SEQ ID NO: 81841 - DNA, 228 bp, Citrobacter koseri
atgagaattactgtcttagatgacgatccaggcagaaagattagtcccggagtcgagcgatatactgtctttctcgatggcgctgaggttaagcacgtctacacggctgatgatgagaaaggtgaagtgatctcggcggttctcgatgagcgtggctatgtggtagtagagaatggtgaagtgaagcgacagatgctttacgggaaagtcactattaagcgtcagtaa

SEQ ID NO: 81842 - DNA, 396 bp, Citrobacter koseri
atgagagtgcttttttgggtttttgtttctttaatgttatcggggtgtgtggctaaaagctatgaaccaatatcaacgacgtgtttgccatcgaatagcgtgtctgttcggtatcatgataacccggaagcggatatgagtgaggccgagtatatggcaaaaattagaaaaatcatttcgtcaaaaatgtataactcatcaatgtataaggggcaggagtgtacagtaagactaaatgccaggaatcagactgcttccgttgattacggtgatttcaggttatgtctttctttactgtacgcaatttcatcatcttcttttcctgtagttcctgagggtattaaagaacaagatgcaaacgcgttgatgtccattcccgtaaaggttaagttttaa

SEQ ID NO: 81843 - DNA, 210 bp, Citrobacter koseri
atgggtattacgcatgttgtgagcttctctggtggcagaacgtcaggccgactggtcagggaaatggaaaataaacgtaagttggggtgggatgttcgtttcgtgttcatggataccggcgcagagcacccggaaacctataaacgctgggtgaaagaggccatcgagcgctattgcgccatcgcagggatcgaagtgagggtgaagtga

SEQ ID NO: 81844 - DNA, 129 bp, Citrobacter koseri
atgattaaccagcagcaagtccgggaggctcaacgccttgcatggttcgccgttcggcatcgcaatatccaggtatgggaagaagccaaacgtatttacgcacttgctatcgggaggactcttcactga

SEQ ID NO: 81845 - DNA, 558 bp, Citrobacter koseri
atgagcaaattgcaaaatgaagagttgaaagtggtcgccgtcgttcagttcaacaaaggcgaagccttggtattaaaccgccctctcaattttatctacgaagagattgggagagatttaattggaagcgacgggccatttaaacgccctctcctttactcaccagcaagcgaagcattcaaagcatttgcaggaagcgagatgaagctacaaatgcaggacggaagccagaggattgttaaggatcactggtggtcaggaagcctaccagggcaccaaagcgttactgcatgcgacctggaatcactcaaaaaatgctacgtattttacggcggcatgggcataacggctgatgattttcaggccctgcgtgaatcctataacgggtgcgtctacccgtactgggattacgagcgggttatcaagttcgacgatatgcgccgcgatctgcatcagaggctttttcatgaagagcgacgtgtaagagcgttaatcgctgaagttaagaaaaagcataaggcgttggtgacggcgaataatcaggagcgtgccgcatga

SEQ ID NO: 81846 - DNA, 501 bp, Citrobacter koseri
atgaaattatctaaattctctgagctagtggcccgtatctggtcgaacccactgacgcaacgtcgcgacccggaaattaccatcgccgtccactcgccgggcagcatcggcgcgtcgccatctgttgaggtcgagtccattcaggctggcttcgactgggacgccggacaggcgttgatttacccggcgcagccactgaccacactgacacctgaacaagtggcggacatcacctccagcgtgcgcaaaggccagtcctggcatgcctttgaaacttacaaaaaacacaaagcccagcttgagaatgcagcgattgagtatgcgaaagtctcagggcagcgcgacgaactgttggcggcgctggtgttctctcgcgaagtgtttcaccagatgagcatgcaggctagaaccagaggcgatcggcagtatttcactaacctcttggtcgaagggaatactatcgacgcagccatcgccagcgccaaaggcggtgcagcatga

SEQ ID NO: 81847 - DNA, 552 bp, Citrobacter koseri
ttgcgtaagaatgcccacgatgcgctggaagcggaccaggaggccatccggctgatcctcagcaacgacccgcagccaacgccgctggcgtatcagcgaatgcgggtgaaccaggcgcacaatacgctgtttaactcgctgaatcaggcgatgcaagaaccggggtttaacacgcactatctggaagatatgaaactgtgggtaacgcacagccagtttatcgttgagcacgtcaacgccatgaccacgctggcgcgcgagcatacgatgctgacgccggatctggcgcagcgctatctggaatcctgcgaaattgcgctccagcgctgtcagcagcggctggagtatgacgcaccgggcggttccggggatgtgaatattctggagtcatcggagatgctctcccacgggccgctcagcacgctggaacagcatctgcaacgcgtgctggggcacctgaataccatgcacaccatttcgtcagtggcatggcgccagcgcccgcatcatggcatctggcttagtcgccggttacgggatatgaagggttga

SEQ ID NO: 81848 - DNA, 333 bp, Citrobacter koseri
atgatattgacgcccatacgacgatatggggcaatgattcttatgttactcaccgtagtattttcgggtgaggtgctggcgaaggcgcacacgacaacaacgagtcaaaagtcccacgtaaccaagacaggtcataaacaggtaagcagtaaacaagagtattctcgcaatagtgcaaagagtagttcacttcctgatttgcgaaaatacccttctggaacaccaaggaaaaaagcgtttctccggacggttatgccttttatcaccagtcaaaatgctgcgattactgcggatcgtaactggctgatttcaaaacagtcccagaatcgctga

SEQ ID NO: 81849 - DNA, 492 bp, Citrobacter koseri
atgatgttcaacaacaacaactggaagctgtcagtcaccgacatcaacctttatgaaaacactgtgagtctggacggtcagtcctatccgttgtcgctcgcgatcaagaccctcattccgggctacctgtccggcctgccagccaccagtcgcgaatcaatggaactgttagagaagctggctgaagctggcgtgacaatcggtaacttcttcagtaatgacctgatgaacgcctaccaacgccgccagcagaacaagcgagccgaagctgagcgtatcgctaaagagcagcgcattcaggccgagcgtatgcgtgaagagaacatgactgatgcagagtggcagaaagagctacagcgccgcgaacaggtcaaagctgaacgccggacatatggtgagaacctccgcagcgctacccattctgctggtcgttccaaggcttcaattatggctgacctcgatagtggcgctaactggatggattccatctaa

SEQ ID NO: 81850 - DNA, 309 bp, Citrobacter koseri
atgcccaaattagctattagcttattgctttacttggcctgcttttatgcagttggatacggcgctggatatataacaggtgggataacttggcacacactgtatatgcttgaacgtataatcaccgtagccctacttgcattcattccagtgtttatctttgcggttttaataaaggcatccaaagaacagagaataataaaatcactttctgtcgcagcaattaatatcatcccttcggctatcgcattacttgtgggatttactgacgcagtgaccagaggattccttacttatttcctcggttaa

SEQ ID NO: 81851 - DNA, 192 bp, Citrobacter koseri
atggctatgattgacccacgcactcccgaaggccgtttgaccctgcgttaccgtggtctccgtacttcactacttttgtcgatgcttggtttggataaagacgccacggataaccgaccgttttattctcgtaatgagctaatagaaagattggttatccgtgatatggaaattaaccgaggaaataagtaa

SEQ ID NO: 81852 - DNA, 486 bp, Citrobacter koseri
atgtttcaacaagaatacaccatccatatcttcggtcaggacctcaccagtcaggacggattgtttcgactggatgaaattcgccgggtcggtatccagattggtaaggtagaagacactgagaagacaatggttaagcgttttgctcagaccaaagtcggacgctatcttatggggcagaaaaaccgccgcataaagaaagtcaatatggggcgcctcggtacgtcatggcttgctgaccccacgtccgccgtgaagtttggcgagtggctggactttgagtacggaatagctgtggcggatgcctttgtgtctatgacctccagtgccagcgtacaggccgctgtagcatcttcggatgacatcacgccggactctaaggcattcattaagaagcacacggtatcgcactacagggctggacaactcgtctcgaaagaggagtttgaggagctacgtgtcggtcgctgtgagtggagactttaa

SEQ ID NO: 81853 - DNA, 666 bp, Citrobacter koseri
atggctgagtattatccggcggtgtttgggagcaagcgtttcaattgcccaagttgtgaggtgtacgcacaacagcactggaaaaaactgatttatagacctatggagggttacgctaatactgaggaaactccgatgtatatagcgatttgtgaacattgtgatgaaatgagctactggctcgcgaagcaaatgattctccctgcgtcttcaaatattgaaatgcctaatcctgacatgccagaagactgcaagtccgactacatggaagcaagaagcatcataaatctttcccctaaaggcgctgccgcactcctccgtctttgcctccagaagcttatggtccacttgggcgaaccggggaataacattaatgctgacatccggtcactcgtccagaaaggactacctgtacgcatccagcaggcagcagacatctgtcgtatcgttggcaatcaggcagtccatcccggagagattagccttgatgatgatccgcagttggcacatgggctttttaagctgctgaacattattgtcactgagcagattaccagaccgaaagaaattgaggctatgttccagagtatgcctgagggtccacgccaaggtattgagaatcaggataagaaggcgagggaacagcagcaggccgctaacgagtaa

SEQ ID NO: 81854 - DNA, 186 bp, Citrobacter koseri
atggacttactaaaattaattgctgaatctcacagattcgcgggtttggggtttgttgtgctggtggtgctattggtttataaccttctccggttgattatttccaaaaccagtcgcttcaaattaaccgttaaatttttcaatactgaaatttctgcttcagcggataatgaggataaagcatag

SEQ ID NO: 81855 - DNA, 291 bp, Citrobacter koseri
atgaaagaatatcacggtgaaaaacgatacaaagattatctattaaagcgttacagcatttctcgtgaaggtcatcttatgaaagatactcatggggaggtttaccggattcgaccgaagaaggaaggaaagaattatttcttctatgatggcgtgacaggtttaaaagttgatgctttgaagttcgctgtattacatcattatgacttgtgggttacgaaacaacttaagcttaaagatggtgaccctaataacctgagggcaactaatatcattgaaaaacgctggtga

SEQ ID NO: 81856 - DNA, 948 bp, Citrobacter koseri
atgagcaaatataacccaaatcagttttataaatttgatgtgcgaatctctcagctttcagaagaaattaacgcagcagcaagattaatttacatggtcatggttcatagctgtgatttctatgaagagaagtacaaagcatattcaccaagtattgaccatctcgcttatatggctggtgtctcaaagagaacagcaatcagagctattgagacacttgagaaacacggtttaattcaggtgcaaaagaatcaaggtcgtcaaagcacttatcgtgtattcacactggatgataaaccggaattacttgtaagacccacatcacaggaagttgcagcatcagtaagacaaaatgacaccactaccagtgacaaaatgtcatcagtaccagtgacaaaatgtcatgggggtagtgacaaaatgtcacccgtgttagataagttattagataaaacattagataataatattacagataagagtaaagacgctgaatttaatgatggtattaatgaagatgattttctttctttggatgaattaaatgattttctctctatgaatgaatctgaccttgatagtgaagctactaaagagacttctaaaacatctgacttagaggaagacagaaactctgatgtgaatgaagttagtgaccagaaagatacaccttgcccccgcctcgaatcaactgacgactatgagctaccagacgttgaccttgatgatgaagaagaccctgaagaggaattgaaacgcgaacaatataaagcggagaagaaaaagagattcgaactggcaaaactaaagaataagattaatgaactggatgattttgatgatagtgacggagacgactttacttttacaccaagaaagaaaacccacactgaaccaaagaaagaaaaagttaaagtcagacgtgtttatgctggaggtatgcactaa

SEQ ID NO: 81857 - DNA, 576 bp, Citrobacter koseri
atgtcacgcatctttgcttactgtcgtgtatcagttgatgactccaccaatgagaaccagattgaagccatcaagaatgcaggttacacaatccctaagacacgaatcatagaggaagtagtatccggttcagtggctgctatggagcgtaaagagttctctaacttggtcacgcataaactagaagctggtgatacgctggtggttctcaagcttgaccgtttaggacgtgattgtatcgacctacagaaaacggttgatatgctcattgcaaaagggattaagctaatttgcttagacctgcctgtacaggatttatccaagccagaaggtaggatgatgcttcaaatgttcggggcttttgcagagttcgaacgtaaccgcatcaaggaacgtactaagcagggtctacaacgtgttaaagcacaaggtaaggtgttaggtcgtcctgtagctgtgaacactacagaagccgttttagagcataaggctaaaggattgtcacaaagtcaggttgcaaagcttctgaatctctctgtgagaacggttagccgtcactggacaaagacactgtaa

SEQ ID NO: 81858 - DNA, 582 bp, Citrobacter koseri
atgactgattacctgctgctctttgtcggaactgtactggtcaataactttgtactggtcaagtttctgggtctctgcccgtttatgggggtttccaaaaagctggaaaccgcaatgggtatggggctcgccaccacgtttgtgatgacgctggcgtctatctgcgcctggctgattgacacctggattttgattccgctcgatctcatctacctgcggacgctggcgtttattctggtcatcgcggtggtagtgcaatttactgagatggtggtgcgtaaaaccagtccggcattgtaccgtctgctggggatcttcctgccgctcatcaccaccaactgcgcggtgcttggcgtggcgctgttgaacattaacctcggtcataattttttgcagtcggcgttgtacgttttttccgccgccgtcggcttctctctggtgatggtgctgttcgcggcgattcgcgagcgcctcgccgtggcagacgtccctgccccttttcgcggtaacgcgattgcgctgattaccgcaggtttaatgtctctggcctttatgggctttagtggtttggtgaagttgtaa

SEQ ID NO: 81859 - DNA, 939 bp, Citrobacter koseri
ttgaagtcaatacttaactgggttatgaaaaatggttggaatatatttagctttattggggtgatagggacattctatttttcgcttatatatgttcccggttatgtaaaagatataactgcagcaaaggtaaatatcacgcatgaaagcttagtggatgatgttcaagagttattattttataataaaaaactaacaattgatgatatcaattcattcattaaggccaaagagttagagcaaggaactccttacccatactcagctgatgaacttttattacaaatccaagatcgctttatgggaaacaaatttattccattagagaaaagggagtctctaatggatacagtaaaatctattcgctccacatattcaaagccaaaagttgctgagaagaaaagtataaatgaagattctctagtatcaatgtttgtttccgctataggagcactcattgcagctataggtacatatagtattttcaggaaaataaaaattgataaagaaattgaggctgatattacttcgggtgatgtaattaataacttggtctatccaaatttaactccaggctcgaaggagtttgaaagtatggttggtgaagtacttaatgaacttggagtgctttcagaaagagttgaagcaggaaaagatgatggttatgactttgagattaaaactcaagaacagaattatattgttgaggtgaaaaggtattcaaaactactcggtttggctacagctcgtgaatttatatataaagtgaatcaatcaggtaagggtggtattttaattgttagctctggctttaccgaaagaacaaagcaacttataaatgaacataatgctttatctgaaaaccaaaaagtatatcttgtagtggctaaggcaaagactgagcttaaggatatattggctaaaattttacggctatag

SEQ ID NO: 81860 - DNA, 828 bp, Citrobacter koseri
atgatatttaaaaataacaagataatgcagctctgggttctcagcctggcgaccgtcagtacgacgacgtttgccaaaacgcaggaggagaccattctggtgacgcaaggcgtcagccaggaacccactgcgccggtgaagggaatggtggcgaccaaaaccctgtcggcaaccaaaacctccgcggagctggtgaaaacgccgcagtccgtctccgtcgttacccgtgaccagatggacgcgctggacgccacctccgtctcccaggcgttgcgctacaccgccggggcatttacggagtatcgcggctcatccaaccgtaacgatgaagtgtttgtacgcggcttcagctacgttcctaaattccttgatggtctgagctttggcgcaacggcgtcatcgcaaaccggcaccgttgatccgtggctgctggagcgggtagagctggtacgcggcccggcttcggttctgtttggccaggtgaaccccggcgggcttatcagcatgaccagcaaacgccctaccagcgaaccgattcataaggttcagttcagcaccggtaatcgcgatctggcggaaggcgcatttgatttcggcggcccgctgagcgatgacggccgggtactgtatcgcctgaacgggatcgcccgcactcagcataaccaggttgaagactataaagattcgcgcgtcgcaattgctccggctatcacctggtatccaaacgatcagacccgtttcacgctgctgaccagctaccagaaagatcccgatgcgggctaccgtaacttcctgcctgcctgcttacggcaccgtcaccagcgctaa

SEQ ID NO: 81861 - DNA, 372 bp, Citrobacter koseri
atgcaaaccatatcatcacacccgacacgggcgactcagccctgcctgtcacccgttgaaatctggcagcggttactgacttgtctgttgtcgcagcactatggtctgacgttgaatgacacaccgttcagtaatgaaaccaccatactggaacacattgatgctggagtatcgctctgcgatgcggtgaactttcttgtcgaaaaatatgagctggtaagaattgactgtaatgattgctctgtcatggagaagtcaccgttcatcaccagtatcgatattctacgtgcccggaaagcctccggtctgatgaaacgcagcgatcacaaaattgttactagggtaacggcaggccatcatcaggagctataa

SEQ ID NO: 81862 - DNA, 474 bp, Citrobacter koseri
atgcgactgccttatgtaatagttacattagctatgctggcttctgtatcaacagcacaggctattcccaatatgtggacgagtggttttgggatgggcgtgaccgaatatatcattaccagcccggataaggtggtgtttaatctgaactgtactggcaatccggatgcgcagaatattctgcaacacggcgttaatctcaccctgcctgatggaacatcagtaagttctcatgacgacgggacggaaataacggtcgtcatggataacagtcagttcccattaccttcatccctcggctggaggaatggcgataatgcctgggtgtcatttattgacgcactggggcaggcagcaaatttcgatgtttatgtcagcgataaaaaagtaggcactttcagtccgggtctgaagaatacgcaaaaagagctgtctgacctcagtgagtgccggaccacacactacagcgattag

SEQ ID NO: 81863 - DNA, 453 bp, Citrobacter koseri
atgaaagaattgaaattgttgtctttactaccagtcatgttgttccccttacttatcacaggtagtgctcacgcagcacgtccttatagcgggtttctgcctgcggcagtgaataataagagtgggaacatattctggtgtgatgcccaccgccaggtcagaaaactgtgtacagcgacggaagtggattcaatgggatggtttattgttgttcgctcgaaaccttccagagattgtccggggggcatttgggggtggatcactcccagtaaagacgatgtggcaacagggtataccattacgccaggtaaagaattcaatctcaccatgaaggatatgtgcagtcccgatatgaaagtaacgttccgcccgaataaaaaggaccctcgttatgacgatctcgtcgggatttatgcagggaaagaagcgtttcgctacaaacaaataaaataa

SEQ ID NO: 81864 - DNA, 717 bp, Citrobacter koseri
atgacgcttcaggagcggcgacatgaccggcttgccgtcaggttgtcgttgattattagccgcctggtgtccggtgaaactctgtttattcgcaaactggcaactgaattcggggtgtcagagcgcacgctgcgtcgtgactttcgggagcggctgatgtatctcgacctggattactaccaggggcagtgcagtctgcgctcagatattcacagtacgcggcaggaaatagatattctgacctttgctcaccgcacagggttggccggggttttcccgggctttgaccggcgactggtaagcagcctgctggactgtgatgaacgaccctgtctggtatggcatcaggacagacctcaccccccggcaggaaagctctccttctacaggctggtcagagctatttcgggatgtcagcgcatcaccattctgactgaaggggagcgtcatgaggccgttgcaccttaccggctaatcgctcttgacggttactggtatcttgtcgctgaacataacaggcaattacgtgtcttccggctggatgagattcatctggtaaggccatcgcgggaaacatttattcgcagtgagcttctctatcagttgtcggaggataagcattttatctctgccttacctcatttccgttttattcagcagtcgctgaattcattttctccatcagaaagtcggcggcaatccggacaaactgattag

SEQ ID NO: 81865 - DNA, 1224 bp, Citrobacter koseri
atgataagttttatagttacaaaaacaggacttgaatttcattattctgcggggcctttagaaaacaacgagtgggtatggatcgaactaaagaaacacagtgaggtaacgatatctcgcgtttttttatttgaatttagtgacctgatatgcaaaccaagttctaatgaggattttgagagttttaccttccgctttaaatttggaatatacattaataattacattaagattccagcccgtatccttgatattgcgaatgatctacttataagcaaagatatagctttaaatcgtaaattatttattgctgaacgatatatctcaatttttaggcgtctgtctgaacttttagaccatacaaaccccattgtgataggaggcccagatcctgaagcaataccttgggaggcttataaaaaattaattgataaattccctaacactacagaattgaataaatatgcagatgcacgtgtaagtacaatgctatcccaatatataaatggcatgaaagatgctcagtacagatatgaaacataccttaaaaaaaggtctacctactataaacctcagctagatttagaagcaatcaaaaaacttgagattcaaaaatacattttaatcagagatctagtaaaagatgcattacataataagaaacattggacagagaaagaatggcaggatttgatggtttcttttattctcctcctatttccaaagtacattatggtaattaataatgtaaccattcatgattattacagcaataaaaataagaaaaccaatcgatttattgacatagcacttatcgatgccagcggtaatattgatataattgaaattaagaaaccttttgatgacagaattctcaagaaaaatgattacagaggtaatagcatccccacttcagagttgagtgggactataatgcaagctgaaaaatatctctttcacctatcaaaatggggagtaaaaggagaacagacccttactcaaaagtatgcttcttcattgccatcaggaatgagcattcatatttccaaccctaaggctattatcattgtaggacgtgataaaatcgatggttcggatatgagtcctaaccaacaacttgactttgaaatcataaaaagaaaatatgcacacatgatggatattatcacttatgacgatcttttacgaagactcgaaaataccattactgctttaggtggttag

SEQ ID NO: 81866 - DNA, 918 bp, Citrobacter koseri
atgttgcattacgatatgatccgttacgagataatgtaccttaaaatgttggataggtttttcgattcagatcactcgttactgtgcagtacttatgaaacgccggatcagtttcgacgtttgatctctcagatccttgagcggtatttcttgggcgatcaggacagtatcaaagttggccggaaaactcttaaagaatgggctgacctgcaactgattgataaagactattttgaatgtttcaaaggtacaccaagagcatcgtggtttgctcaccattacatttttgaatacccagtaaaatctgcagggttgacgcttggtgggttggggaatgacgtcggttgttctagtgattttaattcccttttaatggacgataatatcttcaccaatattgatttctctaatttgaatatcgatttggacgatattgattgggacttgataactaatccacaggcgactgcttcgaaaaaaaagaaacgtcttttctctcgattttatctgaacgcgggagcaagtaccgatgtgtacaatcccactccggtaactgagcgtgaactgatcaacggtgtgatgagatacattgatgaagctccatgctcacttggagataagatctcttatttcagaaaactgcatgatcgttggcttgagcaatatgatttttttctgacagattttgactggatttcacgtgatgatgaaactcagttagtttatctctgggactatctcaaaggaaaaggacgaatagcgggctatcttcgcccttataatacgtctatgcgttatgacatgattattgcggctatggatgtgtggaacatccaacctgaagagaaactggagtttattgagaagatgaaacatgcctggcaagcggcgaaatcttatcggcgatctgctaaatag

SEQ ID NO: 81867 - DNA, 222 bp, Citrobacter koseri
atggaagaaaacatcatgacagaacaaatttctttgcttgatgaccaactggtggatatgcggttcatcacgaagcttacagggcttacggacaagtggttctacaaactgataaaagatggcctgttcccgagaccaattaagttgggccgctgctcccgctggcgagagagtgaagtcgaagactggctattagaacgcatccgttgttcgcgcgagtag

SEQ ID NO: 81868 - DNA, 528 bp, Citrobacter koseri
atgaatgagcatgcggttctgaaattgcttaatgagctggatatatcttttcagtacatatcacatctggaagtgaagacagtcgctgaccatgcgagttttgctgcggattttccggcacagttgctgaagaacctgttgctgaaaaatagttctggtaagcatttctacctgcatattcttgatggcaataaaaaggcagatcttcgcgagctagcgctccagcttaatgaatcgcgtctgtctttcgctaaaccagacgagttaatagaaatactcggtgtggaacctggtggggttacgcctttcgctattgcacataacaaggagagggatattcgaattattatcgattcttctgtatcagcgagtcgttcactgggctttcatcctctgattaacacagcttcggtttgtatttctaaaaaagacttattgcggctactgacatttttcggttattcccctgtagatattcagaccgatagcgtgctcttgctactcgcgcgaacaacggatgcgttctaa

SEQ ID NO: 81869 - DNA, 261 bp, Citrobacter koseri
ttggtcagcttttctcccggcaaacgggtcaaggttagcgtcaggatttcccgttcttttcaggtcagcttgctgtcgattttgcagaagcaactcatgctgagcacaggcgaaatcaagagacaagttgagtctgggaaaacaagtggtatcacgatgaaaatgcttaaatcaagaaggctgaaggctgcggaatataagtttcagctgcctgcggaaacgctgttcgcccggcacaagatagttctgacacatcgttaa

SEQ ID NO: 81870 - DNA, 339 bp, Citrobacter koseri
atgaaagttacctggaccgccacgcccgtggggtatcagcgcattgcgaaacgctgcccttcatgcagcattaaactgaactttttgccttcgggggcatttcgggttaatttgcaaaagaaggtgctggacgtgtggagtatctataaatgcacacactgcgattacacctggaatatctccctgtttacgcgcttgtacgtcagcaaaactgaccgcgaacttcatcaccgattgatgatgaacgatgtagccacggttctacattttgcctatgacacaactacgctgaagcgaaataatgccgagatctcgggtcggcctgactttcgcatctag

SEQ ID NO: 81871 - DNA, 1194 bp, Citrobacter koseri
atgagtaccatacttaacccacgcttcggcgaatacggcggaatgtacgtcccgcaaatccttatgcccgccttgcttcaactggaagaggcctttgttaacgcacagaaagatccggcatttcataccgaatttaccgggctgctgaaaaactacgccgggcgtccaacagctttgaccctgtgccgcaacctcaccagaggaacccgcaccacgttatatctcaaacgtgaagatctgctccacggcggcgcgcacaaaaccaaccaggttctgggccaggcgctgctggcaaagcgcatggggaaaactgaaatcattgccgaaacgggggccggacagcacggcgttgcctcggcgctcgccagcgcactgcttggcctgaaatgccgtatttatatgggcgcgaaggatattgagcgtcagtcgccgaatgtctttcgtatgcgcctgatgggggcggaggtgatcccggtgcacagcggttctgcaaccctgaaagatgcctccaacgaggtgcttcgcgactggtcaggaagttacgaaacggcgcatttcatgttaggcacggcggctggccctcatccattcccaaccattgttcgtgagttccagcgcatgatcggcgaggagacaaaagcacagattctggaaaaagaaggccgcctgccggatgcggtgatcgcttgcgtgggtggcgggtccaactccatcggcatgtttgctgactttattgatgagacatgcgtcgggctgatcggcgtggagcctgctggtcatggtattgaaaccggcgagcacggtgccccgctgaaacacggtcgtgtggggatctactttggcatgaggtcaccaatgatgcagaccaatgagggacaaatcattaaatcctgttccatttctgccggtctggatttcccttccgtcggaccacagcatgcgtacctgaacagcacggggcgagcgaactacgtctccattaccgacgatgaggcactgaatgccttcaaaactctgagccggaaagaaggcattattcccgccctggagtcctctcacgcgctggctcacgccctgagaatgatgcgtgataatcctgacaaggagcagttgctggtggtgaacctctctggtcggggagacaaggatatttttaccgtaaacgatattctgcacgcacaaggagaaatatga

SEQ ID NO: 81872 - DNA, 810 bp, Citrobacter koseri
atggaacgctatagcacgctttttactgagctgaaaacccgtggcgaaggcgcttttgtcccctttgtcatgatcggcgatccgggcccggtgcagtcgttccgaatcatcgataccctgattgcggcgggcgcagacgcgctggaactggggatcccattttcggatccgctggccgatggtccgacaattcaaaatgccgcgttacgagcctttgctgcagacgtcacaccacccctatgttttgaaatgctggccacgattcgccagacgcatccggctattccgatgggtctattagtgtatgccaatctggtcttcaaccgtggcatcgacgcgttttatgccgaatgtgcacgtattggggttgattcggtgctggtggtggatgtgccgttcgaagagtcggggccgttctgtcaggccgcgatgcggcatgacgtggcccccatttttatctgtccaccgaatgccgacgataaactcctccaggagattgctcgtcatgggagaggttatacttatctgctctcccgggcaggggtcacaggtaccgaacggcaggcgacaaagccgctgcaacatctgattgcaacgctggataaatatcaggccccgccaaccctccaggggtttggtatttccacgcccgagcaggtggcgggcgcaattaacgccggtgcaacgggggccatttcaggttctgccatcgtcaagatcattgagaaacatgtcgataatgaggaggcgatgctggctgagctgaaggcatttgtgatgagcatgaaagcggcaacgcgtcaggggtaa

SEQ ID NO: 81873 - DNA, 1431 bp, Citrobacter koseri
atgtttataaggataatagcaacatccattgccctctattcaatttcgtttatcccctttgctgcgggggagaatgagaatacgcgccaggatgaaaatactcaggagcacatttctgacgagcgactgaatcgccaggattatcgcgatcttctcgtttccagaacaagtcgtcttgcagaacatcctgctgataatgccctgcgctgggatattgcacaggatgaattgctcgcaggagatctcgctaaagccgaagaatatctgaagccgttattagatgaccctctgtacgcggacgaagcgacctatacacagggattgattcgttatttgcagggcaattatgcgcaggcggaaacattgtttctaaaggttcccggagatctgagaagtcgggttcagctactttacgtctattatcagacaggccagtattcgaaggcgaaaacgctgttcgacgacacgcaactaaagtccctcagtcagcatgaaagcgcccttctgagtttactgaacgcatttggcacagaccaaccctacaaacccgagtggaaagctgaccgggccgtgctgccgtttatctccatgaatcatctaccggtggtatccgtcagggtaaacgggcagcctgtttatgttttcatcgatactggcgccgatttatttgttcttaacacgacaatgacaaaaaaactggatctcaaaccgcaagccagtttcacggggacgtatgccggcggaaagaccgcagaaacgcattattcccgactgcagacattgggtctgggagaagtcacgttgcataacgtaccgattgatattgcagaatttccagactcatgggtttttacggatgaaacgacgggagaaaaaattaatgtcgacggtattttatccactggcgtgtttcaccagttcctcactacgctggactatccagaacgacaactggtgctgatgcccagaaataaaaaaagtcaaaacaacgtcgccaaaggtggtggcgtaaacgttccatttatccttgagggaacgcatttcatgatagtcaaaggcgcggtgaacggtaataaagacatgacctttttcctcgattccggtcttgacgatccggatgccgcaattttgttgcaaaaagaagccttaaattatgttggggtgaaattgcaggacggagagcacgtgattccggatgacgataaaggcggacttggcggtggcggttttgcaataacccgtctgcccatcgacagaatctctgtcggtaccttaattcaaaaagattcgacaggactttatggtgtcttaccagaagagctctatttcactgaatcgggtatgattctggacggttttatcagtcatcagtttttaaaacactataaatggaccatcgattttgactcaatgatgatgacattccagtaa

SEQ ID NO: 81874 - DNA, 225 bp, Citrobacter koseri
atggcaattattgtaaaactggatgtattactggccgcgcggaaagtcaagtcaaaggaacttgctgatgcgattggaattacggagcagaatctgtcgctaataaaacaggggaagattaaaggctttcgattttcaacccttgatgcattatgcaaataccttgattgccagccgggcgatctgttcagttacattcccgtgaaagagaatgacggagattaa

SEQ ID NO: 81875 - DNA, 564 bp, Citrobacter koseri
atgtccacggatgcactggcacaactcagccaacgaatggtcactttcaccatgatactgctgatcgccgtcgttttgttaaattcgattgtcttgttttttcccgcattgtcattttcgaatgagttctatgggataacgctgtctctcactgaccaacggctcgctgcgctcaacgtcagtttgcagacgttgccatggtggcaggctgcgggtaccggcgtcatcagcctgctggttatggcgccactttgctactgcctgtatcaactacgatcgctgtttcaggcctatgcccgacggaactatttttccactcgatcggcacaacatatgagcagagttggtgcctcactgggagtctggacggtgatgaccctgcttgccgatcccattaccagttactggctgacgatgctgaactccgcaggagagcgtgtaatattaatcgggtttgagctctatcatgtcgtctggttttttattgcgctgtgcgtaatggcagtggctaaaatactggaaaaggcgagtatcctgtacgaagaaaataaacttttcctctga

SEQ ID NO: 81876 - DNA, 258 bp, Citrobacter koseri
atgaatttatcccgtcaggaacaacgtaccttacacgttctcgccaaaggtggacgtatttcgcacgttcgcgacacgtcaggccgcgtcaccgccgttgagtgctacagccgcgaagggctgttgcttgcggactatacactcgccgtcttcaaaaaactcaaaaataaaaagctgatcaaatccgtcaatggtcaaccctaccgtattaataccaccgggctgaacaacgttcgcgcccagccagataaccgttaa

SEQ ID NO: 81877 - DNA, 747 bp, Citrobacter koseri
atggatatcccacgtatttttaccatcagtgaaagcgaacaccgcatccacaatccgttcacggaagagaagtacgccacgctgggtcgcgtgctgcgcatgaaaccggagacccgaattctggacctcggcagcggctcgggcgagatgctctgcacctgggcccgggatcatggcattacggggactggcatcgacatgagttcgctcttcaccgcgcaggccagacgccgcgcggaagaactcggcgtcagcagacgcgtacattttattcataatgatgcggcgggttacgtcgccaatgaaaaatgtgacgtggcagcctgcgtcggcgcgacctggattgccggaggctttgccgggacagtcgaactgctggcgcagagccttaaaccgggcgggatcatgctcatcggtgaaccttactggcgtcagcttccggcaacggacgagatagcccaggcctgcggcgtcagttcgacaagcgatttcctgacgcttccagggcttgtcagcgcgtttgacgacctcggctacgacgtggtggaaatggtactggcggaccaggaaggctgggaccggtatgaggccgcgaaatggctgaccatgcgccgctggctggaagccaatcctgacgacgacttcgccgccgaagtcagggccgagctaaacatctcgccgaaacgccatgtaacgtacgcgcgggaatactttggctggggcgtgttcgcgctcatcgccaggtaa

SEQ ID NO: 81878 - DNA, 252 bp, Citrobacter koseri
atgtcacaatatgaacagttctgccaggcttgcggaatgcctatgtcggcacccgatgcacacagtgccagtgatcaatattgtgcgtactgcagcgacagcaacggcaatctcaaaccatgggaagaagcggtatcaggtttagccagcttccttgattcctggcaaaaagtcggcccggaggaagcacataagcgtgcaaaacgttatctgacggcaatgccagcctgggctcataaagcggacgagtga

SEQ ID NO: 81879 - DNA, 393 bp, Citrobacter koseri
atgttttcttacattatgcttggaaccaacgacctgccacacgccattacattctacgatccgctaatggagatgctggggtatccccgtggcggcaggaatgagaacgtcgcatggtggggcgtattcaacggtaataacacgacggcactgggtatcggcagaccttttgacaaacaggatgccacgaccggaaatggtgtgatggtcgccctgattgcgcgttctgccgaacacattcagcagcttcacgcgctcgctttagaccacggcggcacggacgagggaggacctggcctgcgcccgcattacggcgaaggtttctacagcgcttatgttagagatcccgatggcaacaagctggctttcgtctattacaccgcacaatcctga

SEQ ID NO: 81880 - DNA, 174 bp, Citrobacter koseri
atgtacgcaaaatcttttattgctctcgatggtaacggtcgcttgaccagtgcccgtactacacagagcgccccttacgacaggtatacctatcacctctgcgttagttcactaaataccatccggaacacgacacagaactcccatggcttgagcactccgacactgacctga

SEQ ID NO: 81881 - DNA, 366 bp, Citrobacter koseri
atgaaaacaacattgtacaaagatttcaccttcgaagccgcacaccgtctcccaaacgtttcggaaggtcataaatgtggtcgcttacatggtcactcttttgtagttcgccttgaaatcaccggcgaggttgatcctaacaccggttggattatcgactttgctgagttgaaagcgattttcaaacctactctggaccgactggatcactactacctcaacgatatccctggtctggaaaacccgaccagtgaagtactggcggaatgggtctggcaacagattaaaccgcagttgccactcctaagcgcagtgatagtcaaagaaacctgcacggcaggttgcatttaccggggtgaattataa

SEQ ID NO: 81882 - DNA, 3108 bp, Citrobacter koseri
atgaacgtattacccattgggtcacttgttgtctctgagcaatttgaaggcataggtaaagttgtcaccgtcgatagtgatacaaataacgccacggtcgctttttttgagtcaccgactcaaccttatgcacggcaaacgaatgttcctttagaacaactcagcccgacaatcccgcacgaagaggcggtaatttattgcattgaaccaaaaagccaacgatgggctagagcccgatttggcggttcgcgccccaaaggggattttctcgtcatctttcgcgaagatgaaagtacgacgctgacaatcgacgaaatttttgttctgaacaaagcgccggataccccagtaaaccctgcagatttccttgcccaccaagctaatgacgcgccgttctttttccctcaccgccaagcctttattgaaacttacatccaacaacgtgctgcctgccgggcgatggcatctatttccagtagcgccgttgaacttgagccccaccagttggcggtggtgcgccgtgtgcttcaggataaaaaccctaaatatattctggccgatgaggttgggctggggaaaaccatcgaagctggtatggtcgtccgtgaacacgcgttagaaactactggccacgtcagcatgcttattgcagttcctgcaccgctcgttaaccagtggcgggaagaactgggtgaacgctttcaactgaaacaacttattattgatgcctcgtcagccctcgcgggtttgcgacaagatgaggtcacagaaggcatcgtaatttgtagctattttgatgcttgcaccttgattgaacagggattcccaccttcgcttatcgtggtcgatgaggttcaccagattgcctcctggccatggtcaggagacaaagatgaacgttattacttcaacctgatcgctcagggttgccggaaagcccactacgttctgttactcacagggacacctctgcatggacacgaaaggaacttcttgtcaatgttgcactgtatcaatcccgaagcctaccaagtggatgaagcccatctgcgagactttaccgaactggtcaaaaatcgtgaaaacctcggcgggatcttctcggggttagtaccttccgtctcaaacgtcagcttacgccgtaatctggaaacactgcagcagcagttcccagaagatactgttctgatgacactctgccagcaactcatcccgcttattgggacgttctcccccaatacccaggagcgtgaagaaaggatccgggatattcgtcggcacctaggggaaaactatcgcattcatcatcgactgttgcgtaaccgccgtcaggtttcactcagcttcgatgaaacgaaaaacctcaacctaaaccttctgtttccagggctaaatggagcagcggagtgccgctggtattgcgatgggttagcgttagacgaactgattgatgagtatcgttccttatctttactaccgcagaatacgcagtgggcaatgagtgaagacacgtacctcttctggattgacgatctcctatccagcccactctgcgtcatgcaacgcgctaaagtacatttgggtgaagcggaacgcactcaggaagaacgagatctgttagaacacattgtttcaactgcaaaaaatgaacttcaggccattgataacaagcttgccatcaccctgaatgagtggctgcaaaagaattcaacaggaaaagccatcgtcttttgcgatcgtccggatcttgcccagcacttggcaataaagctcgaactgctgctggagtaccccctggagcgctatcagccgggtcaacccctgatgtacctgaaacccggcagccccattcggatcctgatctgcgataaaagcggcgaagatggtctgaatctccatgggggtctgcgactggccgttcactacggtttaccgcgctcttgtagccgtattgaacagcgccttggtcgtctgaacaggtacagtgcaaacctgaaaggcgtaaaacccgtccagagtctgatcctgaaaaatcacgccgaccgcggattacgcaacgtgtgggccagtattctgaaagacagcattggcgtatttaataacaccatcgccagcctccagttcgtcctcgacgattatctggaaaatgcgtggcaaaatgtctaccaagaaggtccggtggcccttgaacgtattgccagcgaattccctggcgaacagggcattctggccaacgaaacgcataaaattaacatgcaggaaaagctgctggcgatggatgacgagattgccgaggcagcgatttttgcgcaacagataagcgctgacgatcatcttgcagtagcgcagtgtaatgcgctgacaaattggatcacgcgtgcactgcgttttcgcgccaccggcaccgcagaaaaaggtatcaagtttcagttcgaactctctgaccgcagcacagggacgctggtcgattttaaaacctttctcaccacctgcatgctcagcttcgataaagaagggggtaacccaccgtcaacgcatctgatgagcgctgaacgcattccggcgatcgacggaacaaccgtttatccgctgcgttatgggcagccatttgtcgatacgatctggcaactgttaaaccaagatgcccggggcagttccatggcggtactgcgggtgctcccaaagccattgaatgagcccaattacttcttccagtctacctggcttgtcacccatcgccagacgcaggacacctacgcccaacgccgtatcgcagacgagttgtacccgccgcgtattgtgcaacactggctgtcctctaagggtacaccggtgacgaatccgcagttgctggaactgctcaatagcgagtacgccaaacatgaaacatcgcagaaattctatgcagatatgaatctgcgccctaatctctggcaagaaattgaagagcttgtctcaccggacacctggaaagagatggtggaacgagtctatgccagtgaccgggaacaacaacaggcaaccttcggcgaacaagccagactccagttaatggccgtcaaagccgtggtggtgtgcagcagaaatctactggaggaaatcgtctga

SEQ ID NO: 81883 - DNA, 2481 bp, Citrobacter koseri
atggaagaggaatggtcacgcctgcagcaggcgctaaccacctgttttagtcaaggggtcacctttaaggacggtatcgaaaatcagtttctgaacagactgattcagatcatcaccgatgcctcggcaggtcatggtgacatttttgccggctacgccgatgcgttacgtgccgctcacgcaagtggtattagcgcgccgtggctacccctgccgccggaactgaccgacgctccggcgcctgagtggggcatgacaaagtcgcctgccgcgcaacaaattcaactggctgaagaggcggacctggcgctgaccagagccacctatcagcgtaagatccgcaggaacttgctgcgccccgagaccgatccggcactgaagcgcctgttacccgaggagccctggctgactcactatcagggattcggtcaacaggccgccatccggacgctgctaacgtctgataataactgtacattgctggtgaatctgcccaccagttgcggtaaaagtctgctcacccaactccaggcgctcagcgcaccgacaaacaccctcacgctggtgatcgtccccaccgtcgccctcgcaattgagcaggctgacgacatgcaaaaactgcttcgcggcaccgaccaagatcatggtggaagttatgcttggatcggaggacaagatcagccctcgcgtcaggcaattaaggaaagaatcaaagcggggacacagcgtgtgctcttctgttccccggaatccgttcgctcttctttggttccggtgctgtttgagctttccagactgaatatgattggcgcgatcgtcatcgacgaagcgcatttgatcgatcaatggggcgcagagttccgccctgactttcagctgattgcccctatgattcgctcactgaaagccctaggaaaatgccgttttcgtacgctgctgctttcggcgacttacagcaaaagcacccgggacattctggtcgagcagttccatgatgaaaacagcgaactgattgaagtgtcagctaatttcctacgcccggagccggaatattttgtgcatcatgaggcaaatgaaaacgcgcatcgtcagcgggtcgaacagcttctgatgaccttaccccgcccgctgattttgtattgcactacccgcacagatgcggaaatgtggtctgcccgtctgaacgaactgggctactggcgaaccggcatgttccacggtcaaattgacacaaacaatcgcaagaaattgatttcaaaatggaaaaatgaccagctcgatatcatggtcgctacctctgcctttggggtagggatgaataaaaaggaaatccgcagcatcattcatgctgccattccggaaaatatcgaccgctattaccaggactgcgggcgtgctgggcgtgacggcagatcctgccaggtgcatctggtatggcataaggcgcaaatgaaaacggcaaaatcgctggccgttgagacgctgattggcgtagaaaaaggttttgcccgctggaaagcaatgtttgacgatcgtaagaaaagcccgatcgctgactacatgatttcactgaacaccaagcccgttcatattgatcaccaaggcgataaaaacgaagcctggaaccgtcggacattgctgttaatgcaaagagccggactcatcaaactggtctttgctgatccgaaaattcctgacgacctgcgagataatctggatgacaacaacacgcaactgattgaatggttcgaaagctactataaccacgttcatatccgtcactgtgacgatgcgcattattcagaagcgcactggaacacccatgtggagaagatccgccagtccgagttgaataaccgccgggcagcctttacggtaatggaaatgtggttggaggatcctggcaaaccactgtgtaaaattctgcagaaattctatgaatatcagagccatcctcccgagttaacctgtggaggttgtccgggatgtcgtcagaaagggaaaggagcgttttcgcccaccgtgggcacagatgtacaaattttacgctccgagccgaagaaaaaagcactcttcgtaggtgcggaaaagaaagtttattacaacgaaaatatgaagttacattcgttgttgatggaacttcgtgtgacgttgcggtcgctgatcacctctggcgaatacgtgtttattcgtgcagacaggccagtgttcctgcaactagagaacaacctggattcgctttcgcatttctggagcgcacagaaaatgacagcacctgcatcggatggaccagagatcgtgatcatccctaacacggccaatgcgttcccagacctacccatgacgcgctttgagcgaattattattgcacctgagcatctcgccgatcctcagttcccacatcgaacatggtgtgcaagcgccgctaatgcgctgtcgctggacacttttatcaggcaactacaacatgtcaataattaa

SEQ ID NO: 81884 - DNA, 876 bp, Citrobacter koseri
atgtcaataattaacaacgcaaacccaggaagcggcctgatactgcttcctttgattgaacgcgttctgcaaagcgcacaggaaccgttgtctcaggacacgctgctcgcccgctatcgtcctgataacctgcccactaacgataacgcatggggaaaattaaaagagaacctgagcttctggtgcaatctgggactctggccgatgctcgacggaaagatgttaccgcttgaagcaggtgtgcgtccgttggcgcatcggttgcttgcctgtacgattgatgcttgtcgtgaaaacggcgttgccagtgggaatgaatgcgaaccgctgtggcgggtactgagttgcctgttgagccttcagcaacactcgctcgggggcctggaacctctctcccctacgatcatcaccaacaaagtgcataaatggttacccggcgaaaccatcaataccaacaccgaaaaactagtgagagaatttggtcgttttctcggttttctcgagttaatgccggacggaaattatgtcaccgaccctacccgggccattcaatattttctgccggagatctttgacgatacgcgtacccttcccgccaaaatctttatggcaaacatggcggaggtcatgccaatgatggacgggggccagttcagaaactccgttcatgacgtgatgcagcaggaaaaagactgggtcgcgccggaaggtgacaatatctgcaccagcacatccgttgcgctgcaacgacttgaaatcagtaagcgcattatcctcgccatcggcagtgatgataaagacgccttatcactccacttacctggcggtaaaattcgccgggttagccaaatcacgctaagggaggatgcagaatga

SEQ ID NO: 81885 - DNA, 3207 bp, Citrobacter koseri
atgagcatgatggagtactggccatccaggaaaaatatcgtccaatgcattcgcaatgaagcagaagaattagaggatcatgtgcttctggccgtgcatgaaccgatgctactgacccgacgcgacgtcaatgaaaatcataaaatattacgtgacgaagacctgttccagcagttacttcatacggagcgcgccatcccactgattggccgctcggggatggggaaatcacatctggtgcgctggttagactgccggttcaacatgtacctggcggaaaacgaccagagcgagcaatgggaaattgtccggatacccaaaaactccagtctacgacaggtgcttttacgcatcctgaaaaacttgacgggggaatttttcgacaacgcacgcatgcgcgttaatgaagtaacagaacagtatccggcgaaagatctggcagatctactgttgaccatgatggcccatcagttgcaggacatgcaaaaagcggtcatggaagaaggtcaaacgctgctggcacaaggtaaagacattccagcagaccgactcgcctatatggaagccatcattgaagaggtggaaaacggtatctgtgatctgatcaccgaccccaacttcaaacagaatcttctgaagccgggccactgtattttcaaacttgccagtcggatgagtagtggtctggaagaaggagaagaagatcatgataaatatgaacttcttccggaagatctctattttgtctttgagcctgacgatctgtccgcgcgtgcacgccgctatcttaaccattctcaactgcatgagtcagaccaagtggaggcgcgtacccgtgcagcgcgcgtgctcaatgaagccatgcatacctcgctgaaatcactcttcaagcgcctgttcaccttcaatggaggatcttttcaggagctttttcaggaaatccgcaaggagtttctgcgacttaatcgccgtctggtgattctggtagaagatatggcggcgatctccgccattgaagatgtcctgatcgacagcctgatcgaagaagcggcacctggcggcgtgcaaattctctgccctgtccactcagtgattgcagtcaccgacaattatcccggctataaacgccgccaggaaacgttaatcacgcgtgctggctacgagtgggtcatcgagaacgtcgataaagacaataacgaagatcgtattgtctcgctctgtggtcgctatctgaacgccgcacgctttggatcagaggagttaaaaaacagtcctgagcaaggtaagccccagtggccacctgtctggcacagtgatgagatccccaatgcactagaagattttggttattctgccaataagaaattcccgctcttcccgtataaccgcaatgccattttggcattggcggataagcattgccgcgacagcagcggcgagttgatttttaacccgcgtacaatcattaaccgcatcctgttagatattctgcgcgattgcagaatagaagcggaaaaaacacagttcccgccagcaaatttcgctggaattcatgccgttcccgagatcgaagacaagatttcacagatagttgtcaaccgggttggcagttcggtgacgcttgccgccatctggggatatggcattgattcatttgatgaactacgcgaaaaactgccgggcagcgttgcgagtgcctttggcctcgatgaactagcagcgcaactgaatggcaaaggtcccaccatggagtcggcggaaccagcaacaaagaacgcacacgaaacggcgggcaaaacaggcagtacgccggcgggtaaaaagattgacaatccggaattcaaaccgaaagaagaggcaaaatacactgccaaatccgaactaccctttatcagggcggtccgtgcatgggtgaatgacaatgtcattctgccgcaggatgttgcccgtgatttgcgtgcggcactgaacgcctgttatgaaattcatgcacagccagagttgttcggtatgtcttctcggccaccgctgaaagaaggtcgttttacgttgatttcactgccaaaagcggcgtctgacccctcaagcattattacgaacttttactctgagcaggacctgaccgatccttcccgacgggtagatgtgtataacgctgcggtagccctgttacgtatccagtattacgccggtttaaagcaaggctttaattatccagaggcgcaggaagactacactcgctatcaaaacttcatccagtggtgggtgccgcaggctacggaaagcgccattaatcacttccgggcgcgtaacttacaggatgcgcttaaaaagcatctgcaaaaagctctgctgcttggcctggtgacgggtaaagaagaaccggcggagatcgtcaataccctatgcctcacccagaaaggtgtcgggagaaccgaagggaaaagtaccggtcgaacgctgacgacctctccttccgagatctgtttcagagggattgaggcgaccctgcatccgcacgccagcgccagagtcgccgaagccagggcgcaggcgctcgtaggatgggatgatgccagaaaagcgtggcttgaacaggttgccatcactgagcaaggctcaggcttgggcagcagtcgtgcgctggatgccgatgtaatatattccgcgctgaaaacagtgttaaaacagccgcttggtgcggaaattgaacgtgcggcgctctccgtcaaacaggaacttgccagcacgctaaaaaatgttcatctctttgccaacattaaagatagcgacgatttcctcagccaactgaacgactggcagacgtttattgagactgtgcggaccgagcactatcccacaggcagcgctcagtacaaaccatcttcgtggctgctgggtgaaattgaagccctcagaaccgacgccgaggagagtctggcgactttaattgcgttactttccattgaaaaacagaaagatagtgcgaaattgtggctggagatctgtcgacttgacggtgactacgtttcaagaatcagcagcgtacttgcgcaatggcaactggtacaacccaagatcgcgttcacactccagcagatgaacgccaaaggggatatccagcaactgactcttgctctgaataaagtgaatgaccgtctgaaaacacttgtgagcgatatcatcgcctctggagccgatcaatga

SEQ ID NO: 81886 - DNA, 849 bp, Citrobacter koseri
atgaccaccttgcgccaacaactggctgaaatgcaaaaagaactcgatcttagcgttcaggctggtaaggcctcacaaatcatcgataaatgtaatctggtgtgcagcaaaactaacaccattgccgataagtttgcattgcttaaacagcaatatccagcccagcaacaactcccgcggggcattgcggttacctggaatgacgagcagcgtagcgaactgatcgctgccgcgaacagcgtcaaaagtctcaagttacagtggggacgctggctgaaaaaccagtcggtaaacaatcccgacgaggaagaaaaccttgtagatcaggaagagtcgccacagaactctctagatgagacgctggccgcttcagaggaacctaccgcttacgacatcatccagaatgattccttgacccattgcgtcagccaactcggcaccctacacaaggacctgagcaaagaactaaaagatgcctgggatgcatggttggaagagttacatcagcaggttcatgtcgatgacaagacactgaatttccaaaaaaatgcgaacaaatttgacgatatcgcctccgactatgagcgtcgacgtcaggatttcgaaaacttaacgcagtgccaaccagttagcggtgaaaagattcaccaaatcaaagcgctcgccgaaaaactgtattccctgcgcggcatgatgaaaacagactggcctgacgtggtgcaagcatttttcaatagcattaatggcccgcagagtctccgcccgacgttaagtgccctgacgcccgaggtgcttgagtggttaagggatgaagagatgctggatgagttcgtgatcacaaggaaatag

SEQ ID NO: 81887 - DNA, 4437 bp, Citrobacter koseri
atgtctacggctgatttgtcccacttgcaccaggcgctggacctgctcgaagagcgggaagcggaactgctggtctggggggatacggatggcgcatttacccatgccgatatcatctcactctttacccggcacctgccctacgaagatgcagagtcgttactggcagaactgcagaatgctgccatgctcttcagcgtcccgaccagcaaaggggggacgcgctaccgcacgcgtatggcggaatcggtctacctgttccgccaccagcgtcaatggttccgcgatcaaccgcttcagcgagcccggacgcttgtcgccgactaccgtttcgtccgtcgcccgcgcaactatccgaagcgggaacttccggcgcaaacagtgctgagcaaatgggtcgacgtcccgtggatgaacgagattaaacgcaaggcgctttcccgactgatcggcgacttttccattgccggctttcaggaacgctcaaccgaacgtattttgcgcgcctggcactttcatagtcatcatgctcacgcgaaagaagccaccgggaccattgtctgtgccggtacggggagtggtaaaacgctggcgttctatctcccggcactcacctcgctcctcaatgatattcagcgcgacaacgcacagcgggtcaggacgctggcactgtatccgcgtaaagaactgcttaaagatcagttcatggaaacctggggcaaatgtcgtgaactcgacagtcaggccctagcactggcaggacgcaagatccgtattggttcttttttcggtgacaccccgttcaaccatcaatacgcaacgaaagataaagacaaggatatgccctttgatttactccgttgcaccacgccgaaatgtccggggcaaatgcactggaaagcagaagatatcaaagcgaaaagagagattcttcgttgtagccactgcgatcacagcgtagacagtgacgaagtgatcctaacccgcgtctcgctgatgaaaaaaccgcctgacatcctgtttactaccaccgaaatgctcaatcagcacctcgggaataaccaaacgaatcacctatttggcgttggcatcggcgtaacaccgccgccggtagtcctgctggatgaagtacacacctatgtggggaataccggtgcgcagacagcctatctgctgcgacgctggatgcaacttgcacgcaaccgcccccattttgtcgggctgtcggcaacgctaagtgacgccgaacgtttcttcgccgatctggtaggcgcgcataaaaaacatgtggcttttatcgaaccgaagatccacgaaatggaagatgaaggggctgaatatctgctggcattacgcggtgatccggtctcgcaaaccgccctgctgtctactactatccagaccagcatgctcgcccggcgtattctggatacgaaaaggaaaaaatcacgcgggacatgggggcaaaaaaccttcgtcttcaccgacgatctggatatcaataaccgactttatcatcaactgtgtgacgccgaaggctggcggtcacgtggtcaaaacttatacgttgcgaaaccgccgctggccgctcagcgtctggaaacaccgcaaaacagccatacgctgactctggcaggacagaactggcgtatcgcgcaggatattggtcacccacttgacgaaaatgaccgggccatcgttgcccgaacgtccagtcaggacgtcggggtcgatcctagagcggaagtggtaattgcaaccgcgtcgctggaggtgggctttaacgacccctcagttggcatggttattcagcataaagcgccacgtaacgttgcctcctatttgcagcgtaaagggcgtgccggtcgttcaagaactatgcgtccgtggatggtcgcagtcctgtccgaatttggccgcgaccgcgtcgtttatcaacgctatgaagagctcattaatccagagataaaaggacagtcgttgccgatgggcaacattcatatccagaaaatgcaggcggcaatggcgacacttgactggctgagcatgaagatccccggaagtaatatctggtcattgctgaataaaccgcagacaaagcgagagtctcttgaccatcttgatcgtatgttccacctgattaccgccgtgatcgaacaacatgcatggcagcaggagttggaaaagtatctgttctacgcgctgcgcatcactgacgagcaacttcagcgtgtactgtggtcgccgccccgttcgatcatgatggagttgctgccgacattaaaacgacaactcaccacccaatggtcgcggatgggccaaccggaggcagaccgttcgacgggacgttccccgctgccggcctttattccttcagcgctattcagtgaactcaatctgccggaactggagatccatctcgagcggaagttcaagaaacgtgaacatttgccctttattcagggtctgaaagagtttgcgccggggcgcatttccaagcgctatgccgtttactccgacaatgaagcagactggcttatcccgaacaactttgttccggcgatgaattgcgtttcggatgttgattttgaaattgagcaggctttcggcgatacctggcagcccgagtgtatcattgagtatgaaggtcagcctcctattagggtcattcgcccgatgcaggtgcttacgcgcgcgctgcgattcgagcaaaatctcaccgagaaaagcaactcgcaactgtactggcatacccggtttaacccagacgatcaggccgatccgctccccattcctgccggcccgtggacggacaccctccgctccattacgttctttacccaccagaacatgacacctctcgacgtcacgcgttacgccacccacgcaacagcctcattacgcaataaaaccaagcaacaggcgcatgtgaacttcaggtgggtcgacaatggcgagcctgtcggggttggcgtgcggcagtgggtggatggcgcccggctcagatttacgctgccgcccactctgctgcaacgcctccggcatgacccggccattcagcgcgcactgcgaacgctctatttccagcatcggatcaaacatgaaccacgcttcgaatatgacacgttcaccgctgactggatctacgagtgctacctagcggcggttacgcgggaattggccacacagtcgtctctggcagactctatcgcggaattaaaaaccccggacggccgacgtcgactgactgatatcgcggacacactcttccaggcagagaatatctttgaaaatagcgaggatggtgaagacgacgccgaaagccaggaactgcagcaacatttgcgcaacctgtttaaagagaccgacattctggaaatggtggacaggcacagcgcgatcctgactcaggatctcagtgatgatgtcgattttcaggactggctacagcatctgctgacaacgacccttgccggagcggtcaaacaaaccagccacctgttgctgccggatgtcgatgaacgcggtctggtggtggataccgaactcaacgacgaagtactggacatctggctgaccgaatcagaacccggcggctgtggcatcattacccgtctggaagacgtttttcatcaggatccggtctccgtactgaatctgtttatgcgtagttttgccgccagcgattacgagcagatcgactacgacctgttcgaaatgctttcgcggctcccctcttccagcgagctccaggaggccttaaatgcgatacgtaaggccagcagccatccgcagcgccgtgaggctaacgcccacctcagagcgctgttgaaggcgcagggatttgcactcagtcacagttttatgtcggtgctgcacacacgggtactacgtccgggcagccaggcatcacatgatgcgcagatgcttgcatatctcaacgcatggcgggaactggaagacaaagccggatacgaaatcgctctgaatatttttgcccatacccaagcgacgcaagaactgcctgacgccagtgtgattaaagtttttgagcgcttttgcaaaattcagggaatgctctggcagcgcggcaatgccatccgtcagtcggttctcagctattacaatccgtttaagtccggtaacaacctgactgaacgactgctgctaagctcactgtttcaacagacggcgtgcagcatcagcatcagcgagaacgactggttagcgcagttacatcaagccattacccaacacggctttgcagaactgcatatcccgcgcgaggcccgccatcgtattgtggaagtgatctctctggtgcaggtgaccccgattgagtactttggtttgcatctttatccccgcgaatccgccgtggattatcaggatggcaatctagtgttacgtattgaactggccgaagcgctgctgtaa

SEQ ID NO: 81888 - DNA, 531 bp, Citrobacter koseri
atggaagaacaacgacaaattttcctacatggcccactgggccagcgacatttgcgggaaattctaagcgcgcagtttagtggcttgatcctctacccagaaccgatctggctgatctcaccgtggatgagcgactttgacgtgattgataaccggggcggtcagtggagttttcttgatccttcatggggggcccggatggtcagcttccaagaattgctcgccaccgccgtcaacaatggctgtccgctacgcatcgtgacacgtgaagacacgcgcagcgtggtctttatcgagcgactgttgacgcgcttatcgcccgatcacgacatgcaatacctatatcacgagaacctgcacgccaaggggttgctgaccaaacatttctttctgaaaggatccatgaattacacctggagcggcgcaaacctgaacgatgagcatctgctgttttcaactaataatacggtgatttcagatgcgttgattgaatttagcggccagtacacctttggagacacccatgactga

SEQ ID NO: 81889 - DNA, 2184 bp, Citrobacter koseri
atgactgatactcctcaatgggtgcgtgacttctttggcaacggaaatttactgaagctggacaggttgctagaaaacgttgaaaacgcctaccctgcggacttaaaaaccgtcttactgccgctctacgagagcgcgactgacgctcagtggccgatcattctgccctggtgcgatgctcatcgctgggtattttttgccgcggcagaaacggatcgcaccacgctggagctcagcaatgtgttgaatgccaggctggggtctgccgatgttattgccgatagaagggtgactttcgtccccgcgcagggagcgacatcgctgtctgaaacggctctgctgacgcactgtccggccggatttatccggatcgaattactgcccacaaagcagaaagataaaccagcaaaagagcgggtcttcgccgcgctcaaagacgttatcgccctgtttcgtgataggccatcaatcgtacgcacggtcaaacgtccctttgggcggatcttgagtgatttcattctggcgaatagccaaaaagacgaagccacaagcgacgctttactacaggaactgaagaacaacggcgcgctttcgcgacgcaaccttatgctgcttgaactccagcaggcgggtaagttagagaagtgggacacgctgctgaatcacgattcgcttgctgatttggttcggggacgcattcccacaactctgatgcggatgctgctgaaagcataccagcagcgcttttttacacccgacatccacgggtatccgcaggcctccccggcggatcttcgcccgcaatgtctggcgctacaccctctgtttacgcagatgccttttttatcccaggatgaggctgactttgcggcgtggaaaacctgggccaccggcgtgatgcttattggcgaagtcgacctgctcaacgcgttaccagaacgcctaaaaaccgactggttgagtggattgcacacctgggccagtcggccgttctacgttgtgagtccgtcagcagcgacagcgacggcgtcgctcccggatacgctgcaacagcttgccgcatatctgcaaacctccctgaccgcaacgcaagaggagattaccggctacgcacaaacgctccacacgcttgatcagcagttgatagagcaggcgatggcggtaccactgctgaaaacactcatcgaggagatccgccatctgaccaatccgcaaatcgtgggctgggatatctgtttctcccgactatgtcagtcagaagtcgacagcaacagcctggtgcaactggtcgcgctggaaagtgaaaactggcccgccgactcgttccatgaagcgacgatgctccagttactatcaagtcaggttccaccagacgcgttcccgatcctgcgtaacgtgatgcctgcctttattgaatggcttgaacgtcatcagttcagtctgagtagtacgacgtggctaaagtggctggatgttcttgcgatggaacaaagcgtcagtcaggcggatatcaagctggccacaatggtgacggaccgcttcctacaaggctctgttagccaggaagcgtatcaacagtccggtgccatgctggaactgatcgtcgaacgcgccagttcattccgcaacctgccagcgctgggcgagttgatcgaactcttccttgatgctccggtgcaggatcgggcgacgctcacctcgctgtggctcagcgttcagtcttttgtgagcggaatatgggcgcgattagatccgactactcgtacagtgatgcgcaacttggcgactgacgtgctaggggaaggtgcagagcgcgtatttccggctgagcaggatagctgtacggcagatgcagaagatgaattgccggacttatccggagccagagtggcgatttatagcctgacagaaggcgcggtaagacgcgcgaaacggatgctggaaacgctgttccccgggatcagagtggagatcagccatgcgcacactgcaaccgacaagttgattaatcaagcaaaacaggctgattacttcatcttttctgcaggcagcgccactcatcaggccttttacgcggtctcagcacagcgcagagatttaatctaccctacaggtaaaggtgccgggtcaatgctgaacgcgtttattgcgcacgttcagcaggtctctgcagtagtggcataa

SEQ ID NO: 81890 - DNA, 1128 bp, Citrobacter koseri
atgagtgaatatcgtgttcccgccctgcgaatccgacagggtgaggagaggcaactctatagccttgcgatagaaggtaaacagatcagcaaaattgcagcgatttcgcgaattcgtcgcggtgaagagaatttggttggttatcagcgtccagaagtacgtaaccatattcgcgaaattcagcgctatattgagagtaaaaacccgatgataccaaacccggtgattatcgcttttgataagcgtgtgcgttttgaaccgcttacagataatggcgacatggggcatctggtgatacctttctccgaagataaggattttgagaagccagggtttattgtggatggtcaacaacgtactgctgctttgcgggatgcggaaatcgactcgtttatgatgccggtctctgcatttatcgctaatgatgcagaagaacaacgcgagcagtttatgctggttaactccacaaaaccgctgcccaaaacgttgttatacgaactggcaccgcatacccacggtcgtttgccatccgatctgcaaatgcgtaagtttccttcgctgctgactcaacgactgaacttcggggaaggtccacttgcggggcgcatcaaaacggcaaccaatcctgatggggttattgctgacaactcgatgatcaaaatgatcgatgctagtcttcgtgagggagcattgtatcgcttccgtgaccctgcgacagggttgggggatgaagggaagatggtgaaactgctgaataacttctggtcggcggtggaaaccgtgtttaccgatgactgggacaaaaagccgcgctattcccgcctattacacggcgtcggtattcttgcactgggtagcctgatggatgaaattgatcaggtgcatcaggactataaaggtgaacctggctggactgagatcccttcctatactcgttttgtcgaagagttaaatcgcatcaagtcgctttgtgcatggagtagtggcgcgtggaacttcggtacggatattgatggtcagcctatcgtccgtaaatggaatgaactgcagaacctgtcgaaagatatctcattagtgacggattatctggtcacaagttatatcaaagcagcgaacgccaatatataa

SEQ ID NO: 81891 - DNA, 1272 bp, Citrobacter koseri
gtggcgtcacaggagagtaagttgtcgaagctaaagtattttttccctgatagtcaggattttatcgatcccagtttcgacttcttccgcgaaacgcgtaacgaacatcgcgtgcgtcaacgtgacgatcagtatccgcatgaggtttttcctcatccttacgatggtatgctggtttctaaagctgtagttgatggtcttggcggcggcgagagcaaatatactcgtgcccagcgtttgcgttactttcgtaatggaatgaagcactttttccgtctgccggaaaatatggaaactatgggtgattgcggagccttcacctatgttaatcaggacgtcccgccataccgtgtggaagaggtgattgagttttacgaaacttcccgctttaaccatggcgtttctctcgatcatatcgtttttggctatgaaaaacctggtgaggtattcagtggcgaagtattgactgagtgtcgccgacgccaggatatcacgctgaccttggctcaagagtttttaaataagtctcaaaagtcctgtttcaccccctttggcgttgcacatggatggagcaaaacttcctatcgtcagtctgtagaggccctgctggccatgggatacagaaatatcaccatgggggggatggtgccgttgaaaacggcgcagatccttgagactctcgaagagattaaaccgctgctgaaaagtgatacacgtgttcacttgcttggcattgcccgtccagagagtttcgccgactttatcaagtttggtgtgaccagtattgactcaacaacaccgctgcagcaagccttcaaagatcggaaaaacaactatcatacgcctgatggcccggcctataccgctgtgcgtgtccctcagtttgatgcgaatccaagcttgagtcgcaaaataaaatctggcgtgattgatcaggatattgcacgacatctggaaaaggatgccatgactgccctgtttgaatatgataaaggggctttgtcccttgagaaaactcttgatgcagtcctggcatatgaacgcctccattcgggtgaaaaagaggccgataaaatccgtgcggattatgagcgtacgctgggagaacgtccttggaaacaatgccagtgcaatatttgccaggccatcggtatcaacgtcatcattttccgcggagcagaacgtaaccgtcgccgcggtttccataatattcaggtgttgtacaaccgtttacagcacacattgtcattacgctcagaggaactgtcatga

SEQ ID NO: 81892 - DNA, 513 bp, Citrobacter koseri
atgaaaaaaagaaaaagagactattatattatctgtggctctccagattatattaatgcaattgaactagatatcattaatggtcttgagtatctagttgatgcgaaaaaacaactgcttattataacttccaaaaaaatcaatggtaggttaactacataccttttcaaaaccaaccaaaatatggctcagtggctgagatgcaatatgctcatgcttaatatcagtgtggcaaaatacattgtgaaggaatttacgtcaaaacaactcaatgatttaaatgagttatctcaaaagttaatagaagaactcaaggagttacctgagcgtgaagtgaaaaaaggaattcgtcgtagtccggaggaagttaagtctttcattttaaagattatggaaaaaaatcctggtatcagtgcaacacacgcgttgcgtgaatttcgtgactcgggaaattcatttgaggaaaaacgttttcgggctgagtttatggccctgagagaggctaaaccttaa

SEQ ID NO: 81893 - DNA, 234 bp, Citrobacter koseri
atgaaaactttcgatactcaacttgcgatgagcattgtatcgcactcaacgggaggttttagttatgacacactcgctagggcattgatttctaaagataaaaacgaaaattctgacgtccttcttgagtcatgtctaaatttttgtctctctcttgaggaaaaaggtattctgaggcgatgccaaagatgttctcattctcaagatgagtatttcgagtatattcctcactaa

SEQ ID NO: 81894 - DNA, 1245 bp, Citrobacter koseri
atggcgttaacagatatcaaggtcagaactgccaagccaacggataagcaatacaaactgaccgatggcaatggtatgcatcttctcgtccacccaaatggttcaagatactggcgtctgcagtaccgctatggcggaaagcaaaagatgctggctttaggtgtttaccctgacgtatctcttgcagatgccagagctcgtcgcgatgacgctcgtaagcttttagcaaacggcatcgatccgggagataaaaagaaaaatgataagattgagcaggaggaagcacgtacttttgagcagcttgctattgagtggcatgccacaaataaaaagtggtcggaagaacatagtcgacgagtgcttaaaagcctggaggataatctcttccctgccataggtaagcggaaaatcgctgatcttaaaactagagacctgctggccccaatcaaagcggtagaactgtcaggacggcttgaggttgcttcacgattacaacagcgaactacggcaattatgcgctatgccgtacagagtggtttactggactataaccccgcgcaggagatagttggcgctgttgcttcaagtaacaggcagcatcgacctgctcttcagttgaagcgaatcccagaactattacggcgcatagatagttataccggtagacctcttactagacttgccgtcgaactcacgctcttggtattcattcgttcaagtgaactacgctttgcccgttggtctgagatcgatttcgaaacatcaatgtggacaatacctgcagagcgcgaagctattgaaggagtaaagcattcacagcgtggttcaaaaatgcgtacgcctcatctggtgccgctttctcatcaagctttagcaattcttaaagatgtttacaaacttagtggtgatcgcgattttgttttcatcggcgatcatgaccatcgcaaaccgatgagtgaaaacacggtgaacaaggcgctgcgcgttatgggttatgacacgaaggtagaggtttgtgggcacggtttcaggacaatggcctgtagttcattgatcgagtctggattgtggtcgagggatgcagtggaaaggcagatgagccatatggaacgtaactcagtacgcgcagcttacattcataaggccgaacatcttgatgaacggcgactgatgctgcagtggtgggctgattttttggatgcgaatagggaaagcgaagttagcccttatgactttggcaagtag

SEQ ID NO: 81895 - DNA, 426 bp, Citrobacter koseri
atgaccgatgaaaagccaattaaaccgctggcacgtgatgacccacgccgccagcgttacgccgaacttttgaagcaggctggcagtatgaccattccccgattgcgtccgggcgatgctaacagtgtgatgagccagcttgcgacgatgctcggcgcacctgttccggtagtcggtgctatgacggagcacgccgctgcatggcgtgcctgcctgctggagcaagggcttggcgatcttctggatggtattaataagcaggtgctgacggtcttctttctgctctgctggagagacagcgccttacgagtggcagctaagcaaaaggcacggcttacagcggccagcgagggtttgaccattgagcaataccgggcaatgcacccggcttacagagaggataaagaagatgataaccaaaattaa

SEQ ID NO: 81896 - DNA, 633 bp, Citrobacter koseri
atggcacacaatgcgcttatctattgccgcgccagtacagcagagcaacacgcaggccgggcgctgggcttgctgcgagagttcgccagtgatcggggctggcctgtacgagcggagtacatcgagaacgccagcggtgcgaggctcgctcgccctgaactgatgcgcctgctggatgatgcgaaggccggagaggtcttacttgtcgagagcatcgacaggctaagccgccttacgcaaaaggaatgggcaacactgaaacagaggattcaggataaggggcttgttatcgttgccgttgacctgccaacctcgtggcaactactgaacgatacagcgtcagagcttacagagggcattctgagagctgttaacgcaatgctgattgatatcctcgctacgatggcacgagtggactacgagacacgcagagcacgccaagcgcagggcatcgagcgtgccaaagccgaggggaaatataacgggaagtctaaggacgagagcgcccgtgaaactgtccgcgctatgcttaccgttgggaataaaccagagcacatcatgaaagctgccgggataagtcgtgcgaccttctaccgtatcaagcgtgagctggccgccagcgttacagagtga

SEQ ID NO: 81897 - DNA, 1443 bp, Citrobacter koseri
atgtctggggttattccagaaggttccttgattgttgtagagaactttgaccgcttcagtagggcagatattgacacagctatagatgatgttagacagatactgaggaggggagtctctatattgactctgggagatggtgaactttatgacaagtcagccttaacagaccctgtgaagttgattaaacacatcatcatagctgagagagcacaccaagaatctcttgttaagcaaaagcgtatagctcaggtctggaaccataaaacacagcttgcaagggaacttaagaaacctatgggtaagcaagcccccggatggttagagctatcagatgatgggtcacactacatcgttgatgaggataaagcgtcactggtgaatctcatctttgacaagcgtctgtctgggttgtcgatgtttgctatctgtaagtggttaaacgaacaaggttacccaaccattaatcagcgtaaggtcagaatatccaagactaagaaaccggatggtaactggtcagcattaagcgttaaacacatcctgacttcacgaagtgtattaggttacttacccgctaagatttctacagaagaccgtaaaacagtgttacgtgaagaaattgaaggtttctatcctcagattgtcacagattctaagttttacgctgtacagcaactgttagaggaaacagggaaggggaaaacttctagcggtgaacactggctatatgtgaacatactgaaggggcttatccgttgtaagtgtggtcttgtaatgactcctacagggatacgtaaaccagtttaccaaggtacttaccgttgcaatggtaataaagagtcccgttgtaattacggtacagtgtccagaaagttacttgatacacagctttgtagccgtctgttcagcaaactgtcacagctacacgatgaagctactgatacagcaagactagatgaactacagcgaagattaaccaccgttgatattgaactggaaaaactcactgagacactgatacaactacccaacatcactcagattcaggaagcattacgggttaagcaggaagagaaagatgaactgatagctcagttatcacgagaaaaggcgagagtaaaatctgtatcaagcttggatttaagcggtcttgatatggagtctgtagaggggagaactgaagcccagattattatcaaacgtctggttaaagagattattgtctctggtaatgaaaagctggtggatgtatatcttcacaacgggaatataattaagggcttccctcttgatgggaaagatgaccacaccttaacgcttgaagaagcaaccgatgagatgcagccattagatgatatgcttatttttggtgaaccagtaacaaggatttatcctgctggtgatatggaagaggtgaatgctgatgaggtggattattcttag

SEQ ID NO: 81898 - DNA, 786 bp, Citrobacter koseri
atgtttgacacaaaacaacttagatatagtgggaaagatggagtttatttccatctgcaaggtaacccagataactttctgtcattatcagcaaccgagaacatggaatatgattcccctatgatggtgacaactcaggctatgcagtctgggcagaccattacagataacgttcaaagagcacctaaaacaatcactatctcaggtgttgtagtagttgactcatcaagtaacatcttagttacccgtcaaaatgccttgacagaaacctttatcaatacggttgaaacttggcgagaccaaaaacagattatttcaattgtctgtagggatggtattaagattgatgactctgttattactcagtttaaagccagtaaagaacacactattactaatggtcttcgtattcagatgacatttcagggtgtggaatttaaatcaatagttggaactacggatatttcttctgcaactggtaaacctatgacaactaaagatgacggtgtaacttctaaaaagaatactggtaacactacaacgtccattaacaagaatacgcctatgctggcttgtaaggagctttataaccgttcttcaagtgaacttaccaacgaacagttaaaagcccgtctgaattgttccaagagcgttacggtaaaagatggtgaaagcaccttcacagactcagctaatgagcaagcttcaaaggtgcttaataatgctggtacaggtaatgctttgaagaagttctctgtgaatcctaataagagaggcacttactaa

SEQ ID NO: 81899 - DNA, 1986 bp, Citrobacter koseri
atgcagtcagctacaaagattgaacgtaatttaaataaggcgtttaaagttaacccaaagagcatggataaggatttagcagcctctttagggaatatggaaaagaagattaaccagacttttaatagattggaagaaagagctaaatctacgaaggtctttaagtttaaaactcaggttgaagaaacggttaaagcagcaagacaaccacgaattagcggtaacagagcaatcacagcagcacatagcgtgaatatgtctaagcttggtaacgctgaccctttattagctaagatgttcaagtctcagtattacgctttaagtaatcgagctaataagattggtaatgaggcttttaatcgtgagctaacaaagttaaatcagtctcttcgtgaaacactgtctaagtttaataaaaccaccagcaaaaataatcacagtgaaaatgcttcgaatggtctggatgtattagctacaagtgcaatcaaagcagggacggctatttatagcttccagacagccttagaagcctacaaaaaagtaatggaagttggtttaaagaaagaagcatcacaacgagcagcacaatttgttttaggtgatgaaggcgctaagcgagctacagacttcgttaagaatcttgctaataatacaggtgtagaccagattgaaacattaagcagctttgctaagttttccgctggtgctggtgatatgaatacagaccagaaagagtccttattttctaacgtgattggtacatccagattaatgggtttaagcacagaagagattaacgggattctaaaagctttcgagcagatggcttctaaaggaaagattcaagctgaagaacttcgtggtcaattaggtgaccgtatggcaggtgcttttcagttatttgccagaagtcttgggatgactacggaagaattagacaaggccatgaaagacggtaaagttctttctaaagatgttcttcctaaagtatccgctgaaatgggtaatatgattgctaaggcaggtggatgggaaaagattattaactctacacagactcagttagggcgtctttctaattcatggagtaataatttggcattaatgttcgacggttcacaggaaggtttaacagactttacaaggtcactgactaatttacttggttcgctaggtggtacatctaaaagtcttggtgaatctcttggtgacctgatgaaaagcatgtcaaacggtattgatgatttaacaacgattggctatcgagttcagggatactttgacagggtgacgttaatctaccgagaattaagcgatactcaaaaagctgtagctgatggtcttgctaatggtctgttaagttcgttaaaggggcttgctggtattgtcgctgtaaggtctgggattggtgctgtaggtggtattttaaatttaaccagagctatttcaaaccttgggactgtagcaaatacagcagcaggaagaattaattcacgttctggtactggtagtgttgaaggtggtaaaggtaagttatctgtagctgatgcaattacaagagtgatggttgttggtatgtctgctgatgttattaactccattgttaaaccactctatgaacgtcagatgaataaatctggtgaccctatggataaagtaaggtctaaagcagagcctacagaccaagctttaacgggtgatatgaattcattagctgctgttttatgggctatgtttcagggtaaatcaaaagcacctgagcagattatttcaccagaagcactaaacaaccttaagagccgtgtagaggtatttacacaggatattaaaactatcagaccatcggtaaatattcagcctcaaacaatcaatatcactactcagacggtactcgatgggaaagtaattgatgaaagaacaacatcacatatcaaccgtatgcaggaagataccttgattaactcagcttacccagagggggaataa

SEQ ID NO: 81900 - DNA, 1128 bp, Citrobacter koseri
atggcgaggttatatattgtaaatcaaatgcttacaatgtactccggtgttttttgccatccaggcactcacctccatgttggcttctacattcgaccatggggttatctgtatactacaaaagtgacctttaaaggtgcctgttatttggtcgttcgtatttactcccttaagaacaagaagttatactgggttaaaaatttctcaacggaattagaaatgcatatcgacccacatagcgatcccaaggcatgggaatcgtatttcaaaagcattatttggctacattacaagccagcaaattgttgtgacttacctgattcacatggaggggattttggtcttgaatgctacaccctcagtggacatgtttttcagtgttatttgcctgagcagtctagtgatattgataaactttataaagcgcagcaaaagaaaatatataatgatattcagaaattctccaaagacaatgttaaagaattagaggagttgtttggaacattaaagattagtcgttggatattggcaacaccttataataaatcagctaaactaagtcaatattgtacaaagaaatcccttaaggttcgccagttaggtcttccgtatgttgctgatgattttcaaatcattgttcaaactgaaagtagctattcacaagaagcttttttacttcgcaaagactcatatcaattaagtctgaacttagatgatactactgttgaaggagctctagaattcatcagtgataatagttctttccttgaaaagttgaatttaaaattacctaagatccacgactccatgtcaaggcaagaacagattaggaattttctaattcagaagttccttgattatcagaatctattagacactttaaagaaaaattgggttgatatttatgaaatcgtttataaatgtattcaacagagagagaataatttagttgggatgtttatgcttgccccatctaatgcccaaccatcaaaaattatgacagatcaaattgaagcattaaaaaaatgtattgaagaagaagttccaacttttaaacaatcggatctcgagaaaattacttggggtgtgatttccgattggttgatacgatgcccattagacttttaa

SEQ ID NO: 81901 - DNA, 213 bp, Citrobacter koseri
atggatcctacactcgaccgtgcgctagagctaatgttagctgaaggttttataatacgagagaacgacaaatataaaatagctgaaaagggagaattatgtgcagtaaagttaactgcactagatgtattcaaggatgaatcttttaaactgcataagcttaaaaaaggattgtccgaaactaatgttaataaaatattccaagtggggtaa

SEQ ID NO: 81902 - DNA, 201 bp, Citrobacter koseri
atgttatgcgttaaattcaaatatcacacagacaaaatgattaagcacgtatcagacctgctcatcaaagaaaatggtttcggtgacattcataatcaaaaagatatcttcattcacgccaccagcccaaacgaaacattaaagacagcagttaagccagaatggtttgaacgaaacaaagtagaattaggctattggtag

SEQ ID NO: 81903 - DNA, 309 bp, Citrobacter koseri
atgaattattcattacaaattatggttgaccaagaaactatgaactggttgattgacctgaacatgtcaggtttcaatattcactttgcaaattgttttgaagcttcaacttatatcgacaaacacaccatcaatacaattaagcttggtgactatgttcataaactggaagtaacagaccagcacaacaaaagatttatcactgaagagtgtaacaggctggatttaagcccagagcagctattgaagttaaatgtattcttgacctatcaacaagaactaaatccgtacagtgaggtgatgcaatga

SEQ ID NO: 81904 - DNA, 729 bp, Citrobacter koseri
atgtctattcgaaacgaacatgaaaaagaaattaataacaagccacttgcttttgaaagagttaatctgagtggtggtaaagcacatcgggtacataagcagcaagaagagattgctgatagaattgctcaagaggaatgggaaaagaaaacaagagtcccaagtgaaattatcactgtttatcctgaaccaactgagttaccggatgtatgcaagactgaagcattacttgagcttgagaagaaatattatccaattctgaaagcacaaagagttaaacttgactctgcttataacaaagttactcaaatgcaagcagctattgagcctaatgagtttgagattcaggacgaattatcacagagaccatttgtctattttgactacaatgacaatgatggctttggtactttccttgagcaaatcccagatgtgattaataatcttcctgagggttctagggtagctaagattgttaaagcttctcgtggtaatggttccttcatttacttgactgacaagactcaggaagaactaaatgaagttgctaaacagaatatcttaaaagcccgtaacaaggttattgatactgccaagcaagaacttgctaatcaacttaaagctatgaagcaactaatcagcgactatgaagcacagaagaaacaagcattacaggctgatattgagcagttagtgaagctttcagggaaatacgcaaaggctatttaa

SEQ ID NO: 81905 - DNA, 219 bp, Citrobacter koseri
atgtatgaagaccgtctggaaactatcaaggcagtttgtgaaaaacttaaaaaccaaccacgtaaaccaaaaacggtaaagagtaagcatcaacctgtcacctcaaacagcaaaacaaagattcgaaaaatcccttcgtggtgcattgaccgcattccggttggttcaagaattattcgtgaagatggtgattatcattgggtatcagttgtgggttag

SEQ ID NO: 81906 - DNA, 249 bp, Citrobacter koseri
atgaaaaaaaatagtaaaatcgaaaatcccccagaatcagtaacatatggttttgaataccagaaagaacatttttggcgatgccgttatacaccctcagaggtaacaagcttatattacaaaacattactcccactagatgtaaaaccggttagcattaaacctgagctaatctcaggaaccaatagttcctatactcttaacaattatgatttaaaatatgaagataaattttatattgagaattaa

SEQ ID NO: 81907 - DNA, 186 bp, Citrobacter koseri
atgatcctttccgggaaatacattaattctgaccgggctggcagtatctgctgccagtccacggttagactgaacgggaaaaaacaggagaataccttgatagtcatggacgaacctcccgtttcagcacatcatcaaaacgggttttccattccggaaacagctctgaaacaagatgatgcataa

SEQ ID NO: 81908 - DNA, 519 bp, Citrobacter koseri
atgagtgtgccacaaacaaaagctgagctgcttttagctattgataaaagttttagtaaattaattagttacctcaacgcaatcccgccagaaatgacttcagataactcaatagatggacacgccaaaggaacgaagataagtgttcatgaccttgtttcatatctgcttggatggaatgctcttgttgtaaagtggatcacttttgatgctaaaggtctgcctgtcgattttccggaaactggctataaatggaatcaacttggtcttcttgctcaaaaattttactcagattacagtgagttaagttatgaattgttagtagctgaacttcaggctgtaaaaaatgaagttgtgaaacttattgatgagcgtaccgatgatattttgtatggaagactatggtacacaaaatggacgatggggagaatgatctcatttaacacatcttcgccttacgccaacgctaatggaagattaagaaagtgggcaaaaaacaataagatcagtttaaagtaa

SEQ ID NO: 81909 - DNA, 528 bp, Citrobacter koseri
atgaaaaaaacttgcttacttatctcatgtttttctttatggcttttaaccggatgctctgtacaggaaatcactgagtggaatcagaaaatcagtgatctgggtcatcaggtcagtaataccatgaccggaggaaaacaggaacgaagtaaaaaagcgactgatatgacgattccggtggatattgataccgttgcatcccgactgcgacgctattatggttttacggatgtgaatactcagattgcaacacttcagagagggactgttaatgatcagtgggccgcagaagcaattgccgctgaagggcatacatttgaagcgacaccgggcagttattataaattcggacgtaggctgggcaacaataatccactggatgaagtgattctggaactggaaaagaatggtgcagggacacgggtatatgtggtttatcactcctcgttcagcgggcatttaacggaggagtatgtggatccgctatttaagcagataagggatgtcgcctccggcaaaatcagataa

SEQ ID NO: 81910 - DNA, 741 bp, Citrobacter koseri
atgactcattctgaagaattgtccgtaaccccattacataaaaaaatttaccggggggtgattgtgacgggcgtggtcgcctgtgctctggtggccggtatcccgcagtttatccacagtaatgttatcagttcacactcagaggctctgtcacaactcggacagcgattacaggcgattgagatgaagatggctgactctgtcacggatgaccggatgaatgcgcaactggacgtgctccgtcaggggctgacgacgctaaaacaggatgtggcatcacagcgcgacaccctcagaacggtgacagcacagctggcggtggccggcaaaccggatgagcagatcgccgtactgtctgacgggctggaaaaacggctggcacaactggaaacccgccaggcacagtgggcactggcgttacatcagttgcaggaacagcgtcagccggtacaaaaaacggtcaatcccccggttgtcagggcaaaacccgccgcgccggagacttcccgtcccggggcttctgcccgtccatcccggaccgtgccgtttcagttaaccgcgattgaacagcggggcggtcgtcttcttgccgcactggctcctgcggatattcgtcagctggagcaggtgcaattactgccggtaggcggacgttatcagggctgggaaatgaccgacattcagactgaccgtgtgacattacgttatcaggggcgcacggtgacgttgcgcctgccataa

SEQ ID NO: 81911 - DNA, 198 bp, Citrobacter koseri
atgttaccgccgatatggccttcagacgggggtgactccccggcactctggttggccctgctgatgtggtgcgtgttctttattgtgatgaggatcctggggaaaaaaaaccgtcctgccggccgtcatcgtcactgtcacgggaaaaaaacgcgtgagccggaaaaagaaaatccgtcagatcctccccggggttga

SEQ ID NO: 81912 - DNA, 759 bp, Citrobacter koseri
atggcaacagctgaagcccgtcaggaaaccccgcgccatccggcaaaagaacccggtttgccggcgaaactggtgtggcactggccctgggctgttatcggggtattactggcctcctgggtatgcagtctggtgattgaatgggtcgggattgcattcttctggccggacgaaggagcagaccacagccggcaggtgatgttaaccgagagcgggtatctgtcggaagggtttacccgcagtctgctgatgtccagtccggcgcagtggctggcgcataccattgagcaggcataccggtggttgtttgtggagtccggcctgatggacagctggcagaacgtatacccggtgtcatcggccaatgggaatgcggtcgcccgtgaactggataactggcggagcgggttggtgtctgaactgagggattatctgctggcgacagtgtatgtgacgctgacgttttttatccgggtgaccattctggtgctctctgtccctctgttcgtgctggttctgcttgtggctgtggtggaggggctgggacgacgtgatttgcggcgttatggcgccggatatgaatccagttttgtgtaccatcacgcaaaaaaatggataaagcccttatttattattccctgtttgttatatttatcctggccttcggccatcaatccgacgcttttactgttgcctgcggcagtgttactgggtatcgcagtcactgtcactacggcttcgtttaagaaatatttataa

SEQ ID NO: 81913 - DNA, 549 bp, Citrobacter koseri
atgaaaaaacttgcattatctgttgttgctgtcagtagtttgttaggaagtagttgtgcgctggcagataaccataccttatctctcggttatgcacaggcgaaagttcaggattttaaaaatatccggggtctgaatatgcaataccgttatgagtgggactctccggtcagtattgtcgggtcagctacttatatgaaaggggatgaagattatactgatgatgaatatgacagcggatataacggaaaaacagaactgaaatattattcattattggtgggacccgcttatcgcattaatgattatgtcagtttttatgctgttgccggatttgcacacacaaaagcagaagataaagtcacgtatctgacgcagtactcggaagaagcgagtcagagtaaaacatcttttgcttatggtgccggggttcagtttaatccgcttgaaaatatgtcggtggggataggctatgagggaacccgggcaaaatatggtgataatgtctccattaacggattcaatgttaccgttgggtatcgcttctga

SEQ ID NO: 81914 - DNA, 486 bp, Citrobacter koseri
gtgacgtattttgcgaagccgggggcgcaggtcgtgacgccggtgacgtttccgctggtgtttgtgttcagtgccggaaaagccggttgcaccggaagtcatttttgcctgacggtggacggtcatcaggtgtttgatgatgagcaacagcagctgattgccggcatgtcaccggcgacgatacagctggcgtggcaggttgccgccggtgaggcggccggggcggtgctgtctgtcggccgtcaccgggtggcgctgtgtgacaacgacattaccgtttaccggtttgccccggggaataaggcgtacccgcaggaccgtgactgggatcgtctgctgtacacggtgtttaaaggagagacgccggataaagccggctggcaatgcgtgcctttttcattatctgaactgaactgtcacggtgagtttgcccggctgaactgccggggggcggttctgaagggagcgggagggatcatactatga

SEQ ID NO: 81915 - DNA, 408 bp, Citrobacter koseri
atgagagataaaacaactgtttcccggggagaacactggggtgtaaaagcggctcataaaacaaaatggctaatcaaaaaattaaaggcattcgataagagctgcgtggcaagagccaaaagcaaaaatacgccgggttggctgggacatattccactggtatctataactcttgcggtcatcgcattactggcttatttcagtttgtacatcctatttgcttttggggcattagtgattttattttctgtaatagaacactttgatatttcttcagaaaatagcattaaatcctctgataacaatagtgaatggcaatctaatctcgttggcaatagtgacgactttagaaatggcaaccaaggttttggatattatatgaacggaataaatattgacgaagattaa

SEQ ID NO: 81916 - DNA, 327 bp, Citrobacter koseri
atgagatataaatcagggcaacgtgtgtgggcgtgggtaacgttttggatgtttccgttagtggtgagtccggggtttttatgtgctgtcggttatttcagctggccatatctgagtcagttcatggcccggaatgaacagaatctggctgaacggggaggttattacctgacagaatgtcagttgctggaaagaaacagagatacgggcttctggtcagggagggaaaatattctgcaatgcagggtgacccgggagcatgtgagtgtggatgcgtatgaaaaggcaatccgtgcctggcagcagaaacagacagagacaaaataa

SEQ ID NO: 81917 - DNA, 222 bp, Citrobacter koseri
gtgaagattttcctctttaatcgcccggcgggtttcggcctgatggtatgcgttacggcattttccgctgcgaccagggccgattactattttgatcccgcgctgctccaggggtccgcatacggtcatggtctggatctccagcgctttaatcatacccaagacagcgtgcctgcgggtgaatacgatacgtgctggatgtttatcttaataaccagttga

SEQ ID NO: 81918 - DNA, 783 bp, Citrobacter koseri
atgaaattggaatcatccttaaaacatttcagccctcaggggatgcacatcagcgacagcgtgaaaggcacatcaccggatcgtataaccggtactgatgtaatggccgctattggggccaccagcagccgcgcacgattcggcctggctgctttcttcggcaaggcggggatcagcaagacggatgagcaactggcggttcaggcgctggcgcgtcacgcgatggagacggctccgaagaacgtcaggaagggcgccggtagtgagttcggctggtgcatgcaggtgctggcgcagtttgcatttgctgagtattcccgttctgcggccaccagcgcgacatgtcacagttgcaacggcatcggacttattgaagggtgtgaagacgtggttaagtatccaggactctacaacatcgatggtgatgagattgttgcgccaaaaattgaacgtgaacaggttaagcgtctctgtaccgcctgtaacggtaaggggaaactggaagcccgctgtcgctgcggtggcaaaggggaggtgctcgatcgcaaggctacgaaagagcatggggcgccggtgttcaaaatctgtgagcgttgtggtggtgaagggtattcgagagtgtcttcggcgaccgtccaccgcgctatcctcaaacgtctaccggacctccatcagtcgtcgtggtcccgcaactggaagcaattctatgaaatgctggtggatatgttgcacaagggggagagacacgctgcgttagagtttgagaaggcgaccagttattga

SEQ ID NO: 81919 - DNA, 1083 bp, Citrobacter koseri
atggcgcgaacggtcaaaccgcctctccccaccgtggtgggaaaaaaatctctatctgattgccggatggcggctacgccttatccggcctacacgactacagaacaactctgtaggcccggtaagcgacagcgccaccgggcgattgaccgtaatccggccgacacaatcacagaacaactctgtaggcccggtaagcgacagcgccaccgggcaattggccgtaatccggccgacacaatcacagaacaaccctgtaggcccggtaagcggcagcgccaccgggcaattggccgtaatccggccgacacaatcacagaacaaccctgtaggcccggtaagcggcagcgccaccgggcaattggccgtaatccggccgacacaatcacagaacaaccctgtaggcccggtaagcggcagcgccaccgggcaattggccgtaatccggccgacacaatcacagaacaaccctgtaggcccggtaagcggcagcgccaccgggcaattggccgtaatccggccgacacaatcacagaacaaccctgtaggcccggtaagcggcagcgccaccgggcaattggccgtaatcaggccgacacaatcacagaacaaccctgtaggcccggtaagcgacagcgccaccgggcgattgaccgtaatccggccgacacaatcacagaacaaccttgtaggcccggtaagcggcagcgccaccgggcaattggccgtaatccggccgacacaatcacagaacaaccctgtaggcccggtaagcggcagcgccaccgggcaattggccgtaatcaggccgacacaatcacagaacaaccctgtaggcccggtaagcgacagcgccaccgggcgattgaccgtaatccggccgacacaatcacagaacaaccttgtaggcccggtaagcggcagcgccaccgggcgattggccagatagaggctctatgccgtccggcgagtaaattccttcactttaaagcccaacaccgccagcgcagcgaaataggcggcaatccccacaaccacaaccgccatcagtcgggccaggcgccacagcatcgtcccttctga

SEQ ID NO: 81920 - DNA, 195 bp, Citrobacter koseri
atgcctaacatcgataataaagggtggggttttcccgccctgtcgaaaaaagcgcatttctttaattcgggggaagccatatcactatgcggtaaatggatgttcaccggcatcaggattgatgaatggcatgaacaccctgagaactgcgctacctgcatgaagaaacgcaaaaagcaggaaggtgaaaaataa

SEQ ID NO: 81921 - DNA, 213 bp, Citrobacter koseri
atggcacaaggcaacgtagaaaatttcgcaatcattgtgttagtcaacggccgcacatcacaggttgaactaactacatcgcaaaaacgtttgttcgcaaagttaacactcggcgcgctcaacgatagtggccctctgaaacttatgccaatcgacgacatggtccagttacaagccgacgccgaagcattttcagacggtgacccgctatga

SEQ ID NO: 81922 - DNA, 132 bp, Citrobacter koseri; identical to SEQ ID NO: 76263

SEQ ID NO: 81923 - DNA, 210 bp, Citrobacter koseri
atggaggggagcggtagatgcatttatcacgtctatcgcaaggtgcttatgttataccagtgtagtttgattcattatttccgctgcactcgcaaaggggattacttcatagggtatagcagttctactggaaaggttgaaaatgtttccgcgatattttttcataagaaaatcaaaagatttcaatatgaaattaaagtctgtgggtaa

SEQ ID NO: 81924 - DNA, 738 bp, Citrobacter koseri
atgtttaaccgtatccgcgttgtcacaatgctgatgatggtgctgggggttttcgcactgctacagcttgtttccggtggtctgttgttttcgtcattacagcagaaccagcaaagttttgttatttcaaatgatttacgccagcagcagagcgaactgacctcgacatgggatctcatgctgcaaacgcgtattaacctgagccgttcttcggcccgcatgatgatggatgcctctaatcagcagagcagcgcgaaaaacgacctgctgaaaaacgccaaaagcacgctggagcaggcggcaacgcattatgctaacttcaaaaatatcaatccgctgccggagatggcggaagccagcggcaatgtggatgaaaaataccagcaataccatgcggcgctggcggaactggttcagttcctcgaaaacggcaacatggatgcctacttcgcgcagccaacccaggggatgcagaacgcacttggcgaagcgctgggcaaatacgctggcgtgagcgaaaaactgtacagcaaggcgtttgatgagagcgcgcgtgactaccattttgcccagtggcaattgggtattctggccgttgtcctggtgctgattctggttgtggtgtggtacggcattcgtcataccttgctgaatccgctggcgcgagtgattgcccatattcgtgatatcgccagcggcaacctgaccaatacgctgaccgtctctgggcgcaattga

SEQ ID NO: 81925 - DNA, 1602 bp, Citrobacter koseri
atgtttaatcgtattcgaatctcgaccacgctgtttttaatcttgatcctctgcggtgttttgcagattggcagtaatggcttgtccttttgggcatttcgcgatggttttcagagtctgaaccaggtcgagcagagtaatcagcaacgcgcagcattggcgcaaacacgcgccgttttattacaggccagtaccgcgctgaataaagccggaacgttaaccgcgctgagctatccgcccgaggatatcaaacagctgatgaccaccgcccgggaaagcctggcgcagtccggcgttgtgtttaaaggttttatggcgacagaggcgagtacggaagaggggaaagcgttacaggccgccacggaaaaaagttatacgcagtggtatagcgatctggagcatcaggccacctggcttgaaagcaaccagctgtcggattttctgaccgcgccggtacaggcatcgcaggacgcctttgacgccaacgtcactacctggcagcagaatatcaaccatgttctggagacggccagcgaacagggaaaagacaattatcaccgctcggcgatcatttttatcacgatggtgatcgtcgccgcgttgttaaccaccggggcgctgttctggtcacgcaaaatgattgttcagccgttggcgattatcggcagccattttgacagcattgcggacggaaacctggcgcggccgatcgccgtgtatgggcgcaacgagatttccgctattttcgccagcctgaaggccatgcagcaggcgctgcgcgaaacggtcagcgacgtgcggcagggcagtttagcgatgcataccggcatttcggaaatcgcgatgggcaataacgatctgtcgtcgcgtaccgaacagcaggcggcgtcgctggcgcaaaccgcagccagtatggagcagctaacggcaacggtcgggcagaatgccgataacgcccgtcaggcctccggtctggcgaaaagcgcggcggataccgcgaaaaaaggcggcgaccaggcttcgcgtatggccagcacaatgcaggatattgctgccagttcgcagaaaattggcgacatcatcggcgttatcgacagcattgcgtttcagaccaatattctggcgctgaatgcggcggtcgaagcggcgcgggccggtgagcaggggcgcggttttgccgttgtcgcaggcgaagtgcgtaacctggcgagccgcagcgcacaggccgccaaagagattaaaggattgattgaagagtccgtaaaccgtgtgcatcagggatcgcaattagtggacaccgccgcgaataccatgacggagatcgtcagttcggtaacccaggtgaacgacattatgggcgaaatcgcctcggcctccgatgaacagcgcagaggaattgagcaggtggcgcaagccgtcagccagatggatcaggtgacgcaacaaaacgccgcgcttgtcgaagaagccgccgccgccaccgatcagttagcgaaccaggcagaccatctctctgcccgtgtcgcggtatttaagcttgaagagcaagtcgtaacacaacaagagtcggcgccgccgcaagcggtacccgttgtatcctga

SEQ ID NO: 81926 - DNA, 330 bp, Citrobacter koseri
atggcgaaaaaaatattttatgtgatgaagatccgcaatttagctttcacatcagagaaatttcgtagtgtaaaatatccctgtaacatctcattgcaaaggaaggtaaatctttgccaaaaagacattgtctctgttatgtttagcttccgtttaattagtaaggagtatagggcagtagcccgccgtatggatcgtcaccgacgtcatttcactttgaggccgtatcaggcctgtctgtctggctcttttggccgcaaccttaattcgcatattgctttctcgcctgttcgctattccttaagcaggagcttgtcatggaattcttaa

SEQ ID NO: 81927 - DNA, 669 bp, Citrobacter koseri
ttgtttgaaaaatacgcgcaggagatagactggcgcctgctggccgcaatttcctatcaggagtcacactgggacccgctggccacctccccgacgggcgttcgcggtctgatgatgctcaccaaaaacaccgcgcaaagtctggggctgacggaccgtaccgatgcggaacaaagcatcagcggcggtgtgcgttatatccaggatatgatgggtaaagtgcctgaaaccgtgccggaagaggagcgtatctggtttgcgctcgccgcctataacatgggctatgcgcatatgcttgacgctcgtgcgttgacggtcaaaaccaggggcaacccggatagctgggccgatgtaaaacaacggctgccgctgctcagccagaaacaatattacagcaagctgacgtacggctatgcgcgcgggcatgaagcctacgcttatgtggaaaatattcggaagtatcagattagcctggtcggctatctgcaagaaaaagagaagcaggcggcagaagcgataaagctggcgcaggattacccggcagtgtctccggccgagtttgacacggagacatttcctttctcttctttcttatcgcagccgtcatcgaactacctgtcacactctccttctttgccgttttcactgaagaagaaagacgaaaactaa

SEQ ID NO: 81928 - DNA, 408 bp, Citrobacter koseri
atggcaagaaatcgggatctgccaacagtaagtaaattccgcactgactttccgcaattcgctgataccaccaaataccccgatgcgcaggtgcagttccgactgaacctcgccgatgtgctcatgagtgaaagcctctacggcgcgacgatgtttccttacgtcgtcgagttgtacgtggctcattacatggcgctgtttgctcaggatcagcggtcagctgcagcgggcggttcgggtggtaatgccagcggcgttcagtcgtccaaatccgtcgataaggtcagcgtcagctatgacaacagcatgacgttgaacccggatgcaggtttctggaataacacccgctacggcgcggagttttaccagttggcgacaatgtttggcgctggcggccgccagctatga

SEQ ID NO: 81929 - DNA, 360 bp, Citrobacter koseri
atgccaaaagaaaaactggtgtcggtcatcgtccataccccattcaagctgacgctcagctccggggctgtcgttgagtatacgaaggggcaccataacatgcctgaagagcatgctggccactggttcacccaggcgcatgcggagctttcagaccgcccggcggatgcggacagtgacgaactgaatcagctgaaaacgttgcttgctcagcgggatgaacaactgctggaacgccagctgactattgactcgctgaagcagcagattgaagacctgaacgctcagcttgcgacatcgctaatcggcggtgagggggaaaccaatggcaagaaatcgggatctgccaacagtaagtaa

SEQ ID NO: 81930 - DNA, 387 bp, Citrobacter koseri
atgtccgatccgatttccggtactgggctggctggcggtgtcctgacgggcgccagcgtctatggatttctgtccggaaccgattacggcgtggtgtttggcgcgtttgccggagctgtgttttacattgcaaccactgctgacctgagtgcagcgcgccgtctggcatattttctggtgtcgtatatcgcggggatcctttgttccgggctggtgggttcaaagctggctcaggttactggctacagtgataaaccactggatgccattggcgccgtaatcgtttctgctttagccgtcaaaatcctgacgttcctgaataatcaggatgtcggctcgctggtggcgctgataacgcgccggggaggttcaggtggtacaaaatga

SEQ ID NO: 81931 - DNA, 618 bp, Citrobacter koseri
atgaaccaatcacaatttcagcaggcggctggtatcagcgccgggctttctgcacgctggtttccgcacattgatgcggcaatgaaagagtttggaatcacagcagttaacgatcaggccatgttcattgcgcaagttgggcatgaatctgctggttttacctcgctagtcgaaagcttcaactactcggtagacgggctaaagaaaacctttggtaaacgcctgacaccgtatcagtgtgaaatgctggggcgagtagatggtaagcaggtggcccaccagccgcaaatagccaatctggtttatggtgaccgcatggggaataacagccagggtgatggctggaaatatcgtggtcgtggcctgcttcaaatcaccggccgcgagaactacgccaaatgcggtgcggcgctgaagcttgatctgatcagcacaccagagttgctgacacgggataagcatgccgcccgttctgctgcatggtatttcacattacgtggttgcatgatgtattcaggtgatgttgtccgtgtaacgcagatcattaacggtggccagaatggactggctgacagaaatagtcgttataacaaagcgcgggcggcgttgctggtatga

SEQ ID NO: 81932 - DNA, 255 bp, Citrobacter koseri
atgcacaagcacaagccgctaaatctgctgccactgctgctggcctgtctgccactgttagccagttgcgcaccgaagcaacaaagcttgccgcccgcctggacgccgcaaagcacacctcagatcttgccgctgccgtcagaagcaaaacagccggagccgacgccgcagtgctcgccgacatgctcggacgccttgcagaagaagctcgatattatgctgagcgatctgacgaaagctaccgggctggaatga

SEQ ID NO: 81933 - DNA, 342 bp, Citrobacter koseri
atgaaaatcagatatgtaattgcgttaacattatcattgctcgcttccggttgtgataacgcgccaaagtttgatggttcaagccaggaatctttgcgttactctggcgagaaggttgttgagtcactttctgatgcaaagaaagaagaacttaaatcggcaattctggatactttaagttattacgatactcaagccatcattaataacgatggcagttattcttccgataaaatgcgtttagtcatattgaatggaaagactgctgaacagattatttcagaggccgatagctatcgggaaaagaaagagcaactactaaaaaaacaccagctgaattaa

SEQ ID NO: 81934 - DNA, 1242 bp, Citrobacter koseri
gtgactgaattaccgcgccccgactatagccgcaatatgcggctgattggccatagcgaccagggcggtcgcccggacggcgtacagctgatggtacatcgcggttttgcctatattggccatatggtgtcgcaggggttttcgattgttgacgtgcgtgacccgaaaaacccacgggcggcgggctatgtgcctgcaccgccaggcacctggaacgtgcatttgcaggcgcatgacgatctgctgctggtgattaacgcccgcgatttgttcgccgatgcccgctttgccgatgaaaaggtctactacacgcggcaggtcggtgagacggtcagcgatgtgcaggaccggggctggagcgcagggctgcgcgtgtttgatatttccacgccggacaaaccgcgtgaaatcggttttctctccctgaatgggatcggcattcaccgcatctggtacgtcggcggacgctgggcctacgtctcggcgctgatcgacggtttcactgactacatcttcctgaccatcgatctggccgatccgcgtaagccagaggtggccgggcgctggtggttgccagggatgaatcaggcggcgggagagacgccagactggccggagggcaaacgctatgcgctgcatcacgcgattatcgctggcgataccgcctacggtagctggcgtgacggtggtctgacgctgctggacgtgcaagatcgcacgcagccgaaactgattagccatcgcaactggagcccgccgtttggcggcggcacacacactgcgctgccgctgccggaccgcgatctgctggtggtgctggacgaagcggtgctcgacaatcaggaagacggcgaaaagctgatctggctgtttgatatccgcgagccgtcgaatccggtgagcatcgccaccttcccgcagccggatgaagctgattacgtggcgaaaggggcgcacttcgggccgcataacctgcacgaaaaccgtcctggcagctttattagctcgacgctgattttcgccacttaccagaacgcaggggtgcgcgcttatgatattaccaatccttatcgtccggtagagaccggcgcgctggtgcctgcggcgcctgagaagatgatggatacgcggccaaatcgcccgcaggtgatccagtcctgcgatgtgtttgtcgatgcgcgggggattatctacagcacggattacaacggcgggttatcggtgattgagtatctggggtaa

SEQ ID NO: 81935 - DNA, 507 bp, Citrobacter koseri
atggctatctcacgcgataacagtcaaatcgtggacattatcggcgtcattgacagtattgcttttcagaccaacatcctggcgctgaatgcagcggtcgaagcggcccgcgccggtgaatccgggcgcggatttgcggtcgttgccgcagaggtgcgtaacctcgcccagcattctgcgtctgcggcaaaagagatcaagcagcttatcgagaaaaacgtcaccaacgtcaatacgggagtgcaaatggtcgagcagacggaaacacaccttaccggaatgatcgatgacgtgttgcagatgtctaccatgatcaaagagataagcctggcgacgcgggaacaaactttagcgctcgaacagatcaacaattcaatttcacgaattggttccatgacggacaacaatgcggaaatggtggaacaggtgacggatgccgcaggggatttaacgggacgcgcgtcacggctgcaacaggccgtacaggtttttggcgcctcacgatag

SEQ ID NO: 81936 - DNA, 297 bp, Citrobacter koseri; identical to SEQ ID NO: 76889

SEQ ID NO: 81937 - DNA, 228 bp, Citrobacter koseri
atgaaaaaggtcattgtttttttcaatgtcgaaccagcagaagtcgttgatgttatgcctggtattaccacgatactccgaaagtatccaaacggggaggacactcatttgcctgtaatgactgctggtttcccgtcgttgaccggcgatcatgaaactgtgcatgtagcatctgaccgtgagttatcatcggaagaaatccttgaagcagcaagaaagtttttgtag

SEQ ID NO: 81938 - DNA, 915 bp, Citrobacter koseri
atgatagatggtaaatcgaaattaaagaaaaaaagaccgcgaccttcaatacaaatcacatcagtatctgattttgttcgccatgttgttaattggagacttgatggccatcccccaacggccttcagaggccagagtcactatggatggtattccgtcccaaaacttttacgtgatgataatgatattcatagcagcgaaaactttgccgttagggatattgtttctttgcatccaagtgaatttgagtctgataagactatgtttgaccggctggtcagaatgcagcattttggtttacccactaggcttttggatgtaactactaaccctcttgtggctctttggtttgctacagaaatgagtaaacgtagtgaggagtatcatggtgcagttcaagcgtttttagtgcctaaagaccggcaacgttattatgatagtgatagagtgagttgtatggcaaatattgcaaatctcacaaagaaacagaaagaggaattagcctcttgtgccatgacgacttcatctgtcatcgaatttaataagcagcctgtcgtcgacaccttagtttttcacattgggatggaaaaggcacatttcagaaaggttgtaaatcctgatgatttgttacgccctgtttacgtcaaaccgaaaatgtctaacaagcgaataattgcacaggctggagcgtttatgctttggggggtgaatgttgatgcgtctacagctggtgaacgtctccgacaggatagaatttggatcgatgaagccgacaaagcccatattagagatgagctgaatcttttaggtataaacgagagaacactatttcctgaaattgataaatcagccaaatttataactgatttgtatgggagtagacgacggggtctgagcgcaagcggtttactttga

SEQ ID NO: 81939 - DNA, 927 bp, Citrobacter koseri
atggaacagcagagaacgacctctttaaggacaatccctttggacctcgaggtcaagcaagaagcggtaattaatggaattgagatgggggttcttgataatggaattccttatctgacgcaaagtggactagcaagtgtctgtggtgtccagcgattaagaatcaaggaaataactgatgaatgggcgcaatcagtagagcatggcattttccgaaaaggaagaatgaccttcattggtacataccttttaaacgaaggatttactgatgaaaaattatacattccaataatcaggaatggtgtcgagtaccatgcatatccagatgtcgtttgcatggcgatcctcgaatactatgcttttgaagcaaaacaagccgaaagcgaaacagctatcaggtcttaccgtgagcttgctaaaaaaggtcttaagacctttatctatgaagcgcttaagtaccaacctgaagatccatggcggcattaccatgatagggtttcattgcttaaagataagggttctgtacctgatggctacttcattatcttcaatgaaatcgcaggtatgatggtagatttgattaatgcgggcttggctataaaccaacatactgttccagatggtagtgtaggaatttgctgggccagacattggaaagatgctgatcttgcaaatgcctttggagaaagggtcgattgtgagcattactatccagatgatttccttcaagccaggtcaaatccacaaattatcaatgcttaccctgatgccgcgttgtcggaatttcgccgctggttcaagcatcaatacctgacaaccaagtttccgccttatattctgaagaaatctaatgtcttgcctggcggtaacgacgatgcgacccgcataattgaagcatttaagcagtctgccattgaaagtaaatga

SEQ ID NO: 81940 - DNA, 1029 bp, Citrobacter koseri
atgagcattgaagacgaatccccacaagctaagggtggaaaagctcgcgcagagaaaatgactgcggatgaacgaaaagaagttgcccagaacgcagccaacaagcgctggcaaaggatcaaaactaaccttccctctgcccaacttgaaggtgttctaaaaattaatgacactgaactggaggtagctgtactcaacaatgggaagcgaataatatctcaatcatcagtttttaaagcattagggcgaccaagtcgaggcgtgagagccacgcttgatggtgagatcatactacctgcttttatggatgccgccaaccttgttccatatattaatcaagatcttatggaggtgatcaaacgagaacgatttttagacaattcaggaactgagcttgagggctatgatgcttcaatacttcctctggtatgcgatgcttatttaaaagccagacaggatggtgcgctaaaagcaaaccaaatggatacagctcaaaaagcagaaatcttagttcgttcacttgcaaaagtcggtattatcgcccttgttgatgaagcgacaggctatcaagaaattcgccctaaggatgctttacaggcctatttagacaaaataatcagcaaggagctttctgcgtgggctaaaaaatttcctgacgagttttacgaaaatatttacaagctgaaaaattggccttggacgggtatgagcaagaaccggtttagcgtagttgctcattacactagggaccttgtttatgagcgtctcggcgactctattcttcaggaacttgagaaaaaaacgccaaaacagttgaatggccagcgtaaaaataaaatgcatcaatggcttacagatgatgtcggcaaccccatgctatcccaacacttgcattctttaattatggttcagcgattagccatcgccaatggatatgggtggaataggtttattaaaatggttgatcaagtcatgccgcgtaagggcggtacttttgaacttgaacttaacgatacttcacttgattaa

SEQ ID NO: 81941 - DNA, 282 bp, Citrobacter koseri
atgttcgcgcccatgctgtcatacacatggggcgtgaatgtcccctgtaatactctcagcacttttttgattactgatgataccggacttgataccaagaatgttttgtccatttgcacagcttacgtacaccgttacaagtattttctccagccacattctgttgatgtggtgctgcaatcggcgctggtggtgcgccgggaaactcccggcgttctcaacctgagaaaaaaccattttcacttccgctggtcaaacagcttcctcaacatccaccagtag

SEQ ID NO: 81942 - DNA, 273 bp, Citrobacter koseri
atgacaaacgataaaaaaataacaggccttggtgtgaatcatcctgcaaatggtccgcttacaaccgagcggctaagccatgttcgcgacgtgctacagcgccacatcaaatactcaaatggcggaggtatggattacatcatcgctgatgctgtgaaagcgattgatgagctgctggaagtgcggaatgcgaagcctgtggcgattcagttgcggatacctgttcaccgtgaacccaattacgcctcacgcagaccctcgcagggtgattaa

SEQ ID NO: 81943 - DNA, 204 bp, Citrobacter koseri
atgatggggggaggtacggggttactcgttacttgggattatttttcgttttttgaggtaggctgtagctacatcgtcaagttcttgcagacgctgctcgatcaactcaattatcttttctctttcatcatcagtaggcaaaagctcaaattgttcaagaagtttttgttcctgaacagactgaggctgtcgttttttttctga

SEQ ID NO: 81944 - DNA, 153 bp, Citrobacter koseri
atgataagcaaaaagtatacgctttgggctctcaacccgctgcttctcgccatgatggcgccagcagtcgctcaacaaaccgatgatgaaacgctcgtggtgtctgccaaccgcagcaatcgcaccgtagcggagatggcgcaaaccacctag

SEQ ID NO: 81945 - DNA, 705 bp, Citrobacter koseri
atgtttttcaatcataatttgtcacgtagcgatatatccgttcgatatgtcttccaaaaaatgttttcacctctcggggcgcttgtcgccgttgagtgcctgagccgctttgaccatatccctgtttctccagaagagttatttcgttatgccaatgcggacttacgggaaagtatctttatggaacaactggcgttaatagaaaaacataaagcgtggtttataaaaaacaatgtttctgccacgattaacgttgacgaccatatactcagcgtcctgctacggccagaagtgaaagcgaaagtcaaagcactgggctgcgttcactttgaactcacggaaaactctaacgaactgttgaataactctctcgccgcctggtgtgattcccacagctccttactctggctcgatgactttggcgctggctacgcgggaattaacgcgattcgtggctatcattttgactatgtcaaaatcgacagaaacttcttctggcatttaatgcagaaagagtctggtcggccattaatggatgcgctggtcactttcctttcccgtaaccaacataatgtgattattgaaggcgtcgaaagcgaagcgcataagaaatggttgcagggtatggagtggtttgccattcaggggcattactggaaagaagtcagtattgaacaactggtcaaagaagagattacggtttaa

SEQ ID NO: 81946 - DNA, 1005 bp, Citrobacter koseri
atgggctatcacattagccgcttatactcaccgattaactcaattcgttcaatagtacaggactttgccgaagcacattatactttcgatcttgccagcttttacaataacgtacttggacttccttatattgataaagagaatactgatcacgatttggtactacttgaaaatctacgtgattcatcaattgatattgataatattcctgatgatgtattgggtatcgtacttggtgtggatcagcaattagatcgccttgaggtaactactttaggagttagtgaaaagaatctttatgtactggatcatcgttcaattcatgctatcgattgtacaaagataaaatcacctgcatggagtaaattaactgcatttagtcaaacaactttcaaaactcagtcaggtaaaccacttaaagtgttgacgggatttgttgatagttctaacggtaatgcaacgaatacaatataccgttattgtggagcatcgcagatctttagacctatcaagggtgcagccagtactacaacgccactattcaaacaatcaagggctggtggtcatactctcattaacctaaacgttaacttaggtaaaagtaacatacgtcagctactaaacagggctgtatccgatagtgataattctaaggaagtacaactacatttctcacactcactaccagatgattactttatccaacttacaagtgaaaagagggttattaaggctggcaattggatgtgggttaagaaggtatcgagtcagagaaatgaagcattggattgtttaaattactctttgatttgctttcagtggtatctatctaaacttggtaatcagccattcagacaattgcgtgaatttaatgcaaaacaaaaacaaaaacaaaaacaaaaagcaaaagccataaatacagatataaataaggaagaatccagaccacttactaaacagcgtgtaataataccaagtagacgcagtgggggattttttaaataa

SEQ ID NO: 81947 - DNA, 1221 bp, Citrobacter koseri
atgaaggtcagcttctttttactgaagttcccactgtcgtcagagaccttcgtgctgaaccagatcaccgcgtttatcgatatggggtttgaggtggaaattgtcgcgttgcataaaggcgaccttgagaacacgcatgcggcgtatgacacctaccgcctgggtgaaaaaacgcactggctgctggatgagccggaaggcaagctggcgaagctgcgctatcgcgccattgcgtctttgcgtggcggtacgcgcgcatcgacctggaaggcgctgaatgtttcacgttacggtgatgaagcgcgcaacctgattctatccgcaatctgcgggctgacgccaaaaatgttccaggcggatgtttttatcgcccattttggcccggcgggtgtaacggcggcgaagttgcgggaacttggcgtgatcaaaggcaaaatctccaccgtttttcacggtattgatgtatcgcaccgcgatgtgctcaatcactacactcctgaatatcaacgcctgttccagcgtggcgatctcatgctgcccatcagtgaattatgggcgggacgccttaaaacaatggggtgcccgcccgagaaaattgcggtctcgcggatgggcgtcgatatgacgcgctttactcaccgtccggtaaaagcgccgggtacgccgctggagattatctccgtggcgcgattaaccgagaagaaaggactgcacgtagcgattgaggcctgccgacagctcaaagcgcagggggtggcgttccgttatcgcatcctgggcatggggccgtgggagagacgcctgcgcacattgattgagcagtaccagcttgatgatgtgattgaaatgcccggctttaagcccagccatgaagtgaaaaagatgctggatgacgcggatgtatttctgctgccgtctatcaccggtacggatggcgatatggaaggtattccggtggcgctgatggaagcgatggcagtcgggttgccggtggtttcaaccgttcacagcggaatccctgaactggtggatgccggtaagtcgggctggctggtgcctgaaaatgatgctgaggcgttggcggatcaactggcggcattcagtcgcatcgacaccgagtcgttgcggcctgtggtacaacgcgcccgtgaaaaagttgaggctgattttaatcagcaggtgattaatcaacagttagccagcctgctgcaaacgatgtaa

SEQ ID NO: 81948 - DNA, 495 bp, Citrobacter koseri
atgtctcacaaaataatggcgattaacgccggtagctcgtcgctaaaattccagttgctggcaatgccgcagggcgaaatgatctgccagggattaatcgaacgtatcggaatggcgaacgccagagtcacaatgaaaacatccgcgcaaaaatggcaggaaacggcccccatcgccgatcaccgcgaatccgttaccctgctgctggataagctcctcagtcatcacatcattaataccttacaggatattgacggcgtgggtcatcgcgtggcgcacggcggagagttctttaaggattcggcgcgcgtgaccgatgaaacgctcgctcaaattgagcgtcttgccgaactggccccgttgcataacccggttaacgcgctcggtattcatatttttcgccagttgttaccctcaacgccttctgtggccgtattcgataccgcctttcatcagacgctggacgagtcggcctatatttaccctctgccctag

SEQ ID NO: 81949 - DNA, 597 bp, Citrobacter koseri; identical to SEQ ID NO: 77427

SEQ ID NO: 81950 - DNA, 183 bp, Citrobacter koseri
atgttccacaacccttatcccttcattattcatcttaaggatttcatctatcaacgaggcatagaaactgaagtattcccgcatagaaaatgtgaacgatgctttttgtgcaaacccatagggactaacaggtcggataaacatgtccttgaggccaagagacaagtgagcctggacaattga

SEQ ID NO: 81951 - DNA, 336 bp, Citrobacter koseri
  misc_feature (189)..(198): n is a, c, g, or t
atgatcttgatacttactgacagtaacgatgttcatgcagatgtagtttcgatgaaactcggtgataactatttccgtttgaatttagatatagaagcccttaaagataccaaaattagctttgatggctctgaatggactatctcccagaacggaaaaacgatcaaaaattcatccgtaaaatgtgtnnnnnnnnnnggcgggtatctgttcaagtcaattctgaacaacagcaagatcaaagtaatggtttcagattatggcgatctgaatggaataaaagcctttttggtctatataatgcattatctgaaagttgctggtttaatcatgtaa

SEQ ID NO: 81952 - DNA, 570 bp, Citrobacter koseri
gtgcgattatttgctcaattaagctggtacttccgtcgggagtggcgtcgctatctcggcgccgtggccttgcttatcattatcgctgtccttcagctgatcccgcccaaagtggtcgggatcgttgtggatggcgtcactgcgcaacatttcactaccggtcaggtattgatgtgggtgggcacgatggccatgattgcggtaatcgtctatttgttgcgctatgtctggcgcgtgctgctgttcggcgcctcttatcaactggcggttgaactgcgtgaagattactaccgccagctcagtcgccagcacccggaattttatctgcgacaccgcaccggcgacttaatggcgcgcgcgactaacgacgtcgatcgtgtcgtctttgccgccggggaaggggtgctcacgctggtggattcgctggtgatgggctgcgccgtgctgatcgtgatgtcaacgcagctcagttggcaactgacgctgttcgcgctgctgcctatgccgattatggcgctgatgatcaagcgctacggcgaccgtctgcataaccgcttcaaactggcgtag

SEQ ID NO: 81953 - DNA, 453 bp, Citrobacter koseri
atgaaaactacagtgaaactgtcgttcatgatgttcgtggagtggtttatctggggcgcctggttcgtccccctatggctttggctgaacaaaagcggttttagcgccggagaaatcggctggtcttacgcatgtaccgcgattgccgccattctctcgccgattctcgtcggctcactgactgaccgctttttctccgcacaaaaagtgctggcggtgctgatgttcgcaggcgcagtcctgatgtatttcgccgcgcagcaaacaacattcgccgggttcttcccgctgctgctggcctactccttaacctatatgcccaacgaacagcatcgccttcgccaacgtgccggacgtcgagcgcgatttcccacgcattcgcgtgatgggcaccattggctggatcgcatccgggctggcgtgcggcttcttaccgcaaatgctgggctataa

SEQ ID NO: 81954 - DNA, 1017 bp, Citrobacter koseri
atgatagatattagttcagctaaagtagctaaagtcattgtccaccgtgttgggaataaactcagagacgaggggtttcatctatcacaggcagagtgtcaccgttcaagcacactcgacgaactactgataagagatttccttgctcctgtagtcagaaaaggtcaagagtacagcttgacacatgaatcagatgtttccttgaacactatcaatcattatgccaataacgttttcaaaacttctaatgcattcaaagaaagcagtgatgcgatagcaaaacacctatatagttgctcaggccatcagaatattggtggcggtgaattccttgtgattttatttgaaggtattaggtctgaagatcaatcactacaagcccttggtctatacaaagttgaaggaaaggatgattacctagatgttggggaagagaaaggagagatccaagtaattgagagggttggaatatctcttagtaaagtccagaaaggtgctgtcattatctctaatggcctgaaagtatttgctatcgataacttaggactaaaaacaaagtattggatagaaaattttcttaaagtagcaccaagccaaacacctcaaaaatccgcccaaatagctggtgcattacttaaagcgatatctaatagagttgaaacaccgagcaatgcactggaattcacgcatcaagtagaagaattacttaccgagacggatgctctatctctatccgacattcgcaaaatttcaaataactatttgaacaatgaagaagttgatgaattgctgaatggagctcgtcttaaatatggtgtttcacttgatgacagcgtaccaattgaaagcaaacgtcttgctaaatttgcaaaagaaattgtcacgaaggcacgaattgcagaaggagtcagtctactcgtttcaaatccagatgcaaagatccattcaatagacgtaaagcccgttaagaacggatatcgtgcggttgtagatattcaaatgaaggaggcaaagtaa

SEQ ID NO: 81955 - DNA, 945 bp, Citrobacter koseri
atggctggtgaaaagtcaaaaaaatcaggggaaattggggaagcattagccaaagctctcctaaaccgtattggttggcaacatttaattcacaatattgccatcagttgtaatactccaactcatctaaacgatgagggaaatgcacgtcaaagccacggagaagatcaagtctatctctacaataatcccttccatgatgatcgaactgattttgttcatgtctcaaataaaaacacccttggaagttatccaaaagaagggacattaaggtcacagtttaaaagccacataaaagaacttaatcaaactattgaatgtgcaaaatacaactccacgttacgagaaatcggtactaacttcaaagcaaagaggaacagatatcacgcaggtcttcttatttggttccataacgatcacgataatattgagaaaagtattttagcagaccttgccccagcccgtctggatttggatacagatattccattttatgtaattgacaatggcagagctactttccttttaagggtagttgatgacttacgtaaacgttcaactggtggagactatcagttcttttatcctcggattggtacatcgataactgttgatgaaatgcggacaggtaaagaacttccacttgaactcttagcttcagatataattccagctgtattgaataaagatggtattaaagagctaattatttatgcaaacgaaagtttcgattcaacctcttataaaaacttaatggcatatggattaagtttttcgtccgggctaatcactaatataaagattggcatgcctgattacaacccggcacgcgatgaagaagctgtacaaaaagctcgactcgcattccataatcgccctgaagaaattataccattttcatttaatcgctccattcttgatcttctccaagaggaatcccaatga

SEQ ID NO: 81956 - DNA, 129 bp, Citrobacter koseri
atgattaaccagcagcaagtccgggaggcacagcgcaaggcatccttcgcagtggctcacaacagcattaaagactgggaagaagcaaaacgtatttatgctgctgcaatcgggaggactcttcactga

SEQ ID NO: 81957 - DNA, 840 bp, Citrobacter koseri
atggagcaagagcaacaaagcaccgattcactatatgattttctctatgttgataatcagcgcgcgtcttcgcttcttgcgcaaatgcatgggcctggtgtcgtaacatcgattaaacatgtcacagctgaaattgataaatcagtttccgatgcagggtttgacttaaaaattgttaaatcaaaaattggtgttgaggaaactttaaaccagacacaagaaaaaagttttgatgcatcgtggacccttccaatcaatcttctcgataaacttgatgagtgcggcctgataagaagagatctcaatggagagcgcttaggtagtactgttctgtgtaagggaaaaatgagaatttttgatatctcagtttttcaaaaaagtgttccatttatagccaagatgatggaaatggagcagccaaaactgccacctaaagcaaaaaaatcaaactttaatgttgatgaccaattcatcgccccaggtgtaacttttgggatgatgaaagaggtgttaaacattgtcccaaacactttacaggttgatttcataaacgaagcgggacaaacaatttggatgactataaatagagactatctgacgataaatccagatgatatggttctaaagtatggttcgagactgccaggcgagtggtatgtaattggcttcattgatgctcttcctgaagccgaagaagatatgacggaaactttaccgtttgagccgaacccaatgaaagacggcattcatggcatgctgtctgggataagggacttggccgggagaagtggtaattcgtatggtatgacacctcttataattttcaggaatattcaataa

SEQ ID NO: 81958 - DNA, 180 bp, Citrobacter koseri
atgctcagaaaattattgaaacaagccaaacccaacgtccccaatgaggtcgaggatgaacttactcaattatttgatgaaatagatgaaaagcaacggaaaattgctgaaaagaaagaaagagctagagaggaatggcaaaatggagcaagagcaacaaagcaccgattcactatatga

SEQ ID NO: 81959 - DNA, 588 bp, Citrobacter koseri
atgaaaccaacggtagaaacaaaaatcattgagttagtgaagttagggcatgagttggcgaaaaaactgcattgtgctgagtctgccgcgctggtgagcgatctggctacgcagcttgatgtgcaactggtgcgtagcaatgctctgactgcaaagctgagcatgattgacggcctcatggatgctgctgaacaggccaataaacttgcgcaggaagcaacggaaaaactggtacaggagcgtgacgcgctggctgctgagaatgcggggctgaagtccgtggttgctgagaactggaacatgcgcgatgtgctgcgtcagttaatcgctggccgccccggcggagtttatttcaacaaatgggaaccactgatttttaaagttctcaatgcaaccccagcaaccacctctttcatggctgaagtgcgggccagcgctatcaaatctgcactagatgattgctctgagtatctcgatagggattgcatcatggagtctaacggtatcagttacgatgatgctgctcttcgggaaattggtgcaatggctcttcaggaagcgttacttcacaaaggagcagcccaatga

SEQ ID NO: 81960 - DNA, 420 bp, Citrobacter koseri
atggctaaatcatcagacgtacatgacctgttaactgcctaccagaaacaggcgcggaaagtaccagcaaagggcgtttacgcctcaaaacaacgccgcgatgaagtacaggcggcacacgtacgcaagataatgcgcaagcgtcggcggtcagtcggaaagtcaaataagctcggctgtcgctttactgcggaaatgcgtgtagcactgatttgcgatatgaacttctgggcgctggtatgccgctctatgccgccccgccagcgccggcagtaccaacattcgacgaatggttggaaattcgcggtaacaagccgcttggatgggtcaaagatgccatgcgtgaatcgtatgacgcctgccgcgccgcaatgcttaacggaggtaaatcgtgaaaactatccagttatcagagcgtga

SEQ ID NO: 81961 - DNA, 387 bp, Citrobacter koseri
atggacataaaactgtctgcggtttaccaaaatcaggccattagatactgcattgtcggcggtatgaacacagtagtcacagctgccgtgatactttcacttactgcctctggctttggcctgtatgtatctaatttttccggctatgttgtcgggatattgttcagttacgtccttaacacatattttactttctcgtcaaaaccatcattcagaaggttggttaagttcattgcatgttgtgcagcctgctacgtcatcaatctcatagccatgaagtcatctatggtgctgggttttgaaaatgaatatttaattcagctgacagggatgtttttctatacaatctctggctttttgattaataaactctgggtaatgaaataa

SEQ ID NO: 81962 - DNA, 1143 bp, Citrobacter koseri
atggctgctagaccacgttctcacaaaatttcaattccgaatctttattgcaagctggataagcggacgggcaagatttattggcaatataaacatcctgtttccggacgctttcacagcttgggtactgatgaagtagaagctaaaaaggttgcatccgaagcgaacacgatcattgcagaacaaaggactcggcaagtactaagcgttaacgaccgtcttgccagaatgaaaggcaggagaactgacattactgtcactgagtggattgataagtatattgaaattcaggacgaacggttaaaaaacagtgaactcagacctaattcctatcgacagaaagcaaaaccagtcaggttatttcgcgaacattgcggtatgcaatatttgaaagatatttccgcattggatatctctgagataacggatgcagttaaggctgaaggccataatcgtatggcgcaagttgttcgcatggttttgattgatgtattcaaagaagcgcaacataacggtcatgtccctccaggctataaccctgccctagcgaccaagcagccgagaaacagagtcactcgtcagcgtctttctctggaagagtggaaaactatttatgaagctgccgaaaagcaagaaccatacctccagtgtggaatgttgctcgcgataataacaggtcagcgtttgggcgatatctgtaacatgaagtttaaagacatatgggacgatatgctccatgtcgaacaggaaaaaacaggatcgcgcttagccataccattagacttgaaatgtgaagccctaggtttaactcttcgggacgttgtatctaaatgccgagatgcagtcatcagtaaatatcttgtgcacttcagacataccacctcacaagcgaaccgcggtgatcaggtttcaaccagttctttaacttcaacattcaaaaaagcacgtgacagaagtggactgaattgggataagggatccccacccacttttcacgaacagcgatcattatcagaacgtttgtacagagaacaaggtgtcgacacgcaaaaattactcggccataaatcaagaaaaatgacagacaaatataatgatgacagaggaaaagattgggtgatcgtcaacacaaaaacagggtga

SEQ ID NO: 81963 - DNA, 237 bp, Citrobacter koseri
atgtcacgaatgatccccctactcgactgggctactgaggagttcggagagcaagcaccaagtgagcgtatccttaaaaaatacgctaaaggcaaaatgatgatacctccagctgttaaagtgggtcgttactggatggtagaccgtaatgctcgatttgttggtacgcttgccgaaccgaaaattccggcaaacgccagtccaagattacaacggattattgcagatggctgctag

SEQ ID NO: 81964 - DNA, 558 bp, Citrobacter koseri
atgtttagttcactcacaagtcttaatagttcacaaaaaatggcaattttaacagtagtactaactcttgtaacttctgctttcggtttgtttagtaacttaaaaaactccgtaagcattaccgcccaagaaccacgagatgagataatcacaataaagaaaaattctgatttatataaatctattagtatgattgatcattatagaaatgagaccattgaattacagaatacacttacaagcctgaaaaatacatctacacttacacctgacaatctgaggattgaggagttggaatcgaaaataaaaaccttgcaaatgaagctagataacatgaacgctatcattgtttcatctcctgaaaaggcgttatcacttcccatgatgcgtaaggatatagattctctagataaatcaatgagtgtacttagtagttttacagagaatcagtttgagcggttttacaatctttttttatggatttgtgggacgttagttttaagcgttgctggtctaggattaagttttttcctgtcgaataaatccggcacaaaataa

SEQ ID NO: 81965 - DNA, 390 bp, Citrobacter koseri
atgttcgacttaattaagcacctcgttaaaaacgatattcagcacactgtttccgataacgggaatattaccgtcacccacaatctggatctggaagatgttagcggcgtcgacgccttgccggacaatctgaccgtgggcggctcgctctacctgcgcccggagaagatcacgaacgtttcttaccgtgaaaactgcggttactccagcagaaccatcttcgctatgtggaccggcaaagagtttcggatcgctgcgggttgcttcttcggttccattgagcagttcgaacaggcagtagatgacaagtatgacggcaacgcaaccgaaacatacaaaaaggccggtcgtgattgcgtggctgaactgactgaaaaactgaatccgtaa

SEQ ID NO: 81966 - DNA, 213 bp, Citrobacter koseri
atggcggcttatgacatcaagcttagcaatggttggattatcacggtcaattgtgcgaacagcgaaagcgaagctatcgaaagactgataactgaacgtgagcgcatgggttatgaacataccagtgtttccgaaattagacgcatgaaggagatctatggaaacggcggttatggactggttgctgtagaagggtttcatcaaatcacgtag

SEQ ID NO: 81967 - DNA, 837 bp, Citrobacter koseri
atgaatactccatgcctttacagcattgttcgatacgcaccttatgcggaaactgaagagttcgcaaacataggtgtggtcatgtgcgcgccaaaagaaaacttttttgacttccagataacaaagcgcaacgactctcgcgtaagaagctttttccatgacgactgtatttttccggtagcaaaagacactattcaaagagagttacagtttgctaaagcccaagctactcagattagtggtcaccatcaacttgctcaattttttagatatttcacagcaaaaaaagagtcaattttccaatttagctctgtcagggtgattctcagtcagaaccctaaatctgagatggatcgaatttacaataagtatgtaaaccactcagactatacaaaagaacgccgtgaagatgtactggctcgggaactaaaacgaagcattgacagaatcgatggccttaagaatgcgtttaagcttgaatccattgaaggttcatatgccaagttcaccatgcctttggttgcaaaaaaagataatgaaattcaatgtgctatcaaaccgctcgcatttactcaagttgagccggggaaaatgatggaacatagtgatacttgggtaatgagggttacccgtgcggccgaagagaacttgctagatattgacgatgtgctgttcactctagaagtacccgaatctcctacatctggccaacgaaaagtgattgatactattaaaaaaacaatggactctaagaaaataaatcacacagcagcatcaaatcataaagacacgattgaatttgcgaaaaaaatattggttcaaaatagatacgcgtaa

SEQ ID NO: 81968 - DNA, 750 bp, Citrobacter koseri
atggcaaatgtggacaacaacggtggagtcattcctagtgtcattgaaataatccgacgcatcaaggaagggtctactcaaccatttctgtgcaaatgcgatgatgggcaaatgtatgttttgaaatcaaaaccatcaatgcccccaaaaaaccttctggctgaatttattgctggttgtttggccaatgacatagggctatcactgcccgattttaagattgttttcgtcccggaggatctgattgaatattcaccagaacttcaacatgaaatcttccccggccttgcctttgcctcaagatacatagaaggtgcagtcgacctcacttttacccagtcacgaaatgcagcaatcataccaacagaacaacaaaaattaatatatgcatttgataaatgggtactaaatgctgatcgcactctcacagacaaaggaggaaacgtcaacattctttatgatgttggccatgataagtattatctaattgaccataacctatcatttgataaaaatgctgttccggaagattttacagtgcatgtttatggcccgggaaatcggaaatgggagtacgatttagttgatcgtcttgagtacagacaaaaggtagtggactgctactgtaagctcccagcaatcattcaagagatccctgaagaatggattgttgacgatgagtttttaccttttgtacaaaatactttagagaaaggcgatagcgatgaattttggagcgacatagcatga

SEQ ID NO: 81969 - DNA, 579 bp, Citrobacter koseri
atgattaatccttctgaagttggtaaatctggtgaaatggttcgtcttcgtactctggaaagcatctggatacagggtaagttgcgtatgtggggtcgctggtcttatatcggtggtggtagtggtgggaacatgtttaaccaacttctggcatccgggaaaatcaccaaaacggcaattaacgaagcactacgccggatgaagaaagctggtatcagcaaacctgaactggaagcgttcttcaaagagattcaggaagggaataataaaagcggcctggcgttctgtaccgatgaagaagcgctggccatcaatgctgtactcagcgagatccttgtgcagtcagggcataagaagttatacgctcttattgaagatcgatatatcaagcgccttagcaaaaaggcgatggccagagacttaaatgaaaaacatcctgaatggtgttttcgaacctgtgaaagccggatagatgtttggctaaaggtagcagaatcgatgctatacaagccaatgtgtgacgcattcggcacaaatagcgacagattctacttgaatagttgcgcggaaagtgcttaa

SEQ ID NO: 81970 - DNA, 573 bp, Citrobacter koseri
atgtggttgggaataccgtttctttatgttagggaaaggctggctgatacgattagtattgataaaataccaatgatttctgtagattcttcattttcatgggaaactataattggtgcttttattagtgggttggttccagcattaatttctttatatgttatccgtaaaaataatgaatctattcgatatcaacaaaatcaggaagataaaagacaatattcagctcatatgagagttgttatcagtgaatatgcataccaattgtcaaaggttaaagaaattcactctgagtgggtacttgcgggtagattgtttaaccaaataaaatcagttgagttagaagctagaatgtctgatgctctcttggagttggggagatttaaagcaagtctactaatctccataccagatgatgatgctggagtgttatttaaagattcaataaacaacatttcagaatctttaactgaaaaaataagtggctcattctccggttctagagtggaaaaaatgtggactgatgactatgattcatttatatccagtgcaaatgagtatttaaatagttag

SEQ ID NO: 81971 - DNA, 234 bp, Citrobacter koseri
atgtacagcagactgttaatcatcttcctgatgacgatgttgaccgcgagttgcgtgagaactttacccgcaaaacctgaagtaacggacacggcctgtgactgggtacgcgtcatctaccttactgagcatgatattgaagtaatggatcggtatacgaagaaagacattctggcgcacaacaaagcagtacagttcaactgcaaacagggagtaaaagaaattaagcactaa

SEQ ID NO: 81972 - DNA, 405 bp, Citrobacter koseri
atgacaattacagttaagaataataacaaaacagtgatccatagtgggaatgttaatattctgtacgataaagatcctgttgcagagtttgatgttgaaggacttcaaacaaaattaatttttgagttattgcctatcgactcagataagaaaacatcaattatttttggcggagaggaggattcggttttttttaagcactccataaagttaacgactgaaaaatcagcaattgaaagtggtatgctggtacctttagattttgcagtgcgagaaaatggtgaaagtttgtatattacatggagtgccaagttaaaacactcagtagacaaagaacgtattatccaattggcctatgccttctatgaagatgttagagaagatgagggcgataacaatgaataa

SEQ ID NO: 81973 - DNA, 375 bp, Citrobacter koseri
atgaataagattagacccactctcagtaaacaggggtataaagaaataaacataactaagagtcctgttgcctcagtaatgtcgaatagggaaataaaaaagtatacagaagttactacgggtgttattgctaaacaaataggtactggtgataatgctaaagattcatttgtatggatgactcttagagcgtgtttttggattgctggacttgcttctgcaggtgtgtttataatgagtgccgtgattatttcaaaatatggtgtttatgaggctaaggaatttataaattcgttgaaggatttatggtctatattcacacctattattacacttgctttaggctatgcttttggtaaacgagaaagcaagtga

SEQ ID NO: 81974 - DNA, 603 bp, Citrobacter koseri
atgcaagaggttatgactagaattgaattagggggtattctgggcaagtcttttggaaaggttcattgtcgattaataaaaacaacagcagaatctattaacgccctaacaaaaacgattaatggattcgaaaaatatctaaatactagtcgaatgcgtggacttacatatgctgtattcagagggaagaaaaatataggaaaagatgatctcggatttcccgttactggtgaagttatccgtatagttcctgtcgttataggaagcaaaaaagcagggttacttcaaacaattttaggtgcggtacttgtcgttgttggggctttaggggcgacaattggacaagcatggggaggtgctgcctgggggccagctgccatgaaaattggtgcagcaatgatgcttgggggagttgtgcagatgctttctccgcaaccagccgggctggcaagcaaacaagatactgataaccgcgcatcatatgctttcggtggtgtaacgaatacaactgcccagggctaccccgttcctctgctttacggtaagcgtcgtattggcggcgccattatctcagcaggtatctacgtagaagatcagcagtaa

SEQ ID NO: 81975 - DNA, 3177 bp, Citrobacter koseri
atggtaactgcaaccgcgattaaaggccgcaagggcggcagttcaaaaacccgcaccccgacagagcaaccggacgatctacagtctgttgcaaaggcaaaaatacttatcgctctcggtgaaggagagtttgccgggcaacttaccgggaaagatatatatctggatggcacggcgcttgagaatgcagacggttcacagaactttagcggtgttgtatgggaattccgctcaggcacccaggcgcaaaaatacattcagggtattcccggtacagaaaacgaaattagtgttggcaccgaagtttcaagcgcgaccgcctggacccgcacgtttaccaacacccagctttcggctgttcgcctacgtcttaagtggccttcgctttttaaacaggaggacgacggtgatctggttggttattcgatcaactatgcgattgacctacagactgacggcggcgcatggcagacggtgctaaacactagcgtgaccgggaagaccacttctggttatgaacgcagccatcgtatcgatctcccgcaggcgggcagtacctggacaatccgactacgcaaaatcaccgctgatgcaaacagcgcgaagattggcgacacgatgacgctacagagcttcaccgaagtgattgatgccaagttgcgttaccccaacacggcgctgctgtatatcgagtttgattcaagccagttcaacggtgccattccgcaaatttcctgtgaacccagaggccgagttatccgggtcccggataactacgatcctgaaacacgcacatataacggaacatggacgggtgcgtttaagtgggcatggactgacaacccggcgtggattttttacgatcttgttgtgacagaacgctttgggctgggcaaccggttgacggcagccaacatagataagtggacgctgtaccaggttgcgcagtattgcgatcagcctgttcccgacggcaagggcggaaatggaaccgagccgcgttatatctgcaatgtctacgttcaggacagaaatgaggcctataccgttctgcgtgactttgcagcaatattccgcggtatgacttactggggaggtgatcaaatcgtcgcgctggctgatatgcctcgtgatattgactacgtctacacccgtgcgaatgtcattaatggccggttcacatattcaagcagctcaacgaaaacgcgttacacgacggcgctcgtgtcatggtcagacccagcgaatgcctatgctgacgcaatggagccggtattcgagcgagcgctggtggcgcgttatggcttcaaccagcttgaaatgacagctatcggttgcaccaggcaatcagaggcaaaccgtaaggggcgctggggtattctcaccaacaataaagatcgcgtcgtatcctttgatgtcggcctggacggcaacatccctcagccgggttatgttatcgctgtagctgatgaaaatctctcagggaaagtcacaggcggtcgcatcagtgctgttaacggcagggtgataacgctggatcgtgcagcagacgctgtgccgggtcatcgtcttatcctgaaccttccttccggcgcgtcgcagagccgcacgatacaggcggtaaatggcagggtgataacggtcacaacggcatacagcgaaataccgcagatagagtctgtctgggctgtggaatccgatcagctctacgtgcagcagtaccgcgttgtcagtgtgtccgacaacaatgacggtactttttcaataaccggtgcgtggcacgatccagataaatatgcccgtatcgataccggagccatcattgaccagcggccagtaagcgttatccctccgggtaaccagtctccgccagccaacatcgtgatcagctcattctctgttgttcagcagaatatcagcgttgaaaccatgcgtgtgagctgggatcaggcgcagaacgccatttcctatgaagcgcagtggcgccgcaacgacgggaactgggttaacgtgccgcgcacctccaccacgtcattcgacgtcccggggatttatgccgggcgctacctggtgcgcgtgcgtgccatcaacgccgcagaaatctcgtccggctggggatattcagaagagaaaacgttaacgggcaaggtagggaatccacctaagcctgttgggtttacggcaacaggcattaactggggtatccgcctgaactggggttttccggccaacaccgcggacacgctcaaaacggaaatccagtacacggcgaatagcgatttttccgatccacttctgctgtctgatgtgccgtatccgtcagctgaatatactcagttggggctgaaggcggggcaggaattctggtaccgcgcgcaactggtggataagacagggaacgaatctggctataccgagtggataagggggatgtctaacgataacgccgatgactatctcggagatattgcggatgacttcctcacctctgaagatggtgctcgcctgacctctgacattgataccaatctggaaggcatcatccagaacgcgctggccaaccacggcaccgtggagcatcaatacgcgcaatacggcgaggtcagggccgacattcttgttgtgaagagcaccattgccgacgtgaatcaggcgatggcggaaatgtccacgcaggtgcaggcgcagtttaacaatgtgaccgcagcgctggaagataagcttacggcggttgtggacgccaccggcgcatcagctatctacacgctcaaaacgggtgtgcgcattaatggcgtgatgtacaacgccgggatgagcattgccgttctggcgcaggcagggcagccggtggtaacgagagtcgggtttaatgctaaccagttcgttctgatgagcggcagtggggatacacagtattcaccgtttgctgtcgtaaatggtcaggtgtttatcagtgatgctttcatccagtatggggccattactctggcgaaaattggcgaattaagatcggccaattacgtagcgggacagacagggacgatcatgaaatcagacggtacgtttgaggtgaatggtgcagtatctggacaagggaggttaaccattacaaatatcagaattgttcaatatgactctcagggcaggccattggcagttatgggggtacctttataa

SEQ ID NO: 81976 - DNA, 1914 bp, Citrobacter koseri
atgtctggtaacgcacctgtcaatccaggcgatacactcatcgtcacaccaccaaaagaaaaccccggcacggggggcacgctgctcgggctggctcagagtgtcggtattaacctgacttttgatcctgaccaccttaatgaacgattacaggaagaaatgcagaaatcagctcaacagctgaaagtgcagatagctaaccttatggagcaggctaaagctctggcagacaaagcggaacaggaatggatagccactcatccggctgagtatgccaaaacgctttataaacagtcagtggatgccgtaacacaggcccgggcagcgcttgccagcagggaaaaggaacttaataccctgaaaaacagcaaagagtataagactcttatttctccggagaaacatcattacagccaggcattttccggggtatttggccccagaacatttgaagtggataaccggaaagatctggatattttgttagggaaagatggtgataaagcccttgctgttttaattatggcccgggaagactggttttcaggaataactgatgtggcactggctaacaaagtcaatgcgagcatggggtcattatataaagccacggagaaagccagaaataacctgattaacgcaaagaaccttgtagcggaaaaagaacgtcaggtgaaagcggcacgggataatatcccgcgaaaagaagccgaaagacaggcggcggaaaaacggctgaatgagcttaataaaagtgtgaaggagttaaacaatacgctgcagaaagcagaagctgaggtcagagtcagagaggagttgtttgcaaaagccggagtaaaaccagcaccgacatacacagcgcaaatggtgacaggtgcgaataatgccatgaaagcacccggtgcaatggtgctgaaccagagtccgggtactgtgcagatggcgctggcaggtgcagggagcctgacgcttaccggtgcagcagaaaaaagcattctgaacaccatactgaatagcgtgaagactctgggtaaagccgtccccggcgggtatgtgatttctgccatctttcacagcccgaaggccggtgaaggcagcgataaagtaccgggacgtgacctggaagccatgtttgcgcttaacgcgcaacatatcgcgagtcagggtgtgaaaattgaaccgggtgtgaaaagcgtgaacctgccggtgcgcggacaactggtcatcagtaacgggaaactggcgatgcagttgctgaaaacaggaaacagcagcatcccggcggcagtaccggtgctgaatgcggtgcgtgatgcagccaccgggctggataaaatcacggtaccggcagtagcgggtgcgccagcacgaaccattctggtgaatccggcaccagctccgtctaaaccatcaaataccggtaatcagaaacctgtaccagtgacgccagttcataccggaacagagataaaaccagtggaaacgctggtgacgacgaccactccggctgtggatgctggcggactgcgggactttatctactggcgaccggatgcagcaggtactggcgtggaaccggtctatgttatgctgaatgacccgctggattcggggcgatttactcgtaagcaactggacaggaaattcaaacatgctgctgattttggtgttagcgacaccaagaaaaatagtgaaaccttgaccaaattcagagatgcgattgaagctcatcttactgataacgcgacggtagtaaaagggacatatcgcagagagaagggttcaaaagtatattttaatcccagaactatgaatgtcgttattcttaaggcaaacggggaatggttgtcaggctggaaaataaaccctgatgcggataatggaagaatttatttagaaacgggggatttatga

SEQ ID NO: 81977 - DNA, 783 bp, Citrobacter koseri
atggcaagtgtttttcttagtcataattcggctgacaagccatttgtgcgacggctcgcacaatcattgcaatcaaaggggcatgtagtatggctcgatgaggctgaaattaatataggtgattctctgatcgagaaaatcagagaaggtctagataaagttgactatgttgctgtggtgctatctcaaaactcgatagctagcacatgggttcaacgagaattagatataagctctaaccgagaaatcgcagagaaaagagtcattcttctaccgttaatgcttcagcaagttgaattgcctggtttcctcttcgggaaaagatacgctgactttacctctgatgaaatctacgaccattctcttgacgaagtgttaaaagtattaggtccagtagataaaaaaattagcgaatcggatcaagagattgatgccttgcgcgcagaacttgaacaggcccgagaccgtcttgcaggactagctcgtttacaggaacatcaaagcagctctttcacttctgactggacacctgagttaagggaagcagttgagaaaagcaatcaaaaatacccgcagcataaagtcatcaatgattcatatgcattcaacgctatagaaaacactacgcctgtaaccttggattatttgctatgggctattgccaaaactatgagaacgggagctcatcctttagatgctttaatggcaatggggaatacccatcataaagctgaaacgatgattagtgcttatatggcttatcttggtaaccctaacgactga

SEQ ID NO: 81978 - DNA, 1029 bp, Citrobacter koseri
atgttattacacagaagcaacatagatatatgtcaatctttaaagatcggtagagacaatgacgggcacaatctaaaaataagaattgataagttaactgtagttagtagttttctttctgaagaggaaagaaaggaagtgtatagtaaacttgaaaaaatgaatcaacggagtgaaaggatatatcgagctgaatacattaaaaacaaaaatgaaaaaccttaccgcaaatcactaaatatatacagtagaaagaagaactctccagttctattgcacattgattatgttccgaagcatcctaatacaggagggctacgtttggattttaatcctcaacatatgacgaaagtaaaaatagatgaattagtatcatggataaatggcagcttaggtgagatattttatcggctacttattcgagcatgggttacaagaattgatgtagctcttgatgtatataactgcaagctagatgattacctatggggattaaaaaacgcagggaagagcacgtattacgatactgaaaatggattacctggggttagaataggcagcaatcgctctcttctacatattcattgttatgaaaaagttaatgcacgccgtgacagaaaactcattctgaagggtcgtgccaaacatattaatatcaatctggatgagcataagcgcttcttgcgcatcgaagctcgatacaagccaggcgctaaaccaaccagtaagaaacaggatgccttgatgctgtcccaactcctggagatgagaaacccattcaaacggctgcaagtctattctaacggcttaggaaaggagttgcttatgagagggtgtcttactaccctcccaaaagaacccagcgttatagcgctgaaagccagtctcagacaacagctagggcgttcacgcttgactgccttacttgctagacatagaacagtgcttttcgatgaacgtgagatctggaatctgtggccacgctgcgttgagcaattaagcagcatatacaacatagcatctgcttag

SEQ ID NO: 81979 - DNA, 570 bp, Citrobacter koseri
atggttacgaaaaatgaaattcgagaagaagcagaattggcttatcgacgtgagaagtacattgaatatcaaaacagacgcaaggaaaaattggataagcttgggggtaaaaagttaacaataagacttgatgatgttcactatgataagctaatcgaattatgtgagactctaggttatcgtcgcccagagaaaggaaaatataaccttatagaaacatactcgggagttatgaagtatctattgagaatttcagatactataacaaagtacataccgaaaacagaaggttctcaggaattactgcacttacatctactcgttagccatttgaagtatggactaaatttaagtgatgaagagatattgaaagaattaaaaaataaagggattaaaacaccgctatcatcgctcgaaaatacagtgaaatcagtgaagcgtgatgaacttagatctttagataacaaaactattagacgtgatatatacaagtttgttgaggatcttttaaaccaggaaaaggtcgttcaggagatgatggaattagataaaaatgcccctcattgctga

SEQ ID NO: 81980 - DNA, 378 bp, Citrobacter koseri
atggcccagttaccctcagatagtgcagacaaacaggtaggccaacgcattcaaatgcgtcgtaaagagctggggatgactgctcagcacttagcggagcttgttgatatatcccaccaacagctttctcgttatgaacgtggaacgaacaagatcaacgtagcccacctcgtgaacatcgcggtcaagctcaacacgccgattagctggtttttcattgattgcttctcgacgtttgaaaatgacgtccagaaacaacaggatttcgctcctgtaaaagatgcagacttgaagagtcgacttgataatatatggcctcgcttaacacatgagcaaaggcgcatattgattatgtttcttgataaatacaccaaatag

SEQ ID NO: 81981 - DNA, 564 bp, Citrobacter koseri
atgaaaaaacaggaagttttgattattgaatcacgtagcgatcaggatatttatgatggcagaggtgaaggcgaaacattaaagcgtatacttcatttgcagggtgtcaatgccaagagcattgaggctattaatgagaaaatgcttattaaagcattaaaagtcgctcaaagagaaaatataaaatatgttcacattagtgcgcatggatatgataaaggctttgctctaacagatgatgctattattacatggcgagatttagatcggattgcatggccgatattaagagggaaatgtatttgtttctcaagttgctctgttggtaatggcgcagaagaattatttaccctacacaaatcattttgtaatgcgattattgctccaacaagagatattagctggggggaggcattggtggcatattctgcattttaccatagaacacaactacgcggaaaatcatctgtccagaatgtaaaagtaatgaatcatattgttggcgctgggacgttcaggattattgagtctccctatatgtcccatacatatacaattggttga

SEQ ID NO: 81982 - DNA, 228 bp, Citrobacter koseri
atgatccgctgccatcttgctcggctcatgggcgaacataagatgcgaatagccgatgttgtcagggaaactggcctgagtcgcaacactatcactttgctttataaagagacggctcagaaggttgacctggatacattagaaaggctttgcgtgctttttgactgtgaaatacacgatttactgcaaaaggttcctgcttcgcagaatcgttcagagaaaaattaa

SEQ ID NO: 81983 - DNA, 1500 bp, Citrobacter koseri
atgacactgattaacctaaaagatctcgaggcccatctttggcatgcagcccatatcatcactgggcctattgatgcgtcagattacaaaacgtacattttcccaatcctgttcttcaagcgcatttgtgacgtatatgacgaagaatttgccgatgcgatggagagcgttggggatgcagagcttgccaagggtaagatgtttcaccgcattcagatacctgaaaattgccactggcgcgatgttttcgcagagaccaaagacattggccaggccttaaaagactccttccgtggtatagaactggcaaaccctaaactgcatggcatttttggcgatgccagttggaccaataaagaacgcctttcagatgagttactggctacgctacttaatcacttcaataaggtgaatctgggtgttgcaagtgtccgtgatgatgtcatgggccgtgcatatgagtatctaatcaaacgttttgcagacaaagctaacaaaaaagctggtgagttctacacccctcgtacaatagttcgtttgatggttaacattctcgatcccaaagcgggtgagagcgtttacgatcctgcctgtggcacaggtggtatgttgctcgagactatccaccatgtaaaagaaaacggtggcgatccgcgcttgctaaaaatcaaaggtcaggaaaaaaacctgactaccgaagccatcgcgcgaatgaacctgttcctgcacggtcaggaggatttcgatattgttcgcggggatacgctccgtgaacctaagtttttacaaagcgatcgtttagaaaccttcgactgcgttgttgccaacccaccatttagcttgaaggaatggggatacgatctgtggtcgaacgatccctatggccgtaagcaatatggtctggcgcctaaaacaaatggtgattttgcctgggtgcagcatatgtttgcttcacttaacggcaatggacgtatggctgtcgtgttacctcatggagtgctgtttcgtggcggcgcagagggagtaatacgaaccaaattgctgaaagaaaatcgcatcttggcgattattggtgtcgcttccaacctgttctatgggactggtattcctgcgtgtattttggtgctgcgcaaatcacggccagcaacgcataaagatcatgtattgatcatcaatgctgaagaaatctataccaaggggcgtgcgcagaatacgctgtccaataaacaggctgatgacatataccaaatctaccatgaccaggctgaacaagggctagatgcaaaagaaatcgaaggcgttgcacgctgggtacctctgaaggagattgaagaaaatgacttcaatcttaatattgctcgttatgtgcaaaagccactcgaagaagaaaccatcactgtggaagcggcgctcaaagattttcaacggaagctggctgagctggaaaaagcagaagaggagctggaagccctgcttatcaaagaagggttcgaggtatga

SEQ ID NO: 81984 - DNA, 1491 bp, Citrobacter koseri
atgagtaataaaaagctggaagagctgctctggggagccgccgaatttcttcgtggccaaattgacgcatcagactacaagcagtatgtcttcccgttgctgttttacaaacgcctgtcagatgtctatctggaagaatataacgaggcgatggagctccatgaaggcgatgccgaatatgccgccatgccgatgtttcaccgtttcagcattcctgttgaagctagttgggaaaaggtccgcaataccagtaaaaacattggtgaagcgatccagaatgcacttcgactaattgaagccaataacccgcgtttacatggcgtcttcggtgatgcgcagtggaccaataaagagcggttgcccgatcatctgttggctgatctgattgaacatttcagtaaaataccgctcggtattaaatcggttgcccaggatgatcttggtgaagcctatgaataccttattaaaaagttcgctgatgattccggtcatacggcagcagagttctataccaaccgaactgtcgtgcatttaatgacgcgcattatgggcttaaaaccgggtgaaaccgcctatgatccgacgtgcggcactggcgggatgttgctaaatgcagtgatggatcttcgtgcaagaggggaagagtggcgctctgtgcacctttatggccaggaagtgaacctgctgacttccgctatcgcccgtatgaatatgtttctgcacgatattgaagagtttgatgtgctgcgtggtgatactttgtctgagccaaagtttatagaaaacgatcggctcaagcagtttgatgtgatttttgctaacccgccgtactccatcaaaaagtggaatcgtgataagtttgccgccgatccgtatggtcgaaatctttatggggtaccaccgcagggctgcgctgattatgcgttttacacacatattatcaaaagcctgaagccagataccggtcgcgctgccatgctctggccacacggtgttctgttccgtgattctgagcaggccattcgtaaacaggtgattgaatcggacatcattgaagcggtgattgggttagggccgaacctgttttacaactcgccaatggaatcttgtgtagttgtgcttaattgcaataagccagctgagcgcaaaaacaaagttttatttatcaacggagttgagcatgttacccgtgaacgagcccatagccgtttatctgatgatgacttagcggtgctatgtgaagcttatcttaatcctgagaagcaagataatatcactgcgttggtggatatcgacgttattaaagagaatctctataacttgtcgattccactgtatgtgcaagcacaaagtaacggcgatgcacataatattgaacatgcaattgaggcgtggaaagtaagtcgcactcaactaaaaatacaaactaataaattattccaaagccttgcagagcttggatataacattgaaagcaaggtagatcaataa

SEQ ID NO: 81985 - DNA, 1113 bp, Citrobacter koseri
atggtgaagtttggcgatatcgctaaacatatatctaaacgagtggaaccgagcgagacagaccttgaaatttatgtcgggttggagcatttagaccctgacagcctgaaaatcaaacgctatggcacaccaagcgacgtcgagggacaaaagctattggtgaagaaaggtcagattatttttggcaagcgccgtgcttatcaacgtaaggttgctgtagctgattgggattgtatctgttcggctcatgcgatggtactggaagctaattcaaaagctataattcctgaatttctgccgttctttatacagtcagatgaatttatgagtagggctattgctatttcagaagggtcgttatcaccaacaattaaatggaaggttctggagaaacagttatttcccctcccgcctttacagcaacaggttgcactcgtagagttattgttagcgactgataaaattattgattcgtcctttgctgctgaacagtctgctaaatttttattgagtaactttattcttcatgtaccaaacgggaatgtttataaacttagtgagttaggcacatggaaaggaggaggaaccccatcaaaacagaacaataatttttgggggaatggaactattaactggatttcaccaaaagatatgttttccggaataatatgcaatagtgaagatttgataacaacagaggctatccaaaaatcctccactaatttaattaagaaagagtcaatcctgcttgttactagaagtggtatcctgagacatagtctcccgattggtattcttgagaaagattcagcaattaatcaggacataaaagcccttaccgttaacaaaaaaattgtgcggccattctatctttgggccatgttagtagctcgttcgaatacaatcttaaaaaactgtatgaaagttggtactacagtagaaagcattgactttacatcgttgaaaaattttgaaataaatatccacccttatgaagagcaggaaactatcgaatctataacaaaagttttattggagtgtataactttaattcaacaaaaagtagttgaagcaaacagtcttaagaaatcattgctcagcagaggtttttaa

SEQ ID NO: 81986 - DNA, 3063 bp, Citrobacter koseri
atgtttaacgaacaaaccgtcacagaaaatggaattatcgaccgtttaaaaggtttaagcgggatcaagtggacatactgccacggcgaaaacctgcctaaacaagcgcaggatatcttcgttgatgtgtgggtaaaagacgcgctttgttcgttaaaccctgatatcggcagacagcctgattatgccgatgaggtcatctacaaattgcggggagtggttttagaagcccgacataccggtttggtaaaggccaatgaaaacttccaggaatggttgatggctgagaaaaccttgccttttggcgagaatggcgaccatatcactatcaatctgattgattttgacaatatagaaaataaccactttgtggtggcacagcaggttcactatatcgcggccactgaagtctattttgatattgtcctgtatgtgaacggtataccactggtggtgggcgaagttaaaaccgcaacgcgccccagcgtgacctggcaagacggagccgccgacttcatgggcggcaaaaagtactattggaaaaatgttgaatctttctttgtacctaacttgctgtgttttgccagcgaaggtaaaacctttgcctatggcgcaattaatgcccgagttaaagactgggggccctggcataatactgagcttcgtgatgagattctgccgggattagcatcagtactcaacagctgcgagagtttgtttaatccacagaccttattgcagctactggaatctttcgcattattttcaaccgtcaaaaggggcaaaaatactccacctaaacgcgttaaaatcctgccgcgttatccgcaatttgaagcagcaaaacaaattgttgagcgtgttcgcagaggctatccaaaaaaaggtctgatttggcattttcagggatcgggtaaatccttgttgatgctttacgccgctaaaatgctgcgtgccgacaatgcgttaaaaaatccaacggtacttatcgttgtggaccgacgagatctggacagccaaattaacgagacctttggtggagccgacgttaagaatctcattaaagtgcaaagctgcaaaaagttgggcgaatacattgagcaagacagccgtggtattttgatcaccaccatctttaaatttaaagatatcgaaattgacgatagcaaccccaatggcttgaacaaccgtgacaacatcattgtgttggttgacgaagcccaccgtacccaggaaggtgggttaggcgagaaaatgcgctgggcgttgcccaatgcgcacttctatggcctgacgggtactccgatttctggcattgatcgtaatacatttaagttgttcggtgccgaagaagatcctggccgctatatgagccgctatagctataagcagtcgatccgtgacggcgcgactaacccggtgaagttcgaacctcggttggctgaactccgagtggatcgtgatgccatcaatgaagagttcgagcaactcgttaatgaaaacaatctggatgaagaagaaaaagcagcattgtccagacgtgccggcaagctggctatcatgctgaaatcccccagacgcatggctgcggtgagtaatgatattgttgagcattttaccagccatgttatgccgaaaaagatgaaaggcatggttgtggtatacgatcgtgaagcctgtgtgcagatgtattatttgctcggtgaaaagctcggttttgatgcggttgaagtggttatgaacgttgaccaggctccggttaaagttgaagagggtggcaaaatagataagctcaataaggactggctcaaatggcatgacgaattggagctacctgttaaacaagccgatttcgaacgctggcagcacattgatgcggaagagcaggtacagaaggatctgattgaatgctttaaagatcctgaacatccgttacagcttatcatcgttaccgccaagctgcttacgggctttgacgcgccaatttgctactgcatgtacctcgataagcctctacgcgatcatactcttcttcaggccatgtgccgtaccaaccgattgtacgaaaccgatgatgtacgcaaggacatgggattaattatcgactatctcggcgttttcgaaaatctgcgcacagctctggcctataaccctgaagaaattgaaggggttgtagagggaatcgaggcatttaaagagttattgccgttacaactgaataaatgtctggccttcttccctggtgtggatcgttccatagaaggttttgaaggtattatggccgcgcaagaatgtctgccaactaacgagaagcgtgatgaattcgctgccagctttggagtgttatctaagttatggtcagctatcaatccagatccttttttaaccccttatcgtcaggactataaatggctggcgcaaatttatgaatcggtgcgtccggtggggcagacaggtgcgcttgtttgggctgcgcttggtcctgaaaccatcaaaatgatccatgagcatactgatatcaatcgtattcgcgatgatattgacgagttgatcatggatgagtacgccatttttaccctgaccgctaaagaacaggaacaacgcgccaagcgtctggagattgatcttatggggcgtttgcgcggcagtcatgatcctaaatttgtggcattgggcgagcgtttggaaaaacttcgtcaggattatgaagctggtgttatcaaggctatcgactggttgaaaggcctattggatgctgcgaaagatacagtacaagccgaacgcgaaacgggtgagcacccagtaactgaagctgataataaacaggcgttgaccaagctttttctggaaacacgcccggaaactacccctaagttaatcggtgatgttgtagagcaaattgataaaatcgtgaaagctacccgttttgatggctggcaaaactccaacagcggccctcgtgaaatccaaaaggcacttttgctgactttggctcagtttgggctagggaaagataaagaattgttccggaaggcgtatgggtacattgagggacattattga

SEQ ID NO: 81987 - DNA, 405 bp, Citrobacter koseri
atgcgcatgctgaaatgttaccttggcaataatcgtgacgggcacgttgtcactgctaaagacgctatgcagtcaccgggtaggatatggacctgtacttcctgcggctgtcagttgatacttcatgcgggttcatctggtgaggccccctggtttgaacatgaccagcgaacagtgacgacaaacgttctgatgcaatgtacccatctcgaccctgaagttaaagccgaagcccgatgccaaaaattacgcagtatcatcggcggactggatgcacctgtaatggtgcttttctggcattgcgtgtggtgcggaaatcattacagtgggaaaaagcattgcacttcttgcggaacaggcatctacagtatcgaagaaactgacaagcaatcagatgcgaactga

SEQ ID NO: 81988 - DNA, 534 bp, Citrobacter koseri
atgatccattcaattttactcaaccattatcagacctggctggatgattttacccgcgtcagtctgtcccacggtttatgccagcagcacataacgcaatggcaccgactggcgataaccaccagctcaacattggacggaagcgtaatagaaatcgtcattccacagcgcctgctaccgatcacccgtaccgctcgactggaatcctgtactgtcgaccccggactaactaaaaacacagactatacccttctacccggcgtgctgctcagcgagtgttaccggctggggaagagccggttggcagatcagttacaaatgttattccggcttcatgtacagcccggtatgcgacagacgctgaccctactgtgctggtgtgaacttgcaacaggaaaggatatgagggaatggtatgcgctgcatctgtcgctacctgaaatgctgaggcaatggcttacgataaaacaacgggcataccggggtctgaagacgctgacggaggattacattcgtgccacccggccactatga

SEQ ID NO: 81989 - DNA, 213 bp, Citrobacter koseri
atgaccattaaaccttccctgtctgaagaccaattcgtcaatatggctttcattacccatctcaccggactaaccgataaatggttctacaagctcatcaaagacggtgagtttccggcccccatcaagtttggtcgcagttcccgctggcggcagagtgaagtagaagcctggctgcaggctcgtatcgatgcatcacgctcacagcgctag

SEQ ID NO: 81990 - DNA, 582 bp, Citrobacter koseri
atggactttccctggccctggaaccgaaaatatacgatgaactggttcctgctgtcgttactgaaccaccatcttgatcagctactggaacgttactctcgccttcagcccctcagactcgatttgttctatcagaatgacacatggcgttataaccatcacggatggtacgagacagaaagggaggtacgccagttaacagaacatctgatgttagagagcaacatcgtgggtcacttctgggtgctggagtgtacttcccgacacaaatgccatgcccatatcgcgatgtatcttgatggtcaccataaccaggccacctttccggtagctgaacaggcggggactgcctggcagaagattacacagggtgaggggtaccacaatcgctgtgatcgtaagaaatgctacgaagccgatatcacccgccccgtcaattacgatgatgctgcagccatcgacaacctgcgctacatcatcagctatctcgccaaggagaaatcaaaacacgggcagacttactacggggccagcgaggttccacccgcgagtggactgggcagaccgcgagggcttcgataa

SEQ ID NO: 81991 - DNA, 798 bp, Citrobacter koseri
atgtcagaacgaatcactttcaatataaccaattctgagactctgcgcgttgtagatgaatacagcaaaaaacagaagatctcgcgatcgcaggttatttccaccttgctggatgccaccgttccggtactgaaagatattaatcgctattatcagcttgcggacgaacttaaggcccggctactgtctggtgtctaccagcaggatttgcctcgccgaagaaatgttgtagctgctgaaaagtattgtatggagatctgggagagtaagcttcaggttggaaaagggtatgactttgacagtgtcaatggcaaggtgcatgttcgcgaatataagcgacaccaccgccgggataatgcagttggcagggtcgaaaatcgacatattaaagagttctgtcagtcgctcctggaaaggtcagaacaggatgcccgctatgcttgttttatctataccgaaaggattgtttttgctgatctagaaacctctgaacactcttcatcgccagtaaaacttgcggcaggtgacgctgtaattttgctggcaaaagatgtggtttttaacgagtttttctttgatataggtaaggcgctttttatcaatgtggttgatcttatggcatacggtacaagtggtattccggagacgacaggagacccacgtgttcactgctgggtgccaatcctggttagtgggaaaaatgccgtgatagtcccagtgtacctgattgacccagctacggcaccgacgttaagaaaaccagacaacataacagtggtctaccacggtaaaaaataa

SEQ ID NO: 81992 - DNA, 807 bp, Citrobacter koseri
atgaacaaagccggaaaaatagcgtattcatggctaaaggcacagagcgatagcgaaaaaattcgatttattgcacaagcgctggggagtgtcgaatatcaggcgtttataaaacaacatcagcctgaaaagcagcatgcccacaatctacctttaagttttttgaaatggcatttgcctcagaaactagtggcctcctatcacggcaaggagatcgacctaagaagtgtgccggagatggttggcgataagctggaaattcggcatacctggatgccaacaggacagtttgctccttcgcgtcatggatcttacataccactgggaacccactttgcttgtactgctctgatgcaaccctttttgcaaaaacagcaggaaaaatgtctggagcaggcctggcaggcagcacttcccctgcttctgtcacctgacatcagtaataacaatgaattcaccgctccatggctggattacgagccctatctcaatggtgaaacggatgtgtactttttactggatgaacctcaggaaagagtcaagattggaatatcaggtaatctcaggcaacgcgtggataccttgaagcaacaacataataccagcctgagtcttatatccataatacccgcagggggtattgagacagaatccgcattacatcttttctttaaaaaatacaggttagatcagaagggacttggtagagagtggttttcttacacggatgaattatgcgaatttatcaatactctgaacacctatgcaatcaggagccactgcctaagagcttacggcattatctga

SEQ ID NO: 81993 - DNA, 909 bp, Citrobacter koseri
atgaaacaactccctacatgcactgaagcaaaagcccacgctaaatacctttcacggtcgctcaatatcaatctaagctacgcccgggatgcagtggcattacgttataactgccataactggtcggaactcagcacagtatttggtcagcttagcgataagtacatgtcgtgctatggccttgccagccatgaagaaaagcgtgtttttagccagcttctggcaccgtatatcgcagaattgcaaaatgccattcatcctgaccgccatgtgccggaaagcttgatacgtaagattgctgaaggccatatttcccgggtatccggtaaagtcatgtcggctgtaatacgtgaatgcaaggattttcctcccacgacagttaaagacatcattgaactgcttgaattttatgatgatacggccagccgagtattagcaggacaccacagacagatcccgaccaataatccctggctggaaccttgggtatttggtgtgcgcttttatgcctattaccactttaatggcaagcaggtcaccatcttaagccgggagtgggatttagatattcatgatgcctacctgccacattcacgtgacagagtattttcacgcccatggtttcaagactatatgatcggctatctggcctacctcgtaaagcaatttatcggattgggttacgacggcaccgttaagatttgttgcattaataattatagtgcgctggattaccatcagaaaaaagcagcccccaacggtcgtgtggggctcaatcacttatacagagagttacttaatcgcgggggagaagaaaagtggtcgtttagtcaaaatggtcataaacatgattttggtatcgagctcccgtttaccgcattgacctcattgaagaaaggaagaaaatga

SEQ ID NO: 81994 - DNA, 2310 bp, Citrobacter koseri
atggagttctggatatttataattgctatttatttgatttatattctttttttcaaaaagaagaaacctaagtccgcgggctcttatacttccgctcctgtgaaagcaccacctaaagaatggcttgctaacaacaaaaaaaatcaggcggtaatgcacaacgatgacagcgaagatgacaatctggctacgtttacactaagtggcggacggaatgtcgaatacagcataactgccactcaacgccagaatctctcaaaaaccaccggtgctttggctcgctggattttaccgggagaggtgatcacagtcggtggggtagaggttaccggtggccacttctatcttggacagcgaatgaaacctgccgggcataactcaggtggttattatgatgatagtagcgaggcatcgctaattgacgacacgcttaagttataccccacaccttacatttacgaagatagttcattagggtactggcccagtttttcctcactttcacctgaagcacgtggcgcgtacctgagttggcttgcaagcgatagatgtgacacttcttgcccaattggttacgtttttatttatctgtatggtctggaaagacgggcacttgttgacagcaggaacaacagtatatctgacgatgagttctattctcttttcaaagagatctgccgtctcagatcggttttcaatgaaaaccgatctttccggaactactcgtcccagttacttgaagcgatgtccattcttcgcccgaacgaaaatcttgcagcagctctcggcaatgattcggagttcagcaatggcatgcagttcaggctaatccttgcaaagacagttgaggcaggagccccggtgccagctgatctggctctgacgtgggtgacaaaccatactgaatactcattgcgaacccccgcccgccgctgcgcgaaagaatttgctgcactttttaaacggcgttacacctttaaatacgatgaagggatggtcgtgaagccgaataaagcgcgtctgcgtttagattacacacctgcaagtcctagtttgcgaggtattcggcttcctgttcccgacttgcctgatccaagtgcattgaaaggccctgttcagaagcttatgacccttgccgatatatgcacagatgaactggatgcttacagtcgttaccttggtagaaaaggcacgtcagcaaatgataccgctgcaattttgttgctgccttcagaaatcgttaacgaaagcgcagaaaaaatattaagtgcattcaaacgctgggctgatgacgcgatccttagtaaagctggggtagtttcagttgctgactactggtcacatatgaatgctacctgtccggcgaagatcaataaaaaagaggccgacttgatgcaggcctttgctcagaaaatggggtactgtctggctcctgacccctattaccaccacgtaaaagcagatgtcgatggtgttcttgttttattccctgctggtgaagggggacgcttctctccttctcctgaatttatcacagctgtattgacgctccgattaggagcggtggtcgccttgattgacaattctctcgatcaagccgaacagaaagtgctcgagaatgccataaacaacaatgccggcttcagcgatgatgaaaagcgctctctacatgcatatttaacgtggcagcttcataccccggggaatatgacgggaatgaaaagccggattgaattacttggtgctgcggaaaaatcagctgtgggtaaggttatcgttagtgttgcttgctctgatggcagaattacgcctgtcgaagtcaaacagcttgagaagatttatacaagcctggggctggatccctcatccgtatcaagcaatatccatcagcattccacaactgaaactgctctcgtttcatctgtaccagctaatcagtcgacggcagggtttacactggatgccaatgtacttgcccgccacgaatctgccactgatgatgttcgtaaattactgaactcgattttcactgaagaagaaccagaacaaccagaaagcgctccagcctcattaaccggggaagggggccttgaccccgctcatagccaactttatcgcaggttgctggataaagaacaatggtccagaaaagaggcgacagagttgtgcagtaactggaacctaatgctcggcggtgcgcttgaggtgatcaatgattggtcctatgcggtggttgatgcaccagtgctggaagatactgatgatcatatttgggttgacctggaaatagccaaagaattagagggttag

SEQ ID NO: 81995 - DNA, 3336 bp, Citrobacter koseri
atggctactacactagatgacctcttaggcgacggacgattggctcgccttttttctaaccaaaatcgcgcttgtgcacttcagctatgggtccttcagattaaatctgaaaagtcgagagaaatgcgcgtagtttacggacgtctactcccatacagccattcgagtaacagttggtccttcagtgacaacgataaccatcttatcttcggaaacatcaaggcaaagtttacccgccttaacttgtatatagacagtatccattgtgcagagtttttaaggcaattgattgctggtcggtcaatctcagaaataaatgatatattggaaattgagtgttcgagtaaattaacgaaactgtttggtgctactgctcttatggccaataatctggtctatcgcccagttgcttatctactcaaccgagatgcatatgatcgccagtcaatttctagcccacatagtgcagccggagctttcagtgcttcgattactcaaatgaataaggaagcgttatttctgttgagtgaggaatacagcgctgccttaactacttcgttagttgaacggctcaatgcggaaactggtttagattttggaaaatcagatgccacacgatttggcgatattgaattattggtttttcctacgcttaatgaccttgagcagaacttgctaagtgttaaatggattgactcatcacctgctctatcagtttgctttgctccgacacaagtgccgctctttgataaatttcagttccacttgagcattacaaacgatggccaaatcatttcctcgtctattgcttcagcaaatcgtaaagaggatggagtgtttgaatatgtgtttaaagtgaccgaggaggtgtgtgagaggacagatagtacagaactggagatttttggtttctcaaacgatcgccctcatgagggggtgctctgctgccggtggcggataggatatatccgagaaataaattttcagggccatatggtggggcaagggacaagttccgtcaagttcgactggcttgaaaaagcagctaggccagctatgtcagcgcgtgtaaaggctgctcttacggttaaccggggcaatttggggtttggcaaccgcgtcggtgggcggcaggcagacccttgggttccggtgaatcgtgaacttctttctctttttacacggcttcatccgcctaagtcagaagggcagtttttccagagatggagcatgggggatggagaagggcgattgcaattcgtggagtggtttagaactatattgggcaagtatcagcagcatcaaatagttatattcgatccttacttcgagactgctggtttagggcttgtattgattaatgcagcaattaagtcagattatatcatttttacatcgctgccaaagacatcgagagagattgaatatgaacaagatagctcagaacaactctatacggggcgagtaaacaatttaatagtgagctgtgagcataatagtcacttactaggtcgcctaaagtttcgtatctatggcctaaaagaaggacggctacatgatcgttatattttaattatgggggcagatcgtcttccggttgccggattccatctgtctaattcttttcaaagtgcagccgaaaattacccattactgattaccccaattccttcggatgttttactccaaatagaacaatataaatctgcgctggtacaggagattatggttactagtcttggaaatgaggttgagaatcccatgatgcaactgcttttcgattctagtaagacgtcagctgtaccgcgacggtatgagtctctaaactttctcgaaaggtctggagtgggtaaagtactcagtgtatggttcggtgaaatgtcattgcagggcttaagtggtgaccagttaagagcgcagatgatgacattaggtttactaaatgataactcgcttattttgcacgatgggctacataacttcatcaataacaaacaagttattaactctaaggactttaatgtaacttggggagtgctgggagaagtgctagcacattctcccactggggacataggatggggtgttattgagtcaaaaagcgattttctcaagttattgagtcaatttgttgtggaatcgttcgatcgcctacatgaaaatacagataaagaactggctgtagttgatatatggttctttcgaaaaactgtagaagtcttactgcacagcccttatcgctcggaacagctattccattcgacaaaatacgcagccctcacttggtcagagtactttgccatcaaaatcttatggagtcatgctccggattgcttgttgacgatcgccgaagcacagatctctaggctgcaaattgagcacgaagtgtcggaggtcatgcggttgtctctgttgagccagatagtcagcgaagtttccctatcgatacagttcaatatcagcatcattcaacgagatagtcttatccatcgcaagcagggattacttaaatggctgggatttaatgcactagaacgacagttagatatacctgcaggactcacgtcagtattatcgtgtctggaaacccttactcatcaggaacgagtgctcgccttaggttggatgattaaccatgcagccaaggatcctaataaagagaaaacttataaagatttggttgaagctctgcatgaggaactaccagagaaaatacctatggaggagttgcggtacttggtcgattccatgcgaggacatatgaagcaattagcgttggctgagccttggttgtcccaagatgtgatcttaccgttattgcagaatgcccgtgcctccactgaggacgcttgtgaaatatgggttcaggagttggtgagcatgcttgggccgagactgaacaatcagtctcgcttgtttgaacgaacccgtgaagggcagacgactaacattgcttcgtttcttttcgccaatagtaacacctctcagcgagagttaagcctgacgatgatgaatcaaatcttgaagcgacagcgacgaatcatacaacaaccactcgccagcacgtcgaactggagccaatgggacgatgcgctgagagtgtcattatggatacttacttttgctaaatggagtgagttctatctaagtgcgctaggtatgttcgatcaaaacttagaacggttaacaggtgatgcacatgggcttgctatggttagatcgaaagaagaatggcaaaccgaaggtgttggtatacagagcgaactcattgagttcctagagcagggcgagaggcttctgagtgaaggcggtaggctgaaaagcgattctcaataa

SEQ ID NO: 81996 - DNA, 834 bp, Citrobacter koseri
atgcatgtttttgataagaatggcactgaactgagcgcagagtgctcagtagatgaagaagatggggtttatggcctaatccttgaatcttgggggccagcacatagaaacaaagactacaatattgctctcgattgtatcattgagcgactgattaattccgatgtagataatgtcgttgtgtatcttgcctcatcgacagccagaaagcacatgccgtccataactgaaagaaaaatccaccctggtgaatacttccctctagtgggtaatagccctcgagatattcgccaagaaatgtgtagttatcaggcttatttcagcagaacaggtagaaaagaagtaccatcaggtaacaggaccaaacgaataatgataaatgttcctaaagtcaatagtggcgaattttgggaaccgataatacatggagaatcattagatctcttacaacctacagatgatgagaacattctgaatataagggttagtagattaataaaaaaacctttgagcgagcccataggatataaagtaccaggcgcgatagagcgacttcaaaaggtctatatcagagatcctgcggtgaaagcttgggtcttgcagcaaagtaagggcgtttgtgaaagctgtggtgaaaaggcaccgttttatttaaatgatggcagcccatacctagaagtacatcacgtgatacctctctcttcagccggtgctgataccacaagcaactgtgttgcactttgtcccaattgccatagggccttgcactacagtcaaagtgcgaaagaactaatcgagatgctttacattaatatagatagattgcagaagtga

SEQ ID NO: 81997 - DNA, 408 bp, Citrobacter koseri
atggatacactgactccggccaaacgaagctatgttatgtcccgagttaagggaaaagatactagtcctgagagaatcatcagacgtctggtttatcatgcagggtttcgttatcgtttatatgatccgcgactaccgggcaagcccgatctggtcttttggggaaagcacaaagttatcttcgtgcatggctgcttttggcacgggcatgagggatgtcggcgacatcgtatgccaaagtcaaatcaggaatattggtttgttaagttggaaaaaaacaaagtcagggattctctacatttatcagagctatgcgaaatgggctggcgagcgttggtagtgtgggagtgcgaacttaaagagacggatatccttctggaaagattgaaaacgtttttaaaagaatga

SEQ ID NO: 81998 - DNA, 5847 bp, Citrobacter koseri
atgttagatcctattggtggttttcgccgtattcaggacttcttcatttcatatatagaaaccaactttcgaattgccgatccttcagtcgcggcctcaagacgcaatcttttgaatagcagcggggaatttgccgcggagccctacattgaacctgttttacggtatgaatcttcggataaaacgcttgaagctctggccgagatggacgggggaccgctggatagcttgtctagcaaaggccggaaggcgttcgtagaattagcgttatccggtctgttcgattcgaaacctggtgacgaagtctggccacgtcgttcggtccatgcgccatatagccaccagactcaaatgctagagcacggtattcgccccggctgccccggcattgttacatcgggaacaggttcgggaaaaacggaaagttttatgttgcctatactggctgcattatcgaatgaggctgtcagttgggccgcgccttgtgatggttatctgcaaaatcgatggtggaatggcgaaaaaacaaactgggttcctcgtcgcgaaggagaaaaacgtcaggcggcagtcagggcactagtgctttacccaatgaacgctctagttgaagatcaaatggcgcgtttacgtaaaacgttggattctgatgacgcgcggcaggtgatggagaatcgcttctccggaaatcggatattcttcgggcaatataccagcgcaacacctattactggctatgctagccatcctcgtctctccggagccaaatcggaaaaaagccgccgtgcccgtaatcttgaaaaattacgtaaggcgctgaagcgaattgatagcgatcagcaggctgcgcgcgcattcgacgaaaaagaaaactcgtcggaaaaaacccgatatatatttccttcgacagacggtggagaaatgatgtctcgctgggatatgcaggcaaccccgcctgacgttctcgtcactaacgcctcaatgcttggggcaatgctttcgcgcgaagtcgaaaacggtatttttgatgctacgcgcgaatggctgatgaataacaacgacgcgtacttctatctggtattcgacgagctgcatttaatgcgtggttccgctggaaccgaaaccgcgatgttgattaagtcgctgattatcagactcgggcttgacgacccgaagcatcgctacaaactgcgtttgctggcgtcttccgcatcgctgccaatggatggcgcggatggagaacaatcacggaaatacctccgggatctctttgcgccctttggcacttgctgcgattctctggatcccggtagcgataagcctgatttctggcgtaactgcgtcatccagggaaagccttatataccgtcgaagccagaaggaaaaatcaccgttcggcctttcgccgcattaatgcgagttgctcttgaggggcagggaaatgtcgttcgcaatctgaacatgacggacgcgtttagtaaggctttgtctaatgtcttccaggctttgggcgtgaaagcgcaaagtggcatgcaaggcattaaacaagcagcggaaaaagcagctgccctgcttaccaacgcttgtatagaagaaggcagcgagtcgccgcgggcaatgccgccggaactaatcattgataagatttttctgaaggaagactcggataaacaagatgagttggaattagcattacgcgggttaatgctggtgcgcgcactgccggaatccgggatggattgcgagaaacccgccaacgttacaccagcttttcgcgtacatacattcgtcagaaatattgagggtttcttcgcctccgtatcaccgggagaacaaaaggcaaaatttgctgatttttgtctggaacgaggactatcccacgcgccttcagccccaggtggagagcgcggtcgtcgtttatttgaaatgctatactgcgaagcatgcggcgatttactgctcggcggtcagaagggacagaatcacggtaaaacaatcgaattattaccttcggcgaccaatctggaaaatcttcccgaacgtcccggcgctgaatattacgatgatatgacgctggaggagtttgcggttttctggcctgtagatatagccggtcggcctcctgtaggttgcgaaaaaggttgggatgtctgggaaaaagcggcgcttaatcctgttacaggcattgtgaccattgcgcaggaaacatcgacgacgaatactgacgcggttcgcgggtatctctatttccagaatccggttaaacctaaaaaaggcgagccggcgaagaccccttctgctcagcctttctgctgccctaactgcggcattgactattccagccgacctgccagcaatcgttccagaacgcccattcgcgcatttcgaactggtgtgacgaaatcatcccaactggtagcaacggagctatttgaattactgcatgcaatcggcgcggaaacaaagagtattgttttctcagacagtcgacaggatgcggcatcaatggcgctggaaatcgaacgcctgcacttacgagatctacgcagggaaatattggtcgccgcttccagagcgatgattaaggaggctgaaagcgggtacatttcagacgaggatattgaagacaggaaagccaaagcgaaacaatcaggagattacgatgagtatatcagactgcatgaccttcaaaaaagccaaagcggaattactgaactttgtaaatatcgacggataaaaatcgataaattactggagtctgaaggtgactcaatcggaagaatcacatctgagctcgtcgggttggggatatcaccctataaatatcgttctaattcagatgagaatgatagcgctgtttggcatacaaatttcattaaagaagggggaactattagattcagtgaaaggcttccttctcacgaacgaatgaaaataaaaacgaaaatatcttacgatcaatctgaattgatagatgatgttattttcgccaatacttttttcgcgctggaagaaacagggctggcatacccatgcatctcagataaggatgacatgccagaaattgatgcttggctaagggtgttttccggtgcctatcgtgttaaagagaataaatatttcgatgcaagccgtactcgtgattggtatgttgggaaagatgttgaaaaagagaaagttaagcgcgtcgccagagtcttattcggtgatagcgggtatcaagatggtttaacgcgtatcttaaatcaattttctctgcttgagcataaggcaggactaatcaatatcggtaagttgttcctcaaaatcagtaaaccaggcgatcattactggcaatgcggaaaatgtgggagaattcacttacatttaggttttaaatattgtacccgttgcgtgaatacactcgaccttgaacccagtggaattgtcgaagatctatgggaggaaaattttcttggtaagcgcattgtacgtggagagcgagatggagttaaacgtttccggctgaacgtcgaagaattaacgggacagacggatgatttctccgatcgtttgcgtaagttcaaggggattttcgtcgataagatgagtgaacttgaaaagcttgattcggaaatagacatgcttgccgttaccacgacaatggaagtcggaattgatatcggttcacttcagtcggtttatcaagccaacatgccgcctcagcggtttaactaccagcagcgcgtcggtcgcgctgggcgacgcggccaggctttttctttcgttatcacattttgtcgcggacgtactcatgatgcttactatttcgctcatcctcatgcgatcaccggagatccgccgcctccgccttttctggcggtagatcacgacgctattccattaagacttatgcggaaagtatggcttagatctgcatttaatcttttacgtgaagaggatcataaaaacggaacagctttccctggcgataaacttgttccccctgatattcatggagaatatgttgctacgtatgattattatcatagcgatgaaacgaattgggctgaacgattgctgggagcgttgaaagcaactcagaatatacatgatcgctttatcgaagcggcaacattcgatccagagcaaagactacgcctttattccgcattaaacgcggaaagaataattgaagaaatcgctgaattgaacgttaatgctcctgaagaagatatggggctagctcgtttcctggccgagcacggtaaactgccgatgtatggaatgccgactcgggtacgcaacctttatttgggattgcgtaaaacaaaaggtccaaactctcaggaagaatacgaatggtcgacgatggatcgcgatcttgatctcgcagttttcgagtatgctccaggttcggtattgattaaggataagaaaaagcatgaggtaataggcttcacaggcaattaccaggaaccacagatccagaacaatcgaatgtcggatctctcgacggtaggctcatggcaggagtcgtgcagccatgtagcaatttgccctgcatgcggttccgccaaactggagctacataaacctgacaacgacattaattgcgaggattgccgaacgccgatcggtcctgaagagttcaggctttatgtcacgccagccgcttttcgcacggatttcaaacccaaagacgatatagatagttttatccgtatgtcgttgaaaaccaccgctacagttttgcatgagggtgttccaacaaaatgcgattctttcactgtacgacgcggcgaagtgaccattcttcgcctcaatgatggcaccattaatggagaaaaggaaggtgagcgatttactgttgacctggtaaatgatctaaaagcaccaatgcccttttctacttattgtccgtcagttaaaggtgaacaggctatcgattcaggttggttgggatcgcacaataacccgcgctggcagtgtagcggcacgaaaaaaagttttgggcttgtatccagcaaagagacagaatcgcttcatatcgaattaactaaattcgatgctcgccttaatctggacatggtcgccagatacggcgagtatatgaatttgcctacgcgcgcggctgctattagcgcgacccagatattgacgcataaggctgcactctatctggatgtttcgccagatgaattcgaaatgcttgaaccccgactgcatcttggtaaacccatattgcaaatcgccgacgcgttaatcaacggttcagggttgtgcagacggctttccgaaccagtagtcgctggcggcccgactttgatagtcacactattgcatgaaattctgaaagatcagcacatctggcctatggctgattttctgaaaaaggatcacccgactcaatgtaaaaccgcatgttacaagtgcatacagcgctacggcaaccgccgatatcatggtttgctggactggcggttaggtatggcctacttacgggcgatggttatgcccgaatttgcatgtggtctgaacgccgccgactggaatcagccagagatgaaaggatggagagaaagagcgtttgagttagcggaagatgtcgaggcgttacgaccagcaacgatcaaattgtcaaaagagcattcattacctgtccttattgaaatacaggatgggaaagagctttggcgagcggccgtaacgcatcccttatggcaatggagagatgccgaacgtgatgccctaattgactcttttggattgactgacggggagtcgccgctactattcattgatacgtttgaactggaaagacgaccgctgcgtgcgttggcgaaccttaacagagttaaaatatag

SEQ ID NO: 81999 - DNA, 2091 bp, Citrobacter koseri
atgaaagatatcccttggtatattggccaatatgaccgcagaaattaccagtcttacatcaaagttgtcgcgcaggaaactcaagatggctggagtgtgatcgacaatcctaagaagaaatttcctcgtacaggggaagtcgagtttaacggaactgacattttacaatttcgcccgcaagaatgggctgcttttcaggtgggtccaggtcctcgaaacaagactcaggcgaaacacacccgtcgtatttatccttattatgatttatcttccgggcagtcgctgctggaagctcgtcgtcgattaagtttcgatggcataacggcagacggtgaaccgggactatgggctatccgtttcgggcctgacggacttattctggcgaatttgactgagtcaaaatcaggttgtctgatgctgtccagaaaccagagcgtccatgaatatgctttcaacgaaaacggtgtaattagtgtatccaacacatctgaaagcggaaaagcattttatatgcccgatactgatgcttcacccgctagagtccatgactggacgacggataagcagtatatcgaaaacgtcattcaactcctttcctgcgctgatacgacagccgcgatcgcttcatggcttcgggtgcatacaaatgagcaaaacgggaaattaacttccggcgtcgatgctcttctggctgccgctcaaacgctccgcgcaggagagctagctaagaaactggaggaagaagattcgctgactcgtcagtttaccgaagcgatgttgaaggaccagcgtatcgcccgccttctcgaccatcaaatacaaaacattgcggaagaagagcgagtcgcgttgcgcgccgaacagcataagtcgctcgataaagagttttctgctgaacgcctgcgacgtcgagaatctattgaagcggaaatagccgtttttgagaagacaaggaaaagcgagatcgaagaggagatcgcacaattacggcagctcgaagaagaaaaattacattctgtttttgcagaaaagaaaacggatatagaacaaacactcaaacaggaaaaagcgtatctcgaaagcgaaattagctgcctgaaagacgccaacgctgatttatgcgctcagagcgaaaacgaacgtcaaatattggcagccctaacctgcgagcgtgaagcacttttggcgtctttaacggatgctgaagaacgtaccgctcaggcgcaaattgaactcaaaaaaatggatctaactattgctgaaaaagcgcgccgcatggcttactcagcgatccctgaagtacgcctcccagcgcaagcgagggtcgtatcctgcgaagaattcggtcataccgtcagagagaacaagttgctgacacctgacgggaagatactcatgacgcaatttctggcgttaatgttggcaggagaatgtccattgttatctggccctgaaacgcaggacttccttactgttgccgaatcgctgatttcttcgggccgatccatccgacagatcgccgatccaacgatgatttcctgcgaagatctttgggttcgtgcgggaaataatatcgcgacgcccctttatcagggattattgttgagcgaggcttcttgtccccgaactatcctcgccgtcattgaacgtgtcgaatgttccgccgcacgtttctggttgccagcgctgaaagaccgattgcacggcagcgatttgccccgacgctttctgatttgcggcaccgttgaaaacgaagattgtgaagaagcggagaaaatgaaggaacaacatcttcgcctgcggatggaaaacgtcgtcatccgtaatgcgattgcgctgtcccctttacatctttctttagaaaatcatcgagagcttgatcccggcccggcatcgcaaggggctatcccggacaaactcgctatcgcggatgaaatgtcagccggacgtctggatctggcaaataccctacgggcgatgagaacggcgcatgaagtcgcgccgcttgatgatgaaaacaaagcgatatatcagaagcagttagtcgatttatacgcagacttacagaataacgaaatatacgcccaataa

SEQ ID NO: 82000 - DNA, 2565 bp, Citrobacter koseri
atgaagtggacgccgcctgttacgcccgatggctgggaaagtaagctgatcgattattttctccggttcggtaccgacggcgacgcgcaggatattcgctggtttgaagttacgccgtcgacgcttgcagcggcattcgccgacagcggcctccgcgcggatgaaatagaaaaagcttttcggacctgtatgtcgaggataccggatctgccgctgcgccttgaaagtggaatgatggaaagatccaatgacaagtctcccggatattttacttatcttgtcatgacgctacttatcagtagtcaattcgacgctcaagaagaaagtaatgatttccgcctgaagttacagaactggttgcaaaccgggcatagctaccagaatttggcaggcgtaaacgctatgtgggaagcgctagctggatggcttgaacaacggattcagaaagaggagccttaccgtcgcctgattcttcctgaaataccacccagttggagtcacatcggctacaccctacggctggcttttcccgggaaaacagacttgcgcttgatgacccgagttcttatgaaccacccgcaagctgtatccagcccccgactactaatcgactatttccaatccgcgattcaaaaagaaaacgcatcttacgcaatgaatcaggtgtttaacgagtttaaaagcgcctggtttgctggaagtagaacgctcgccgatatgcctttctggcgcctgcgtcagcgagctatggcgcagttctccgatgttgaaatgcataaagcgattattgatatgcgggtcgatttcgacgattcgcggagttatttcagctcctctgatgagaacaacgatagtgttttcgctccttcgttatccgaagcgctaatttctgcatctgctggaaacagtgaaaacctgggaaaagccgtgcagagcggcttaatcttttttcatcaagtcggccatggacgctggagagcaatcgcagttcccgataaatgttcttcacaattttacatcgcaatatcctgtaagcactctacgcgtataagcagataccttgacgatgcagttatagaaggtgactggattttgaccagatgccctcagagccgtcatatagcaatgggtatactccgtgtgatgaaagcgtcgtcagattcgccggatgaacagattacccgtcctctgatttacgacggaataagagtaccggggggatggctggggttgcctgcatttctgccattcatcaaatcagacgcgcgaaattacagggtttatgctttggggaaaaattgcgcaaaaatcgatgtcaagaagatagatgggcaattaatatcatccatgccactcaacggtgagtttattattgagcctgagttggaagcagacaagaaaatgccactatggcggcggcgagtgcgtttttttgatcgcactgttccacatccagcgctaggggaaagtgcaaaatatcatctcgaacgtcttactgaatggaagatttcgcaactggaaactccggtattccgcgccgaagcgccattgttaatggaagatggcgatgtgcgttgtgaacatcttctggaggctatttacgcaaccggagccagcggctgggaagaagttgaactggtctcacttctccagcgcgttgctgacggtatcagcatatggcatctgcttcgctgtctgcatgatgcaggtctgattgagccgcgcttacgccagtcctggaaaggtcgggtatggacgttagttaaaccctcactgtttcgtattcgcgatggaaaaagcaatctggtcattgtagaaggtgccgtctgcgccagacttatagatgattttcaaaaagcagtctcagaactgggcggaaaatatttccgtcgcggcggagtaagtgtctggtctcctcctgtattcggcgcggagattgatgatcctgtcacgttatccctgattatggaatggccacttgtcgaggcgccgttgaagtcagatatgatgcctctcgcatttatgtcaacgctccgcaccgccgaacttcacgttcaggcggcaacctgggactggaattccgggcgtttcctgtcgtatgtggattcagatggcgaaacgacgcttttaacgcgccatgttcatccgggtggtcgcgatcatgatgtgtatcgtgttgttacccaccgaaaaacggagttttttttatcccgaaccgccgcaattctcgccgcgagcgtggatgctcgccgccctacgttcaggaaaatcgctgataaccgctttatttgcattaccaacgactgcggcttgcctgacgcacttgcgataggattgcggcgcaacctgctcagaaacggcggcccgacggaagccggatatgcttaccctctcgacgacatatctttccgttggctaaaccaactgcttcctggatgcttctattcgctctcgtcggatgacgataatagcgcgagccagttagtttccgcagctcgccattccggcggaaaaatgcgtcttcaatggcgaaacgggcttctagcgttatggactgggaaataa

SEQ ID NO: 82001 - DNA, 1236 bp, Citrobacter koseri
atgagcactaaagccgtcacgagcgacaatcattcaacgcaacctcacgaagaggaattcagtttctatgagttttttgcgggcggcggtatggccagggctgggctgggaaaacagtggcaatgcctgttcgccaacgatatggacccgataaaagcatcgacatacatcgataactggggcgacgaacatttcgacatgcgtgatgtacgcgaagtcgcctccgatgaactgccactccatgctgatttaagttgggcctcatttccttgccaggatttatcgctggccggcaatggcctgggaattggcgaaagagattcctgcgcggatgaaaccacgcgttccggtgcgatatggccgttcctcgatttaatcagcaggctcggcgaggaaaaccgtaagccgccgatccttgttcttgaaaatgttcttggattgctgacgctggatcaagggagccatttcgccgcgatatgccatcagttaagtaaaacaggctaccgatatggcgcaataatcattgatgcaaagcactttcttcctcagtccaggccccgcgtatttcttgtggctgttagtcgccatgtttccattcccgaatgtttgatcactgaagaacctttgtcgcaatggcattcaccttcgctcctccgtgcctgcgatgcgctggcgaaggatgcccgtaatgactggatctggtggtcgcttggaaatatgccagactccaaaacgaaggagttagatgacttaatcgattttgaagacgaaaacgcgctatggcattctttcgatgaaacacaacggcttatcagtatgatggcaccggcgagcttggctcgtctggcgaacgctcaggcatctggcgcgacaataacaggcagcctttatttacgcatgcgtaaagaaaaaggcgttaacaggcaacggactgaaattacgttctcggccgttcttggttgccttagaacaccaaaaggcggggcttctcgtcctcgtattatcgttgtcaagggcaatcaggtgaaaacgcgcttgctgtcggtcaaagaagccgcggcgttaatggggttgccggatgattttattctcccggcagcgtatcaatcggcatttaaagttatcggcgacgggcttgctgttcccgcagtccgttttctggctgaacgcatactggaaccgctggcgatagctgtccgaaatgatgagcgccggagggaggacaaacacaaatga

SEQ ID NO: 82002 - DNA, 1023 bp, Citrobacter koseri
atgccgtttaacattcacccctggtctgagctagcaccacgatacgatgggactattttgttgggcaacggtgcaagcatcgccgttagtcctcgttttgcgtatggatctctgcttgaacacgtcacgcaaagagagagtctggaggaagatgtacgcagactttttgacttttttaaaactaaagatttcgaacttatactgcgtattgtttggcaggcgtctaacgtcaataaatctttagaaattgaagatgcccgcacccatgaggcctacctccgaatccgcgaatgcctcattcaggctgtacgagatgtgcatcctgagcatgatgaagttgatgaacaactgccatacatttacgagtttctgaaaagattcaacacggttatttcgcttaactatgacctgattgtttactggacaatgacatatggtctggatatcaacgatcatcatcgatttaaggactgctttcttgccagaggtctttttgagcaggattggcaacggttaagaggaatgcttggaaatgaacaatctaatacgcttgttttttatccacacggcagccttatactatgtcgaaaccgtgttgaacaggaacataaaatccatatccgaggatctggcttgctcgaatcaattctggaacgttggcaaagcgaggaagttgttccgctatttgtcagcgaaggaacgtatgagcagaaggttagttctattcagagtagctactatctttcaacagtttaccgtgaagttctcaccgaaccgcgtgaaaatctggtgattttaggttgggggatgggtgagcatgacgtacatctgctaaaacgcatggcgagaacaagaatacaacgcgtcgccgtatctgtttttcggggggatcaggcttattgcaccagagtaaaccaattaatcagagataatctgggaccacatgtcctcatcgagtttttcgacagcgaaagtcccagctgctggaatcagccaccagaaaatctgatgcaggggaactaa

SEQ ID NO: 82003 - DNA, 438 bp, Citrobacter koseri
atgcagagtattcattacctcccggccacgctggttgaatttggacccgggcgggaagtaagtattgccagtcatattattgcagcaggtataacaagaattctgatttgctacggtagcgaaaacgtcagacatcaggggctttttcaggcaatcactcgtcaactgacgagagctggtgttgcgtggactggatatggcggcttggtctgtgatgagaccctgtttgcattacaaaaggccatttcacatgccagcgaagctcatgcacatgctattctcagtgttggagggggcgctatgctggacaatatgaaggacactgcggttactacacggtactgcggagaaccttggatgtattatatcggtaaagaccagcatatccgggaacttcctgtgtatgcattgttgactctgccttcaaaaaggacctaa

SEQ ID NO: 82004 - DNA, 1209 bp, Citrobacter koseri
ttgactgataagatacaacatcataaattccgcccccggcaagcctggggcgcggtactggcaatgtccctctcggcatttgcgctggtggcatcagaatttatgccagtcagcttgctgacgccaattgcgggtgaactgcacatcagtgagggccaggccgggcaggctatttccatttccggagcattcgctctactcactagcctgatgatctctgccgtggccggtaagcgtgaccgtaaacacatgttgctctgtctgacattgctgatgattatctccggcaccgttgtagcctttgctccaaattatggggtatttatggttgggcgtgcgctcattggaatagctatcgggggattctggtctctgtcggcagcggtggtaatgcgattggttgattcgcatcatgtcccccgggcgctggcgatcctgaatggtggcaatgcgttggcaacagtgcttgcagctcctctgggcagctttctgggggcgattattggctggcgctgggcttttttttgcgtagtaccggtggctgtcatcgctctggcgtggaagattcaggcgttaccgccgctaaagcaggatgtatcaccgatatcaggcaatatttttcggctgctgcaccgtctaccggttgtactgggtatgacagcttgtgccctgttttttatgggccagtttacgctgttcacttacctgcgaccctttcttgagagcgttgcgaaagtcgacaccactacgctttccttgatcctgctgattatcggtgtggccggttttgctggtactgcattgattggcatttttatcagaaggaacttgtatcgccccctgatggtgctaccgctgttaatggctgcgatcgcgttggcgcttgtgaatgtcggtgagcatgttgtcgtcactacgcttctgttggggctatggggattgtttgctaccgcagcaccggtcggttggtggacatggctggcaaaaacgttaccgcaagacgcagaagctggtggtggcttaatggtggctatcatccagctagccatcatgctcggcgcggtcactgggggagtactttacgatgccagaggctatcaagccacttttgaagtcagtgctgtattacttatagcggcatccttatgtgcactgtttacagcgcgtagtgaggggggaacgtcgataaaagtcatcatgcgctcatga

SEQ ID NO: 82005 - DNA, 969 bp, Citrobacter koseri
atgtatgcaattggattgaatcattatggtggtccagatgttctgcagcgcgtagcgctcccagaccctcatccattacagggtcaggtgcggataaaagtgcgagcggctggaattaaccctgtcgatattatggtccgtgacggttcccttaaagattggtttgctggtgcccaaccgccatttgtaccgggtatggatatatccggaactatagatgaaatgggtggcggcgttgatccggcatacggtttgacggtaggtcaggatgtggttggtctcgtggataactttggcagttatggcggttacagcgagtatgtctgtctgccagcggcgtctgttattcctttacctgagaagacgccattgaccgcggcagcatcctttttgatgaacgcattaacggcccgcaacgcgctggataccctgcggctaacggaaggcgcgacggtgctggttaccggcgcggccggtgctgtgggcgcttataccgtcgcgttgggaagtaaagatcgccttaatatggtggctgttacctcacctttagatgaaacctttatgcgtactgttggagccagcatggtgattgcgcggggggatgacattgccatgcggatccttaaagcccttccacagggtgttgatgcggtggtggatgcagctgatcttggtgagcagatcatccccgctgttcgttcaggagggactgtgattactctacgtccaggtaatgaagatggttttgagcgcggtattaacgcgatatttgtgaatgtccgcgaacgtatcattgatcatgccgccctttcccgtatcggacaacaggtctctgagggggtattgcctcttagagtcgcagctgtcttcccggctgctgatgctgttgccgcgcatcgccgcttcgacgaaggccgtctgcgtggccgcatcattctcaattttgacaccacaggtacatcggtttga

SEQ ID NO: 82006 - DNA, 486 bp, Citrobacter koseri
atgatgaaaatacatttcgttgtctgtctggcactgagtgtctgcctggcgaatatggcaggggcagcaagttcctcggcgtcaacactggctgacagttctaccgctatcagccatgcaagtgagcagagagtgaaagttcggattgccataggctcaaagatgatgacggctgaactggatgacaatcctactgcgcgcgattttctgtctcttttgcccctgaccgttacgctgcgggattacagccgtgcggaaaaagtcagtgatgctttgccgcgccgtctttccgaagcaggcgcgccggaaagtgctgctggtgagacaggtgacattgcatattacgccccgtgggggaacatcgcgttttatcgcggtcaggggccggatgcttcgggcgtcattagaatcggaaaaatactctctggttctgaagcccttcatcagtcaggtcagataagcatgaccctttcccttgcggaatag

SEQ ID NO: 82007 - DNA, 1035 bp, Citrobacter koseri
ttgaagacattaacgctgatgctggcctttgttgccagtgccttttcattcaccgctaccgggcaggacatgtctcgtggcgcggataacttttataaaagcacacaggtcaccacgcaaaaagtgtctttcaacaatcagtacaaaatgaagattgtcggcaacctgtttgttcccaagaatctgaaggagggcacccgttacccagccatcgttgtggggcacccgatgggggccgtcaaggaacaaagctctaatctttacgcccagaaattggctgaacagggattcattaccctggctatcgaccagtctttctggggggagagcgaagggcaggtacgtaacgccgttgcaccggatatttatgctgaagcattcagtgccgctgtcgattatctcggaactcagcccatcgtagatcgtgagcgtattggtgtgctcggaatttgcggcagtggcagtttcgtcgtcagcgcggccaagattgatccacgtatgaaggctgtagcgacggtcagtatgtacgatatggggggtgctaagcgtaatgggctcaatcactcccagacactggaacaacgtaagcaggttcttgttgaggctgcgaaccagcgctataccgaattcaccggaggcaaaaccccgtggggaaacggaacaccgctaaaactgaccgcaaattccaatgctatcgaacgcgagttttatgacttttatcgcacgcatcgcggtgagttcacgcctgctggagcctcatcggaaacgacgactttccgcaaagatgcaatggaagtgaaatttatgaatttctacccattcaatgacattgaaaccatttccccgcgtccaatgttgttcattaccggttctgaggcgcactcccgcgaattcagcgaagaagcctacaaactggctggtcagccgaaggaactgtttgttgtaccgggtgccggtcacgtcgatctctatgatcgtactgaccttatcccgtttgccaaactgacgtccttctttaaagacagccttaagtaa

SEQ ID NO: 82008 - DNA, 1122 bp, Citrobacter koseri
atgaaaacgaatatgaaaaagtctgatgcagatatccagactgaggaaaacggccttccccgtagaaagttccttcagggggctgttgtgggatcggctgcattactggcagcgagttcgggtattgccaaaaccgtacctgtggcagctaaatcccccctgcaactgacgcaggaatgggacaaagttttccccaaaagcgacaaagtggatcaccagaaaatcacctttattaatcggtacggtattactctggcagcagacctgtatctgccaaaaaaccgtgccggtaaacgtctggcggccattgtcgtcagcggcccatttggtgccgtgaaggagcagtcgtccgggttgtatgcacaaaccatggctgaacgtggttttgtcactctggcatttgatccctcttatacgggagaaagtggtggagaaccgcgcaatgtggcctctcctgatattaatactgaagattttagtgccgccgtggactttatcggcttacacccttctgttgatcgcgagcgtatcggcatcattggtgtgtgcggttggggtgggatggctctcaatgcggttgccgtcgacaagcgtgtaaaagcggttgttgccagtaccatgtatgacatgacccgcgtaatgtcgaagggctataacgacagcgttacccttgcacagcgcacgcagacactggagcatctggggcagcaacgctgggcggatgcagaaaaaggcgcaccggcttaccagccgccttataacaaagaggtaacggcgggggcggcccagttcatggttgactaccacgattattacatgacgcctcgcggataccatccacgggcggttaactcaggcaacgcgtggaccataaccacaccgttatcctttatgaacatgccaattttgacttacatcgcggagatatctccacgtccggttctgtttatccacggtgaaaaggcgcactcacgatacttcagcgaaaccgcctatgccgctgcggcgcaaccgaaagagctgatgatcatccccggggcaaaccacaccgatctctatgatcgcatcgatgtgattccgttcgacaaactgatggactttttcaccacacacctcgcctga

SEQ ID NO: 82009 - DNA, 1056 bp, Citrobacter koseri
atgattgttaacgcttatggggctacatcgggtgaccgtccgctggagccgttgcaaattacacgacgtgatctcggagcacatgatgtccggattgccattgcttactgcggagtctgccactccgatttgcatcaggtgcgggcggaatgggcgggtactcagttcccttgtgtgccaggtcatgaaattgtcggtcgggttgaggctgtcggggcgcatgttaatggtttccgcgctggtgatctggtcggggtcggttgcattgtagacagttgccgtcactgcgaagagtgcgattccggtcatgaaaactattgtgacgggatggtcggtacgtataactttcccaccacagatgagccgggctggacactagggggatattccgggcagatcgtagtacatgaacgttatgtattgcgtgttcgccatccggcggaacaactcgcaggtgtcgctcctctgctatgtgcgggcattacaacctggtcaccactgaagcactggcaagcaggcccgggaaaaaaagtgggtattgttggaattggtgggctaggccatatgggggtcaagctggcgcatgctctgggtgcacatgttgttgcgtttacaacttctgatgccaaacgcgatgatgccagggcacttggtgccgatgaagtggtggtatcgcgttatccagaagaaatggccgtgcatgccaaaagctttgacctgatcgtcaataccgtcgcagcaccacatagcctggatgcttatctgacgctgctgaaacgcgatggcaccctcactctggtcggggcaccggcctcgccacatccttcgcctgaagtatttaacctgatttttaaacgccgggctattgccgggtcgatgatcggcggcattccagaaacgcaggaaatgctcgatttttgtgctgagcacggcattgtctccgacatcgaactcatccgggcagaccaaattaatgaatcctatgaacgtatgctcaagggcgacgttaagtatcgctttgtgattgataacgccaccctggcggccgctgaataa

SEQ ID NO: 82010 - DNA, 918 bp, Citrobacter koseri
atgaatatggccagacataacctgaatgatcttcaggctttcctgatggttgcccgggaaggaagctttacgcgggcagcagcccgactcggtgtgacgcagcctgcattaagccatgccatctctggtctggaagcaagactaaagatccgtttattgacgcgaacaacgcgcagtgtttcggtcacagcagccggaacccgactaatgcaggttatcggtcatcgctttgatgaaattgaagaagaactcgatgcgctgaccgaattacgagataaaccggcgggaacggtaaggatcacttgcggtgatcacgtcctgaaaacaacactgctgcctaagctgatgcctctattgcataaatatccggatataaaagtggagttcgatatcaattacggattcagggatatcgttgccgatcgatttgacgccggggtacgtttcagcgaaaccgtcgataaggatatgattgccgtcccgattggtaaggaggtgcgcatggctgcggtcgcgtctccagcctattttgccagtcacccgaaacccacaacaccgcgcgacctggtggatcacgagtgcatcaacattcgtttcccgacatacggtggccttgatgtgtgggagtttgaaaagaaagaaaaaaaattaaagatccgtgtcgacgcaaaactgatttttaacactacgacacacattgctgctgccgcagtcggtgggatgggaattgcttatctcccggaagaagaattctcaccgtggcttgaagaaggtcaattgataagagttcttgacgactggtgtcccccattttcgggctatcacctgtactaccccagccgacgtcagacctcgccagcattctctcttgttattgaggctctgcacgtgaaatctacgagtatgcaggaagagtaa

SEQ ID NO: 82011 - DNA, 1116 bp, Citrobacter koseri
gtgaaacgttacctcattcgagctttaattgttttgtcgatcgctatcttgctcctggcaggagccggatatctttatctgcagcgccccctatttggcatgcttcctggagaggaacaggcaagacaatttgagcattactccccgaattatcatgatggacatttcgtcaatcaaattccgtcgccgatccatactaatggcagtacagaatggtccatctggaaagaggaattatttggtaataaagggcagccacgccctgactctcctttgcctaaccttaaaacagacctcaaggcacttgatattcagcaggatttatttgtctggctgggacattcctcattttatatccaacttgccgggaaacggattctgattgatccagtgctaagtgaatacgcttctccagtaccaataataaacagggcatttgctggtaccaacatttacaaggccgatgatattccgcctattgatattctgctgatttcacacgatcattatgatcacctggattataccaccattaaagccattcagcagggcgtgaaggaagttatgacaggtcttggcgttgggacacattttcaagcgtggggatacccggaaaacattgttcatgaagcagactggtatgactctattcaggtgggtaatgtagcgataaccgcgacaccggcacgccatttttccggacgaacattgtcccgagatcaatccctgtgggtgggttatgttatcaaatctacagataggacgctgttcattagtggggattcagggtatgggcctcattttgaggagatcggaaaacgatttggtccattcgactgggtggcactcgatagcggccaatacgacccgagatgggcgaacgtgcatatgtctcctgaagaagcgctgcaggcggcgcgcgatttgcatgcaaaagcgtttaccccagaccatattgggcgcttttcccttgccccacatgactggaatgatccgatgaggaggatcatcaagaataatacgtttggtcatgcactgtggactccggtgatagggcagcctgtctattttaaccgtccccctacccactattccccttggtgggatccgaaatga

SEQ ID NO: 82012 - DNA, 390 bp, Citrobacter koseri
atggtggtaagtatgcaaaaccatactaaaggcaataatgaagtgaacatgcatgaagagatgagacgagcttttagtctcctgtctggtaaatggaaacttgaaataatgtggatgcttaaccaacgtatttatcggtttggtgagctgaaaaaggcaattccgggcatcacacaacatatgttaactgcgcagttacgtgagcttgaaagtgacgggctggtggcaagaatgatttatgctgaggttccacctcgcgttgaatattctattactgagaaagctcgggggttaggaccgacaatggaggcacttaccgcctggtggctagaatatggtgaatcagtccctccgaagtcgagtggaagagggaggaaatcaaatatctaa

SEQ ID NO: 82013 - DNA, 456 bp, Citrobacter koseri
atgacatccttgaacaaagtccactacaaacagcttgggaatgacgccatgatgtccaattatatttactgggccagtactattttgctatcagcgctctacttttcatcagcagcactttacctgaccaaaaaggcttgggtgcgcgatacgttaagcagacttgactacccggccacctatctaattccgtttatgattgtcataaagattcttgggccaatcgccattctgtcgcgtatcagtatgccgattagcgatcttgcttatgccggtatcttttttcatttgctcttatcagggatggctcatctgggtgtacggaaacccttaggtgccctccccgcagtcatcggtcttgcacttctggtcgtgtcgttttccacacaaaactcagcccgcacctcaccttctccttatggcgagatactggctgaaagtttcattacgccttaa

SEQ ID NO: 82014 - DNA, 1443 bp, Citrobacter koseri
atgaatcaagaacaaatcgatatcttaatgtcgtgggaaaaattattaacgcccgatgaaaatagtattgaggagctattaaaattagtcgtatttaatccgtcgagagagcataaaaaagacgacaatggccactatattgatatggcagctgaagatgctaaggatctagcaaaagtccttgtaaacaggcttgctgatttgtatgaacattttgaactgttgatgacttttcctgagcagaaacaaagctggatttttgcaaagcatttggtcctagaagcagattatacagaagaactactcaatgtaactctcgaacatttgcgcaatcataaaactgtaagtactcagttcttttctggtttactttctggactttatataaaggaacctgttaaatggaaagaaatagttgagttaataggttcagatgaaaagctcattaaatattatcctgacgcgatacgcacaggtcgctttgatattacacatttagatgttttcattcgactgatagctgaagataagctccctagttattcagccgctacgctcgtttatggacacgcgacagagcatttaactgaaaagcaaatatctcatttttgtatgtcactcagtgaaattgatgcgactgcaaattgggtagcacttgataatatgaatatgtacatatttggtcgtgaagatgtggactttactcagctaaggctgactttggtccatctggttcttaatgtttcttttaaaaaagaagataagagtcgctattcggatagctatcattggctaaactcagtggaacgactattaaagtctgaaaacgctgaatttgcattacaactatgttcgcatataattgaccaagttggcggtaataacgttgattattctgatttatgggattacctaaataatgctttttataaagcatttgagctgcacgggaattatatctggccaaagatctccaacaaattcaatgatagaaacgcaaataaatcgtattacttaactgacttacttggaagtgggaaatcttataaaaaaagagatattagtatttttgatatattaaaaccagaggttgttgttgcttggtgcaaggatgatgttgctcttcttattgtggctcgggcgatttcaatgttcatctcaaatggcgagcagcgtgtagttaacccattgttgattcaattattagaagaattctctcataataaatcattccttagtgaaatatctgctaacttttcaagcagatcgtggataggatctttagtgccatatttagaggctgataaggagatacttaaaaatttgacctaccatgctaacattaatgtaagaaactgggctgtaagtttcatagagaacattgatcatcaaattaaatatgaagaaaatcgcgatgctgaagagcatatgttaagaggctaa

SEQ ID NO: 82015 - DNA, 429 bp, Citrobacter koseri
atgtccaggactccctatacacgcttacgcattgagggcttccgcaaagcagaggcttccctgagacttgaaggaatggaccccagtggtacgcctctgtacgagtccgttaaggcacgtattatttcaggcgagctgacgtatgagcaggggcgttcagagattcttgcatactacacaaaagcagataccgcagggcctgtgacagtgggagaaatgttggcagaggaatttttaaaaccaatgaacatgtctgatgatgaattagcggaagctatgggtatttctcgacaagatgttaaagatattatctgtggtatgcgtcgtcttagtgatgatgaagcccgcgttcttgctggcatatttgatactgatgagtatttttggagcaatctgcagatgttgcaagatcgtaaagaaggaaagtag

SEQ ID NO: 82016 - DNA, 258 bp, Citrobacter koseri
atgcgggggcggacgttcttaattaaagctgatgaaacttactttgagttacgttttccgattgaatatattaataatctttcattggactgggaagcatttattaagttgtctgaagatgttagagctattatatttgatgcgttgggtgatatgagaacacccttaggcttcattagatatataaaagaaccttttggtaagaaaacatccgaatggcaagaaaacggtgaattgctatccgataacgagagttga

SEQ ID NO: 82017 - DNA, 558 bp, Citrobacter koseri
  misc_feature (546)..(555): n is a, c, g, or t
atggctggattaagggtctttgtttcctctacttgctatgatttatcgcttctacgttcgcaattaagaatttttatacaaaatcttggttatgaacctatgatgagtgattatagtgatcttctctatgacccaagacagcatactcatactagttgtattgatgaggtttcttccgccgatgttgttgttctgattattgggtcccgttttggtgggaaagtagttccagaagctttaacaaaagtagattttgattctcttcaagagccagggaaaacaatagagtttttaaaaaagaaagagaatatatcgataactcagttggaaattttaaaagcaattgagtctgggattcctatattcacttttgttgacaatgcagtatggcatgatcactctttgtatgagaggaataaagataagggtatcattaaagatataatattcccatccattgaaaaaaatgaaaccgcagtttttgtttttgaatttattaatttcctaaggcagagagcaaaaggaaatagcttattcccattttcnnnnnnnnnntga

SEQ ID NO: 82018 - DNA, 498 bp, Citrobacter koseri
atgacgggatcatactttttattaccgatggcaatgggggccgtgcttggttgggtcagttacaatgtagtcgctcacgttacgtcgaaacggcaaattaacacgctacgtgctatatcatggggcgttcttgcaactctcaccatgatgcttggcgtaagcgctttttccgctataggagcggaacagacgttaactaagcagaacgtccaatgttcaaataacagccctgaatgttatgcgaaagcgcactataaccccgtaagaaagtgcaagcaggcaattgatgaaaaagcagaatttcaccatatatggctgaaaaacgcatctcaacagatttttgaaaaatatctttggcacgaccagaccaaacgaaccatacaaatcttcggtcaacaggctaaagcgataaacagtttaggaatattaacgccactccaatacttttgtattttcaacgctaacaccggagaaattatcgctgcgtcatttgagtga

SEQ ID NO: 82019 - DNA, 1707 bp, Citrobacter koseri
atggatacatttttcccttttaatacctcgccaaaatataagatagaaaacaataaagaattagctgcactaatcggtattactactgctaagttaacttattacgcctattatttaagtgatgatgataagtatcactcattcaaaattcgcaagcgaattaacggagaaagattaattgaagctccaaatagagggcttaaagatatccaaaaaacaatttctcattttctggagagaaactatacacctcgttcttgcgtatttgcgtatgttaaagaaagaggcatagttgaacatgcctcaattcacgttgggcaacgatggctactacgcttggatttaaaggatttcttccattcaataagttcagctcgagtttcgggagtgttaagacgcgctccattttgctttgctaaatccccggcaaatactgtagcgcgtctttgcacaaaagatgggcgtttaccacaaggttcaccagctagtccagtgattagtaacatcatttgcaaaggattagattataaacttaagcaactagcttcctcaaacaagtgttactacactcgttatgccgatgatatatttatctctaataatggaagtgtattcccttcggcaatagcaataagaggcgacgatggtaatgtagaactaagtgaagcaataaaaaatatcataataaattctggttttgaagtgaatgctggtaagacgactcttcgtaaaaaatccgagaggcaacttgttacaggggttgtagttaacaaaaaaaccaatataccgaaggagtatataaagtctatccgtgcaggactttatgcgtgggagaagtttggcttggatgctgctgaggaatattggaagaaagaagtagaaagatctaataaattcgatgatcaaccgccacaaatgagattggtaatacgcggtaaaataatccatgttggtcatgtaaaaggatataccgatgcaactttcctaacgcttgttaagcgattacaaacacttgatagcgaatttaaaattgatgagcagaaatttcggcgagagataaccgacgaaattcatatttatactgaaggtgtgacagatacaaaacatttccaagcggcgctgaatgcatttcaaaatcgtggtgaattccttgacttaaaaataatattcaaaaactcaagcaagcctggaagcgcaaatcttaaaacgctgtgtgaaaacctgcgagaaacatcacaaaaacatctcactttatgcatctttgatagagatgaaagaaatatagtaaatgaaatgagtggttctccgggtaattacagagatcacggtaataacgtatttagtctaattatccctattcctgaatttagaaaggggaatgactcaatatgtattgagcatctgtatcaagactcgttactttttacttgtgatagcgagggaagacgtttgtattttaaggatgagttcgataaccttaattgtcataaaactgatcctaacctcttctgccggattaacaagagttctcttgtgtatgatgataatgtgattaatatctcagagaggaaaaatgtagcattgcctaaaaacaaatttgcagattatgtttgcagcggtcaaccaccttttaataatgtcgattatagtggttttcatgaggttttcatacaaatacttgaaatagcctctacgtataataagtag

SEQ ID NO: 82020 - DNA, 666 bp, Citrobacter koseri
atggcaaacggcaagttcatcgcttactatcgcgtttccactgcgaagcagggtaagagcggtttagggttggcagctcaaagggaagctgtctctgcttacatcagaagcactactggggaagttgtcgacgagtttgaagaaattgagacaggtaaaggttcaaatgctctagaaagacgtccgcaactgagggcagcgctggccgcgtgtaagaaacaaggtgctattttgctgatcgctaagcttgaccgcctggcccgcaacgtgcacttcgttaccggactaattgaaactgggattaactttgtggccgccgatatgccacaagctgacaaggtgatgatccagatgcacgcggttatgtctgagcatgaacgcgaccagattagcgcccggacaaaagcagctctcgcagctgccaaagcacgtggtaaggttctggggatggcgggtagtgctaacctcaaaagtaacattgaagcccgccaacaagcggcagagagcttcgcagagaatatgcggccgctaatcgaaagcatgaaagtgcgcggactatcgcagcgcaaaatggttgaaacgctaaatgcttcacggacaccagcaccgaaaggtggtgagtggggattgtcgcagctccaaagggtaatttcacggctcggctga

SEQ ID NO: 82021 - DNA, 483 bp, Citrobacter koseri
gtgaactctgaaccaaaaattagaacagccaagttaattaaagaaaatcgcacctcgttaaagcttgatgaaagcacttgggccgcaattgacatgcaggctgagaaacgaggcactgattggaaaggctgggcaaagatggtgcttaaagcaaatcctgactcaccaaataaggctgctttgctccgagccgcattagtagaagaattgatgaccgagcagattcttaccctcgcggaagctgggccagttgaagccaatatcagccatgaaattatcggaaatggctattggcggttaaatgacgagcaactacagaacgagctagacggcgcaaccatcgtcacacgtgataactcatttgcggcgtttaccttactgactggttacagagacaaaagctacggcggatcaccattcgtgatcattcagaacgagttacgcggtcagctacaccttatgatcgctccagatgttgattaa

SEQ ID NO: 82022 - DNA, 330 bp, Citrobacter koseri
atgaaagttaaaacgctttcagcaagtgagacggcttactttttgagagccaagctgggtgacgtcagggcatgggatgatctattagcggatatgcgacgcgggagggctagctatcacggtgaggtcttacttccagtcgggaggtattccgctactcgcccccctcgcccggtttatctatttagtgaagtatgtgagttcgtcgaaaaagtctcacgcctttgccctcccccctccaagccgcacctgttgtctatgcttgaggttgacattgacctcaccgataagcggcattggagtgttcgccctccaatagcgacgagctga

SEQ ID NO: 82023 - DNA, 894 bp, Citrobacter koseri
ttgaagcaattcagggctaccgccgtcatcgactggctcgacgttgagatacgcaccgaacacccaacacaacaccaacacatccgcaaagcgctgaaagagataacgggcgttaatcgctggtgggttgaggcaattgatattcagcccggtgatgttactgacacattccgcattcgctttcatgacaagctggcaaacaactatcagcagctccgtgctgcgctccatgcgttagccagacggttcacgtttgcagccgaaccggctattgccgggatagaggttagttgcgacttctggcacagacaaagctcggttgaagcaacacgcgctctcacataccgattgcaaacaagcctgttcgcaccgggcaccaatcatcgccaatacaatggcaacaacagaagtaaccaatttcttgataagcccggcaatcgtataaacccggagtataacctgcggattggcaatgaagatgacgccatttcatggcagtgctatcacaaacgcaccgacaagaagcaaccgctgccgcttcgccagcaacgtgctcgcatagaggtgacattgcagggtgacgcgctacagcaacacggcttcggtcttctctccgggctgcaacacttcccgtttgaaacgctcgccagcctattcacgttccgccgtccgatagctacggcacagatggcaaagggggatctgttccgactcatttcaatcaactggatacgctcatacagagatgcaacggcagaacgcggcattcactcgttcagcactgtaggacaacgcgacaagaaaggcagaacgcgggcagagagtagccacctaacagcagacaaagaactgagtaacagggttagagcagcgttgcgaaacctacacccgtga

SEQ ID NO: 82024 - DNA, 357 bp, Citrobacter koseri
atggcccggtccgatttaccttatattgctatcaacaagggagccgtccagagtcgacacggagataatgctttgagaaccgtcgagatactgcaatacaccttacgcaaaggcaccggtgccgcttttcacgccatcatgcaggaaatcagcgttcccctacaccgccaccatgggatcgatgttgtttcgtttggcaactcgcttcatgacccggattgctactacctcattcgcgcctttgacagcgctgaaaaatggctgcggttctcaatgctttttatgcaagcgatgactggcgcagcggcccacgcgaagacattattcgcagcatcgaaaccagcattaaaacagtga

SEQ ID NO: 82025 - DNA, 1449 bp, Citrobacter koseri
atgcaagtcccagttatgtctgacttaacctatttagattttgatagtaatagcgagattttaaaaagcctgaccggaaaagttaaaccgcaatatgtcgacctatttaaaaatgcgaccggttccacaagcttaaaagtagggttgaaaattgaagctgatgagctaatagtattgtgcgagcaacttttagatttatactccagtgatgaatacttgcagtccttccctaatatacaaaaaatagtgcctgagaaagaccctctaaaaattgagcgactagatgattcgcttttagatgcgtttattaataaaagccctgatttatctttatcaatcccggagatcgtagattacagcgataacatttactgcacctttaaaggaagaaaaggggtatcccccatatatactgatattagccttcacgagttttatgactatttaggagaaattgacttaaacacgttcaatatagacaagattaaaagcttctcgcttaatctctgcaatgaagaaggcgttataaccaaggcgtataatatctacagaagctttatctatgatattcactttgacaatgaggatattgtttatcatctctgcgatggtgaatggtataaggttgatcaagattacttacagagtttaaaggattatatagatgcaaggtgcgaagatactctacttccaccatataatcatgacaacattaaggataacataagaaattatagtgaagaaaattataacgaagatgttgcaaacatctcacgaaaccatatctgtttagatcagaaagatatcagtcctgatggacacacacaaatagaaccgtgtgatataattagttaccatgataataagtgtatctttcaccatataaagatatcatccagatcatcacaactcagtcatcttttcaatcaaggagtcaattcaatagaattgttgattttggaaagcaggagcaaagaaaaactcaaggaactaatcgaagaaaatattcaagataaagatctggatagttttaaccgtgtgattgataatggcaattataaagttgagtttggtataattacaaaaaaaccagcgagattgaagtctgagaatcttcctctattttctaaaataagtttaatgcgaagcttaagaactcttgctctttatcgcacggaaggtgcggtaagttttatagaggatattagcccttctaaagaaagttatagtaaatacccacgtattacagttattgtttctcttggtgcaaatggtaaaaatgaagtccttgttgatcacaatcaaccttttcctcagggaaaaaaagtcgcgagatgctctcaagaaattactaatagtcctgtcggctcaagatatatgattcatgtcaaagctagtgaaaacggagatctcagcacaagccatgcctgggaaagcgaacgtatataa

SEQ ID NO: 82026 - DNA, 1938 bp, Citrobacter koseri
atggctcaacgtgataatctgtatcgccgtagcagcggtatttatgttgtccgtattgcagttcccgcccgataccgtctctacacgggacagcgtgagattcacgcttcaacagaaacaaacgacatcagaaaagcgagagcgattgccgcaggtttattggttgtctggcagcgatgtctgggtgagtatcaaaaattggatagagaaaagttggtaagcagtgcgcctgctttggctggcgaaggaatgatcagcctcgctgaattttgcggtttaacgagcgcttccctgcaacaagtggcgcagcgactacttgatacgaatatcccacttttttggcttgctgatgggcgtcctgcctactatgtagaagatctttcactcgttgataaggatgatcctgaggcttctggatttatcatcgatagtgccattaacatcgggataagaggttctcttaacggctatatccagcctttggttacttcacgtatattacgtcagattatcgctggtgagccgctagacgcagaaaccgcatttaaatcctcagaggcttcctccaaagccgcatggttcgttgactttcccggtgtcgaaatctcgctaggttcactaatgattcatcgtgtgcaagccgagcgcttacgattgttttggttgtcatatagcccctcactatctcctgcaactcctgagaagccaaaagcaatatccactgcaatattatcctcatcattgccggagaatgagtatgtaaatctcaaatattactcggtgaaaatgagcgagttatgtgaaaaatatattcgctacaagcgcgggggaaaattcacgggaaaggcagaaaatcgagttcgggaaggttttagcctactggttgaagtcatgggggattcaaagcttgtaaaagtagatcgtgactatctccgtgagtatgagaacttgctaaggtcgatacctgcacggcgtgatttggctaaaatccgatacaaaatcaatgacattcatgagctgatggttaaagcaaaagagaatggcgaccctctaatgagcgataataccgttcgtaagtatatgcgggttatatttgaagctttcaggtgggctgatggagaaggtatttttattaagtctccagcgaatcaattcttcgcacctgtagcaaatgaaaagatggatcaggaattcaaagctgatttcactgatgaggatttgcacgctatttttaaccgtccttggtttaaatgtggaactgtggatagaaatagagagggacgcttccatcattaccgtgcatttcattactggttgccactcatcggattctttaccggagcaaggattaatgagttatgccagctttatctggatgatattaagcacgatgatgccggattttatttctttgaaatcaacagcgaacgtgctgatcagtcactgaaaacgattaattcacgacggaaaataccgttgcatccgacattgatcaaacttggattaatccactattgcgaagcattgaagaaagcaggccatgagcgtttatttccagagcttccttaccaccctgtaaaaggatacggcgataaggcttcggactggtttaaccgttcgttgctgaaagtgcagttaggatttgaaaagggcagcaagaaatccttccattcgttccgtcacacgttttctaccaggctcaaacaagcaggaatcgacagcgagacgcgtgcgcagtttgttggacatagccgcggttctggcgagacagagaaccggtatagcaaagatcacccaccagcagccctctttgctgtccttgagagcgttacgttagggctaccggaagtcgctccgtttgtttgcgaagatggtgtagatgcggtagctgatgctatcagaataaaacaatctaataagcaatgtagagaaaagtaa

SEQ ID NO: 82027 - DNA, 1515 bp, Citrobacter koseri
ttgctgattcagaaccagtatttgacgctgctagttcagcgagacgattttttcggttttgatcagtttcagaaatacaccatgacggagctgagagaagaaaccgagaaatcttatttgtctcgtttcaaacacgcgcatggcgccggtgtgttttctcaggtgcgttatctggaaggacgttttgctccgaagagcgacgccagcaaaatgcaaaaactgctcttcagtgtgttaagaggatattgggaatacctgagtgctcatatgcctcttgagtgggtgcatgataagccgctgactatgtcgcaagtactcgataatctcgaacaggttgaatctcatggcaagtgtgcagagctggcactagtgccgcactttatcaaaagaaagtcaaaacagggtgaggtttatccttacgcatttctattcaaggatctgaagaatcaggcagcaatcttgatggacatgctgaaatatgagccgcgcttaacacgctggattcgaggagtggatgcggctgctaatgagatgcacgcaccaccagagttgtttggacctttgttcagggtgctagccaaatcaggtattgctcattttacctatcatgttggcgaggactttccgcatctgataagtggtattcgatcaattgacgatgccttgaggtttttgccgttgcggaatggcgaccgtcttggtcactgcacggcgattggtattacacctagcatctggaaacgctctttgccattgtctttgtccatgaccaaagaaacgcgattgctcgatttggtgtttatctggcgagaacttcgaagtcatccggaactgctgcgttacgccagtgatgcagctattgaagcggttcatttggcccatgagatattttcgctggaagaagaaatctcgattacgacccttgatcaggtgcttgagttgcggagtgtgttggctgaatcggaaggtctactgggggaactgtatgggccattaaaacccaaatccctatggttggaagagtacgagcgcgccagagagttggctaaaaaggcgggtatgaaaaggccgctaaagttgtataagcaatggcttacatctgacaatgtgcaaaagcaacgtgctgaatatgttgaagttgccctggaatatttgccggatgaagcggttgttgcattacaacaagctgtaatggcaaaaatggcagaccgaaacattgcgatagaatgccctccgaccagcaatacccgtatcagtcagtatcgagatgtcagcgagcatcatatctttcgctggatgggcttacggggtgaggcgattgaaggtgatgttcctatgtctatttgtcttggatctgatgatccagggatcttcgccgcggatttgaaatccgaattctatcatctgttcgttgtgttgacccgaaagttcaatttgtcgccagcggaggctttaagaaaggtggctgaggtgaacgagaatgggcggatttatcgctttcatgatgtcagctag

SEQ ID NO: 82028 - DNA, 339 bp, Citrobacter koseri
atgcaaattcacgctatcactatcaacacagtcaatccccaaaagttagcagcctggtggtcagaagttattgggattcctgttgccaacgattatggcataattgtccaattggcctcatcacctggattcccccccattcagtttcagagaattgataaaattccaacaatcgataataacgtttttttaggtttggcaacatcaaattttgatagcgaaactgagcgtttagtacaaattggcgcgactatttttaagaagtttgaacttcctcaaataagatacacaacctttactgatcccgacggtaataaattcgacttagttgcaaggtaa

SEQ ID NO: 82029 - DNA, 873 bp, Citrobacter koseri
atgaagaaaaataataatgaaaccacgtttaacagcagaatgcctgactgggtaaccatcaaagaggctgttgaactggtgagcaaaactgtaaaaatatgcgaaagtgaaatttaccgctatactttcaatcaccaatcgcttttaaaaaaaataaaaataacaaataaaaaaatcagtctacattcaattggtgatgaactaatcgaccagctctgcttacttgatagaagtagcatcatgaatggtcaaaattatgttgtcagtactgaaggaaattttgttcatcctgaaaatcaggttgtggacactaggctcttgggtcatgaatacgttgtaatccaaaagttattagctattagcctaggcattcctctgccaataactggtttttataatataaactatggtatttctgtgagtctggatggcgatctttatcaggtatttgaaaaaataacatggccgcaaagaatcaaaaaacaattagacctactagggggcaagcaacgttgcaatgaagtagaagttgtaaaatcattggcatataataaaaatccaaaatcggattacttcccaatatacaaccttcccaaagatgcctgctttgtcatccttagcgaggagattgataagataataaaagtaaaaattcacagctcatcagtacaatcatcctcatcgcggatctccacaccagtatctcgtctgttatggctcgcttgcaaaaacaacaatttaatcagcccattacttaaacagccttacaaacttctttctatatttgagcagtgggctcttgctgaaggcataacagaccgattgagtggtgacacgttaaaaaatgcacttgaacgaggttctcctcattaa

SEQ ID NO: 82030 - DNA, 588 bp, Citrobacter koseri
atgttcccatcactaaatcacgcagtattgactgaagcactgtacgccctgaaagaaggtaattttcgccactgcgaaacactgggatttacttttgacgaaatgaagtcacttaatcagcttacccttgatcaactgtttattatcagtcggaccgcagatcagttcatgaccttaactgtccatcacgatgttttacggcagattttgacgctgtcgcgtcaggaaattcagcgtcagcaacagatgaatcgggccattaggctgggtgcatcaattaatctgttgagccaatattttggtctcacctctaatgaaatttgttttcgccgccgcctgctgggcatcgtagttcctatgggacgtcccccagttccggatgaagagaccgatgctgaaatctggcggcgatggcaaaaacatcgggtgaaaaatcttcagtcatttgaagcactggaattgatgatgcaaatcaccgaagcgctgtcctcacttgtggaaagtctatctctgaacgttgtctggagtcgtatatccctttgcgaaaaggaaatatcgacaaggaggaggtcaacacatgccggatga

SEQ ID NO: 82031 - DNA, 210 bp, Citrobacter koseri
atgccggatgaaatcgatcgcgatcaagagtttaatgagaagcgactagacgaaatgattgaacagagccgtttcaaaccgggtgtcacaccatcactgtttcagtgttgtttatgtggtaaacccattccagaaaaacgccgccagacgctgccgggtgtgacaacctgcacgcaatgccaggaaaacctcgaacgccgcagacgttaa

SEQ ID NO: 82032 - DNA, 234 bp, Citrobacter koseri
atgagaaaacctatgtatcacgtatttgtcactcacgaaagccagcccgatacgcagggagaaaaaaacacctactggaccagggttggtgtggcatttgcccataacggcaaacccggcctgaatattgtcctgacacccggtattgcggtttccggcaaactagtcctgcttgagccacgggaggatagcaatctgccacagagtacggagcccggcgaaacggcgctttaa

SEQ ID NO: 82033 - DNA, 711 bp, Citrobacter koseri
atgctttccaccactgcctttctggcggcggccatgcagtgtgccgccagcattcatccgtccactgcactcgacgtggcacgggtggaatccggttttaacccttatgccatcgccgaaattatcccgagggccactcgctcccccggagataataatattatctcccatcagcccgccagccgggacaaagctgagctcattattcgccgcctcataacacaaggccgccgttactctgtgggactgatgcaaattaccagcaccaacttccgtcattacaaggtgactgccagcgacctgcttgatccctgtaccaatttgtccgtttttgaacgcattctcagcgactgttaccagcgtggcggttccctgaaaagagcgttgagctgctattactctggcaatttccgtaccggtcaacagccggaagctgctttttccgggaccagctatctgcagcggatgggttatgtttcggcgtctccccgttatgccgtaccgggcacccgcgaggatagcgccatgatcccacagcccctgaaatccatccctgccgatcccccatcccgctcccgcgtgatctggccggggacggttgttcgtggtgtccccgcgaaactccgtcatgagaaaaccgccaccgcacaactctccccgccatcagtgcgccggagtctcccgcagccaatccatatggaggaagaataa

SEQ ID NO: 82034 - DNA, 705 bp, Citrobacter koseri
atgaaaagacgttttcatgctctgtttttggcgggcgtcatcgtgagcccgctggcgcacgctggtattcccgtccttgttgatgctgacccgctgcgtgagttcgaatggttgaaagaagcacagcgctggatgcagaccgcgcaacattatcagagccagatccaggcgtataaagatcagctggcgacggccactggtgtccgtgatatcgctgattttgtggatcaggcgaagagtctgaaatcggatctggaaaaactgcgcaaaccgggccagacacttaatgacctgctactttccggcggcacctccggacagttcgatgcgctgtacgcgaagtaccgggttttcgatacctgcaatgcggaacagtcaggaagttatgccaatacctgcaaacagttggtcatcaacaaagcgatacagtttgagcagactggcgagatccaggagcaggtcagccagacgctgggcgagattaacggcctctcgaaccgcatcgcactatccaaagactcaaaggagtctcaggaccttgccaacagcattcagctaaaatcagtgatgctgaacacgctcactgaccagtgggaaatgagcgtgaaggcagcagaaaaacgcgaaaaagtactggaggatgagcgtattaaacagtggaatcagcaacagttaactgcgccaactcctgatttaaaccgctag

SEQ ID NO: 82035 - DNA, 1065 bp, Citrobacter koseri
atgcccggtggtgtatttatcggcgtggaaaagcacctgataggaggagttactgatgccacaaagggactgatgatgtcatattcttccatgatggtggggctggcggcaacgtcagccacgctctatatcatgtggcgcggttaccagactctggcaggtaagctgtccacgccaatggaggatgtcatgtgggacatcatgaggatggcgatcatcctgtcctttgtggcaaatgtcagcggttatctcgatggggttattgatgccattaatggcctgaaggagggattttccggcagcgataatatctggcagttactggatagcttatggggtaaagcgaaagtattgggtaaaacgttacacgacatggataactcaacgtacataaaagatgagggcatgacggctcaattttatgtctggctcgggatattcgtattaatgattatcaccgcctttatttcaatgatcgcggaagtcatggttttactgctaagtattaccgcccccgtctttatcttttgtctgctgtatggctttttacgccccatgtttaacaactggctgcaaaatgttttcgccgccatattaacggttctgttttctgcgttatcactgcgcattgtcgttaattatctaaactcgcggttagatattgcaacccaactgtcagcacaatccaacattgtggagttaggcgcacaggtctgtctggccggtgtctgtgctgcaatactggtctacctctccgcaaaactggccggagcgctggccggggccggagcaaccgtctccatgcaggggctggcggcggtgggtattggtgcggcggcgtttggtgcaggaaaactggcagcaggagccggtaagcagactacccgcacccttcaggataatattcagggctggagaaatgccagtgcgggtaaacccggcagtggtccgggatacagtgcggctcaggcgcgtaaatacgcgattgagcagatgattgcccgcaacgaagcccggcgactggcgcaatcaagagaaacagccgttcaaaaattccatcgttaa

SEQ ID NO: 82036 - DNA, 1215 bp, Citrobacter koseri
atgaatgacgaatatcagcattctgtgtctgatggagcccgaccttctccggcgcaggcggatgacgatattgccgcgctggagcgcgaggcccgtacaaagcgtgaagcggcacttctcacagagcaggacgatgaagagaatgatccgctacaacccgccgtcaacaaactgaaaaagcgcaggcgcgggaaagccaccgcgtttctggcgatcgccgccgttgcactgattgcgctggcatcggcgggcaactgggtataccgcaatctactctggcaacccggtgaagagaagcggcaggatgctgcgccacagccgaaccgcagcgattaccggcagcgtaccgatctgggtacgcaagataccggagccgaagcatcggaatctgcagaaaacagcccgcgcatgacgacagccccggagcctgaaatgccgcctcaactcaataaaccccattttttagttcggcgtgatggttcagccgctgcggcccaaaacccggtccggacccggcagcaggagatgacgcaggcggcttctggacagcaaccagacatcacgtcgccaccgtctgaaccctccccggcagcagtccggcgtattccttacaacccagacctgtacgtcccggaaaataccgctattccctgttcactagattaccgctttatctcggaccgggcggggaaaatccgctgcacgatcgccgaagatatctggagtgccagcggtaatacgaagctgattgaaaaagggaccaccgccacgggcatttaccagactggcgcagaaacagggatgacgcacggacaggaacgcgcctttctcatcatcacaaaactgcgtacccgccagcccccttaccttgatattccgctggtcgatacccgcgctgccggagaactgggcgaggctggcgttgacggctggatcgacacgcacttcagagagcgattcggtggcgcattactggttggtatgatccctgatattggtgcatgggcatccaacagtgctggtcagaaagatcgaaacacggactataccgaaaacagccgtcaggctatggcggatatggcacgtaccacgctggaaaacagcatcaatattccaccgaccctcgacaaaaatcagggggagatcatcaatctgatcacagggcgggatattgatttttccggcatctatacgctgaggatgaagagtgaataa

SEQ ID NO: 82037 - DNA, 387 bp, Citrobacter koseri
gtgaataatcgaaagtttctgtttggcgtcaccgcgacagacgtcatcgtcagggacgattacaacaatgccgtagtcaacgacgtattgtcacaccttaccgggatcaggagaatagtcatgacatgttatcgtgccgggggcacattgacagagctcatcattgactttggggaagaacaaacgttctgccttaccatcggtgaaggttctctggatgtaccgccttttacctcagacgatatccggctgacacataagcagatatcgctgcctgatgtcaccgatattatcattcttgtgacaacattagcccactatgccggactatccccctcctgctccgttgatggagaatcatcttccttgctggagttcagctcgtag

SEQ ID NO: 82038 - DNA, 1008 bp, Citrobacter koseri
atgtctaagacgaaggtactgttcgcttattgccatgaaatggggcgctgcttgtccattgatgaagcgcgaacggaatttttctccagaaagccggaagaaagaaagcggttcactttttcctgtagcgatcgcaactgtaatgtcaccatcagtggcgttaactatcacgtcaaagctgaagatggtgaaaaattcagggctgcacacttccgttcaccccatcctcacaagttcggatgtgaatgggtcgcgttcaccgaagatgccgatcaggacagacgtccggacgaatcagaagctgatttcacggaaagaaaagcaaaacaaaagctgacggactatatcaactgctttgatccttcaattgatgatcctgatggcgagccagccgatctcgttaagcttgctactcctgcacatgttaaaaagcctgacggggatgatgataagcctggtacaggtgaagagccgcgctggagtcgctatacgcgaactaaccagcttcagcgacttatcgacacatggcaggaagcgaaagaaacgctgcctcaggatgagttcagggcgttgagactcaggatcatgcaccacagtcaggtctatcttcatgaatatataacgcatattcagagaggattgactaacccgtacgcaggcgtcatctatggcggcggaacgctaatgcatcggtatggacggggttttctttttaatttctttgataaacatgagggtaaacctgttcgcctgtatgtcagtaaagatctgatggcgaaaggccagtttggtcattatatcgatgaaatactggacacagaaaacgtcagatattttcgtgtttttctgctcaatccggttatttctgaacgggaaaacagcgcaggaaaatccgttatcaaccttgaaatatcaaaactacgtcaactggcgatttactacgagctgaactccagcaaggaagatgattctccatcaacggagcaggagggggatagtccggcatag

SEQ ID NO: 82039 - DNA, 399 bp, Citrobacter koseri
atgatgaaggttatcaatatgctgctattttcgctggtactttccggctgttcttcacccccgccacaggttcctgttgaatgggataaaacgggccagtcagtcaataccggtttaccggaatggcgagacaacccagttatcattccttctccggtcgttaaatatacatggttattatccattcacgcacggaattttaatgagacacactggacgcccgccgtattttacgcggtcgcccactctgcgcgaattgttgttgctacaccatcaggcgcagaattttttactgcaaaagactggctgcgtcgatatggcgcaaaaagtgttattgaatatcagctagtctctggctgcctgacatgcagcgacacccgcatttatttctcgtattaa

SEQ ID NO: 82040 - DNA, 306 bp, Citrobacter koseri
gtggataaagaagacctgtttatttccaacattcactcaacgcatcacgacagaatatctgtcacgtgtatctatgattctctgtcaaaaaaagcacatcagggatgcggactttattacgagatatatgaaagccgatttatcggtttattgagacatcatctgtcacaacttaatgaatcggacgctgagaagctcaggcggtatgccgaaagtcagggaacgaaagtcgatgatgacacctaccatgcggtatgcaacgctgaacgagaatgccgggctgaaatagcccgcgaacagacgtga

SEQ ID NO: 82041 - DNA, 804 bp, Citrobacter koseri
atgcttattcataacgttactgaaagaaatgaagccgcaaaacggagaatgcaggcattgctgtattttctcaaggaagaaacgttctctgatttgcggaccttaaaaaaagttgtcggctataaaggaaaacataaccatgcgatgtataaactgctcaataaagcggttgcgatgggcctcctgattaaacacgaatatccggtattgaccgggaaaaaatcattgtgggggctcagcatgcagggactggcgatggtggttagcgctgatgacaaggttttccccgcctattttgagccgggaaaactcaaacactcgacgctggaacatcgactgttaaatcagcgggtcaggatcgcccttgaggaaaaaggcggtacaggctggcttaacggcgatcggagagagtttatgtcgcgatacccgggcttccggcaccgaccggacggcatcattaccttaagcagcggtgccatcgttgcggtggaaacagagcgaacgatgaaaacccgcgcccgttacatcagcatcatcaacagtcatctggccgccagcgacgccgggcgctggcactatgcgatgtatgttataccggatgataaaacgaaagaatcgctgctcaggctgtttggcagcatcagaacggtgatgaggaacaacgttcccgtcccgtttgatgcgaagaaccgagaaatgtttctcttccgcacccttgatgaactggtaaatagtgtcagtgataaacaaggggccccttcttcatcagttggtgacgatgccgggagggaacgccatgtatga

SEQ ID NO: 82042 - DNA, 1050 bp, Citrobacter koseri
atgtatgacgttttgactcatggcgactgccttgacgtactgcgcaatatgccagacaactcggtggacagcatcgtgaccgacccgccatatggaattaaattcatggggaagacatgggactacgatgtcccttcaccggccatctggaaagaatgtatgcgcgtactcaaacccggtggtcatctgctgtcgttcgcgggctctcgcactcaacaccgaatggcagcgcgtatagaggatacgggctttgaaatacgtgacatgattgtatttctctacgagaccagcaatgctgctcaggccctcattgaaagtttgtctccggaccagctcaaattgctggacgctgcatttggacgtgacggaatgctaggctgggtatacggttcgggctttcctaaatcccaccacgcgttaaaaccggcactggaacctattacccttgcccgtaagccattcaaagggtctatagcatcgaacttatgcgcgcatagtaccggcactctgaacatcagcaagtgcaggatccctctggcagagggggaatccccctatagttaccctaatggaccgggtggttccgatcctaatcacatgtggcgaggcaaaaataaaggtgatggcggtatcgccaaacaaggaaaccctgatggtcgctggcctgccaatcttatccatgatggcagtgatgcagtacttgctatgttcccagacactcttaagcaggaggaaattagtagcgccagtcggttattttattgtgcaaaggccagcagaaaggaccgtggtgagggtaacaatcatccatgtgtaaagcccaccgagctgatgcgttacctttgccgcctggttacgcccccgggcggcacagtacttgatccgtttatgggaagtggaagtaccggcaaagctgcggcgatggaaggcttctgtttcataggtattgaccgagaagaggattatgtgaaaattgctcgcaggcgtattgcggcagcacgaagcagcatggctcgttctggcgatgcagaaaggcacgttgataattga

SEQ ID NO: 82043 - DNA, 1053 bp, Citrobacter koseri
atgaaactaaaaaaaatgcttgaaatggattttattaaagagtttcaagagcatctagaaactgactttgagtatgaactcttacatgccagtcttcgcaactattgttctcatggcaaccctctgcgcttcaacaactttgcatttgcaatacgtgagctaataaatcatgtgctgaaacgactggcaccaaatgacagagttatggcgtcgccatggttcactaaaaacaaaaataacgccactgttacccgtaaacagcaagctaaatacattgcccagaagcatataccagatcaacttcttgatgatgcagctatcgaaatcctagatgatggtatagcatggttcaataaaaactattcttcgttaaacgattacacccatattagcgaacattcatttgatagtaaccccaaggagttttttgagagtgctaaactgctaatagagctgtgtaataaaatattcgataccttcgatgagcttgagcgtgttattaccgaatcaataatcgaggaagttcagaatgaagttactgatatcacgatgaataatattcctgacgaactggatatattatcttcacagacagctgttaattggtgcaatgttgaatccattgagttgctgaatcttgaagaaaattatatttatcttttggtgcgtggaatagttgaaattactagacaatatgggcgtggggaggattactttgcacaggaagattcgtatcccttcaagttcgcagtctctatccgcactgataatttcaatgtaatagcaccattacttaacactgtagtagtggatacaggctcatggtatgacgatggcgaagggtctgctcattatgacacaatttatacaaccagcagctttttggagatcatctcacatataaatattaaaccaaaaacaaagagaagattgtttcctgagcttagtacagtagtggcgttagagactcatgaaagtgaaggtatatcagaatcggtcgtaccagaaatatttcctctaaatcaaggaagctcagatttaactgaattttag

SEQ ID NO: 82044 - DNA, 1395 bp, Citrobacter koseri
atgtctacgaatatgtatagtctacaaagaatgcctgctgaagcatttaagatatttgcaatgtcattaccacatgggcctaattatggtaatgcagaatttctttccgcttggtcaaatgaaaaagggcttggatatggtgcagtccttcaattcagcccaaaatcatatggccttgtcgtgctcaggcgacgagaagattacgtgctggtacctatcgagtataagatgtgttttaccgagcaggaggcattagcgcatcttgataagcacctttcagccggagatcatttattaccaattccatctgggcaatcacgtagagcccgactggatcaggttggtgagcgggatatttgtcaggcatttatacaattatcgtccacgataaaataccgaggggcgtttcatttaattgccgagctctatctggcattaccaaaacctgatgataatttcataaccgatctccagaaccgaggattcaactctagaatctgggagctataccttttcgcatgttttaaagagcaagggattaaagtttttcaagattatccatctccggattttatgctcatgtgcggtaataacaaagcatatgttgaggcggtcaccgcgaatcctactggtccgggcagcctggagttgcctcaaacacaattcccccctagagatcgattagctcgcacagcaggtgatatggcagcacggttcgctaagaccctcaggtctaaactccagagaaaatatgaagaactaccgcaagttaaagggttcccatttgcaatcgctatagcagattttagcggtgggggcactatggtctggtctcgcgagtcacttccaacctatctgtatgggcaaactgcatatacagtcaaaacgtccaaaggtatgaaggctgctgcattatctattgaacggcttataggacatgagcatattcaggcaggactatttaatgatccagggatggcaaatttatctgctatcttatttagtaatgctggaacattgccaaaattccaacgaatggcaatccaagctgaattttcttcaccaattgtgaaagcccgcagaattggaattttatttgacaggactgaaggggccgtggaaccaattgacttcgacctagatattcaatcgcctgaatatactaatctttgcggcggcaaagaattttggtgttttgaacttgaagtatttcataaccccaatgctgctcatccaatgtcccatgatttcctaccaggggcaacgcattggtttgaacacaatggagagatcatttgtgagactcgatggaaaaaccaagtacttgcatcagtaaccgagtttcgtattgttccagatatcgccgacaaactcaaaggcaaggaaaagtcgtga

SEQ ID NO: 82045 - DNA, 1071 bp, Citrobacter koseri
atgcgtgaagcaaaaactgtggatatggctatcaataagatcgctcgttcacatttcaggaagcaagcctaccgagcaactaaatcatatgagctccatcaatttgcgtcgctctttaatgccgagtatctcaataagcttgctaaactatttttcatatctgatagccatgcttcgggcaacctacatgcgtatcattatgctgtagacgtgggttggattgataaaaagccgcttgctgaatacgctgcccagactttattcgaaagagttgaactaggggatgctctaatcttatacaatgaccatttgatagatagctcggggaagcatgttggtgtagtccatgagcgagccgtcattattcaagcaaagattacgaaaaacaaagcccgggaacccaaagtgacagtgacttctggtgattcctcaaataaagagtttgcactttacagtcgatggccaacgtttcgcctaaagcggagaaaattctacacgcaaaaattcaatcttccagcactaactcatctgaaaaatccgtatccgtatgcattttaccttgcagcaagaaagtcttactcaatacattcaaactggccctgccactggatgggagcaccatcgcagctatctaaaaaatgcaatatttccgcaggagagttattgcttgcacttaaatctggcgtgtcagttaatggctatcaggttggtgcagaacttaattctaatccagaatgggctcgcttggttagattagtactaatgaaggtgggccttggttggacgaatgtaggatggtgtggtcgtaccatccctaccagaatgcaagggaaacatttacagcttgtaacccaacaactgccaacactcatccaaaaaaaatattacactgatcttgttttgagcatgaatcgaatattctttaaaccgacgatttccggtaaacaccagaataattttgtaagcaaccaaagcttgaaatatgcccctcaaggtaaatttatggtattgaggattaccagaatcagctcagaatttgctcctgagtcagaaaacttcttcgaagggtaa

SEQ ID NO: 82046 - DNA, 342 bp, Citrobacter koseri
atgaaatctactgactcagagaacgattcatttctaaaatggggactgaattgtaatgtgacaccttgctttggtgctcgtctggtacaggagggaaaccggctgcactatctggctgatcgggcctgcattaccggtgaattcagtaacgcagaatctttgaagttggatgaagtattcatacgttttatccgccaaatggaatcgatgctgaccactggtgaaatgaatcctcgccatgcccacagcgtcaccctgtaccacaacggtttcacctgcgaagccgatacccttggcagttgcggctatgtatacatcgccgtttaccccactcatcgttag

SEQ ID NO: 82047 - DNA, 441 bp, Citrobacter koseri
atggatacacacaaccctcagttcgctgagcaggcagcaattactgcctcagtggtccctgacgagctacgcatcggcttctggccgcagcactttggctccataccacaatggataacccttgagccccaaatcttcggctggatggatcgcctgtgcgctgattacagcggcggcgtctggagcttttacacactcagcaatagcggcgcatttatggctccggagcctgacggtgagaaatggacgttgttcaacccgatgaatggcaacgatgcggagatgagcggagaggctgccggtatagcggcctgcctgatggcatacagccaccacgcttgtcgcaccgaatgtgacgcgatgactgagcactattatcgcttacgtgagtacgcgctaaaccatccggaatgcagcgccattatgcatctaattgactga

SEQ ID NO: 82048 - DNA, 2610 bp, Citrobacter koseri
atgctcagcaacgagtttttgcgctttttccaaactttagacacagcagatgtacctggcgatgttagaaaaattgcgaacttagtgtgggataatatggatagtattatcccgttaggtaccgcgcagggccagcggattcgtcgcatcgtcgatctggcgcagtcttcatggaataccctcagtccggaagtcctgccactgcctgagcagaactccgaacgtgtccccacgttcagtcggctaaaaaggctgtccgttggaccgttcagaggatttgccagacaggaggaatttgatctggactcgcgtctggtgctgatttatgggcctaatggtaccgggaagtccagtttctgcgaagcacttgaatatacattattgggtagcgttgctgaggctgaaagtaaacgctttcgtaatcaaaccgactattttagaaatgcatacgtcaatcagttttctgcgcctgtgattactggtgttggatctcaagggcatgatgtggaaattgagaataacgaagcactgcaccgcttttgctttgttgaaaaaaaccgcatcgacaacttttcaagaattgcggcactggccccggcaaggcagaccgaactaatttcaacgttattcgggctggatgtattcaatgattttgtccgaaatttcactgcggagattgatggcagatacatcgatctgataggcgtaaaagccgctcaacttgcagaaaaacgccgcacactcgagggggccatccaacaactggaagcgggtaagacggagcttgaaggactggtttctgaggaacatacgctggcttctgggtaccgcgagggcctttcttttcagcagatgatgattgaattaaaaggggatgagcaaaatatcgggaccatccggcagcttgaggctgaattacagaaacctcttccgaacaagagtcacctgacctgtgcgatgttgaaggacttaaatggctctgttgaaactgtattggcggatctgtatggcaaacagaaacaactggcagaggcgagtctgcaggtttcgtttaaaagtttattcgaagcagtcgtccagttacagagctccagcccagaacagtgccctgcatgccataccccactcctacaagctacgaaaaacccctacagtcatgccagtgcagaattgctgaagcttgagtttttgtcaacgttgcagggtgaaatagctcagttggaacaatcattcagccagcagatgtaccgcgtctcacaagttgtcggcacctgttgccagtttcttcctcatgaaaatgttctcgaaagattccgagaagagaatggcatcgctttgtggcgtgatctgcatcaaccagcaggcgatggtgtcactccctggtctcttctggagaaacaggtgttgcagttggaagaagaagataaaaaaacagaagcagctgctaaattgcgggaatcccggcagcgtgatcttgtggggctgcgtgagtcagaacgccagataacaatattacagacaagaagaagtacgacagaaagggccatcgcagcggctcagttgttgattggtaactttgatacggaaaacaggcagcttattgaagaggttgtacttgaggaatccgttgtaagaaaaaatagagaaatctcaggagcctatgcccggttcgtattgcagttgaacgcctataaagatggtttgcctcagcagttggttgcgaatctcggagacagcattgttattttgtacaatgcattcaaccgtaatgaccctccaggagaaaagctcgctggtatcaaactccccctgatgcagaatcagcggttggaggtggcatttcagaacaatccagcgcaatattttgatgctttacatgtgctcagtgaggggcatgttcgctgcatagggttggctattttgttggcaaaaaacatcagtgagcaatgcccacttttgatatttgatgatccggtcaatgctatcgatgacgatcacagagaatctattcgaagaacactgtttgaagacgccttctttgcagataagcaaatcatcctagcctgccacggagaagagttctttaaagacatacagaatttattgccagctccagtggctgcccaatccagaactttcagttttttaccacgtcttgacgaattgcatatccgcgtggattttaactgtgcccctaggaactatattctttcagcgagaagtcattatggacgtaatgaaatcagggaggcgctgactaaatgcagacagtcacttgaatcgctgatgaaggggaaagtctggcgttatgtaaacaaacacggtgacggtaacctcagccttaaactgaggtcagcaactgcacctattgagctgcgtaatctctcagatcaattgaaaaaacaaattggtcgtgccgattttaatgacccaaataaaaatgccgtgttttctcccatcgaggttttgaccggctttagcggagaatcacgtgaatggcgatacctcaataaaggtacgcatgatgaaaacgacagggcagaatttgacagggcaactgtagaagccatgataggtgcaatcgaggcgctcgatcaggccgtgggataa

SEQ ID NO: 82049 - DNA, 579 bp, Citrobacter koseri
atggccactagttacattagtgaacacagtgctgaatactatttagtaccagcgctcaaaaacattttacaggaacaatatagccatatcgccccagtgttcccgtggatatcccgagagtttagcaatatctcaaaatatcttcataaagaggacctgtttcatgtgctggtaatgtttccgcgcagaccaaaaataaatgcccctgatgattgtgaagtatatatcactattaatgaagaactggatgcttttaataaaatagggaaagaaaaaggggttccagtgatagctggttgccctagggctgtaaatgtctgggacttatcaaattgtaataattacgcatggataaatcttagtcaatttaattattatgagtatttaaacccagtaagtaatttgaaaaaaaatggatgtttgctagagaaagaggacattctatctcttgtgagaaatagtgccatttttaatttagagtcttttgaagtttttttccgatatgcaaaagagactcaacctcacaggatgtatggaagtcaatataagcctgtatactttctgattaagacacactga

SEQ ID NO: 82050 - DNA, 477 bp, Citrobacter koseri
atgctcgctatctataggggaaatgattaccgtatcgtggtaggcagcaagagagtcgattatgctgatgctgctgccagaagcctctttgcggaagccagtaataacttccaacgctacaatctacaaaatgactgttttattgccaccggtcagaactgctatgtgatcccgtggatgggggataaaattgtcaatacaattacgtccctgcttatacgttgcggctttaaagccagttcatttgcaggtgtgattgaggtagaggattcaaacgttgcctctgtccagcgtgcacttaagaaaatgttattgtcggggttaccttcagagtttgagcttgctgcagttgttcctgacaagtatctggataaatatgacgagtatttaccagagtctttgcttgcgaaaggatatggggcaaaggcgtatgatatggaaggaacgtgcatctggctgcagaaataccttcagtag

SEQ ID NO: 82051 - DNA, 1341 bp, Citrobacter koseri
atgagcagtgcctacaatagtctcgatccccgtgtccgtaggtgggtttataagcaaggctggtcatcattaaggcccttgcaggagagttctattccagcaattttagcccgtgatcgtgatgtactaattagtgcaggtacagcagcgggtaaaacagaggctttctttctgcctgcctgttcggcggttgcagatctcaccggtggatttggcattatctatatcagcccgttgaaggcattaattaacgatcagcaccgtcgtcttgagagtcttggtgaagccctggaaatgcaagtgacgccctggcacggggatgtaccacaaagcaaaaagaagaacgcacggacaaacccgtctggcatcttacttatcacacctgaatcacttgagtctttgctcataaactcattgggttggctcaaacaggcgttttcttcagtggcatacattgttattgatgaattccacgcttttattggctcagagcgtggtatacagctgctttctctgcttaatagaattgaccatgtgctaggacgccagttaaatccagttccccgtatcgcgttgagtgccacgctgggagagctggaaaaagtgccagaactattgcgcccggataagagattaccttgtgaaacggtaacagacagtaatagcacagccacactacaggttcaggttaaaggttatcttgagcgggtgcccgaaaaaggagaagagctccagagctctgccgaacagctcgtctgcgcggatattttcaggctatgccgtggcagttcccacttggtctttgctaacagtcgaaagcgtactgaaagcatagcggcaacactgagcgacatgtgtgaggcaaatgtcgttcctaacgaattctttcctcatcatggttccttggctagggagttacgtgagacgcttgaagcccgactgcagaaagggaatttgcccacaacggctgtttgtacaatgacgctagagctgggtattgatattggtaaggtgcagtcggtcatacaagttacacctccgcattctgtttccagtctgcgtcagcgtatgggacgttcagggcggcgcggttccccatcggtgctgagaatgttaattactgaatctgaacttaccgcaaccagcagcattgtggatcatttacgtctgcagttggtccaggcgatggcaatgatcaggttgatgatctctaaacgctggttcgagcctgcagatgtccggcagaaacattactcaacgctgctacaccagatccttgctattactgcgcaatggggcggagttcgtgccgatcagctcctgtctcttatacacatctga

SEQ ID NO: 82052 - DNA, 528 bp, Citrobacter koseri
ttgcggatcctgaatgactgcctgcaaggctccgccgaaaatattggttttatcctcggggggacgccagagtttcttttcgatccacgtaaggggctctacagctatgaagcgctccagtcgcgtctggcagaaaaccgattcgcacagaaagcagaagtgattgactactcgtctcccacgctgcatcttgccagcctcactcctgaggaactgtatattttactgaaaaatcttcgtcatgtttatgctggtggagatcccgcgaattatctggtgccagatgatgctctgaccgggtttctacatcactgcagcaaaaccatcggagatgcttactttcgaactccccgcaataccataaaaggttttctggatatgctggctgtgctggaacaaaacagaacgatgaactggcaagcgcttatcgagggggtggcgattgaagaagacaagcccagcgatatggatgacgccattgtggaggaaagcgatcacgatgatggtctggcgaatttcagactatga

SEQ ID NO: 82053 - DNA, 720 bp, Citrobacter koseri
gtggatgagaaggatataaacgaatccatagttcttctaatcgaatggaatcgccttgttagacaaatatcttccaagataaaaccgtcatctatgcttataggtaagatctggacgcgattattttttaatctatcaaatattgcggcaaaacataaatctttgctgggtagtgatcccttggcgaatgaaggtaagtatgcacatcagactaatgcggcaaaaattatgcgtttcaatgtgttggcttttctccatgcagttttagtggaggaagatgcatatcatagggttagcgagagttcagtttcatgtatttctgtgaattttaagcagaacccggttacatctgttggtcagttagtgactaaattgcaatcgatggagaatctctcggatataagcaacacgcatccgatcttctactctattttgaagtgtccattagtgcatccatttattttccctttgggtagtattaattcggcagataatttgctctcccaacaggaaaaaagtcttcttactctgttggatggaattattggtgatggatttaaggataaggttcagtttagtgctgtagaatctatagattcttcaaagtctgtattgggatttaagtttctgaatgtttctggtattgctgctgcaccatatgaatcaaagaaaaagagtgacagtgttaattcttcggctaatccagcggcagatgaataa

SEQ ID NO: 82054 - DNA, 180 bp, Citrobacter koseri
atgctggcaatcgtgtacgtctttgcgtcatgcccacttagtattaacgcactcttcgccattgccttgcttcatgggctgatactggcactcaacgtctttatgaacggtcagataatgaatacgcgtcatgtatcacaaagcgttgaatctacatgcacccagactttgcacttatga

SEQ ID NO: 82055 - DNA, 303 bp, Citrobacter koseri
gtgttcggaccagaaacctggctacggatgaaaacccctgccgatcatacctgggacggggatgccgtctggtacgacaatataactttcggcctgtcccctggtggcaaagtcaacgtctggttccccgatgtcgccgggcgtcccagccttcccgtaaaaccgctgaaaatgtggaccctcgcaggcaacgagatgacgctctgcaaagactacgtcgttcccggcggcacgtttaatttcattcagtcgacgcaggatttcattaaaggcaaaacctacccgtacggcgactgggaataa

SEQ ID NO: 82056 - DNA, 360 bp, Citrobacter koseri
atgaaaaagatagttataactttgttattggccagtagctttactatggcgcatgcagctgaatacgttaagagaaatggtgctttatcgttgtggatggggaatggcactgctgaatttaatattaatgcatctcacggtaatgcttctggtgtttgtaatatggagggcattgctgaacgtgtcggtgcaggcgcagggcagcgaaatcgctgggtttacagcgactcatcgagtgcatgtgtggcagtgattagtgaattgaaagatggttctgttaatgttatgacccgtagttgcgagaactattgcggtatttctgctgttggctcaatggatgggcagtaccaatataattaa

SEQ ID NO: 82057 - DNA, 225 bp, Citrobacter koseri
atgacggttgttctgccggatggcggcgtaaacgccttatccggcctacagagtgcacgttgtaaacccggtaagcgtagcgccaccgggcattacgccttatccggcaaaaaccgatttactcctgcggccacaaccatgccgcgccgcgaacaccgctggaatcgccatgtaacgccttacgaaccggcgtttcgcattcgccgccaaaaacaaacggtttaa

SEQ ID NO: 82058 - DNA, 588 bp, Citrobacter koseri
atgcaaagacattacccacactttaaaaaattcactccaaatgattttctactgaatatgatcaatcaccatcttaatcagatcctggcatgtcattccaaaatactggcgttccgaatggattttgattaccagcgaggcactaaccgatttattcgtaactcttccatcgaaatacaggatgaccttagagaactgacgcaagcaatgatcactcttcccggagttatcggctttttttgggtactggaatggacatctgaaggggctgttcatgctcatgccattttttatcttaatggtcaggaacatcagaaatcattcccatttattttacaggcaggagaactatggcaccagattactcatggagaggggaaatatcagcaatgcaaaccaaaaaaatatcatcaggacaacattaacaatgttgtccgataccaaaacaacgatgccgtaagcagcttgagacgcatagtgagttatctgacaaaagaagaccagaaatatggcttcctgatctggggatgcaatgaggtgccactaccagcacgacagggaagacccagaaaatatatacccggctaa

SEQ ID NO: 82059 - DNA, 207 bp, Citrobacter koseri
atgactattcaaatttccctgctcgaagaacaattcatcgatatggcattcattacgcaactcacccagttgaccgacaaatggttttacaaactgattaaagacggtaaatttccaaaaccgaccaagtttggccgcagttcccgttggcgtaaaagtgaagtcgaagcctggctgcaggctcgaatcgacgaatcacgcagctag

SEQ ID NO: 82060 - DNA, 1503 bp, Citrobacter koseri
gtggctaagataatcattaaaaaattacggcatatcaatagtcttgagtttgatattcctggcactggagtttggttacttacaggcaccaatggtactggcaagtcatctgtcctaggttgcctgcgccgaattgggtatagaaacgctttccctgtccactttccggcatcacggaagtctgttcgacttgactccaatgagggggcttcaattagttactcgaacagtaacggtgaggttgcatacacttacgttaccgaacggtggtcaccaactcctaaaagtgctagtaagtttttagagggtttaggttaccctgaaactatttatgtagccgctgatgctgaccggattgaaccccgtaaggaggatttttctccaaataagcttcgtcctgctcagcaagatatcgttgatgctgctaataaaatttttgggacacaaaagttttctgctttgaagatcaccaacgttcgaacgggtattggttctcaagcgtttgttttagagctgccggctcatggcaagcaagctaagagttactactcagaaaagaattttagccttggtgaaatctgtattctaaagcttttgcgtaagctatcgtcatgtaagcgtggagcgatgattttaattgatgagattgagctggcgttgcatccgacagcgcaagctgaattgcttgaatatctaaaaaggatcgcaatagataaatcacttacagtcgtggtgtccacgcactcggcaaccttaataaaacaagctagcaaaggcagtattctacacttgcaatcggatgagaatggtcatgtgatttgcgctaaaaattgcttcccttcctatgtgttaggtgcgttggcatatcaagaggagtcagcctctgacgtagttatttatgttgaagatgaagctgcccgagcgattcttgaacagtttgtacgaagatttctgacagactcaattgcgtctcaacatcttacgccaagtgtcaccgtaattgcagtgggaggccttgtagaagtactgaggttttacgtccggcagcgacccatactgccatcaattacgcggtcttacgtgatgcttgatgccgatgcggaagatgttctcgagaacgctacgaagctcgacctaatcagcatttacagagacgagagacagagaatatcctttctaccgttcacgccggaggaaggagttgctcaatatatacacatgaatagagcgcacttagtgaatgaagttcgtcggtatttcggactcaatggggtacatcttcgaccgcgcgatgtccggcaacctcctcagcagggtacccctaggtcacgtgatatttgcaaggacatagttaacgaagtttgcgatgcattattggcccagattccgaacgtgacattcataagtgttaaggagacagtattaaagatttttgctgagcactactttggagcgaatcggccagctatcatgcagctagttgggccaataatccgaggttag

SEQ ID NO: 82061 - DNA, 1236 bp, Citrobacter koseri
atgagttatagcaaagatatttccagtcgaatttttaaatcatgtacattaaataaatccacaatcgaaaaaataatattttctcacgatgggttaattggtaatgtcattataatcactgacaatgaatcttttgaaaaaggattagatgatttgtcaaaaaccaatgatggacaatttatttcaaagatatattttagatattacattgaaaaaaccttatttgaatgtggtgatcacccggatgatgatgtagatgttcgtgttaaatatttcaaaaacctcattaatagtctaagtttagttaagcaaacagaacatagggttgttaaacaagtatttggtggaaatataaaaaatgggtctcaccctattaatctagggccattttgtttttatgagattcctcgccatgcaagtcatataaaacttccattctcagaccctttctttagtaaacagcaacctacaaaaactgttgttcaattatgtgtgaaatcattagattcctataaagcttcagaaattgcagacacttttttcaatacactagaattgtcattttctttcttattggcgaagaaaggtaaagagttttctataggtgctttcatgtatgagttttctcctaccgaaccaccgattatttatacggaaggctcaatttttggaaggactgaaaataaacacgaacaagatcaaataattgatctggctgatctgactgattattttccagaaaaaaaagcaagctcgatgacaaatttttttaatgtcgttttatctccgggtacccagcttgaaagaaaactttccagagcagttgaatggattggagaggcttatcgcgataaaaacagatcaagtgccttactgaaagtcgtaattgcgcttgaagcacttttcaaagttaatgaacgtagtgttattactgcctctatagtagctagcatggctgaacaatgtgcttatataagtggggaatcagtagatgaatgcttagaaattgaagattacgtcaaagaactatatggattaagatctaaagtagtccatgctgggtctaataaccttggagaaaatgagttgaaaaaggcgttaacatttagccgctccataattttcaaattgatagacttgaaaatcaacgagaaattcgaatcaattgatgaattgcagccaaagatccgggaaagcaaatataaatcatgtccactatggcaaactactaattag

SEQ ID NO: 82062 - DNA, 1086 bp, Citrobacter koseri
atggcatttcagttaaggcattgtgttatacacgaactagtaaaagaaagtggaaaacagcgcgttgaggctattattaagcaggttctgcctacagatgacaaatatgtgcaggaattagtaaaatctctgaatgacttaattggaaaaaaagaaaaccaagcagcaagaggtacttttgacattgaggatcctacttacagggtacctaatgctttccaagactattacaacggtaaggcagagcctgattcatttcatacattttcaactgtgtgtatgaacgagcttactcggcaagcaaaagacccttcgagagttgccgcatccggtggagcaatagtatttgctcattacacaagtggcacctcaaacttcatgcttattacaatggttaagcaaaaggaagctttacggctagatgaaaatttaaagcccgtcgggatcgttcaaatagacatggccaagatacatcaggctgcaagggtaaattttgatagatattatcaatatgaaacattaccggaagaagaaaaacctacgtatctcgctttcgtcagtcctaaaataaatcaggatgcttcggggtattttgtagcagccttaggatgttcagatagtgttccctctgctaaagccactgatggcgcacttaatggggttaaacaatacttcgaagcgaataaagaattaactgcgtataaaaatcaagcatatgatgctgtactcaattatttaacattaaaagaagatggtaaattagcatctcttaccgaaatcgaccatgcagttagaagtacagttcctgcagataagtatgaacatatggataactttataacctatcttaatagtgaggaaattggactaccgttagagttttctattaacagagctgtgctcggtagacgtgcgaaagtaaaagctaagtcaaatgggtgggagttaaactttgaaagacgattttttggtacagctccaggatcagtaatccagtataatcgtgcagataaaaaactgataatatcgaagctagacgaaaatatcatacaaaaattagaagctgttcttaaagagagagggtaa

SEQ ID NO: 82063 - DNA, 1170 bp, Citrobacter koseri
gtggccctcagtgataccaaacttcgcagcatcaacgccaagccttataacggcgcacccgaagtcacagatggtgacggactgagtgtgcgcattaccccaaccggaacgattacgtttcagtaccgttaccgctggaacggtaagcctgtccgcctttctgttggcagataccctgcaacgtctctcaaagaggctcgtgtgattgtcggcgagatgcgcgaattgtacatcaaggggctgaaccctaaaaattattttgccaaagaagatggtgagttaacgctgaaggaatgtctggatcagtggtggactaaatacgttgagacactcaagccaaacactcagacgctgtacaagtcagttgtgtacaacacaatgtacacagaattcccggatgcaccggtagtaaatatccccgtttcatcctgggttagattcttcgataaacaggaaaagaagaacggaaagaaagccagggtattgcttctccagcttcgatcagtgatgaactggtgcatcagtcgtcagttgatcccatcatgtgaagttttgaaactcagcgtaaaaactattgggaaaaagcccgatgtgggtagccgggttctcacatataccgaacttgcaaaagtctggctggcgctggagaacaacaagatcgttacctccaacaaagttcttcatcagttactgttgctatggggggctcgattgtcagagctgcgcttggctaccgcaagtgagttcaacatggatgacctgatttggactactccagaagagcattccaagatgggtaacgtcatccgcaggcccgtattcgaccaggtaaagccctatattgaaaggctgctaaacgcaggtaatgacgttattttcccgggtcaaaagctggacaaggcaatagaccgatcgtcggcaaatctctacatgaaaaagctaagggaagaaatagacataccggagtggcgaacacatgattttcggcgttcgctggtaacaaatttgtcaggggagggagtcatgccccatgtcaccgaaaagatgctggggcatgagcttgggggagtgatggcggtgtataacaaacacgactggctggtggaacagaaagatgcgtatgagctgtatgccgataaaatattctggcatgttaaacagctcggttaa

SEQ ID NO: 82064 - DNA, 186 bp, Citrobacter koseri
atgactactaccgattttatggaagagcaggaagttttcgacctgctcaaaaagaaaaaaacggctgtctggcgtttacgtaaggaacacggttttcccgatcctgtactcacctacccatcacgatatagccgaaaggcagttatgaaatggatagatgaaggcggcgttaaccgagctgtttaa

SEQ ID NO: 82065 - DNA, 942 bp, Citrobacter koseri
atgaccaataaccagttaaacagagaacgtctggaaaaaattaaatcatggcgtgaaacctatggagctggaagcaacgtaatgctgccagctgaagaagcggaggagctggcccgtatcgcgttggcatcgcttgaggctgacagtgacagcaacaaccacccggcgcacggcccgctctcaaatgaccgcctgcaccgcattcgtgaaatcttgggcaaagcagcagcacaaagcgacggcggtaacatcggttacgcaatgtctgatgctgtacgtgcgtttgatgaactgctggaagtgcggggcgctaagccgataggaatcaccgacagaagcgagattgaatgtctgaagcgaggcgagatggctaacgttatgcctcccgattacaaaggagttgatgctggtgatgaagtttttgtctacaccgccccgacagcgccggtagtccctgcaactcttccatgtgctgttgagttaaagccaggtcttattatcggcaagggctgcaaaacagaaactttgctgactgctctgcaacgtcgcgccgactattacgctgaaattgacgctatgacgccggaagaacgcgcagagcatgacgccaatatcgaagcattcaaagccatgttgccgcaaccagcgccggtagtgcctgataagcatcacagcgttattgctgaacagttggctaacgttctatccagcatggatgttaacgaccatcagcgagccgtaatcagttgcgcagtcgacagactaaataatgtttcacagctgcttcaggcctctccttctgcgctattggtgccagagatgctggattatcagggagccaaggagctttataactacctgatgaccgaagaagaaaccaatgcaaccgtaaatggctggaacgcctgccgcgccgccatgctcaacggaggtaaatcgtga

SEQ ID NO: 82066 - DNA, 756 bp, Citrobacter koseri
atgattcactatcacggtgggcctataacaccggatacgtgcgcaatgaaggcgtggaaagcgcgtcacgcgttcataagtttcgcgcaccccggacagataaatctggcatctgaatattgccagtccttcgctctcgacaatggcgcatttaccgcctggaaggaggctgggaaaaacaaaatcgactggagcgattacgacgagtttgtggctcgttggatgaatcaccccggattcgatttcgccattatacctgacgttatcgacggaggagagcgggaaaatgacgagttactgcttgcgtggccgcatgggaaattcatcggcgttccggtatggcacatgaacgaaagcgatgagcggtttatcaggttgtgcaacgagtggcctcgggtggcgataggaagttgcggcgattacgacgttaagcgaccaaacctcgcagtagccagaatgaaagacctgattcgtcacgtcgttgatgagtacgggcagccgattacgaaacttcatgggttacgcatgctgaacccgttgattttcacaaagcttccgctggcgagcgccgattccacaaatgtggcccgcaatatcgggatagataaagcctggtctggtgcctatgcgccagcatcgaaagagactcgcgccgccctgatggtagagcgcattgaatcacataatagccccggttcgcttacatattgcgagcagcgcgaccggttcgacatgcagttgcaactggcagtgtaa

SEQ ID NO: 82067 - DNA, 690 bp, Citrobacter koseri
atgacagacaaacaggcgctgcgtaaagcagcgatagctgcaacaggcgggaagtgggtattttctcgatccggtgtcaattcaaacgtacaggcaccaattgagttacagaaaggcggcagagcgcttgttgttctgtgcaagttaaacaacgccggatggagtggtcagattcagacagaaaataacgcgaagtttatagccgccgccaaccccgccaccgtgctggcgctgctggatgagctggaagccagagataagcaggttgctgagttagttactggccgtctgaacctccagtggatattgaacgtctatgtccacgcatacgaagaggccaaagaacagattgctaaggacgttgagataaaagccagactatgccgtgaaagtaacagcttgtttgacaggttacgtgccgcagagaagcgcatagcagaactggagtcccgcacagtcaccttagagccgttccgctcatttgttaccgatgccgacattacagcgttacaccgcttcgcagaatgttgcgatgaccctgaatctggcggtcacgatttggaaaaagagcaggtaaggcggcttgaggcaatcggagcattgcagcgttctgggcgaatcagctacatcacaggctttggtgatgtcctgatttcgattaccaatagcattaagtgggagactgagtga

SEQ ID NO: 82068 - DNA, 225 bp, Citrobacter koseri
atgaagcagtctgatttaccccgctgccctgattgcggaaatatgcctgaatacgccttcaaagttgatcactggggtatgtatcgcggcggcctgaaatgcccttacaactgtcatcgggtgcaacttaacagtccagtcagttcccgtaatcgagctgaagaaatactggcccctcaatggattgagttagtcgagaaggttaaccaggagtccgcacaatga

SEQ ID NO: 82069 - DNA, 810 bp, Citrobacter koseri
atgcccagcttaggccaactctacaatgacaaagatgccgggttaacaacccgcaaaacctacaacgtccctctggataaaatttacaccgaagaaggttacaacgtccgcgaacttaaccaggcgcatgttgaagaattccgcgacgcattcattgccggtgaatatatcccgccgctggccgtagaggttaccgaacgtggagtaaaagttatcgacggccaccatcgctatcacggcgcgctggctgctatcgaaatggggcacgacattgtgcgcctggaatgcaaggacttcgtcgggagcgaagcggataaaatcgctttcatggtgaccagttctcaggggcttgcgcttactccacttgagcgcggtgcggcctaccatcgccttcagaatcagggctggagtccttcagagatagcgaaaaaagttaagcgctcagagtcagatatcctgcaacacctgcaacttcacgaatgcactccttatatcaaaaagctcgtgcgggatgggtcaatgaactacgccatcgcaatcggcatctctcgtgaacatggtgtgtacgccgatcgcgaagcttctcgcctgatgaagaaagccgaggctgctggcaagaaaaaaatcaccaagagtattgccagtcctcagtttaatgcaggaaaagccaggaagttcctggagcttatttcttcatgtgctgaggattccggcgaagtgctgtccattgaaattccaccagcaatgcaggctgaaattatttccattcttcgggagtttcgccacgagtcagatgaggttacctcatga

SEQ ID NO: 82070 - DNA, 813 bp, Citrobacter koseri
atgtctcaaattgaaggttctaccgtgctcgacatccgcgatctggtctctgcaacgctgaagacctcaacggatatcccgtctgtcgttgtgccagaaggttttgaagtcaaatctcttgagaatctgcaactcgctccatcgcgtatccgtcaggccgcaaacctgatttctcccggttcgctgatcgcctatatccagcgattccgtgatgaacgtactgtagttttcgcggataaaaccaaaacgcgtattgtcgccgtgcttgatttccaccagaacgctgacaatccgagctgggctgcacataaagctgtttatgactgcccgttctccgacgaatggaaatcatggacagccaacgatggcaccaaaatggaccagatcaactttgctgaatttctggaaaacaatattcagaatgttgcgccggttagtgattcataccagggcccgtcggggacagaacttctggaaatggttctcgaattccaggaaacacgtaaatctgaattcaagtcagttaagcgcctttcggatggcacctgtcagttccagttcagcgatgaaaaatccggctctggtaataccaaaatgccggaaaaaatcagcctggcaatttctccattccataacggttcgccatatcaggttgatgcacgcatccgttaccgactgcgtgatggtcagttgatcctctggtatgagctgatcgagccgaagaaagtcgttgagcatgccttccaggagatcgttaccgatatggaaaaccagctcggcgaagacctcccgatttacgaaggttccgtttaa

SEQ ID NO: 82071 - DNA, 360 bp, Citrobacter koseri
atgtccgaaacaaaaaataccacgccgtttagccagcaccttgcttatatcaataaaggtactctggatgctgaacttactgaggcgctggctgaagtaattaaggctgtacgtgaaacgggtaaaaaaggtgccgtaacactgacgctgaactgccagatgctgaatacccgtgacgaaaacactatgaaagtcacgccgaaagtaagccgcaccatccctgaacttgaccgcgctgacaccattatgttctcaacctctgatggcgatctgctccgcgacgacccgtcgcaaacccagcttgatttgaaagtcattgagccaaccgctcagaccgcgcctatcaagcttgcccagtaa

SEQ ID NO: 82072 - DNA, 150 bp, Citrobacter koseri
atgaaacctgaacacatctatcagttgacggggcgtgatgtgctccgctggcgccgtaaacatttcggctcaaataccgggttcgctaccgtcattggcgtgaccctgaccataactttaattcttcttatttcgaggatcgctgcctga

SEQ ID NO: 82073 - DNA, 210 bp, Citrobacter koseri
atgaaatatacgcacaaaagtcattttggtttttccgctagtgtgagaagcactcagctaaagacgacccagtcgcttggcaccttcactacagctgaacgggcaaacatagcagccagactatataagcactgggagaaaaccttccccgcaagcgaaatcccaagaaaaccaactcatgtcgatgccttaaacacatttggctattag

SEQ ID NO: 82074 - DNA, 300 bp, Citrobacter koseri
atgaaaattactcgcgagtatatttcaaccatcaacagcggaaagatacccaaccgtaaacgttacggacgggtttgctggagatggtcgaacggcgcgactttaaaccatgcgtcggaaccgtggcgggacaggatgtcggcaatgcgggttagtgaattaatcaaaggcttcgggccttttactaatccactgaatgggggtcacacgatggataaagcatacgaagagtattttgaaagtctggctgaaggcgaagaagcacttagctttgctgaattcgtggaggcactttcatga

SEQ ID NO: 82075 - DNA, 210 bp, Citrobacter koseri
atggattacgaagagttggcgcaactgcgctatcaggaaatgtgccggattgtgggtgatgtcgtgtttgctatggtggctgaagggcatgagacgaaaagagtggctatagctgacgtgatacgaacggagatatcgaagggacttgataagtgggatgctgaccagattcaggttatggggctggcagtaaagttgctggaagagtag

SEQ ID NO: 82076 - DNA, 492 bp, Citrobacter koseri
atggatggtcttgggccagcatcaaatatggatgttgatgtgccagcacccaatattgacacttaccgtgtagaggttctcgaccttactgtgagcgcgggaccagggtctttcatgatctctgagtttgttgaggttctacacgccattgaattcacctcagagcacgctcgatcactattcggtaatcgttctcaagatgatgtgaaggtgatgacggtagatggcgatagcatgtccccaactattaagtcaggtgacagattatttttcgatatttctgtgagaaattttaaggttgatggcgtctatgccttcgtgttcggccaacacttccacgtcaagcgactacaaatgcagggtttacagttggcagtgctatcagataacccagcatacaaagactggtatgtgactgaagagaaccaagatcaactctacatcatgggtaaagcaatgatccatgaatcaataacttataacaaaatgtag

SEQ ID NO: 82077 - DNA, 243 bp, Citrobacter koseri
atggaaacgttaagaaattacctaaacgctttgtcgctcgaaaaacagagagagtttgcagcaagatgcgaaacatctcttgagtacctgcgtaaagccattagcaaaaagcaaaagttgggggccgctctgtctgtttctattgaaacgcattctggcggttcagttagcaggaaaaatctccaccctgatgattgggaaaagatttggcctgaacttgatcataaaaaaacagcggcatga

SEQ ID NO: 82078 - DNA, 531 bp, Citrobacter koseri
gtgggtaatcaaccagagtggaaagttgaaaaacagccagcatggctggtggccgcgataagaagaactatcgctgatttacctggtggctacgaagaagctgctgaaattctgggggtatacaaatctgatgatgtaaccccggcaaccgatccactgcataaccgacttcgtactaccggtgatcaaatcttcccattgggatgggcgatggtcttgcaggctgctggtggctcaaaccacatcgcaaatgctgttgcccggcactctaacggtctctttgtgccgctggctgacgttgatgatgttgataacgctgatatcaaccagcgcttgatggaatccatcgagtggattggtaagcactcgcaatatctgcgcaaagctacggctgacggggttattgatactgctgagcgtgctcagattgaagagaacagctatcaggtcatgacgaaatggcaggagcatctgacgctgttattccgggtcttctgcgccccggataaggtttcccgaccgccagactaa

SEQ ID NO: 82079 - DNA, 279 bp, Citrobacter koseri
atgtatcaggacgaaaatatctacgtgactatgcccacggttttttctcgtgaggacgccccgtggattaaacagcagctagcaacactcccggcaggcatgcgggaaaaaatcgcgatggcgtatgcgcaggcataccaggaggcgtttgacgctgaaccggtgtcattccggcagcagaacgcagcacgacggaatgctaaccgccgattgagagagttttgcacgaggtataccccggcagtcaggggctatacgtcgctcccacccagggtatga

SEQ ID NO: 82080 - DNA, 276 bp, Citrobacter koseri
atgatttattcagatgctaacgaaaaatgggcaccggtgccagttgagccttattccagtgcttacgaagtcagtaatctgggacgggttcgtagcatcccacgccttgctaactctgaatactttattcgccacatccacggcggttttctgaaaggccggacacgcaaagacggaaccaaaaccgttgtgttgtctgttcagcgtcagcgcacgaagtttgtgattgatgacctggttgctatggcattcggggaggtgtccgccgatgcttaa

SEQ ID NO: 82081 - DNA, 1530 bp, Citrobacter koseri
atgcttaacatccagccgcgtgagaaacagatcgtcgcactcaacatgctgcgcagtgcatggaagaagaataattcgttcatgctctacgctccggttggttttggtaaaacggctattgctgcactgatcactgatggatttgtcagtcgtgaaatgcgcgtaatgtttgtggctccatacaccgtactgctggaccagaccgcatcccgtttcattgagtacggtcttcctggtgaagagatcagttacgtatggggcgatcatccgtcatacaacccgaacgcactcattcagatagccagtgctgatacgctcatccgtcgtgaattcccggataacattgacttactgatcgttgatgaagcgcacctgaagcgtaaaaaactgctggaagttatcgacaatcttacccgcaacacttcaacgaaggtgattggcctgtccggtacgccgttcgctaagttcctgggcaattactatcagcgcctgatcaagcctacgacgatgaaggaactgattgcccttggagcgttgagcaaatatgagttctacgcgccttcgcatcctgatctgtctggtgtggaaacgtcatatgtcgcgggctacggcagcgactataaagaaggccagctcagtaaggttatgagtgaagccaaactggttggcgatatcgttaaaaactggcttgagaacggcgaggaccgcccgacgatttgtttctgcgtcgatgttgcccacgctaattacgtcacgatggaatttgcccgcgctggggtaaccgttgaagttatgacggccagcaccccgcatgacgaacgtcagttgacgatccgccgttttgagcagggcattaccaaaatcatcattaacgtcggcgtattagtcgccgggttcgacagtgatgttcgctgcatcatctttgcccgcccaaccaaaagtgaaatgcgatggattcagacgcttggccgtggattacgcgcggctcctggcaaagatcactgcctcatcttcgatcacagcggcacagtgaacaagctgggttatcccgatgatattgagtacgactacctcccatcgtcatctgacggcatggaagaagccccgcagcgcgtcactaaaaccgacgagccggagaaactgccgaaagagtgcagccagtgccattacgtgaaacctgccggaatttatatctgcccgaaatgcggctttaagccactggccggggaagatgttgaaaccgacaaatcccgcggactgacaaaggtcagcaaagcagaagtcaaatacaccgcagagcagaagcaatcctggtggtcacagattcttttctatcagcgcacccgtgcagcacaggggagacctgtcagtgacggatggtgtgcgcatacctatcgacaaaaatttggtgtgtggccgagagggttacataacaccccgcagcaaatcacacctgaagtaacgaatttcatcaaatcaaaactgatcgcctttgcgaaaagaaaagagaaacaaggggaagccgcatga

SEQ ID NO: 82082 - DNA, 972 bp, Citrobacter koseri
atgaataccaaacaagccgcaattggtcgctgggctgaaatttttgagcattacggcctgccgggcatcacgggtaaaaaccatttcaaaggcgaatgtccgttatgcgggcgcaaggggaaataccgctgcgacaacaagaacggcaccggctcatatatttgcgtatgtggttcaggtgatggctggtcgttactgtccggcttcactggcaaagaatttaagattctggcttccgaagtggatcggattattggcaatgagtacaccgctgatcgcgccactgtaagaaccgcacgcacatctctggcgcaacagcgtgatcgggtcagccgcaagtttgcaaagctcactccgctgcgcggcaccagcgcagacagttacctgaagggaaggggaattaactccctgccttctgagagcgtcaaatactgtgacaaacagccagtagacggtaaaaacctccaggcgatatatgcgctggctacagatgaccgtggagaactgtgttacctgcaccgcactctgcttgatggtgacaagaaggcccatacaggtggcgcatccaagaagatgatgaaattgcaggaagacagctatttagagtttgctaaatctgtagccatccgaatgttcccgactgcttcaacgctgggcatcgctgaaggtatcgaaacagctttggcctgtcatcagatcactaaatgtcatacctgggcaacgatgaacaccgccttcatgaagaagttccgtgttcctgccggggtaaagaacctgattattttcgctgatgcggattctaacgctgccgggcacgctgccgcatttgaatgtgccgccgcaaacttgcatgcgaagaacgatctggagactgtatcggtacgctggcctgcccagggagacttcaacgatctgcttctcaacggctctgaggtattcgaatgggtattccacaaggggacgaagcagtga

SEQ ID NO: 82083 - DNA, 645 bp, Citrobacter koseri
atgggtattccacaaggggacgaagcagtgaagaaaccagccaggcaaaaagtgaagatatacaagccgaagaagtgcgctcagtgcggcgagaccttcaccccggatcgtaaccttcagaaggtatgtggcccacgctgtgcgattgactataaccgcgcgctgaaggctaaaaaggctgaaacagagagaaaggtcagcctgaagattcgtaagaaggcgctccagccccgtggatattttctcagcaaagcccagtctgcattcaacgcttttatccgtgagcgagacgagggtaaaccgtgcccttcctgcggcacctgccatcccccgatgattttcggcggtcaatgggattgcgggcatttcctgagtgttggatcacgtcctgaactcaggtttgaagaaaagaacgcctatcgccagtgcaaggcctgcaatggcggcgctggaaggtttaccgctaaaaacaaaacggtacacgaacgctacagaatgacgctaatcgagtggtttggccttgagctggtggaatggctggaaggcccccacgccgcaaagcattactcaaaagaagacctggaagaaattgcggccaagtaccgccgtaaaacccgcgaactgaaaaagcagagggcagcatga

SEQ ID NO: 82084 - DNA, 159 bp, Citrobacter koseri
atgattacatcgttactaatcatctatgcgtttatggctgggatgactgccgaatatacgcacaccaggttagaaaaaatatcatcaccacgaaacctctatctcacggccttcatctgcggggtgtgctggccttatgtaatctggagagccaaataa

SEQ ID NO: 82085 - DNA, 642 bp, Citrobacter koseri
atgtatgaccttatttattgtgatccgccgtgggaatacggcaacagaataagcaacggcgccgcctgtaaccattacagcacaatgagcatggaggagcttaaacgcctcccgatatgggaactggctgctgaaaacgctgtactggcgatgtggtacaccgggacgcacaacagagaggctgtagaactggctgaatcatggggattccgggtcaggacgatgaagggctttacgtgggtaaaactgaatcagaacgctgctgatcgcttcaataaggcattaagcactggagagctggtggacttcaatgatctgctggaaatgctggaccgtgaaacccgcatgaacggcggtaaccatacccgcagcaacactgaagatgtgctgattgcgacgaaaggaacggggctacaacgcgccagcgccgcagtaaaacaggttgttcatacctgccttggcgaacatagcgcaaagccgtgggaggtcaggaaccgactggaacaattatacggcgatgtgaaaagaatcgaaatattcgcccgggaagagtggaaaggatgggaccgctggggaaacgaatgcaataacagcattgaaatgattacgggacagataaaaggggtgaaccatgcagcgtga

SEQ ID NO: 82086 - DNA, 405 bp, Citrobacter koseri
atgcagcgtgatattcaacttgttcttgaacgttggggaacctgggcaacgagtgaaggaactcaggtcaactggtcaccgattgccgcaggctttaaaggtttgcttgtaaatactggaaagtctcgcgattcatgcagcgacaatgacggtctgatcgttgatacggctgttggaatgctcagacgcgccggtagagaagatgaattaaatctggtgatgttgcattacatgtataacgtttctaaatcgacaattgcccgctggcagaaatgctctgagggaaaaatacgtaacaagctgatgattgcagaaacgtttattgatgcctgcatcatcatgacgggaacgcgattagaaatggacgactggacccataagtgccagacagaaaaagttgcataa

SEQ ID NO: 82087 - DNA, 243 bp, Citrobacter koseri
atgtacagcagactgttaatcatcttcctgatgacgatgttgaccgcgagttgcgtgagaactttacccgcaaaacatgaagtaacggacacggcctgtgactgggtaaacatcatctacctcactgatcacgacatcgatgtgctggataagcagaccaagaaagacatcctgacgcataacaaatcagtgcaggctaactgcaagaaggagtctgctcgtgaacgcagagaacctaagtga

SEQ ID NO: 82088 - DNA, 540 bp, Citrobacter koseri
atggatattaaggataaaatcaataccattctgttatgtgacattgccattcacttgggtatcgatactgatattgatccacaacttgttaaatatgctgtgtcatccggtaatgattgggttctcaaggcagaatattcatcattagatgttgacgaaccaagtaaagaagaccgtgattttgttactgctgtcttgaatatgtaccgcggactttccaatgctttcaggaaacttagtgatgacgagcaaaaagaattaatccgtgaccatcatctaaaagtgcatgatggggcaattcagctcccaggtttcgacggtaataatgaatgcgattacttcagcatcattgaggcatatcagaaatttgatcgcttccccgaacagcaacagcccatcgccaatactcattcacatacagaacatctctataacgcaatgcttgatgagtttaagaaaattgacgctgtgaatcggagctggaatttaacgaaggaagagctggcatccattctttctactgctccgcgcagcttctaa

SEQ ID NO: 82089 - DNA, 351 bp, Citrobacter koseri
atgccagcactaattcctcgcgcctgtcgcaagagaggttgtcctggcacgactacggatcgctctggttactgtgagcagcaccgcaatgaaggctggcaacagcatcagcagggtaagagtcggcatgaacgtggttacggtagcaagtgggacatcaagcgcgctcgtattctgaagcgtgataatcatctatgtcagaactgcctgcgtactggtcgcgttgtcgcggccacaaccgttgaccatatcaaagctaaggcacatgggggtaccgatgatgattcgaaccttgaaagcctgtgctggccctgccaccgctcgaaaacagggcgtgaacgcttcaaatga

SEQ ID NO: 82090 - DNA, 498 bp, Citrobacter koseri
atgtcaggaccaccgaaaaccccgacacatctggctttggtgaaggggaacccatccaagcgtccgatcaacaagaacgagccaaagcccccttctggggttcccccaatccctaagcattttgataagcagggcaaatactggttcaagcgaattggtgaagagctcgatgctgttggcgtaatgaccactctggatgctaaagcgctggagttgttgatcgaggcttatgtcgagtaccggcaccattgtgacacgcttgatcgggaaggctatacctatgccgtctatagcgaagatgattccgatgaaggaggggagcgggaaataagaatgataaaaccgcacccggcagcagtcatgaaggctgatgcctggaaacggatcagagcaatgctgagtgaattcggcatgacacctgccagccgctcaaaggttggtgcaaaaagcccggcggaagccgacccactggaagaatttcttaaaaagcgcaaatga

SEQ ID NO: 82091 - DNA, 1752 bp, Citrobacter koseri
atggcaaccgttgcagatggattccgctacgccgagcgcgtggtatctggcgatatcgttgctggcgaactggtgcgcctggcgtgccagcggttctttcatgatttagagcacggccctgaacgcggtgtttattttgatgaagaccgcgcccagcacgttctcgatttctataactttgtccctcatgtgaaggggcatttgaccggcaaacctatcgagttgatggactggcacaccttcatcctgattaaccttttcggttttgtcgtgccgctaatcgacgaactgacgtctgaaggtatcctggacgatgacggcgaacctatatttgtgcgccgtttccgtactgcctatgacgaagtggcacgtaagaatgccaaatcaaccctttcatctggaatcggcctctatatggctggtgctgatggtgagggcggcgctgaggtatattctgccgcaacaacccgggatcaggcacgcatcgtctttgatgatgcaaagcgaatgattaagctggcaccgaaaacgttggggaggctgttcggcagcaacaagctgaacattcaccaggaacggacaggctcaaaatttgaacctgttgccagtgatgcgaacaacctcgacggtctgaatattcactgcgggatcgttgatgagctccatgcgcataaaacccgtgacgtgtgggaggttctggaaacagcaaccggtgcacgcttgcagtcccttattttcgctatcactactgcgggttttaataaagaaggtatctgttacgagcagcgggattacgcgattaaggttctgaagaacttcgataacccggacccactttcgattaaggatgacagctattttgctctgatttataccctggatgatggagatgatcctttcgacgaggcgaactggccgaaagcaaatcccggcctgggtatttgtaaacgatgggatgatatgcggcgccttgccaaaaaggcaaaagagcaggtcgcggcccgtgtgggattttttaccaagcatctaaatatctgggtgcaaggcgaaaaagcatggatggacatggcaagatgggaaaaatgccgcgatacctgggaaagtgcaacatcagccaactggtcaatgtggctcggtgtggacctttcgaacaaaattgatatttcggcggcggttaaagtctggctcgctccaaatggtgatgtttatgtccgctcccgattctggatacctgaagggcgtctggaggcctgttctaaacagcaggcagacctttacagaaaatggaatcaagctggtttccttgaatttactgatggtgatgttgttgaccatgccgtaattaaagaggaaacgatctcgtgggctcgtggcgactcattgaatgagtttgcatacgacccgtggagcgctactcagtttgctttgtcggtctccgctgaaggggtgccaattgttgaagtccctcagacggtaaaaaacctgtctgaagcgatgaaggaaaccgaggcgaaaatttacgccggtcgttttcatcatgatggcaaccccgtgatgacctggatgatgtcaaacgtcaccgttaaacctgacaaaaacgagaatatttttcctaacaagtccacaccagaaaacaaaatagatggtcccgtcgcaatgtttattgctatgagtcgcctgcttgttaatggtggtggtgaagttgatttcctgtccacgatcgaccctgacgaagaccttttacttctatga

SEQ ID NO: 82092 - DNA, 162 bp, Citrobacter koseri
atgaaaaaactaatcactgatgctatcgggctgaccgggttcggttcgctcgctgctggagtatatctacagttcgggctggcaccgtctctgatgatgtccggtagcctgttgctgctttatgcgctggttgtggcgatgagggggaaaaatgctgcttga

SEQ ID NO: 82093 - DNA, 1227 bp, Citrobacter koseri
atgctgcttgatgccctgtttcgcagtgaacctctggaaaatccggccacgatgataacgggagagtcagccgaaactgataacatttttgcccgtgacgtttttgtcagcccggaaacagcgatgaagctggctgcggtgtatgcctgtatttacgttatctcttcgaacattgctcagatgccgctacatgttatgcgaaaaaccaataacaaggttgaggctgcgcgcgatcacggtgtgttttacctggttcacgatgaaccgaacatgtggcagaccagctataaatggcgcgagttaaagcagcgtcatattttgggctggggtaatggttacacctgggtaaagcgttcccgtcgcggcgaggtttccgggctggagtgctgtatgccgtgggaaacgacgttgcttaacacgggcggccgctatacgtacggagtttacaacgaagagggggcgtttgccgtcaatcctgacgatatggtgcatatccgggcgctggggaataatcagaaaatggggctcagcccaatcatgcagcatgccgagacaatcggtatggggatgagcgggcagaaatataccagttcattcttcaatggtaatgcgcggccagctggcattatttcggtgaaaaaccaacttaacgaagagagttgggggcgattaaaaagcatgtggcaaaaggccaccgcagcgctgcgtagccaggagaataaaacaatgcttctcccggcggagctggattacaaagcgctcactgtttccccggtcgatgcccagatcattgatatgtcgaaactgaatcggtcaatgattgccggaatattcaatgttccggcacacatgattaacgatctcgaaaaagccacgttctcaaacattacgcagcaggccattcaatttgttcgttacacgatcatgccgtgggtaacgaactgggagcaggagcttaaccgccgtttgtttacccgcgctgaactcgccgccggatattacgtccggttcaacctgacgggcttgcttcgtggaaccccgcaggagcgcgcgcagttctaccacttcgcgatcactgacggctggatgagccgcaatgaggcgcgagcattcgaagatatgaacccggtagatggcctggatgaaatgctggtgagcgttaatgcggctaacccggcagacgattttaaggcaccaaaaaccgacgaggaaaaaaacaatgaatga

SEQ ID NO: 82094 - DNA, 600 bp, Citrobacter koseri
atgaatgaccgtgaaacgcgctgctatagcggggaggttcgcgcggaacaacacaccgatgaacccacccgtattctgggttacggctcggtgtttaacagtcgttccgaacctctctgggggtttcgcgaaatcatcaagcccggagcctttgacgatgttctgaatgatgatgtgcgcggactgtttaaccatgaccccaattttattctcggacgtagcgccgccggaacgctctcgctgtctgttgatgaccgaggcctgcgttacgacattaccgcgccggatacgcagaccatccgcgatttggtgctggcgcccatgctgcgcggtgacattaaccagtcatcctttgcctttcgtgtcgcacgcgatggcgaacactggtacgaggatgatgaaggggtagttattcgtgaaatatcgaagttttccagactgtttgatgtcagtccggtgacctaccccgcatatcaggaagctgattccggcgtccgatcgatgaaagcctggcaggaggcgcgcgacagcggtgcgctacataacgccattaatcaacgaatggcgcgtgagcgcctgctgacccttcttaacgcgtaa

SEQ ID NO: 82095 - DNA, 1227 bp, Citrobacter koseri
atgaaactgcatgaaatgaagcaaaaacgtaacaccatcgccaaagatatgcgcgcactgcatgataaaattggcgatgcggcctggactgacgagcagcgtactcagtggcaggcggctaaaaccgagctggatggcctggacgagcgtattgctcgggaagaagagcttcgccgccaggatcaaaactatattgacgagaatgagcaggagcagcgccagaaaccgaacaccccggaagcgcaggcggattcccgccgtgcggccgcgtttaacactttcctgcgtcgcggcctgggcgatatgtccgcagaagagcgccaggcactgaaagaaatgcgcgcgcaaggtacggcgccagatgaaaaaggcggctataccgtaccgacgcagttccgtaatttgatcgtcgatgcaatgaaagattgcggcggtatcgccagcgttgcacaaattctgaacacatctaacgggcaggatatcgactgggcgacgtctgacggcaccgccgaagaaggcgagctgttgggtgaaaacgtggcggcatcggaaggagatgttagttttggcggcgcgacgctgggcgctaaaaaactgtcctcgaaaatcattcgtgtctcgaacgaactgttacaggatagcggcgtggatatcgaagcattcctggctggccgtatcgcaacccgcattggacgcggtgaggcaaaatatattgttcagggtactggcgccgggagcccgcttcagccgaaaggcctggcggcttctgtcactggcacggtagatactgcgtcggcaactgctttcacctggaaagaactcaacgcgctgaaacatgctgttgaccctgcatatcgcaatggcccgaaagttcgctttgccttcaacgacgccactctgcaactggttgaagagatggaagatgggcagggccgaccgctttggcttccaagcattatcggcggtgcgcctgctactgttcttcaggttccgtatgttgttgaccaggccatcccgaatattgcagcaggtgaaaaatttgctttctacggtgacttcaatcgcttcattgttcgtcgtgtgacgtatatgactctgaaacgtctggtagagcgttacgcagaatacgatcagactggttttcttgctttccaccgttttgattgcgttctggaagataccggtgcgatcaaggcgctggtgggtaaaccggcatctggcggttaa

SEQ ID NO: 82096 - DNA, 381 bp, Citrobacter koseri
gtgacctctaccgctcaggcggtttttttgtgcccgcagtttgctgcgggccagggtaaaacgatgagtacaacgattgaaaagctaagagctcagtgtcggatcgatgctgatgatacaacggaagatgaattgctgctgctttattacgggtcagcgcgccgtcgagctgagaacttcattaaccgtaaactttatgaagatgaagtaccagaaactgaccctgacgggctgatgattgatgacgatattttactggcgttgatgctgcttgtcgggcactggttcaacagcagggaagagacatctgatgttaacaaaatgagcattccttttggctttacctcgttgcttgagccctatcgttttatccctctgtga

SEQ ID NO: 82097 - DNA, 198 bp, Citrobacter koseri
atgaacgagcaacaggtaaacgaactgatagcagcgctgaacgaacaaaccacggcgcagagagagcagacggaagcgataaaccgtctggctgaatcaaatatggcgttgtgtgatgtaatcattcagtcgcttgccgatgaactggacgaggcaccagagcagcagacctatcttagcggtaaacccagggggtaa

SEQ ID NO: 82098 - DNA, 786 bp, Citrobacter koseri
atggaaaacttaaagtattcttgtgtagtgttgctgtcattgcttatggttggctgttctacggtcagtagggaagatgaagttgaaaaaataatgagaagaatgaaggaaagtaacaaaattactgaggaagttgttacttttccactgagttatcaaggcgctgattggggcagtccatttaaagggaaagatattctatcactctctaaaaacaaaagtgagaagttttttacttcttatatttatgctccgttagaatataatcaaaataaaggtgtggtttatatttcttcgaaaaatgaagattaccttggtgatatcgcgcatacatacagtgatatgagtgattattctgatgttggacaatatattgcggtgcatgtttacaattgggatacgaaatcaaaaggaacatatgtcgggacaaatgcttttggagtaactgcaacagtacttgattctaagtctacagattatcggttggtgtttggtaaaaaacatattggaaataagacaagattattcatatccgatgattgtaatgcgcctttatctgatttttcaaataacgagatcaagattcagtttctttctaagttgaaatatccattccataaaagcggggtttcttttaagtctccgacgctagattcccctattagaaatgaaattgataataattattttagggttgatgttgtagcagcaaggctgataaatgaaagaacaggtgtgatttatggatgtactatcggatataaaacgataaaactttttaaataa

SEQ ID NO: 82099 - DNA, 2505 bp, Citrobacter koseri
atggctggaaaatctctcggcactctgactattgatcttattgctaaggttggaggctttgtatctggccttggtcaggcagaaagggcctcgcaaaaatggcgtaaacaagttaaggatgatgcgaaagcagcagcagttgcattaaccagctttgcgacggcagcaagtgctgctgctattggcgttggtgccgctggctttaaccttcttaaaacaacatcaaaacaaataacagaaagcgatcgttgggcgaagtcattaaaattatccacccaagaactcctggcatggcagtttgccgctgaaaaggctggtgtggctggcgatcagatggctgatatttttaaagatataggcgataagatcggtgatgcagtcctgaataagtcgggtgaagcagttgatgcgcttaatgcgcttggtttatctgccgagaagttgtcaaagacaacacccgatcagcagttactggctattggtgatgcgctggggaaaatcggcacaaatgctgaaaagacaacaattctggagagtctgggtaacgatctctctaaattgcttcctctgtttgacaataacaatgaaaaactgcgtcagtttattgatttagctaaagattatggtattgcgccagacctatcgcaaatcgaagatttagttaaggttaattcaatatttgaagatatggaggcgcaggcgaaggctttaaaactggagatagcagcaggtctggcaaaggttgatctttctcagttgactgagtctttcagtgatataagaaaaacattgactgaccctcaggttcttcaggggttagttaatctcgtccagggcgttgctgagttagctggatggcttgttaaaggtgccgctgctgctggagagctttctgcaagatttgcaaaaccacttgtcgcatcaatggagattggcgactcgatggatgaaagtgttattagaaacaggctggagtggctttcaaaagcaagagattattcagatagttgggtaacagctattgatcgttctcttgggcagatgccgactactgaacaaataaataaggaaaccgctgctcttaatgaaagattaaaaaaagttcaggaaaataagaaagctcagcaggccataattgatcagtcaaaaaatgccggttcaacaataggtaacattcctacagatttcgctcttgggcaaggtgaaaataacggtaaaaccacgcctgatgccgcagccaaaaaacttgagtcagcctttaagtcgatggagacaagctatctccgacagatagctctgattgatacaacaggcaaaaaaaacgctgaagtcacggagcagcagaagctgcaatttgatattgctgacggcaaattgacaggtcttaacgagacacaaagacagcgtctcgatcaactggcgacagaggttgatcgcctcaatgcagttaaaaaggcgaacgaggaaaacctcaaacttgcagagtacgtatcaaaccttcagcgcgagaatgtgaatgttgcagcgtctcttgatgctgatgtaataggtgccgggtatggcgataaagcccgggaacggatgcgcgagcagctcagcattgaacgcgagtttttagagaagcgtgaagatttgcagcgtcgataccagcgcggtgatattcgtagccaggaggattacgaccgttacaaccaggaactggacaaagcacttgctgagcgtctcgataaataccgctctcattatgagcaactggatgaattgcagggtgactggcttgctggcgcacagaacggcctggcaaactgggttgattcctccagtgattattattctcaggtttctgatctggtctcgggtggcatggacgggatgattgataatctggctgattcactaaacggcaataaggccgactggtcaagctgggctaacagcatcctcaatgacatgcagaaaataattctcaaggcgattgtgctgaacagtatccagtcaatgggggggaacggtggaatatttggctctttttcgggaatgtttggtggtggggcatctggtggaagcacaccttccggtgcttataactcggcggcttctggcctgacactgaatgctaagggcgggatttatgattctgccgacctcagcaagttcagcaacagcattgtaaacagtccaaccatgtttgcgtttgccaaaggcgcaggactcatgggagaagcagggccggaagccattatgccactgacacgcaccgcagacggtagtctcggtgtgcgtatggtggatgatgccgtttcctctgttggcggtggtggggcgaatatccagcaaaccatccagcagcacttttccatttccggtaacggtgatgcagcccttaagcaggcaatgcagcaggcggcaaggcagggggctaacgacggcgcgaagcaggcccgtcaggatttgcttcaggattttcagacgcgtgggcaggcccgccggttgttgggcgtataa

SEQ ID NO: 82100 - DNA, 273 bp, Citrobacter koseri
atgaaactaatcatcacaccgcaacgtgcggataaagaggtgaaatattcagtgtccggtgacgccctgactgtaatgcttgacggcgaatcggatacgttcgatttcagcgaaatgccggatggccacactactgaattctgctcagttctggagccgtgtccggtcttaatggctgtgaaaaaggatggtgagctgtctgttgtcgtcattggtttttacggcaaagatgccagcgcactggaaaaaacagaacgggtcgaggtgtactga

SEQ ID NO: 82101 - DNA, 192 bp, Citrobacter koseri
atgcaccgggagataaaattgcctggagtgcatatcgacagggattacgtgaccttcctgaacaggacggtttccctgaaaatgtgtactggcctgtgctgcctgctgatgaacattcttcagcggtttgaattgccgcagttgtgtcgtatgcaagaacacaactgcggctggctggcgatcgttcgatag

SEQ ID NO: 82102 - DNA, 249 bp, Citrobacter koseri
atgcgtatcgaaatcagcattgcaaaagaaaaaattggaaaaatgcccaaggggtcagtagaggcattaaagcaggaaatgacacgccgggtcagtaaacgttatgacgaggtagaggtcattgttaaatcggcaagcaacgacggtctgtctgttttccgggtcgctgacaaagacgatgcaaaagcatttgtacaggaaactttgcaggatgcctgggagaacgcggacgactggtttgttcggtaa

SEQ ID NO: 82103 - DNA, 138 bp, Citrobacter koseri
atgcaacgtcaggctagccgccgtaaagcgcgttggcttgaaggacagtcgcgtcgtaatatgcgtatccactcaatcagaaaatgcattctcaatcatcaacgtaacacgttattgtttgcgattcacagcatctga

SEQ ID NO: 82104 - DNA, 204 bp, Citrobacter koseri
atgaatcgagttttgtgggaattgaccgaagagacagtaagtggtcagtttcagattagacacattgatccgttgtgccgagcaggtacaatccgcgacggatggcaacatatcaacgatctccagcctgccgtagttgcgttcttgcatatggcacggcggatgaacctaaacatcgggttttcattaagctatggctgctaa

SEQ ID NO: 82105 - DNA, 204 bp, Citrobacter koseri
atgcacaacaatacattgattttaaaaaatgtttttcgaatttcatatgtattgatagtgatttgtggaatgatcaaagctatgctttttgatcttgatactacattgtttgttatgattgtaattctgattatacctgctgtctttgatgttgattcaacactatcaaacttatgcaagaagtcaacggaagataataaatga

SEQ ID NO: 82106 - DNA, 216 bp, Citrobacter koseri
atggcgctgcgcttatcgggcctacggttcgacgcagtttgtaggccggataaggcgtttacgccgccatccggcatgttggccggtatatccaccgtaggccggataaggcgttacgccgccatccggcatgttggtcgggatattcaccgtaggccggataaggcgtttacgccgccatccggcatgtgctgttattgcggcgcaaaaaggtga

SEQ ID NO: 82107 - DNA, 1842 bp, Citrobacter koseri
atgacgtttaaagattttgctgcggaagaaaaactctttctgagacgagtgatagtggcctttggcctggtggttgtctgctttggcgtcctgattgtcaatctctacgatttacaaatccgtcagcatcagtattacacgacccgttcaaacgaaaatgacatcaaaatgctgcccgtcgccccgacgcgcggcatcatctacgatcgcaacggtattccgctggtgcgtaatatcacctggtatgatatttccgtcaccccatacaaaattgccgacatggacgcgctgttacgtcagcttacccctctcgtggatctcacgcctgatgatattgcggcctttcaccatgcgttgaaatcaggcagccgctatcgcccggtggtattgaaaaacgcgctgtcggacgtcgaaattgcccgcttttccgttaaccagttccatttcaacggcgtgacgatcaacagttatgaagaccgtcagtacccctacggcgcggagctggcgcatgtgctcggttacgtgtcgaagattaacgacagcgacctgaaagcgctggatgaaaaaggtctggctgaaaactatgccgccgatcacaacatcggtaagcagggcattgaacgctattacgaaaatgatctgcacggcaaaacgggctaccgggaggtcgaagtggataaccacggacgcatcgtgcgcctgttaaaaaatgtcccgcccgttgccggtaaagacatccacctgacgctggatttacatctacaggaatatatagaaagcctgcttgccggtcagcgcgcggcagtgctggtcgaagatccccacgacggttcagtgctggcgatggtctccacgcccagctatgatccaaacccgtttgtgaagggcatcagccatcaggattacagcaggttactgcatgataaagatctgccgttgattaaccgcgtcacccaagggctgtacccgcccgcctccacggtgaaaccttatatcgcgatgtctgcgctgttaaacggcgttatcacgccgcaaaccaccttcttcggcgcgccgacctggacgctccccggcacgcaacgccattaccgcgactggaaaaaaaccggccacggtatgctggatgtcaccaaagcgattgaagaatccgccgacacctttttctatcaggtcgcctggatgatggggatcgatcgcattaacaccatgctcggtcaatttggttacggtaagcccaccggtatcgatctggatgaagaatataacggcctgctgcccagccgcgagtggaaagagagagtacataaaaaagcctggtatcagggggatacgatttcagtcggtatcggccaggggtactggattgccacgccgatccagatggtgaaagcgatggtagcgctgatcaacaacgggaaagtgatcgcccctcacctgcttcagagcgaagtgtccggcaagaccgtcatgccctggcaggcgcctcagacggaaacgcagattgccgatgccgcctcgccttattgggggctggtgcgacaggcgatgtttggtatggcgaatgcgccgaacggcaccggttataaattcttccacaccgcaccctacggtattgcagccaaaagcggcacttcgcaagtgttcagtctgaaagaaaaccagacctataatgcgaaaatgatccccatccgtctgcgcgaccatgtgttttacaccgctttcgcgccgtataaaaacccgaaagtcgcggtggcgttgattctggaaaacggcggcagcgacggcgtgaccgccgcgccggtgatgcggcaaatcatggatcacctttttgcgccgcaataa

SEQ ID NO: 82108 - DNA, 267 bp, Citrobacter koseri
atggcgcttcgcttatcaggcctacagagcgccactcgtaggccggataaggcgtgtgcgccgccatccggcgatgtgcaacaggtgaaaaaaaagcccgtactttcgtacgagctcttttctgaatatggcggtgagggggggattgactcgcttcgctcgccctgcgggcagcccgctctctgcgttcgcggtctgtccaactggctgccgccagttgtcgaaccccggtcgtgggttctcatccccccacagtacgtgcaatag

SEQ ID NO: 82109 - DNA, 1686 bp, Citrobacter koseri
atgtctaaaaaaacaaatgatcaaataatactagagcagatccttaaagataaaaaaaatgagttgggaactgacatcaaagatacagaattctttgagttatactcagcatcagagattcttaaagactacgatgttacatatgatgacattgaatatggcattgttggtaatggtggtgatggtggtattgactctatatttacttttgttaatggtgaactacaaaaggaagacacacaacttaatactcaagtaagaaaaaatcacattgagctagtaataattcaatctaaaacatctccaacctttaaagaagatgcaataattaagttccgagaaaccattcaagatttatttgatttaggtaatgatctcgaaaaatttaagaagcgttataactctttattacttgagaaaatcaatttatttagaggtgcctattcaaaattagcaaaaacattccctactattttaattaaatttttctatgctacccaaggtgttgatgctgatatacaccccaatgtaattgataaagcaaataagttacgtgatgatatccatagattatttagcggttcagtttgcgaattctcttttattggtgctacaacactgttagaaatgagcagaaatatccctgcaagctcccgaacgctagaaatatcagaacagccgattagtacttcagcaggtagctatatttgcctagcttcacttacaaaatattatgaatttgtaagcgataatggcgcactagcaagaagtatttttgaatcaaatgtgcgagactatcagggaagtgtaactgtaaacacaggcatccgattaacgcttcaaaatatgaactctgatgatttttggtacttaaataatggtgtcaccattatcacacctaaagcagttagtgcaggaaaacaattaacaatagaagatcctcaaattgtaaatggactacaaacctcacatgagatatatcgtcacttttctaatgctgataattctgtagatgataaacgttctattctcatcaggattatttgtgaggaaaacgaagaagcacgcgatagaataattcgtgcaacgaacagtcaaacagctattctgccagcttccctcagaagctcagatgagattcacagaaatattgaagattatttaaaggctaacgacttctattatgacaggaagaagaatttctacaaaaatcttggtaaaccagcatcaaaaataataagcattgcatatcttgcacaagcaatgatgacaattgttttatttagaccagacagcgcaagagcacgaccatcaacacttataaactcagatattgaatataaaaaaatatttagcttggatatagcaatagacacatacttaaaagtaatattaattataaaagctactgaagcttttttaaaggttgaaactgataaatatacgccagacccaaaaacaacaacaaatataaaatattatgttgctatggttgcggccattaaatacttaaagactaaagaaaatatttttcaggcactttcaagcgtcaaccaaataaatatcaatgaagagatctttgatgaaagtcttgatattgtattaaaccactatcatcagttaggaggagatgatcaggttgctaaaggtgcagctctgacccctgcaattctggcttcactctaa

SEQ ID NO: 82110 - DNA, 966 bp, Citrobacter koseri
atgattagcggcgtgttgtatgccctgctggcagggttaatgtggggactgatttttgtcggaccgttgatcgtaccggagtatccggcggtattgcagtcgatggggcgctatctggcgctggggttaattgctgtgcccctggcgtggctggggcgtgcgcgtgcgcgccagttgacgcgcaaagactggataaccgcactcgcgctgacgatgatgggcaatctgatctattacgtctgcctggcgagcgctatccagcgcacgggagcccccgtttccaccatgatcatcggcacgttgccggtggtgatcccggtgtttgccaacctgctctacagccagcgagatggtaagttatcctggcggcgtctggcgcctgcgctggcgctcatcggcgttggtctgctgtgcgtcaatattgcggagctgaatcaggggctgccggagtttagcggctggcgctacggttcaggtatcgcgctggcgctggtttccgttgtctgctgggcatggtacgcgttgcgtaatgcccgctggctgcgggaaaacccggataaacatccgatgatgtgggcaacagcacaggcgctagtgacgcttcccgtttcgctgctgggttatgttgcggcctgcatctggttgggtaaacagatgcccgactttcctctcccctttggcccccggcctgatgtctttgtcgccctgatggtcgccattgccgtgctctgttcgtgggtgggggcgctatgctggaacgtcgccagtcagaagctgccgacggttatcctcggcccgctgattgtattcgaaacactggctggcctgttgtacacgtttatactgcgccaggaatttccaccgctgctaacggtaagcggcattgcgctgctgattgttggggtggtgatagccgtcagagccaggccgcagaaacccggcgtcgtcgtggtttcacaatcataa

SEQ ID NO: 82111 - DNA, 513 bp, Citrobacter koseri
ttgatcaactgggacggttttcgcacctataactttgatgtgattgacggcgtggagtatcagattgatgtgtcgcagcctgcgcgctacgacggcgaatgccagacggtgaatccgcaagcggaacgtattaaaaatctgaccttcaacggcaagcctgtcgatccgaacgctatattcctggtcgcgaccaataactatcgcgcctacggcggcaaatttgccggtacgggcgacagccacatcgcttttgcatcaccggatgagaaccgctccgtactggcggcgtggattggcgcggagtcgaagcgtgcgggggaaatccacccggcggcggacaacaactggcgtctggcgccagttcacagcgacacgaaactggatatccgcttcgaaacctcgccgtccgataaggctgccgcgtttatcaaagagaagggacaatatccgatgaataaagtcgctaccgatgacatcggttttgcgatttatcagctggatttgagtaagtaa

SEQ ID NO: 82112 - DNA, 555 bp, Citrobacter koseri
atggataaattggctattcagtttgccagagatctgcgtctggtatttgaccatacgcatagtgaactggatgaagcagggatcccgtttttttatagttttcctaaaaatgcatgtcagggagcatctgtattccttgggctgttctttacctggctttacccaggcgcggttatctgcatcgtaaaaggcagccaccgaacgaaggatgagcatcactattgggtggagcttaatgctagggtatacgatttaaccaatgatcagtttgagccttggttgggtgaaacctaccagggcctgaacgtccccgtctgtgcagcgaagaagcacccgttgagaaattattttttttataagaaaagagagtcggcgattcgtgcttacgccacatttgtgactgaacacgctaatcttatcgatgttgataaagctcagtggtttattatcgacaaactcagagagtatggctggaacctagcgaagactcccgagggtaaccgactagtcaacaccagaaatcaccagccgccgattaaaataattgcgtattag

SEQ ID NO: 82113 - DNA, 900 bp, Citrobacter koseri
atgggtataaaggtatcgactaaggaagcactacctaaactggaaactacgttttttattgtgagtgatagctcgaaggttagggtgaagttaggtgcgctgaattttaattatacattgtcgccgtgtgaaaaatacctgtatgtacagctctgcaattcgaagacagaggatgcggggaagtttataaagattgataccgccactggagagaaaatttattcagtttttccagagtggggttgggctagtggctatgcctttacggaccatggcgctcttatggtggagtcggggcattacggctcgtggcaaattgatgatggtggaaatattgtcgatcggtctgggtactatctgcaccgggtgaacattgcagattacggaacgacgaatgcccttcctgattttttcgagctacatggcaaaactcctgagacatgcgctgtggcaatggcatcgcttgaacggttcctgacctcctgcttctcgatgttacatgggatatcgtatggtgcgtctgcattaaaagctcgtgctgagattcaggtatttatgggggatagtgaaggtgcgctgcaaagctgtgttgatgcgctatacctgaatccgaaagcaacggtgaaaaggatgctaaatacgctgagcaaaaaattgagtattgataaagagatgcttaaacaatctaagtgggcggaacaactaaaattatcggtagaacaaattcgtaataaagaaattaaaagtagtgaggataacctcagagaggtatttccctcgatggatgtaacgcttgcgaaaaaaagaagcattgtgaatgcgtcttatggaaacaacaataaaataatgttgttggtacttatagcgattgtgatatttatttttgtggctttgaaatga

SEQ ID NO: 82114 - DNA, 882 bp, Citrobacter koseri
atgaccgccctagtccctgaacttgtgaatgcagcaattgatgctaccgtatcaccaagcgatttgttacgccggggactggttgttgcgcgacgcttggccgtacctgaacgagtcgactggctcagttgcgagctgaatggttactactcggaagaggttcctgactatcggcacttacagggacaattaatggtcgaaaaccctgttcgcggcccaatccctttttttgcgccaccagaaatggctgcactgttgtcagacttcgaagtgagacagtcggtgcctgagttgattgggcttgctcagagtacaacaggcctctactgccacttcccggcagacctcgaacacatactgatgaaaatgatacgcgaggcaaacggcgtgacgatgcgcccaacactgaaattttccaccatacaggttcagggcattatcgagaaagtgaggagccggattcttgaatgggcgctcgatctggaggggcagggagtactcggtgaaggaatgacatttacacagcaggagaaacagattgtgcagccacaacattaccacttcagagatgtaagcagttcccaaattcagattggctcgaatagctcaagtcagacccagacacaaacaggtggtgacatggcagcgttgtcggccttgatcgcgctattacatgatgctatcaggcagggaaacatcgagacggaagctcgtgaagaattacaggccgaactggcgaccctgcaagagcaagcggcatcaccaaagcccaaatgggccgtcataaaagctacagcagggagtatcaaagctgtgctggaaaacgctgctggcggcatccttgcggcccaggcgctaccatacctgactgcgcttctgtga

SEQ ID NO: 82115 - DNA, 558 bp, Citrobacter koseri
atgaatcataacccagtcaccctggccactgataatgcggcggaagggctaaacatacgtgcttttttgcaacaggctgttgaccattatcctcgactggtagcattcagctttactgcgttgttaccacatagtgaaaccatggcggataagccgacattgattgcgcgcttccgtaccgaggtctggcagtgcattggtgaatattcgtggcaacgtcagcaggcgcgccagagttcaccgccaactatcctgcgatggatatgggagtcggttagtatggcagagtgcaaaatggtgttgctgatgaatctcgatacgctgggggctataagcaacgtacaacttattgagaatgcccagcaggcaataagtgagatcatccgtgatgcatggctgaccgtgacggacactgatcactgtagtgtcacgaacattactccaattatcgttaatcgcacgggtaaaggcacttttagtgcgccattgaaccagttgcaaacacatgttcaggctatgtgtcaaccgctggcgacagcaaaaacggggacgggttaa

SEQ ID NO: 82116 - DNA, 246 bp, Citrobacter koseri
atgaccacggtcagcctggaagggccgcatcatccgttatgcattactgccgctggctttacgcgtggcaagtgcttgccggatttctgtatgccccgttgggttcccgcggcgtttagcgaccgcttcttaaaaactcccctgttgctggcactcaccatttcgaatggtgatgagcaagttatcagagcaacaatccatgacccccaattttttccgcaaaagaacaaagacaatccattatga

SEQ ID NO: 82117 - DNA, 423 bp, Citrobacter koseri
atgcgcatgttgaaatgccacctggcaaataaccgtgaaggtcattttgtgacggctgacgaagccatgagcgcaccggggcagatatggagttgcgcctcctgtggttgtcgcatggtactgcatgccggttcttcaggcgacccggcctggtttgaacacaaccagcgctcagtggcacggcaagtactgatgaactgtgcccatctggatccggaagcgaaggcggaggcccgccacagaaaattacgcagtatcatcaacaaactggatgcgccggtgacaacgctctcctggtactgcgtctggtacggtggtcattacagcgaggataaatattgtgtgtcgtgtgggacgggcatttacagcattgaaaaatccagccggcaactgaattactgctgcgacattagccctggatga

SEQ ID NO: 82118 - DNA, 423 bp, Citrobacter koseri
atgtacgcaaaatcctttatcgctctcgacggtaacggtctcctgaccggtgcccgtaccgcacagaccgccccttacgaccgctatacctgccacctctgcggcagtgcactgcaataccatcctgaatacaacacggaacggccgtggtttgagcacacagtggaaggtctcacgaagaacggtcagcagcactgcccgtatgttaagcccggtgtgaaggagagccgttatatccggcaactgcaatgttatgtaccggatgcccacccactggttttcctggccgactggcactgtaacggctgcggcagtgattaccacggtgaacgctactgtctgacctgctgcaccggtgagcacagccatatgctttctgatgctgaaaagcagacagtggaggtgatggcatgcgcatgttga

SEQ ID NO: 82119 - DNA, 570 bp, Citrobacter koseri
atgcaaaacaaacaacgatgggaacaagactggttcctgggagccctcctgaacaaccatatagacaaaatggttgaacgctattcctgcctgcgtgctttacgcatcgatctattctaccaggatcataccgctaagtttttcttgcaggatcaccggcaactcgaatgggatgtcagaaagctgatgaaccgtatgatgcaactcgaagccgttgtcggtttcttctgggttatcgaatggaccgaagatcaccactaccatgcccatgtcgtattctggctggatggtagtaaaactcagaatacctatccctgggcgcagcaagccggtttgtactggagcgatatcactgaccgggaaggctggtatcaccgatgtgagtttaaagagcattacgaggccaatatcaacattccggtacgctacagcgacccagacagtatcgacaacatccgtcaggtactggcgtatatgaccaaaatccagcagaagcatggcctgccgctctacggctgcaacgaagtaccaccgcacccactgacgggacgaccacgacgcagtctctga

SEQ ID NO: 82120 - DNA, 234 bp, Citrobacter koseri
atgttgtcatttgatacgaaggccgcgttggaactgatcacacactctgctggtggttttagctatgacactcttgctagggcattgatttcagataaaaaagtacaaccttcccaacatcttttggctgattgccgtgagttttgcgaatccctggagtcgcaggggattattcagcggtgtgcatcctgtcgcgaagttcaggatgtgtattacgaatatcgtgcccactag

SEQ ID NO: 82121 - DNA, 957 bp, Citrobacter koseri
gtgagccaaattaatctgataacaacatgtacaaatggtaagcacagtaacggttatccgatactgaatctagcaacgtggtcaacttctctttcctgttcccaaaatttaatccaggcatggtgtaaggctgttgatacgtctatttctactggacatactttaccggtcgagaaaatgtataaaggtgggcattgggcgacggcaatgtctatacatcagctatatcaagttgaattgtgggtcctttctgctggactaggactactaaaacgtggcgataaggttgtaccataccaggcaacttttgcggttggtcataatgactctattccattattcaatgaatcgtataacggaaaagaatttcatcagagatggtggtctgaattaaataaacattcaccatttcaggagaagcatcctgtttcgttgactgatctaatgaagaccagacctgatgagtattttatcatttgcggttcgcctgattatattagcgcagttggcccagatgttattaccggtttgccttatttaaattcagcaaaaaaacaggtattgataatatcttcctctcgagttaagtcgccattaaaccattatttactggaaagtaacaagcgaattgctgaatggctaaattgcaacatgctgatgctgaatataaaaatcgcgcagtatgtaatagagcagtttactcgagaagaatatgataatttggggttattagccgataggttgaataaacagttctcttcgttgccagcggcctgcaagaaacaaggcgtgcgcaggactccggaagaggtcgaagcctgggtattacaacatctcaaagaggtgcctgataccagcgcatcacgtgctctgcgtgtctttcgtgatagcggcaacagttttgaagagaagcgatttcgtgccttgttccacactgtgcagttgcgcaatcagtaa

SEQ ID NO: 82122 - DNA, 3057 bp, Citrobacter koseri
atgactacacatactggcgcgttttccgaaggtgacctggtaacatcgtcattatttgacggtattgctaaaattgtgagcattctctctactgagcgtgcggagatagcttggttctactctcctttagaggaggaggttaaccgtcaggaggtggacattcacacactgacggttgctcctctatatgaggagagcaccatttacttccgctcaccagatagcggtatctggtgcaggggccgatatggcgggccacgaccagacaataagcatttgctgattatccgttcgggcgaccatgcggtcgttgatttggcggagatgtactaccccaactatgggcaagggcaggcaatgaaccccgctcattttctggcggcacgctcaaatgatgccccctatttctaccccctgcgggaaaaatttgtcagtgcgtggatcaaacagcgtgctgcctgtcggtcaatgtcgtcgttaatcagcagtcgtgtagagattgaacctcatcaaatagcggttgttcgctgcattcttcaggaccagaaccctaaatatctgctggcagacgaagtcggattgggcaaaaccatcgaagcgggactggtcatccgcgagcatattctggaatgtaaacgtgaagcccgcgtactagtggtggtgccgcaggtattgcaaggacaatggacgcaggaactggtcgatcgctttgctctacaggaagtaatgagcggagggcgaaacaaccagatccgcctgtgctctccggaagaactttgccagccagaactgatcggctggaagcccacaatgatggtaatcgacgaggcccatcaattagcccggcaggcatgggtcaatgatgaagacgaacaggcacagtatgccgcaatgactgcgttgtgccatcaggcccgcattgtgttgctcctgtctggcacgccgatgcacggtaacgaacgtcacttcctggcaatgctgcactgcataaatccacaggcgtggcaacttaatgctgtgggaatcgaaaaatttatgcgccgcgtggcagagcgcgagcgtctgggtggaatttacagttccttgacccctgaaacgccaaatggggtactggaagaggttatcgaagagttacgtcagctttttgccgatgatgagcaactgcaggcgcggattgatgtgctgagtcctctggtcgacttttttgctcctgatgaaagcgaagagcgaacagcggccattctggtattacgccagtggatcggcgagcgctaccgtctttttcatcgcttgctacgtaaccggcgtgaagatcccgcgttggaatatctctttcctgggctggccggcctggaaaaatgtgtctggcccgtcgcctcgaccgagctcacgctggatgaaacctttgatgcctggcgtgctgcagccttacgtaatcccgtgcaacaccaacatctagatgccacgacgcttgataaatgggtagatgcgctatttctcaacccgctggtgatgtcccgcctggctaaaaatgcactggcaaacgggactgccagcgaagaagagtccaattttcttgagcagattattgaaacgtcccagcaagagcagaaagccaaagatgcggcgctaatgaaggcgctgaccggttggtttgaaaaatgtcctgatggcaaagcggtcatcttttgcggtgaaagctctgaagccgccttcctatctaccaaactgcaaattcaggccccctgggcggtggttcgtcattcgccggacctgcgtaagcagagcgaacttccggatgacagttggcaggtactgatctgtgacaggcgcggtgaagacggactgaatctgcacggaaaaaatcgtcttgcggtccattatagtctgagccgcgactttaaccgttttgaacagcggttggggcgctttaaccgctattctggaaatctacgcggcgttaagcctgtgaaaagcctgattttactgccggagcgtgatgggctacgtgctgactgggtgaaactactggacgaaggcacgggattgtttcatcgaagcgtcgccagcctgcaatttgttctgtctgaacaattagagatggtatggcgtgattacgtcgggcaggggcttgccgtcttccatgaggcgcaacagcgcctttcgggagaaaacggcttcatcgcccaggaacgtaagcgcgttctggctcaggaaaacttgttatccatggagcaggaggtcattgctgcacgcgagttttctgagcaactggccgaatctgaagatgaggctgaagcgcaggcaaaagatatgctgacctggatgcgcaaggcattagggtttaagcgagagcaatatcctgaaggaggatttcgtctgcgcttcgagcgtggcgaatatcaacggcaaacgctggtggacgtaggaacgtttattgataactgcctgcttggtctggatttttcagaaggatatcccccttccacagcgttgatgagcttgtctcgaacggaagccggtaaccacaaacacgtttaccccttgcgctatggacagccttttgccgaaaccgtatggcaactgatgcagagcgatccgcgaggagcaagtatggcgctgcttcgggttctctccccagcggttgcgctgaagcaaccgcgcacctggttccatttccagtggctgagtgaagcgcaggttgaaggtgaaaatcagctagccgcgcagcgtcgtggtgatgagtgcttcagcccggaggttcacaatttctggctggatgacggtggaaaagaggcggatccgcaggtcgttgtttccctgctggataaaccttacgatgaagatggcaatagcttgttccaggatattaatcttcgggaagaggtctggatgcgaatgccggattggtttgagccgcataactggaaagagaccgtacttgctgccgcggagcaggcccggagaaacgtggatgctcactatggcgatcgtcccgtccgccatcaattgcttgcaatgaaggcgattattctgtgtacccgcgacatgctgtaa

SEQ ID NO: 82123 - DNA, 2451 bp, Citrobacter koseri
atggaaaatcaatggcaacaacttcgcgcggttctgaacggagaacatagcgaacgcgacgggctgagtggtcagttttttaaccgcctgctttactgtctggatgatgtacaggcgggagaatgcgaccgcctgcacgcattttatgatgcactgcaatgcgcacgggcatttgggctgatgccgttaaggctgccgtaccgacaccttaccgaaggcgcaatgctccagcattttggtttgagacgggatcgtgactacccaggtgaactgtttctgacgcgcgaagcggaagagattgatccctctctcttacccgtctggaaaggcgagcagcgccgttttctggaaaccccaccgctggatgtccttttgccctctgtactcaacgatccgcgttatacgcactacacatctgcagggcaacagcaggcggtacgcacggtgttgaccagcgacagagataaaacgctgctggtgaacctgcccaccggagccggcaaaacctttgtgattcactcccagatgctgacttcaccgcgcaggctcctgacgctggtgattgtgccaaccgtagcgctggcaattgaacaggctctgcgggcgcaagaggtgatgcaacaggccgggcaggatcacggtggcagctacgtctggcatagcggccagtcgattgaagaacggaatatgatgaagttgcggctggcatccggcgagcagcgagcgttattttgctctccggaagcagcgacaggcgggctcttgttacagctgttctcgcttgcggagcgcggactactgggcgccgtgatagtggatgaagctcaccttatcgatcaatggggggcggagttccgtcccgagtttcagctactggcacccctggtgcgatcgttgaaggctacctcttcagacggtgtcaaagtcgttctgctttctgccacgtttagtcaaagcaccctgaatacgctcaaagcgctctttaccggtaaacgacaggcatcagtgattgaagtgaacggcagttttctgcgtccggaacccgtgtggtatgtcagcgaagctgtcagccacgaggattaccttacgcaggtggaaaacgccattgctcgcttgccagcgccaatgatcctctacacaaccgaagtggaacaggccaaattctggtaccagtatctacgtgagcgtggttatcggcgatgtggattattccatggtgcaacgccaatgcaggaacgcgaaggtcttatccacgcttggcgtaacgatgggctggatatcatggtggcgacgtcggcatttggcgtggggatggataaaaataatgtccgttccgttctgcatgtcgcagtgcctgaaaattttgatcgtctctaccaggagagcggtcgtggcggtcgtgatggtaaagcatcggtcgctcacattattttccatcacaaacaactacagatcgcacgcaacattaaccgaaccaaactgatcggggccagcaaaggatatttgcgctgggccaagatgcaccagttgcgcgagcagcatcaaccgggtcagttcaccgtcccgctacgcgcgaagcatgccgacattcgcatggattcgcagagcaatgtggactggaatctgcgtaccttactgttaatgcagcgcgccggttttatcgatatcacctatccaccgccggatcttagcgctatcgccccggacgagcgtgatgagtccagggtccatgcgtggtttgaccattatttcaaccatattcagatttctgttctctgtgacggccatatggatgaagcgcagtggcagaaggagattcaggcccaccgttcgcatgaactggcgatgcgaaaacagggatttagcgcgttagaagggtggctcaatgaccacacaatatcgttgtgccagacgttagcgcaattttataccctcgatggctttgtgccggaaatagcctgtggcgggtgtccggcctgtcggagtaaagggtatcctccctttactccgacgctcggtcgtatagcacacgtgacgggcgagacgatgcggaacgtcatgggaaatgagcaacgcgtttattattctactacgctgacgaaccggttactgctgcgtcagtggagtgactggattgcccgactgctggccaatcgccagattcaggctatccgcgccagccagagcgtgctcgcccggcttggtgaggtcctgtccgcaggtttgcctttctggtgttcacttgccgttgatgaagaaaacacctgctgggatgaactggtactagtgttgcccggcgaaacgatgcctgaactggacatcttcgccagcatcaatcgcattattgttgcaccggaacgtttacaagaaccgggctaccgcgggcgtcgctggtgggatgttgataccggtgccgtggcattagaacaatttcagaggaatatcagctag

SEQ ID NO: 82124 - DNA, 900 bp, Citrobacter koseri
gtggcaattaccaacaacgctgccgcagggagccagatccgtctgctctgcatgatcgatcgggtgctgaatcggcgactcggagaggccatcccgatggcagatttgattgaattactgcgcccggagatgctgcccgtcagcgatggggcgagaaaacgcctgcctgccgaagtctctttctgggcaaaagaagggttatggaaaaatgagagcgctggcctcagtcaacagtcgccactttccagcgaacgtaatctgcccgcacgggttttgcgtacgctaattgacagtgagaaaacgacgccgctgctgaccggaacgcgcggccagcccttgctgatgtgcgttacctccatgctggcgcaggacaaatatacgatccgcggaaacacgccgctgacaaaagaggcggtgccgttggccgttggcccgatgattaacaataaattagccggtgaggggcgacgtaacctcaacgtctctaacgaagcagagccattcctcgattactcatatttcctcggttttacagaaccttatctggatggctgggtgatggaccctacccgcgccattgaaggggttttggataacctgtcgcttaccgctgcgatgccaattcagacattcctcagccaactggcagagcttctgccaatgctggatggaggagcctaccgccagcaggttgaaccgatgatctccgctgacaactggcaaccgctggagaaacatatgatcagcgccgcgttgagccaggcgctgctccggcttgaactgacaatgcagttggttttcaccactcgttccgatgaccttgacgccatggtcctgcaagctccggatggcagtctacgccgtatcagtaccgtgagcccagggggggcaagaaaatga

SEQ ID NO: 82125 - DNA, 3153 bp, Citrobacter koseri
atgagaatgatcgattactggccttccctgcaaaacatcaatgaatgtattcgcaccgaggcggaagagctggcggagtacaccttactggcagtgcatcaaccggtgaatttgctgcgtctcgataaagacggcaacaacctcggacatgcgaaagaagaagatttgctcaagcactttctggaaacgccgcgcccaattccgattgtgggcaaagccggagtgggtaaatcacacatcatccgctggctggatgcgaaactgcggctgcgtaaggagtacaaagacaagaagtggcatattgtccgtattccaaaaagtgccagcttgcgtgaggttctcacctctatgctggcgggcctggagggcgagatctttgacgaagcgcgggaagacatcaataaggtgtcggaaaaacgtacgcctcgcgagatcgctgaatggctgctgatgctgatggggcaagagctgcgtaacctgcatgaacgtaacaagcaggatatggaagcgctgaaaaaacagatggcgggtagtacgcctgagcagttaatagctatcaaaccacaggcgacccggctacagaaaatccacgtccacgctgaagataatgcattgccaacgctgattaacgatgcttacttcaagcagtttttgctgaaagaagagcattgtctctatcgccttgccaaccgtctgaccaacggtgcaaccagcagcgatctcgacgagggggaacagcaactccaggccaaagatcttgatttcagctttaatattaacgatctcagtctgcctgcgcgtcagtatattcagaaaagccgcctgaatacgcatgaggacgggcgcaaagatgcttcggagattctcaacctggtgctggttaaagcgacgcaggcgctgtttaaccagctcttcaacttccgtggccgcagtttctctgacctgtttacccagatccgtcaggcgctacatgaaaagcagatgacgctgatggtgctggtagaggatatgtcgctcatcaccgcgatcgaggatgtactgatcgacagccttgaaagggaagggatccgcgacgggaaagaagtgctatgcccggtgtgttcagctattgctgttactgacggttatcaggggtatgcccgccgtcgtcaggggatgctggatcgcgcgaagggtgaatgggtgatcgaagaggtagggagcgggcgcgaagagacgcgactgcgtattgtcgatttttgtggtcgatacatcaacgcggcccgctttgggggtgaagccttacgccagcgttgggagcaatctgctgataaatcacactggccacctgactgggaagccagcgcaaacggcgacgaaatggccgaagtgtttggtcgcagcgagcaaggcttttcgctgtttccctttaacacaaatgctatccatgcgttggcagagacattctgccgcgacgatcgcaacgaattaaaattcaacccacgtcagatcatcaaccagattctgttgcgtgtactgcagcactgtcgccgtgatgccgatgagggacgttttccgccgccgcatcttggcgatgttgcggcgccagcagggcttcgaagctggctgttccgtcagggcttcgccgacaccgagcgtgctgaatccgtggtcgcgctgtggggttatcccgccgattccgatggcactctggcaagcactctgccgcctgatgttgcccgcagtttcggtctggacgatctggcgcaggtgttggaaatcacaaaaagtgctccggtccatattcagccggtggtgcctacgcgggtgaccaaagttgagccgcaggttaaaaaaactgttaagccagaacccacaacagttaaaccgaaagtgaaagaagataaagataccctggctatccgagcgctggatgcggcggtgggtgactggatgctgaaaggtgcgacgcttgagatcgatcccgcgcgttatatcaaaagctccctggccttcttctttgataagcgcgtcgtggcggaatgggcgggcagtacctatcggccaacactttggttaggtaaatccaactttgtcgccgttgagttacctaacgcacagggcaaccgtggcgtgcatgtggtgaaatttattcctcaggccgaatacgataagcgctcggtgcaactaacggatgccgcgatggcgttagcacggtttggctactacagagaaaactccttatctaaaaccgaggactggagctacgcagatggcaaaacggattacctgattattcagagcttctgcgatcgctgggttaactatgcgctgacggaactcgttaagcataagcgcaacgatctgccgctgctgctcagcgagcagattgcgctggccgacgcgctgggggccattaaaacggcggatggttcgaaagaggtgcttgcacgactgctgcaaaacagcaaaacgctttctgtgcagtttcgttccgggatcacgaaggcaatcactgaactgcgggcagaggcattagcgaagtgggatgatgcccaggacgcatggctcagccttgtggcgctaaacgatcatgcgctggaaggcgatctcctgctaagtgcgatacaaaaggcattgaagaaacgctcaaaaaatacacatgccgccgtggtgaaaaagtcgctcagtgaaatccgccccatactggataccgctgctctgtttgccgactgtgaaaatgcggatgatttttccgaactcgtcaccggtttggctacgttagttaaatctcttggggacagcggcgattatcctgcggatatctccccggacagcagcacgctgacggattcactgaatgcgctaactgaggggggcatctggatgacgatcctcaaattgcgaggcattaatcaatctgaagatccgctgcgtcaatggcaactactttgcgaactggacggtgttttaattaaccggctcatgatgacaatgcaaagctggcagcaggtacacaaacgtgtactggcgaatattaccgcctacaaccattcacacggtgggcatcagatcagcgaatttcgcacgcagattgaaagcacgttgcaggaacttcatcaggtcctcgacgccatgcagtccgttgcaggggaacagtatgacaacgcttaa

SEQ ID NO: 82126 - DNA, 735 bp, Citrobacter koseri
atgacaacgcttaagacccaatttacgcaactgtgggagcagtatcagataaaacagcaggttcagtcgctggaagaggtctacgatcggtaccgcaccatacgtgacggcttgctggatgttgccgaaccgctgcaaaaagcccaaaagaaatttgaggtgatcggcatgctaccggaaccacattccactatcgatttttcgcaagaggcggcgcttttcggcggtgccaaaacgcagttggatgcgctgacggcacgcttcaaagaaagtggcgataaaaccgagcagagcgggttttgggaaacggtgcgggttctgaagagtgtacaggaaagtattgatgataaggtggatgcaacctggaaagcgtttgttgccgatcttgaagcacgcgcaatgctggattccgtctttttggaacaacagcgcacgctggggaacgtgttggtgtatgacgattatcgcaaagcgcgcgataactttaatcggcagaagttaagcggaccagacagcctgtcggtggtaaaaaacctgcagaagtatagtgatgagatggtcgcgcttaaacgttcaatggacccggatgcaccagacgatgttctgcgcttttttgaggcgttggacagacataatcatgcctcgcttacgctgctgacgccgggcgtgattgcctggctggaagaaaaaggtatgctgccagcgtttaacgtgacacgtaagagaatgatttaa

SEQ ID NO: 82127 - DNA, 4518 bp, Citrobacter koseri
atgaagggaatcgagctttcgcttttgcaacgcgtgctggatgcgctggaagaacaagaaaatgcgctcctggtatggggcgacacgggcggtttttttaatctggatgagctgttaagcactatcggacgggtgttacctgaagaagatgctgaaaaggttctggatgagatgctagacgccgccatgttgattcaggtgccgcacatcagtggcacgcctgtctggcgaacccgaatgggggaaacggtccatctcatgcgcaacctacgccagtggatgcatgagcaaaagctggaacagagcaaaacgctggtatcggactatcgctttattcgtcgaccgcgcagctatcccgatcgcgtttacgaaccggcaacgctgattaccggctggaaaaaacagctgaacttaagcgatcgcgtctgtgacattatgtgccaggccctggcgtcagataagcccttcttgctggcgggttttcaggttcgcgcgaccgaacgcattatgcagtgctggctggaacatcaggtgaaaagcaatacggccagcgggacaatcgtctgtgctggcaccggtagcggtaaaacgttgtcgttttacctgcctgcgctaacccgtcttgccgaagagatttgtaacaaccctgagcgcaaggtgcgcattctcgccatctatccgcgaaaagaactgctcaaggatcagtttgccgaaacgttttcacagtgccgcaagcttgacgaatttatgctgacggccgccggacgcaagattcgtatcggtgccttttttggcgatacaccggtgaaggcagaatggtcgaagaaagacgttaaagggaaggttggtctaccgttcggcctgatgaaatgccagcagccccacccgcagcatcctaagcagacttgcggaggggcgctcatttggcgtcgtgaagacatctttgacgagcgtgaggtgcttacctgtacgcaatgccagcatcagctggatcagagtgaaatcatgatcacccgtaatgcgcagcaacagcgcggcgacgccccggacattctgtttactacgacggaaatgctgaacctccagatgaactccacctggagcaaccatctgtttggtgtcggtgaaggctatgggccaacgttggttctgctcgacgaggtccatacctacagcggaaccaccggcgcacaaaccgcgctgctgctgcggcgttggatgcagcgcaccgattgtttgccgcattttgttggactatcggcaacgcttgctgacgcgcagcacttctttgccaggctggtgggtgcccctgaagaggaggtagccctgatccagccctacgcggaagagatgatcgaagagggggctgagtacctgctggcactgcgaggcgatcctgtctctgaaacggcattactctccaccaccatccaagccagtatgctaatggcgcgcatgctggatagcaaagcgaacaagtcacaaggtacctgggggaagaaaactttcatcttcactgataccctcgacggtaacaaccgattgtaccacgacctcagcgatgccgaaggctgggagacggggccaggacagtcgcgcattgatcattcaccgttggccgtgttacgtagtccttttgataaaatggcatctgagcggtcgaaaactgaactggggcagaactggaaggcggctatggatattggccacgacctcgcggaaaacaaagtcatttcccgaacgtcgagtcaggatgccggtgttgatgcatcagcagatgtcgtggtcgccacttcttctctcgaggtgggatataacgatccgttggttggtgccgttcttcagcataaggcgccgaacgatgtcgcctcctatttgcagcgtaaaggacgtgccggtcgtccaagaggcatgcgcccctggatgctggtggtgctctccgagtttggccgcgatcgtgttgagttccagcgttatgaagggctgatgagcccggagatcaaacgtcagggcctgccgttgggtaaccagcacgtgcagaaaatgcaggccgcaatggcggccctcgactggatcagcaaagttggtaaattcaaagatctgtggggcatgctgaaaaaagctgagcataatcagctgaaatatgatcgaatgtatgccccgcttatccgactgattgaagaggtactgagtggtggaagacggctaaacgagttgacgcgctaccttcaggacgctctgcaattatctgacggtgcggtgcaaaatatcctttggagcccgccgcgctcaattatgtttgagtttctcccctccctactgcgtaacctcagaacgcgctggtcggttaacggcgtggagtgggccggtctgcgcccgagtcaaccgaatgacgagagcgaacaacatcggagcaattcacccgctccggaatacatcccgcaaaatctgttcagcgagttgaatttgccggaactggacattcgcctgaagcgtggacgtgatgacgaagaacagtgggaaaccctctcgttctggcaggggatgcgtgagtttgcgccagggcgtctgtctaaacgctacgccattaaatcgaacaaaagtacggattggctggtcccgcaaacatacgaaccggtggcaggagaagggcggcaatatgttgatttccagataagcgatgcgttcggcgatagctggcaaaaagagtgtgaagtcgagtatcagggaaaaacgatcaaggttgttaaaccgtcaaaggtcatgaccacccgggctgatattcgtcgtataaatgataaaagtaatgcgcaactgcagtgggtactccacgtcattaaccctgcggttgcgacgcccgacgaggtgccaaagggaccctggaagcaaactctgcacgatatcacgttttacaaccaccagcatatgacgtcgctggaactggttcgcttttctaccggatcgcaggcgtcgctccggttcagaaataaggaacgggctcacgttgatttcacctgggtgaatggagaggaacaggttggcgtaggaagtcgtcaatgggtggatgcaatgcgcttgcgttttaacctctcgtgtgatgacgtgatgggcctgctgcatcaggcagaaatccagcgaggcatgcgccccgtttattttcaacatcttgtaaggcagtcatctgaatttgaatttgatagctttaacgcggactgggctattgaatgttttatggctcagcttgcggagacgttggcaagcggcgctcacacctcggttgagtcggcgctgcgagaaatggcttccgaaaaagggatgaaaaggctggctgatatcccggccagcctgttccagccggataccgaaaatgaggctggcactgaccaagcgctacagatcggcctccataaactccttgaaagaccggatatacagcaactgctgttgaactgcgcacaggcactctggaaacccttggctgagatcggcggctttgtcgaatgggcgcggcaggtattagcggacaccttggctgcgggtgtgcagcaaacgctaagtacgctacttccggatgttgatgagcgggcggtcgtgacagactcctgctggatgagcgatctccgcacgggagcagaatggctggaaatctggctctgcgagatggagtcaggcggaagcgggattttgatccgtttacagaagaagtgggctgaagaccctgtatccttcctcaatgtgcttgtgcgaaatctttcagccagcgactacgagcagatcgattacgatctgcgcaccgtgttgcagatgctgcaaacagattacgcgcttcgtatggcgatctctgccgttcgtgaagccagtaacatggacgcccggcgggaggctaacaagaatcttcatttgcagctttcacagcgcggtttgcgcctttcccacagctttacaacggtgctgtactcgcggatcctgcgggcgggtagcggcgatgacacagacgcccagctttatcagctactgtcggactggtcgtctcttgaaacaagaacgggtattgagttcagtatgaataccatggcgcacgcactggcggtgaatgcgcttggcgtcaaaaccgatgcatccttagtgtttaacgcgcagtgccggaaccaaaacctgctctggccgcgtggttacacggtccggcaggcagaactcggtttttacaatatgttttgctcgcgtaaagttacgactgagcgcctgcttgccggcgcgctatttagtgagcagatcgaaaagatctcccttgatgaggctgactggcttgggcaactgcatatggcgttgtgtaaagccggtcgagttgagctacaactcacgcgcgcgcagcgaaatcaattacatcagatcattaacaccgtgcaaattgaacccgtcgatcatttaggactgctgctatatccacgtcttggtgaagttcgtcgtgagcaggacgtgctcattttacgtattgaacttgcggaggcgatgcaatga

SEQ ID NO: 82128 - DNA, 546 bp, Citrobacter koseri
atgatcggacgtgcaaaacagcgccagatttttttacacggtgccgcagggcaacggcaattgcgggaagtactcagcgcccaacttatcgcactgattatgcagccagagccaatctggctggtgtcgccgtgggtgagtaacttctcactgttggacaatcgttcaggcaactgggacagcattgatcccgcgtggggaggcagggaggtagatttcattgagctgttggcctgtgcggtgaataacggcgcgccgctttcgctggtgacccgcgacgaaccgatgaaccgtatttttgtaaaagcgctggaaaaacgtctgagcaactttgcaaactttcgtctggaatggcgtaatcatctgcatataaaaggttttctgacgcaaaatgtgttcctcaagggctcaatgaattttacccgcagcggcgttaatcgaaatgaagagtttgtcgaactgaactgcgattcgcatatgatcggtgaagcgataaccgaatttgaacgtcagtatctttttattggatcacaggaagcgttctga

SEQ ID NO: 82129 - DNA, 2172 bp, Citrobacter koseri
atgtgtgcagactggctgaaaaattattacgctaaagataaatatctggattatgacaaggcgatggtggggggatacggcatcccacaaatgaacacgctgattcaacaggccgcagcgttacggatgccctgcatcgttccttcaacgcgaaagagaaaaacggtgttttatgccctggcagagaatgcaaaaagccttgaagaattacgacgtattctaaccgcggcgctgggttccgctgacactactcccgacattaaatcgatctttcaatctgacgatgacggggaacagttgctgctggagaaatccccggacggaatactggccttcgatttcttaccggtgccggacggctcacctcagcaggtaaaagagtggcaggtagcgcgaatgaagcgggtatacgccatgctgcaactggtgatggatctttatcatcagcgacccattttacattcgctagtcagtcggcaaaccggacggattctcagggatttctacacggcatgccacgcgcgcgacggcaagattgccgaacagtatctggaggagctacgcggtaatcaggcactgtcttctcttaatctcctgtttcttgaactacaggggatggcggcttcggcaaaatggggcgagattctcaaccatcctcggctggaagtattgttgcgcggtcgtgtgccggagcgtatccagcgcctgttgttgcgatcctctggccatttaatgcttaacgccatccgcgatgcgcacttcccactggacaggcgtgaagacgccaggcgactggtactgggcttattgccgctgtacaagcataagccccgctttgctcatcaggcgagtttcctgcctgactggcaactgtggaccatgggggccgcgctgctggggatcgacgaatggcaaacggcgacgcctctgttagatactgactggatacagcaggtcgaagggtgggcgacaggtgcaagttcgctgccagcgccggtagaagcggaagaacaggtgctgatccaggctccagttatcatgctgataagccttgaaaatgctatcgatttgctactcgaagccctactggcggacgctgagcgcgaaagtgagatatacgcgcaactggcggcgatgcctgaagcaacacgacaggcattggaaaaaatacccaaactatgggaggcgtggcaggcgctgaaaaatcgctgtgaaccgcaggactatggttggagtagctggcttggagatttacaacagtctacggaatctgaacggtttgaatcactgcgccagcaggcgactgttcactacatggactggacaccgtcaaccttcagcgaaacgcagtggcatgcgctgctagagcagcagtccaacgcccagttgagtaaagttttacgagacgtactgccaacccttctgaactggctggaagaatatgacgttcaggtatctgcctccttgtggccggactggcttatgctgctggctgttgaggatatccgctcagaggaggatgtgcgtctcggtgggatgattctggataaattcctttctggtaccttcacccgcgaggaatatgcgtccgcaattgaatcggtagcaatgctgtgctctgaaaacctgtcggtaagaaccttaggctactcgcttgatattgctgaacttctttatgataaaatctccgctgacgacgccgccagattaggtttttgggtcacgttgcaggagttgctcaagcagcgctgggagcgtctggatgtcagtatgcaactttccgcgcgcatggtggaaagactctatctcggcgaacatgccggacacgttttcccggaagaggacagtacgccgggcgtagcgtcttcgcttcatcgcgatctcgacggtaaaacgttggcaatttacagcctgatggaaggtgcggcgagacgcggaaaagaggctctacttaagttatatcctgggttgaatgtggaactcaatcacgatcacgtagctactccggcgctgataaatctggcggaaaaagctgactactttatcttcgccagcgctagctcaaagcatcaggcgttctataccgtgactgattatcgcaaagagataatctatccctcaggtaaaggggcgtcgagtatgatcgctgccttcgtcagtgcgctggattga

SEQ ID NO: 82130 - DNA, 2574 bp, Citrobacter koseri
atgcgtctggatcgtcttactaataaattccagcttgctcttgccgatgcccagtcgctcgcactggggcacgacaaccaattcatcgaacctcttcatttaatgagcgccttactgaatcaggaagggggatcggtacgtcctttattaacgtccgctggcattaatgctggccagttacgcacgagtattgatcaggcgctgagccgtttaccgcaggtggaaggcaccggcggcgacgtacagccgtctcaggatctggtgcgtgtactgaatctttgcgacaagctggcgcaaaaacgtggggacaactttatttcgtcggaactgttcgttctggctgcgcttgagtctcgcggcacgctgaccgacctactgaaatcggccggggcgaccaccgccaatatcactcaggcagttgaacaaatgcgcggaggtgaaagcgtgaacgatcaaggggctgaagaccaacgtcaggccttgcaaaaatataccgtcgacctgaccgagcgcgcggagcagggcaagctcgatccggtgattggtcgtgatgaagaaattcgccgtaccattcaggtactgcaacgccgtactaaaaacaacccggtattaattggtgaaccgggggtcggtaaaacggcgattgtcgaagggctggcgcagcgaatcattaatggcgaagtgccggaagggctgaaaggccgtcgcgtactggcgctggatatgggcgcgctggtggccggggcgaagtatcgcggtgagtttgaagagcgtctgaaaggcgtgctgaacgatctcgccaaacaggaaggcaacgtcatcctgtttatcgatgaattacacacgatggtcggcgcgggtaaagccgatggcgcaatggatgccgggaacatgctgaaaccggcgctggcgcgtggggaactgcactgtgtgggcgccacgacgctggacgaatatcgccagtacattgaaaaagatgcggcgctggagcgtcgtttccagaaagtgttcgtcgcggaaccgtctgtggaagataccatcgctattctgcgtggtcttaaagaacgttatgagctgcaccaccatgtgcagattactgacccggcgattgtggcggcggcaaccttatctcaccgctacatttccgatcgccagttgccggataaagccatcgacctgatcgatgaggctgcatccagcatccgtatgcagattgactccaagccggaagaactggacaggctcgaccgccgtattattcagcttaagctggaacagcaggcgttaatgaaagagtctgatgaggcgagcaaaaaacgcctcgatatgctcaacgaggaactggatgataaagaacgccagtactctgaattagaagaagagtggaaagcagagaaagcctctctgtccggtacgcagaccattaaggccgaactggagcaggcgaagatcgccatcgaacaggcgcgtcgtgtgggcgatctggcgcggatgtctgaacttcagtacggcaagatccctgagctggaaaaacagctggaagcggcgactcaatctgaaggtaaaaccatgcgtctgttacgcaataaagtgacggatgcggaaattgctgaagtgctggcgcggtggacggggattccggttgccagaatgcttgaaggcgaacgtgaaaagctgctgcgtatggagcaggaattacacagccgcgtgattgggcagaatgaggccgttgaagcggtatcgaatgccattcgccgtagccgtgcgggactggccgacccgaatcgtccaattggttcgttcctgttccttgggccgaccggggtaggtaaaaccgaactgtgcaaggcactggcaaactttatgtttgatagcgatgacgcgatggtgcgtatcgacatgtctgagttcatggaaaaacactccgtgtctcgtctggttggcgcgcctccgggatatgtgggttatgaagagggcggttatctgacggaagcggtacgtcgtcgtccttattccgtcatactgctggacgaagttgagaaagcgcatcctgatgtattcaacattctgttgcaggtgttggatgatggccgtctgacggacgggcaagggagaacggtcgacttccgcaacacggttgtcattatgacctcaaacctcggttccgatctgatccaggagcgtttcggtgagctggattacggccatatgaaagaactggtgcttggtgtggtcagccacaacttccgcccggaattcattaaccgtatagatgaggtcgtggtattccatccgttgggtgaaaaacatatcgcttctattgcacagatccagttgcagcgtctgtacaaacgtctggaagagcgcgggtatgaaatccatatctctgatgatgcgctgaaattgctgagcgcgaatggttacgatccggtttacggggcgcgtccattgaaacgtgcaattcagcagcagattgaaaacccgctggcgcagcaaatcttgtctggtgagctgattccgggtaaagcgattcgtctggaggcgaatgacgatcgcattgtggcagtgcagtaa

SEQ ID NO: 82131 - DNA, 411 bp, Citrobacter koseri
atgtcagctcataatgataaattcccatggctaagttactatggaaactacaatttctttgagcagagaatgcatgaacatagtaaagttacatcttgtcatgagataaaaaaagggctttacaacatccaattaactaatggtaagatgttaaaagtttttatctgcgagtgttattcatttagcactgcagagtacgtagagtcttgtcagaattatggggagttagatgcagttataataagttctaactggtgcggatatagtctggatttaaaatatgagtgcatgaagaaaaatgtgggaatttttgacattagaggatttatggctgcgatcaataaaatgcagttctgggaatatatgactgattatgaaaaagagaaattcaaagaatatggttggttgtaa

SEQ ID NO: 82132 - DNA, 699 bp, Citrobacter koseri
atggcaatttcagaaaaagcgataaagattttatggtctaatgctgctggtatatgttcttttagcggttgcaatgaaaaactttcagtagcggaggctgctgaaggtgccccatatactattggggagatggcacatataaaagggaatagaccaggttccaatcgctatgacattgaacagcctgcttctgaacgagatagttacgagaatcttattttactctgtccaacccatcatacattaattgataaagttgaaaacgttgatagatttagcgttgaaattctccatgaaatgaaaagagaacatgaggtgtcgatttctaaccgattagctattattaaatttgagtctgctgataaactgaaagaccaaatttctacatacttagctgaaaatcatcaaagttgggaacaatatgggcctttatcggataatgctaaaaagaatcctaacagtgagcaaatttatgccgtatggacatctgaacgcctctcaataatcgttcctaataatagagaaattgttaaaattctccaggggaatagagagttgttttctcggaacgagcaaagattagtaagtaaatttattcaacatgctgaaagctatgaaagatgggttaatgatgaaataccttataacgccatacaaagatttccattagactttgaaaccttaattttaggagagtaa

SEQ ID NO: 82133 - DNA, 438 bp, Citrobacter koseri
atgaaagagaatatttatacagataatatagatctatccaaaacttcccgccgtggtagttttaataaaagtaaaataccttcagaagcagtaagaagctattgtgtcagtgtccgattgaatgttgaagaactgcaactccttaatataaagcgaggctcttataaaaaaggagagtggcttcgtatggcttcccttcaaaagttgcctcctgttataccaacgattaataccaaagcctggaaagctttaactgacatatcgcaaaagctaaatcgaattgcgacccatatagattgtaaaagcaaggacagtcagcttacccatactgaattgttcgctgtgaagcgacaactggaagagcttcgcacgaatcttttaagtgacagtatatggagcctcccgaatgaagggtatgcgaaagattcgcaggggtaa

SEQ ID NO: 82134 - DNA, 1167 bp, Citrobacter koseri
atgaagggtatgcgaaagattcgcaggggtaagaactttgctggtgtagtccagtatgcattgaagcccggagtacaccataaaagcgatccagttgtcattggtggaaacatgttaggtgattcagcctttgaactgatcgctgaatttgatggcactaaacaacttcgcccagatgttcagaaggctgtttggcacaactcgcttcgattacccgatggtgaatcactaacggctgaacagtggtccagcatcgcagatgactatatggagagaatgggattcagagatacccatctccgttgctatgtcttacatgacgacgaaggccagcacatacacattatcgccagcagaatcgacctcaatggggggaagctttaccttggtaggaatgagaacctcataagtacacgcataattagtgaactcgaaatcgctcacggtctgacagtgaccaagacagcaccttccattacaccaaagcaacagaagcagaaaagaatctctcgtaacgaacagaagctatctgaacggactggggttctctgccccaaggaatcgcttcaacagatcattgataaaagtatgactgataagcccgatcttcttacttttattaagcgactcgaagatttagaagtcggctttaaggccaacattgcatctaccggtaagatgaacggcttctcattcgaataccgcaatatagctttcaaagcttcacaattgggtaaaaactattcttgggcaaatctcagtcatcggcttaactacaacccagaccacttagaagctcttcgagcgacaaaggaagctgtccctgtccctgtccctgtccctgtccctgtccctgtccctgtccctgtccctgtcgaacagattgccagagcgaatgtgcgaagcgaaagcataggcgacaaaattgctcaaatcgaactgcgactcagcaaagacagacgaaacgagatcgttgaaaaaattcttcaaaagaatgcagtacaacagcaaaagcatcttctttttcttacgtggcttgcttctctaaagcagttcatagagcttctccgaagctatggtaagtccattcttcacaaaacccacacacacttctcaaaaattcatgtaatgcaacctttaaacaaggcgagaaaaattcgtttatag

SEQ ID NO: 82135 - DNA, 279 bp, Citrobacter koseri
atgaataaagagaccattaaatgcccattctgctttcaggagagtccgtttggtgtccgcgtctgcaccggttgtcattcaactattaaatatggagccgtttcagcctggttagctttactaataggagttgtgctgttagcgattgctttcctaatattcgctatcagtcaaaatttcatattaactgtcgttatctattttgtctcagcaatttttttaagattttatttgcgtaagaaatttgcacacagagccattttcacacataaaagctaa

SEQ ID NO: 82136 - DNA, 387 bp, Citrobacter koseri
atgaataaatttattgttacatccttttttattggaatattttcaatttctggctgttcaacatcagggaaccagaaccttaaaaatgaaacaccacaaagccttcagtcaaagatatttaaaaacaaaacaaccaagacagagttactcactaagttaggtgagcctgatacaagaaccacacttgatgatggaaatgagcagtggagatactttatgtataacaatcagttcaatgcctcaactttcattcctgtagttgggcttctaactggcggttcaaagacccagtctaaaacccttgaaatatattttaaaggagagactgtcagtaaatggactttctcctctgacaacaataacaccaaaactggtattcttaattaa

SEQ ID NO: 82137 - DNA, 306 bp, Citrobacter koseri
atgaaaatatactcaatcctcacagttatccttaccacatttcttttaaccgcatgtaacagtgagccatcccaagacgatatatacaatgtcttcaaaattgttgttgatagatcaaatgccagtatgaaagctctcaactcaagcattcccgaaaaagaccttttaagaatcgattatgtgaagaaagtaagttgcacagaagaagcaaacaatgtttataacacttttaaagcacaatatgaaatgaaagtaattgagggagagttaacccatgaagttcgcgtgagaaccgtcaggttatag

SEQ ID NO: 82138 - DNA, 834 bp, Citrobacter koseri
  misc_feature (736)..(745): n is a, c, g, or t
atgctctcagattttgaaatattatttagtgattcaaatgccgggacttatttcggtgatatcttccccatcaatattgatcatgatacagatgtaacactgaaggtctctttaccgggtggggattttcaatttgtagattcacttgatgtctttttatcatttgataacaaattaaacatggggttagatgtcgagaatgtatatcttgttcaagaagattatatttttggagaaaatactgacaacctaacaattaaaaatacattaatactttctcattttataaatgaactcagcaaattagcaaactatattgatcgaattgatgacaatggccgccttaagattgtatttattgataccggaagttctaaaaaaacacctccaattgtacttgagccaaagatatcgatagataatgcttcttaccctgccgtagatttatcagtctttaataatatcaataatcatgagaatgataatgctcatgttcaagaaaaacaatcaatgtttagagtttcagtaatcgaagtgctacgagaagtagatggggaggaagacaattttaataaattaattaaacattgggaactcctgaaagagacatattacggtaattttgaatgctatttgacgaacttttcatttctgaaacaaaaaaaagaagctgccgaaaattacatgtcagtatcaagtaaaatatcaaatactctatcctctatttcagggaaannnnnnnnnnactctatcctctatttcaggaaaacttttcggccttcccatttccataggtgttgctcttgctatattaaaatcatcagaaaaatttga

SEQ ID NO: 82139 - DNA, 960 bp, Citrobacter koseri
gtgataaaaaagtcatataacctttgggatttaaggctagttgtgaaaaaaatcagtccttccgatgtgaaatatataaaactaggtcccggtggaaaatgggaagccgaatgtattgataccggtatcataaaatttggctaccacgagacaccaaatcaactctgtatagatggtaaatgggctgaggttcatgaaatatggaaaatcatcaggggaagtaaaacgggtacagctactagtgaccttaaccagataaaagtgttttatactgctcaggaagatactgtctttatcaccttctacggtggttttctttattggtgcagaccaacaggcgacgtcactgttcttcaggatggcagcagaattcgtcagactattgatggatggcacaatcgtagcatcaacgggacaattttcactattagttcaataaatggtgagttgaatgcaacccatggattcagaggcactatctgtaatgttaaaaaagccgaatatgttatccgaaaaattaatgatgaatattcgcctgaaattattgagtttgatctcgccgaaactagctatctgaattcaattcgtcaactttgtaagctattgacatggcaagacttcgagttgctagtagaccttatattttctcaaagtggatggcgacgagtcggtagtctgggcaaaacgcaaaaaacgattgaccttgtattggaactaccgacaactcgcgaaaatgcattggttcaagttaagtccatagcagacaatgctacgttggatgaatatgtaaaaagattccatgaatgtgatgcctacgacagaatgttttttgtctggcatagtggtccgctgaatgaagatcaacaaattgacggtgttacattaattgggcctgaaaaactatcagagattattttggaaagcgggttgacccgttggcttcgaaaaaaagtatggtga

SEQ ID NO: 82140 - DNA, 744 bp, Citrobacter koseri
atggtttctacttcattaaagtttggagggaaaataattgaggaactatctcaaaaaattccctcatcattatttgcgttaaatgagttggttaagaattcgtatgatgcgttctctcctgatgttagtattacagtagtaccatcggaattgatgataattatttctgataatggcaatggcatgtcaatagaagaaattaattcgttatttcatatttcaaaaagcagtaaggaatatgggcgagaaataagccaagatggcgtgactagaattattcaaggttcaaagggactaggttttttatcagcttttaagttcggaaatacagtggaatggaaaacatgtaaaaatggcgtgcgcagtgtattttctgtacgaaaagcagatttgattaataaagatgatatctctggtattgtcatcccgattaaaactgattccagtaccgagaaaggaactgaaattaagatatatactgatcagctggggatggatgaactactttctgatttatcagatgacaaagtctcgagtaaattagcggcatctatgctcgatgaatcatttaatataaaaattaaaattgaaggtaaagatagagtaatatcaacaaatagattaaagccatttatttctgaatgtgaaaatagtcagcttttttatgtgaaatataattcagttagagagatgattgatttttatcattgtagcatcatcacttggaaatgctttcccagttaa

SEQ ID NO: 82141 - DNA, 960 bp, Citrobacter koseri
gtgaaagcagcggtttatgacgtggaaggcgctcccggcgtcctgaaatatatcgatatccccgagccggtcgccgggcctgacgatgtcctgattgctgtcgaggctatctcgattgaagggggagacctcatcaaccgccgttcagcgccgccgcctcgtccttcatggatcgtcggctacgcggctgcgggcacggtggttgccgtcggagcgaacgtccgtagccgcgcggtgggggacagagtcacggcttttaacatgcaggggtcacatgcggaacgttgggccgtgcccgcggaacgaacatggctgataccagatggggtggatgcggtagacgcggcggtgttaccgatctcctttggcaccgcgcatcattgccttttcacacgaggcatgctccggcagggagaaaccgtccttattcaggcggcagctggcggcgtgggtcttgcagccgttcagcttgcctcacaggcgggtgcgacggttatcgctgtggcaagcggaacgcagcgaagaagtcggttgcttgaacttggcgccgactatgtcgtggatcgtgcagcgaatgacgtcgtggacagtgtccgacagttcatccacggcgccggcgtggacctcgtcatcgatcctgtggggacgacgttacctgcttcgctttctgcactcgctccggaaggacgtctggtcttcgtcggtaatgcgggcggcggcagcctgactgtcgacctgtggccgccaatgcagtctaatcagacgcttatgggggtattcatgggccccctttttgaaagacccggagttcgggcaagcgtggacgacatgttgcaggccgtagctgcagggcgcatcagggttgtcatcgaacgtatattccccctggccaacgctgccgccgcccacgaattcgccgagacggcgaaaccgcttggccgcgtcgttatgaagccatga

SEQ ID NO: 82142 - DNA, 846 bp, Citrobacter koseri
atggatttaaatcaattatttaactcaatagaagccacaatgttggctcgattcaaagaatctggttttatacatcataatggcgataaaggtgagaatcgagaagagtttttaatgggttttctcaaaactcatttgccaaaaagatatggtgtgaccaaaggagaagtaatcacaaaagaaggcttacgctcccatgcgattgatatcataatttacgatgcagttaattgcccagtgctttatgcggggaaaacatcaattcttcctgttgaaggggtttatggtattatcgaagttaaatcaactctatcaaaaagtgagtttgatgatgcagcagaaaaaataacctcattcaaaaaactagcgccaagagatttaggagtgattgctactagagaatacgcaacagttcatagagcatccaggccatttggtattgtttttggatttaatatttctggtaattctctggactctctaaaagaaaattggagggcgcattgtgatgctgtacacgatgtaaattatttttgtaatttaatatgtgttctcggcaaaggtgtgcttcgatatgaaaaggttaatctaacaaaaggggaaaaagatttgcttttagatacagatgaatttgttaatttggttttaacagcgcataagcggcaggtaaatagtgaggaaaatgatgagattattttgcgtatagttaaagagggtatggaagaccaatcttttggccgtttttttacctatcttttaattatgcttactcgaatgaaattaaatgtccctgatattggaagatatatcgatccaaatttgccattgtcgattgtgagagagtaa

SEQ ID NO: 82143 - DNA, 474 bp, Citrobacter koseri
atgttgagtaatgaatgttcgattctgctgattgatgatgatgccgatgtgcttgatgcctatacacagctgcttgagcaggcgggctatcgcgtctgtgtctgcaataatccctttgatgcgcgggagtgggtgcagaaggactggcccggtatcgtgttgagcgatgtctgcatgcctggctgctccggcatcgatttgatgacgttgtttcatcaggatgacgagcagctgccgattctgcttatcaccggacatggcgacgtgcctatggcggtggatgcggtgaaaaaaggagcctgggacttcctgcaaaagccggtagacccgggcaagttactctcgctggttgaggcggcgttacgccataggcaatcggtgatagcgcgtcgccagtactgccagcagaagttgcaggttgagctaattgggcgcagccaatggacgcatcagtatcgtcagcgcttacagtag

SEQ ID NO: 82144 - DNA, 498 bp, Citrobacter koseri
atgaatatatggctatatcttgctttgatataccgcttcgcagcagatgattcattaattatttttaatgctaaggccgagaatgaccccatccaaagtattccctcatcgtatagttttttatatccagggtcctcattgatattaataactgatggtgtgccagcaaaattgctttctatgaaatggttatatggagattccaatttctttaagactttgcattctgttggtgttcctccccatacccttgaaagaaatggaataattatttcctttaagcaaaaactatcaatagtaccaaagaaactatgttttacattgtgtccttcagccttgcatctacgttccagttctgaacttgctttctttgtgaatgtaattgcaatgatccctttatgctctggaagacagtcggtaatatttctgattttttcttttataaccgtggtcttaccgcttcccggacatgctgttattaccatgcttccagtgtag

SEQ ID NO: 82145 - DNA, 588 bp, Citrobacter koseri
atgcaaaaacattacccacatctaaagaaaatcacccctaatgacttcctgctgaatttgattaatcaccatcttaatcagatcctagaatgtcactccaaaatactggcctttcgaatggattttgattaccagcgaggtactaaccgattcattcgtaattcctccgccgaaatacaggacgaccttagagaactcactcaggcgatgatgaaccttccaggcgtcactggtattttttgggtactggaatggacttcagaaggtgcggtgcatgcccatgcaattttctatcttaatgctcaggtacatcagaagtcatttccattcattttacaggccgaagaaatgtggctagagattacccatggtgaaggcaagtctcagcgatgcaagccaaatgaacatcatcgtgacaatattaacaacgttgttgaatatcacaataatgaagccttaaacagcttgagacgtatagcgagttatctgacaaaagaagaccagaaatatggttatccgatctggggatgcaatgaggttccaccacctgcaagacagggaaggcccagaaaatatataccaagctaa

SEQ ID NO: 82146 - DNA, 321 bp, Citrobacter koseri
atgaaaactctacctgctacaatttcgcgggcggcgaagccctgtctgtcgcccgtagctgtctggcaaatgctactgacacgcctgctggaacagcactatggcctgacactgaacgacacgccgttcagtgatgaaactgttattaaggaacatatcgatgccggtatctctttagtcgatgccgtgaattttctggtggaagagtacgaactggttcgcatcgatcgtaaggggtttagctggcaagaacagtcgccttttattactactgtagacatgttaagagccagacgaactatgagggaaacaagaacttaa

SEQ ID NO: 82147 - DNA, 318 bp, Citrobacter koseri
atgagtaacatcacatggggcctgcagcgggatatcactccgtgcctgggagcccgccttgtgcaggaggggaaccagctgcattatctggctgaccgggccagcatcaccggtcaattcagtgacgccgaatgccagaagctgaatgaaactttcccgcactttatcaaccagatggaattgatgctgatcaccggggaactgaatccccgacatgcccactgcgtcaacctgtaccacaatggtttcacctgcgaagccgatacccttggtagttgcggctacgtatacatcgctgtttatcccactcaacgctaa

SEQ ID NO: 82148 - DNA, 222 bp, Citrobacter koseri
atgaaaattatcagtaaacgccgggcaatgacgatataccgccagcatcctgagtcccgaatctttcgctactgcaccggaaaatatcagtggcacggtagcgtctgtcattacaccggcagggaagttccggatatcacaggagtcctagcggtgtacgccgaacgccgtcaggaccgcaacggaccgtatgcctgcctgatgagtattaccctgaattga

SEQ ID NO: 82149 - DNA, 459 bp, Citrobacter koseri
atgacaacgcagacagagtacgacctcgtatccgctaacgaatccgatttcaaactcacagtaacgcaggttcccgacgaacagcgtatcgatttttggccgcagcactttggctccatcccacaatggataacgctggaatcccgcattttcgcctggatgggccgcttctgtgcggattacagcggtggtatctggtccttttacaccctcagcaatggcggcgcgtttatggcccctgatgctgacagtgacgataaatggcgtctgttcaacagcatgaacggtaatggtgcccaaatgagtgcagaagccgcaggtatcgcggtctgcctgattgaatacagccaccatgcctgccgtacagagtgtggcgcaatgaccgcacactattaccgcctgcgggactatgccctgcagcatcctgaggctcacgccattctgcgcatcatcgactga

SEQ ID NO: 82150 - DNA, 261 bp, Citrobacter koseri
ttgctttttaaggtcatcatcatgcctgaatccccgttactaccacctggttctttcacccgacagcaggccgaagccattatcagtcggtatcacaatgttaccgtcgaagatgaccagaacacgcattttcgtctggttgtgcgcgacgatgatggcggcatggtctggcgcgcctggaattttgagtccgatgccggtgcaggacttaccccatatatccggcgctatggcatccgcaggacgttcctcaccgactga

SEQ ID NO: 82151 - DNA, 474 bp, Citrobacter koseri
atgaaaattaaaccctgtttacctgtcctgctgtctcttctggccccggccttcactcatgcaacagtgaccgaacaacagtggggtgaatggtacggcaatacgggcggtatggagtttgcattcagcagcgacaatcaggccggagagaagctgaccatcagttgcagcaataaaaagatggttgtggcctggcagcttccgaaggaggattaccgcgccacctctgatgaaggaatgagcgaagtgtatcttctgataaataatgaaaaatacgcgcttgagaatgaatccctgcttcctggcgaggctgttccggctcaggtggcttttgaagccctgaagcagacaggagcaaaagacacactggctttcaccgcctttcagtcaggcgaatcaaaaccattcagtgcccgtggtcttaacgacgcgctgaaagatatcacctggcaggattgtctcgatcaaccctga

SEQ ID NO: 82152 - DNA, 696 bp, Citrobacter koseri
atgaaactgattaaattattacctctgctggcaatgattgcgggctccagctttgctgcatcaccggagagtacggtcaaagcatcaggctgtctggcggtaaacgatatgcttgagaacctcaattcgcgggagtcctgtgtttcagtcgatatcaccagaaccttatctgaaggtcgctatctggcggttgctaacctgagtaacggcaacatctacccggtccgcatgaccctcagtgatggggtcattaccgcacgtccggatacggatgagattgataagctcaatcagcagcaagcgcagacacgccgggaagagcagttacagaaaaagctcgattattataaagcccacccacagaaagagagcaagttcgacaaagcgaaaaaggcacatctgaatcttactcaatatcactcagccgcctgcagggccattggtcaaaaagtatgggattccattcatgaagatgtgtcgtgcctgatgattgagaatgcacagccggtcagtgataacactcaaacgggaacggccattctgcgcgggccaggtgcgagcaaatttaagctcccggtgaagttcagcgtgattcaggaggattttatccgtgttgacgccgatattgctccggctgcgctggcacaactaaaggcacagatagacgcgtataaagaaaaactgaatcagcgctaa

SEQ ID NO: 82153 - DNA, 864 bp, Citrobacter koseri
atgaacaattctgaaggtgtgaagtcgtttcggcaatcgctttctggtctgccacagtgggcatcagagcggattctgcagcaaataaaccagttaacctactacgagccagtaataggcattatgggcaaaaccggtgcaggtaaatccagtctgtgcaacgccctgtttgccggtgaggtatcacccgttagtgatgtggcggcctgtacccgtgagccactgcgctttcggctgcaggtgggagagcgtgtgatgaccctggtggatttacccggtgtcggggaaagtcgttcacgcgatgcggaatatgctgcactttaccgtcagcaacttccccggctcgacttggtactgtggctgattaaggctgatgatcgggcgctggcggtggatgagcatttttaccatcaggtgattggtgaagcataccggcataaagtgctgtttgttatcagccagtcggataagaccgaacccaccagcggtaacggccaattgtctacagcacagaagcagaatatcagtcgcaaaatcggtctgctgcatgaactgtttcagccagtgcatccggtatgtgccgtatcggtccgggtcagatggggattgcggataatggccgaacggatgatccgctgcctgcctcgtgaagccagcagtccggtagtggcgcaactgcagtctcccattcgcacgaccgcagtccaggagaaagcgcgtaacgattttggtgaaactgtcggcgcggtattggacacggtaagtgccctgccgttgataccggctccggtgcgggcagtcatacgcgcagtgcgcgataccgtggtgtcggttgcccgtaccgtctggaacttcttcttctga

SEQ ID NO: 82154 - DNA, 906 bp, Citrobacter koseri
atgcctagttccccttctaagcggcttgaggacttgagtctggtccagcgtgagcggctggcctacatcgattttcggctctacttcttcggtgagatcggtcgcccagatctgattgagcgcttcggcgtggctccagcaggggcgacacgcgatttggctttgtaccgggaaatcgtgccgcataacatcaccttcgatggtagcaacaagatctatcgcatcgggcaggagttttccccgttgttcaaacacgcatcgcagcgtgttctgtcggcgctggctttcggctttggcgatggcgtgaacggctcaatgcaggcgctgctaccatgtgaatcccccacagccctgtgcatccccaagatggatgtgttagcagcgatttgccgagccatccacgccaagcgacctgtcgccatcagctaccactcgatgagcggcggcgagtccgagcgggtaattgtgccctttgccttggttgataccggcctacgctggcacgtccgggcctttgatcgcaagactagagagtttcgggatttcatcgtcacccgcatcgaagcaccaacattgctcgacgaggagccacaggccaacgaacgacaggataacgacatccagtggacgcgcatcgtcgagctggatttcgtgccacacccgagcgttgagcggcccgatattataaagatggactacgggatgacagatggttcgatcagaatgcgcgttcgcgctgcggtggtgggctatatgttgcagcgctggggggtagactgctcacccgatcattgccttcgcggaccggagtaccggttatggctcaaagatcatctcgcaatttatggcgtaaaaaatgccttactggcaccaggctatagcgccactaagaaggctgactattaa

SEQ ID NO: 82155 - DNA, 3279 bp, Citrobacter koseri
atggaactgatcgacaatatcaaccgtctgctcggagacgacctaaagcagacgctcaaacctggtgctcgcctgaagatcgccgcctcctgcttttcgatgtacgcgttcgaagcgctcaaagcagagctggaaaaaatcgatgagctgcaattcatctttacctcgccgacgtttaccgctaacgaggttaccgacaagattcgcaaggaacgcagagaattccacataccgaaggctgaccgcgaacggagcttgtacgggagtgagttcgaaattcagctacgtaacaaactgacccagcgcgcaattgcaaaagagtgcgcggactggatgcggcgcaaggcaacattcaagtccaatcgcagcaaggcaccgatgcagcagtttacttgcattcaggctgctgccgcagatacggcctacatgccactgcacggctttaccgccgtcgatctcggctaccagcagggcaacgctgtctccaacttcgtcaacaagatggacgagccgacatttacggcgacctacctcagtctgtttaaccagatctggcaggaccccgagaagctggaggatgtaacggcgcagatctgcgaccacattgcatccgtctaccaggaaaactcgcccgagagcatctacttccttatgctctacaatattttcaatgagtttctggacgacatcaacgaggatgtcctgccgaacgaccgcacgggctatcaagacacgctcatctggaacaaactcttcaattaccagaaagatgctgccaccgggatcatcaacaaacttgaaagctacagcggctgcatcttggccgacagcgtgggtttgggaaagacttttaccgcgctggccgtggtaaagtattacgaactgcgcaacaagtcagttttggtgttatgccctaagaagctggcggacaactggctgaactacagccgcaacctcaagaccaacatatttgctcgcgaccggttcaactacgacgtgctttgtcataccgacctcagccgtacgagcggtgagtcgttcggcacaccgctgaatcgcatcaattggggcaactacgaccttatcgtcatcgacgagtcgcacaacttccgcaacaatgacgcctataaggacaaggaaacccgctaccagaagctgatgaacaaggttatcaaggagggagtgaaaaccaaggtgctgatgctttcggccaccccggtgaacaaccgcttcaacgacctgcgcaaccaactggcgctggcctacgaaggcgactccgaaaacctcagcaagaagctgcgtaccggcaagacggtagaggacattttccgtggtgcacaggctagcttcaatgcatgggcaaagcttccatcggaagagcgcacagcgcgggccatcctggattcgttggacttcgacttcttcgaattgctcgacagcgtcaccattgcacgttcgcgcaagcatattcagaccttctacgacatcaaggaaatcggccaattccctgagcgccgcaaacccttgtcgttccatagcccgctcacgcagcgaacggatgtgatgagcttcaacgaaattttcgagcagttgtctttactcaagctcgctgtttacgcgccgatcagctacatcctgcccagtcggctcaagaagtacgaggaaatgtatgacactcaggttgcagggaaaggcaagcttaaacaagtcgaccgcgaaaagagcctgcaggcattgatgacgaccaacctgctcaagcgcctggaaagctcgattgagtctttccgcttgacgctcaagtccctgcgtgcgaaccacacgaatacgctggccaagatcagcactttcaatgagactggcggcctcagtggcattgacagcagaatcaatgacctcaccgaccagttagaaaacctcgacgcggacgacgacctgccaatcaatggcgacagtgagatcggtggcaaggtcaaaatcagcctcgccgatatggacttgccttcttgggagcacgagctgaaggtcgatctggaaatcattgatgccttgctgacgtcgatgaacaagatcacggctgccgatgatgccaaactgcagcatctcaagacactggttctggagaagatcgcagcaccgctgaatcccggcaacaagaaggtgctgatcttcaccgccttcgccgacaccgctgactatctgtatgccaatttggctccggaattgctggctacacagaccttgcacagtgcaatagtcaccggcaaaggggcaccgaagagcacgctcaagaagagctatgacttccaggaactgctcaccctcttctcgccgcactcgaaggagaaagccatcgtgctgccaaatgatgaggcagagatagatgtgttgatcggcaccgattgtatctctgaaggccagaacctacaggactgcgactacctcatcaactacgacatccactggaatcccgtgcgcatcatccagcgcttcggccgtgtggatcgcatcggctcacccaacagcagcatccaactggttaactactggccagacatctctctcgacgaatacatcaatctgaaggaacgggttgagagccgaatgatgattgccgatgtcactgctaccggtgacgacaatgtgctgagcgcccaagccaacgatgtgtcttatcgcaaagagcaattgcgacgtttgcaagaggaagtgattgagctggaagacctgaaaaccggagtgtcgattactgatctcgggctcaatgacttccgaatggacttgctcaactatgtgaaggccaatggcgaattgagcaacgtgccaagcgggatgcacgccgtagtgcctgccaagccggagatgggcctacgcccgggtgtgatcttcacgctacgcaaccggaatccaagcgtcaacgtcagtcagcacaaccgcctgcacccttattacctcgtctacattaatcgcgagggggaagtcattcacgattacaccgaagtcaaacgtttgctggatctggttcgcacctgctgcaagggacaagcccagcctattacagatgcctgtctcttgttcaataaggaaacggccgatggccgcaagatgcagatgtattcggacctgcttggcagggccatccgctcaatgatcgaggtgaaggaagggaaggatctggacagtctcttctgcggcggaaagaccaccgcgttggtcaatactatcgtcggactggacgacttcgaactgattacctttctcgtgattcaggaggccggatga

SEQ ID NO: 82156 - DNA, 702 bp, Citrobacter koseri
atgagtcagtctgcgcgatttgagtcgaataccgcgttcatcaactatccgaagcaggctgtctttggtcgtaccctgccaaagaataagatctacgaacacagcggcgccaatacaaggctgaaggagttgttcgtcgagcaggtagagcagattgtctggcaatacaagttggctccggaaacgatcaacctgcccgccaggccgggagtaccagagcttcagattttctcaatccagctcaagacatcggagctgaatctggacgttttgcgttgcatcgatggcgcggtgcagtttcccataatcttcgagctgagctttgatggccgaacaaaggtgatcgctgcatataaacgaccgaatgagtcagacgccagccgttgggtcatgagtgactactttacgacagcctggctgccgagtgactgtgagcgcgccaccatgcctttagcactcgacctgggcggcttgtatgagcagacgcttcaccgcctaatccccacgcctgcgcgcccacgagaaagtctcgctgacttggtcgtacgcgtcgaactggttgaagccaagcagcgtgaggttgagaaagctgccagtagacttgccaaagaaaaacaattcaaccgcaaagtagagatcaacgcgcatttgcggcagcttaaaaaagaacttgaagaattgaccgggagtgagagtgcatga

SEQ ID NO: 82157 - DNA, 2703 bp, Citrobacter koseri
atgacacagagcttgaatgatgagtcaaggatacacatcgagcagatcgctggtgaagtgttggcgcaactcgaaagcatcgctgaaaccgctagaggcaagctgcacgatgggcggacattgggctcagaagcgttggcaagtatcaatacgatgacgtctagctcggctattcagaatctaggtcagattagccaagtgaatagagagagctatcagaccttgacatctgagccagctattgctcgtgttgttgctgaggacgacacaggaaatcgacagacgttctatatctgtcgggcaattcctttaacaggatttatcaatcacactagttatcgaacagaaaaaggacgacttgcatctctacctgttggagcagagctggaactcaaagacggcagttatttaaccgtcattgagcgagcacatctccgccccagtgcgcttgccgatgggtgggactctcgtgacaccgtcgttgaagccgagcatttagggccgttcaccatcgagtcgttgcgtgcgctgctgaccgaggttgtgggggaggaagtcaccgaagacattctgggccaattgctggccgaagagaccgccagggccaacatcatcgacggcgttcgccgcagcgtcatcaccaagatgggactgcgggatcagcccatcctcgatcaataccaggatgagattttccgcctcccgcttgacaagcgcttgttgatcctgggcccaccaggtacaggcaagacgaccaccctgatccgccgtctcggccaaaaactcgacaccacctacctggatgaaggcgaacaacgtctggttgaaacaatcgcttcagcccaaggcattgcgcatgccaacagctggttgatgttcacgcccacagaattgctcaagcagtacctcaaggaggcatttgcgcgtgaaggagttcccgcctcggatctgcgcatcagaacgtggcaagactatcgacgcgagctggcccgaaacgtattcggcgtcctcagaagggcttccggtggcggtacctttgttctgaaagacggactgaccagcatgaccgatgccgcactagagcgccccattcaatggtttgacgatttcgatgaatggcagcgcaaggcctatgtgcaggaactgcgtgaagcagcaacccagctccacgatgccaaaacgcccgacgtcttaagtctcggcgcacgtctgcaagacatcttgtcgcgcgcggtcgatggcgcactggcggcgatgtttggctcactgtcggtggagattgccaaagtgcaggcacttgtcagcagcctgaaggaaggctcggacgccaagatcaaagccgcactcaacctgcaactcaaccgaaaccgagcttttctggatgagttggcccgcgtgatcgacagcctgcaacaagcgcaaacgactgatacggacgatcaggacgacccggatgccgatgaagaagaagatgccactgcaccccgcacaggccgtgccgctgcgctcaatgccttcatgcaagcagtgcgcgctcaagcccgactggcagcatccaagcgcacagtcagcaaagcctctcgtaatggcaaaatcatcgagtggttgggagatcgtggtctgacagaagcggatcgcgctgaggtgggtgcaagccttctggtacaggccagtgcacgccgcttcgttaatccggtcaagcgctacctcgacggcataccgaagcgctaccgagcattcaggcgcgaacgtcaaactgcaaacacctggtatcgccacgaaggctttgaggctcgcgacatccacccactggagttggatatcataatgctcacgatcttgcgcgctgcaggcgacttactcagtcgccccaacgttcagcgcgatattgatagccctgcctggtcatcgctccagcccattctggggcattactgcaaccagatcctggtggatgaagccacagacttttcgcccatccagcttgcgagcatggcagcactgacacatccgcgactgcgctcattcttcgcttgtggcgacttcaatcaacgcctgaccacctggggcgcacgctccgccgacgacttgaagtgggtcttcgccgatttcgatatcaaggagatcactgtctcctatcggcagagcaagcaactgaacgatttggcccgcgccatgatccgcgctgtcggtggcaccgagcaaaacgccagcttgccagcgcatatggacagcatgggcgttgcgccagccttgctggagcatgtgaccaatgcagaaaccattgtcggttggctggctgatcgcattcgcgagattgagcgctttgtcggccagttgccatccaccgccatttttgtgaacaccgaggacgacgttgccccggtggccgacgcgctgaacatcaccctagccgagcacaacatccaggtcatcgcttgccgagagggccaagctgtggggcaggaaagcaacgtgcgcgtgttcgacatccagcacattaaaggccttgagttcgaggcggtattctttgtcagcattgaccagctcgccacgctgcacccggcgctgttcgacaaatacctgtacgtcggcaccacccgtgcggccacctacttgggcgtgacctgccagggtagcttgccatccgccatcgaaagtctgcgcccgcacttttgcctggactggcaacaaggcgactga

SEQ ID NO: 82158 - DNA, 2106 bp, Citrobacter koseri
atggaaaagctaaaaatgcattcacccaatctcacgcaggacaacatcgcccgcattcgcgatctgtttcctagctgcgtcaccgaagccaagggcgaggacggcagcgtgaagttggcagtggatttcgaccagttgcggcaagagttggccgagtcgattgtggaaggtccacaggaacgctaccacctgaactggccgggcaagcgtgaagccttgcttacggccaacgcgccgattgccaaaacgctgcgcccttgccgcgaggagggcgtggatttcgataccacgaagaacctattcatcgaaggcgataaccttgaagcgttaaagctgatgcaggaaaactacctcgggaaagtcaagctgatctacatcgatccgccctacaacacagggaaggacttcatttaccacgacaactttacggcatccaaagaagcatttgagatagttagtggcgagcgtaatgaagaaggtggtcgactcgtcagcaacccggaaacgcgtggtcggtttcatactgactggctgaatatgatctatccgcgcttgacgctggccaagaggctgttaagcgacgatgggctcattctgattagcattgatgacgcagagcaggcttcattgcgccgcgtctgcgatcaggtattcggtgagcaaaactttatttcccaacttgtgtgggaaaagggccggaaaaacgacgcaaagtatttttccgttgggcatgaatacatgctcatctacgccaaggacttggtgttccttcgagagcgtggtgaagtctggcgggaagaaaagcctggtgctcgggaaatttgggctgaattcctgcggctccagagcattcatggcgaagactatatcgcgatggaagcagcaataagcaaatggtattcggacctgcccaaaggccacccatcaaaaaaatgggcgcgttataagcgcgtggataagaatggcccatggcgcgaccgcgatatttcttggccaggcggtgatggcccgcgttatgacgttattcacccagaaaccaagcagccgtgtgcagttcctgagcgcggttggatatattcctctcccgaggagatgcaacgccagatcaaacttgggcttgttgagtttcgcaaagatcacgcagaaccaccatttcgtaaggcgcacattcgcccgattactgatgaggcggttgaagatcaagttgatggcgatgatgaaagcggcgatgaagaggccgatgctgaacttgcaacccaggtgcgcggctcgtacttctacaagcagtcccaggtggccgtgaaatacctgcgcaagctaatgggagcaaaagtattcagtaacccgaaagatcacgacgagcttgctcgtctgattgaatacatgacgccgcgcaaccgggaagccatcattatggatttctttgctggctctggaacgacagcagaagccgtgttgagggctaatgctgcctatggcaccaatcaccgcttcattgtcgtgcagctaccggaaagtcttgaagatgccttggcctcaacaacaggaactgcaaaaaagactgttcaagcggcaattaatctcctgaaaaaaagtagtcgcccattattgctttcggaggtaacaaaagagcgcattcgtagggctggtgaagccacattgaaggaagactcacacgaggaatggaagaaagatattggcttccgtgtcctcaaaatcgacacctccaacatggccgacgtctattacacacccgacgcgctggacgaggccaacctcgacctgttcgtggacaacatcaagcctgaccgcacgcctgaagatctactgttccaagttatgctggattggggtgtcgatctggccctgcccattaccaagcagtccattcaaggcaaagacgtgttctttgtcgatggcaatgtgcttacggcctgcttcgacgccagtggcagcattgacgaaaccttcgtgaaggagttggccaaactgcagccgctgcgcgtggtgttccgcgacgcgggttttaagaacagtgcggtcaagatcaacgttgagcagattttcacgctcatgtcgcccgtcaccgaagtgaaatgtatctga

SEQ ID NO: 82159 - DNA, 3072 bp, Citrobacter koseri
atgaagcttaaattcaaacatcagccctatcaggctgccgctgtgcaggcggtcgtcgatatttttcaggggcagccaccggcctctaatgcagccatgagctatcgccttgaccctggtaataccaaaaacggcatgggtgatctgtttgcggtagataccggttttaaaaatgctgagctagccctcagtgaggataccttgcgggagaacatccaactggcgcagcgtcagcaaaacctgccgttgtcgaaggatctgatcaagactaaggtcgcaaggctaaatcttgatattgagatggaaacgggtactggcaagacctattgctacataaagacgatcttcgagttgaacaaacagtacggctggagcaagttcgttatagtggtgccgagcattgctatccgcgagggcgtagccaaatcgctggaaatcactgccgaacactttctggagacctaccacaagaaggctcgcttctttatttacaactctaagcagttgcaccatctggagagcttctcctccgatgccggaatcaatgtcatggtgatcaacgtacaagcgtttaacgccaccggcaaagataaccgccgcatctatgaagcgcttgatgattttcagtcacgtcgcccgatcgatgtgatcagcgcaaaccggcccatcttgatcctcgatgagccgcagcggatggaggggggcaagacgctggattccttagctaatttcaacccgttgatggtgttgcgctattccgctacccacaaggccatacacaacaagatccaccgtctggatgcgctcgatgcctacaaccagaagctggtgaagaagattgaggtgcgcggtatctcggtgaagggactggcgggaaccaatgcctatctctatttacaagccatcgaaatctcaagcaaaaaaccgccagtcgtggttgtggagttcgaacagaaactcagcggaggaaacatcaagcgcgtcactcgcaaactgggcaagggtgacaatctgtttgtgctatcgaacgagctggatcaataccgcgatgggtttgtggtatcggacatcaatgccaatacggacaccctgagctttaccaatggcgtagaactgacggtgggtgatgcgactggtgatatttccgagatagcgctgcgccgtattcagatccgtgagacgatcaaggcgcactttgataaggagatggagctctttgataaaggggtgaaggttctctcgctgttcttcatcgacgaagtagccaggtaccgggactactccgctgccgatgaaaagggagagtacgcaaaaatatttgaagaggagtacgctaaacatcttcaagaagcgtttgataatgggtttatgcagggggataccccttatgctaaatatctacgtcacattgcggccgaaaagacgcatagcggctacttctccatcgacaagaagagcaagcgcctcaccgatcccaagaccgctgcgcgcggtgaaaatgcaggcttgtcggatgacgtagatgcttacgatctgatcctcaaagacaaggagcggttgttatcactagctgagccggtgcgttttatcttctcacactcggccttgcgtgaaggctgggataacccgaacgtgtttgtgatctgcatgctcaagcatagtgataacaccatatcacgccgccaggaggtcgggcgtggcctgcgtttgtccgtcaatcaaaatggtgaccgcatggatcacccgtccattgttcatgacattaacgtactgacagtcgtggccagcgaaagttacaaggacttcgtgagcgccttgcagaaggacattagcgactccttgtcagctcgtccgcgagtggcggacaaggcctacttcacgggcaagatgctgaacacgaaggaaggcccgattacggtatcggacgaccaagccacggacatcgagttttatctgatccagaacggctacgtcgataagaagcgcaatatcacggagaaataccaccaagctaagaaagacggcacgttagaggcattaccggacgagctgcagccctatgcagagcaggtattccagctgattaatagcgtattcagcgaaagccagctcatgcaggtagaagatggacgtaagcccaaaagactgcagaccaacgccaactttgaaaagcaggaattcaaggcgctgtgggggcgaatcaatcgcaaggctacttacaacgtgttgtttgatgatgttgagctagtgaacaatgcgattaaggcgctcaatgacaagaatgcagggttgcgtgtgacaccgttgcaatacaccattcaccgtggcgagcaggctgatacggcaacttacgatgacctcaaaaagggtaatgccttcgagctgaaagttaccgaaacagaatcgcacaacgcttccatccactccgctgtgcagtacgatttgattggcaagttgtcagagggaactttgcttacaagacgaaccgttgccgaaattcttaaaggcctcaatgctgacgtcttcgcacaattcaagagcaacccggaaagctttattgccgaagccattcgcttggtcaacgaacaaaaggccaatgtcatcatcgagcatctggcctatgacacgcttgaagataagtttgatttggacatctttaccacgggtcagagcaaacaggatctcagtaaggccgggaataaattgcaaaatcacatctatgactacgtgcttaccgattctgcgattgagcgtaagttcgtcgaagagctggataccagcaaggatgtggtggtatatgccaagttgccacgtggttttctgatcccaacccctgtcggcgattacaaccccgattgggccatttccttcaaagaaggctcggtcaagcatgtgtatttcgttgctgagaccaagggctcgatgtcgtcactggatttacggcctattgaagctactaagattaaatgtgcccgtaagttcttcgatgagatcaacaagaagtttgctccagaaaacgtgaagtatgacgtcgtggatagcttcggtaagctgatggaagtggtgaagtaa

SEQ ID NO: 82160 - DNA, 1341 bp, Citrobacter koseri
atgggaactgtatcctatcaggtaaaaaaaatgcggatgctactagagcagcgcctcgctattccgtcataccagcgcccctacaagtggcaacaaaaacacgtcaatcaactaattgatgatgtgttaacccaccgaaataatcagagctaccgccttgggactgtggtgttgcacagggataaattaaagccagcttatgcaggtgagctcgatatcgttgatggtcagcagcgccttctgaccttaaccttgctttgctcagtgctcgatcagagtggtgagttttcaacgcccctgttggaacaatcttttgcttcaagggttagcatcaataaccttgagcacaatgccaaagtcattgagaaccgccttgtgggactaaatgataacgaacgcaaaacactacttcacttcgtgtgtgacaagtgtgaactgatcgaagtgacgctcgatgatttgagcgaagcctttcagtttttcgactcgcaaaatgccagggggaaggccctcgcgccccatgacttgctaaaggcataccatttgcgcgaaatgatggatgctacagagcaagcggaacgactacaccacgttagtttatgggagcaaggagtcagtccggatgatgaatccgctaaccttcacctcattatgggcgagtatttgttccgcctgcgccgatggctggatggcgattatggcgtgcagttcagccgccacaatcttgaggtgttcaaaggcgtcaacctttccacctctgattaccattatctgcagtctctgctcgccctggattttgcggttgagcactacaataacgaccctaacaggaagtgggacaagcagaataaaccttatccgtttcaggttaatcagttaataattaacggaaagcgcttttttgagtatatccagcactacaaatccctgcatcacaccctatttgaaggtgacaacgcgctgcttggcaatttcttaaaaaaacatacccgttacgctggcagttcacgcaaaggggatatgtatattaaaaatctctttatgtgtgcagtgatggcctattacgataagtttggcgataaagaattaattcaagccgcaacagtctgtttttgttggagttactacttgcgcttgcaatatcaaaaaatcggcatggacagtgttgatggttatgcgcgtgagccccgaggactattgagagtgctcgataaagcgatccacccacaacaagtcctacgctttcagccaaagcgttgtataaacattcgttttcaaaatgccaaacccgtagaagattcaatcgctcagatgcagggagatgtacatgccactgagtaa

SEQ ID NO: 82161 - DNA, 1926 bp, Citrobacter koseri
atgccactgagtaacgatttagccttgctgaccatcgaacagttattcagcgctgatagccattatgttatccctatttatcagcgtaactacgcctggggcgcgcaggagattgaacagcttattcgggacattgccgatgctgctgaagcccttaaaaatgcagagcaacaggaagacccgaaatactatctgggcagcttggtggtatatgtccgagatggcgctgatagcgcacaccaaggcgtaatagtctatgaaacgattgatggacagcaaaggtacacaacgctgtcgattttgctcgcatacttaaaaaaagttgcttgctgcagcgaacaagatttatccccgcttcacctaaatctcgactttgacagccgtcctaaatcagcccgaacgctacataacctgtttcaacaggctcagagcaatgatcctgaagaacccacaatccgagcggcgtttactattattgaacgctactttgagaaagagaacatagacaccaacaacttttgccgatatctactccagcgcgtcactattttgcgggttccggtgccaacagagactgatctcaaccactactttgagatcatgaataaccgaggtgaacagctagaaaaacacgaagtgttgaaagcgaatttgatgtcagtttacagcggtgaaactgctgcaagaaacggcttttctgccatatgggatgcctgcgctgacatgaatcgatatgtgcaattgggctttagctcagaggctcgcaaagcattatttggtgagcagtggctaggattcccggcgagttttgaggtgataaaatgcgcgatagaaactaatcgtgatgcagacgaaaagctgactatacgggatattatcgaaagacgacgctttcatcacactgatgacaacgatgaaaaagcaaaagagcagcgttttgattcgattatcgatttctccaacttcctactgcatgtgctaaaagtgacagtggataatgccgtgtctttggacgataaaaagctacttcaggcatttgaaatcataaaaaatgaccgaaaaaaaatcactcagtttgcttttaacttgctgaagtttagagtcttgtttgaccgctatatcattaagcgcgatcaggctgagaagtggagcctgctgacacttgagtactatgccagagacaggaattcgagctttagctacaacaactctttcgatcaagatgaactgtctggtgtaaataaacaactagcgatgatcttgtcgatgttccatgtctcccaccctgcctatgtttataaacgatggctcaatcgctcgctggccattttgaataccctgacttcggaccaacttaatgttgacggagctgcttacctcagggaacttgaacaactcagccacgagttcctgtcagagatttgtggtgaaacggaacaattcaatgccgaagctctgcatcgtggtaccggtgtgcagaactttgtgttcaatttactcgattatcgtttgtggcgtgagcttaatgctggccaatcatttgatggtaaagggcttaataatcccgagattaagaagcattttgacggcttccagttttcaccgagccgaacatcggttgagcactactttcctcaaaccgatccctctggcgcaaacaaaatgggggatgatgtccatcgtttcggtaacctctgcctgatctcaccaagcagcaactcgagacttagtaattattcaccagcagacaagaaaaaattctacgtcgaaacagaacgagcagagagcctcaaacaagccatcatgatgagctataaggagtggggtccggatgggcaaggcctcaacaacatagaaagccatgaacacgcgatgttgacattgctcaaagagcatcgagataagaccttaccaaccaggaaataa

SEQ ID NO: 82162 - DNA, 1617 bp, Citrobacter koseri
atggagtcgaacgattcaggcggggtagccgccaagcacggtttcttatttcaggactgcgtagccgcttaccatgtcacccgaatgcttcgtgacaagactatccgcagtgtacgctgcgaggtcacagacgatatcgacattgtatctgatagatacatcgacttcgttcaggtaaaaagcacgggcaaagcacgttggaacatttcggacatcgttcagaattcaaaaggtgctgataaaaagacgatcccctgcagttcaattttgcacaaatcaatgcagtgtgagtctgacctgtcccttggacgtaggtactccatcgtcacagaggaaaaggtcaacaaaaccctggagtacttgacgatcagcccaaacgctcggctagataagccaggtcgacaggaactcatcgatgaccttaacaaacgcacagacaattttttaacagactcaggtataagcgtttcagattggatcgatgcggctacatgggaagtgttttcatccctgcgagaacttgaacttctagggatcaagaacatacggctggcctcccatgatctacatggggtcattctaagttccgagaccgtcgctgaagacatttggtgccgcatccttgatactgtgacgcgcaagggcgagcattctcgacgcattcacagtgaggatgacaagtcctacttacgaccagacttacttgagtggttcaaacaacgtgtcgaagatgaccagtctcggtcaggacgcaaaatctacgtaaaacgggacttaccccacatcctcacgccatttagagcgcctatggcttcggtctgcgctaagcgtaaaggccaagttctacatcaacaatactcgcttaagaaataccgctacaagcacatcgcggataacgtctgccaatggttggatgaggtatttctccgaccaaaagaaatgtctgatattcataaactgacactcattgaaaagcgagagcgactaaagaattccgtcttcaaatcgcttcatgacgtcagcgaattcttggggcgagtgttgttgcatgcaacgatccggcagcaccacgaaagccagcctatcccttgcatgctatacgtggaaaaagctggggccgaaaaaattcttgaaaacgtgcatatcgttcgccgcgatccagaaggtgatcagctttggattggcttcagcgagttggtgacagatattgacattgccgtcagattgccgcagatacgggatcggttgtacgaggacatttcggattgcatcgatacagcacgcagaaagatcctcgacattaaagacgacaactacctgcttcgccacgacattgacgaaattcttgatggcagccaacctttcgatgctcacctcgatcgtttcacgtttgttctgttcgtaggctacgactcgaacctactaaccgagcctgaaacgccggggtttgaggatgacctggagaaggaaacgacagtgctattcgaaagattcgcggctgacatcatcgaggattcaccgttcgcgaatctttgcatccacgtgttcatttatccagctccgagtcttgagcggttaacccaattggttgatgagaaggtgagagaggtcgtatga

SEQ ID NO: 82163 - DNA, 2190 bp, Citrobacter koseri
atgacagagctctatgaacaggcgaaaaatagtctgcagggtgaggacttctcatctttcaattacctgtttacggttaacaagctgttgtccaatcctgtttcgtatgacttgggacgggacttgatcgtacgtgctctcgattcgcgcgagcggttttccgagcacaccacaattttgaaaaatatggtgagaaaatcaggtttgttcccgtacctcaaaaaagagttcactggcctgacaccagacgacctgagggtacttgagctataccgaacgccattctcggatggttacgttttccactcaatgcagttccacatattcgatctgctcaagtccggccaaaacgtggtactgagcgctcctacaagcatgggcaaaagcgcaattgtcgattcgttgctcggtatgggaacgttgaagcggctcgttctggttgttccgaccgtggctcttgccgacgaaacccgtcgccgactgcaagaacgattcggtgaccgatatcagattatccaccacagttcccaagtgtgccattccgatcaggctgtctacgtattaacgcaggagcgagtgaacgagcgtaacgacatcatcgacattgacctcttcgtcattgacgagttttacaagttggcgttccggcaactgaaaagcggggccactgatcatcaagacgagcgagtcattgagctcaacattgcgttgagcaaactgcttaaagtctccaagcagttttacctgactggaccgttcgtaaacagtattcgcggtctcgaaagacttggatatccgcatactttcgtttccaccgacttcaatacggtcgcactagatgttcagacgttcggcattaaagcgaatgacgacgaagccaagctcaaagcgctgggggagatcgcgcacgcatgcgtcgacgctacgatcatttattgcaagtcaccaactgttgccggccaagtggcgcgcgagttgatcaggcttgggcatggcactctaactaaaagtcctcatatcgactggatcagcgaagagttcgatgccgactgggattacgcggtcgcactaagaaacggtatcggcttgcattttggcgcgctacctagggcactgcagcaatacaccgctgaccaattcaatgctggaaaactacgtttcttactctgcacctccacaatcattgaaggtgtcaacactatcgctaagaacgtcgtgatctacgacaaccgcgatggaacacgcagcattgacaaattcacccatgggaacattaaggggcgcgccgggcgcatgggcgttcactttgtcggcaaaattttttgcctagaggaaatcccggaagacaacctcaatcaagaagtagatattcctctcggaattcaggacaatgataccccaatcaacctcttggccagcgttcaaccagaccacttgtctgaattttcacaggatcgttttgatgagatctttataagcgatcgtgtttctatcgaccttgtgaaaaagcactcatacttccgtctcgaacagctcgaagttctgcaaagcatgttcgagatgatggatgacaccgaattttcctcgctggtgtttcactggacccccgcgacaaacttcctcaagacctttgcaaatatcattgccaaactggttccccatacgttcagtcgtaatggagtccctgttaagcctacggatgtcatggtcgccaaactagctggctatttaaacgctgaaagctattcggaatatctgaaaaatcagatcgtttacgcaagacagtgggtgtctgaaggggagaagcgcactctttccattgccctcaacaacgatttgaagctcatcaccaataccttcggttataccctacctaaggtgctcagcttgatggaggatgtagttaaacaccacgctttaaagcgtggtatacgcagcaaagtcgattacacgcacgtcaaattggcgttcgaaagcttccacctaccaccaggtgtcaatgccttggaagagattggcattcccattcagacgttacaccgactggtcgacttgctggaattttctgatcaggctgatgtggatgagttgtgccagtatcttcgggatactcaggacatttggagtcgatcgattggatatgtagatcagacgttcatcaggcgcgcgcttggcattgaacagcattga

SEQ ID NO: 82164 - DNA, 1542 bp, Citrobacter koseri
gtgagcacattgttaaatttacagattttacgcaaagcggttttaaggctgatatttcgcctgctggcggacaaacctctgcctgcaaaagccccaagcgaaaaaacacatattcttctgcttcgctgggatgcaaaattaggcgatgccatcgtatcttctttcttttttcgcgaatcacgtaagctcaatgcccgattgactgtacttacggttaacgagttagctgaaatgcataccaacaccttcggtgtggatgaagtcatcgttacgaatccgcatccagggcttggtgaactacgcagattggtgaaccaactaagtaatgtcgatgtcgttgttcatctggttggacgactgcaacctgccgaaatcgtttttatgcggttactccgcccggcgagtctctattcccttgatgattcactgcgctgtgtgaatcgtaaaatgggttttgctgcaaatacgctcaatatcgtggagcagtacaaatatattctgcaggatctgggcgcgaaagtgatcgacacccagtacattgtgccgttgcctgccgagctgccgcctgcggcactttccccccaaatactttttaatccttatgccagccgaagagacaaggggctatccctttcccgtgcaaccgcaattctacaagctatcaccgacgagtttcccggccattccgtaggaattctttgcagcccttcaacgctgcacagcgcacagcatctggaaaacgcagttgcacgcgataatgtggcagtcttgcacgacgggctaacgcccgaaaaggttgcaggctatattctccgcgcgcgggcagttgttagtgtggatactgccattgtgcatatggctgttggcctgaaagcgaagctggtggcgatctacccgttgattgcaggtcaacacaacccatggttgccgcctcgctcaccttttacacaagtgatctacagcgagcaacagacagacacactccgtcgtacgggcaaaaaaaatatggatgctttttcgctaacgtcattaatgaacgcattgcagactctcttaacactgccagcagaagcgaaaaacagcatgtcgcttaacgccagaatcatccccgggctaggggtagcgacgggcacgctggcgcgacaactgcccttaatctgtgaagaatttcctgaagttgcaggctgttatgccgggacgatcaaccttgaattcagcgttcctgtcgcagtcgtgcggcccgatcaccgcaccgcaccgctggcctggactcccagtggaagcaccaccgagatattcgatctactgcgcattgaacttgaattcagccatttaactgaacgcatccccgcatggctgtatattgcccacgactcgccacaccgccggacgccgaccattcacgaagcaatcgcgccacgcattaacctcaatggcgccacgcactgtcgactccacttacccgctgagtctatcgtactgggcgaaagcgatactcaggcaacggaagctatcaatttgtcactttcatcaacccagtaa

SEQ ID NO: 82165 - DNA, 792 bp, Citrobacter koseri
atgacgtccgatactacccattacgtcagttactgggaaaacgcaccgggtcagaccatgccggcttatgttgccctggcactggtttctatgcgcagagctctaggcgatcgttttcttctgcttacgccgcgaacggtaagcgaacacatcaatgctgacatcatgaataaagcttgggcttttgaaccgctgagctttacgctggcgaacggcattgaagctattgtggcgaagagcgatttcattcgcatggcgtttgtacatcgctggggcggggcatggttggatgcggatacgttgctgtttagagatccgagtgttgagttatttccgacagggctgagcgataaattgcactggcatagcgagtgtattttcgcgtccctgccgggaaaccccatacttgcgcaagccttagctatagggcttgagagcgagaatcacgcttggggtaatcctgggagaatcaaaaatatcattgcccaggctgccgatgctgccatcccgattggcggggaggtcatcgatcccggataccgtcctctttacaactttgctggttgcgaggtgatgcgtcgcaccgatattgccgtcggggcatttttgattaacgacgtggccattctcaaactttacaacacctatttccggcgtacagaagcccggagagaaaccgtggctgaattcctggcgggtggctcgctgctggcaaaactgtttttgcatattgaggcaaatgcggattactgggttgatgaaagtgacaaattgatagcttccgttgcctga

SEQ ID NO: 82166 - DNA, 1131 bp, Citrobacter koseri
atgaatggactaaaaaatccgcattcacttgcgtggaacacgttgtacaacgaaccgctcgcaacccagttggcaatgtttcgccaggccagtgcacagatcaatgcgcaggatgttaaatccggttttcgcgcgttcgcgaccgatttgctggcgcgcggtttgatcgacatgtccgattacgtcgctatttttggtggtaaggcgctgcattatctgacgccgaatgcgactggatcattttgcgatatgcgcaccggtgctgacgctacaacattggcgggcatttatagccgtgcgaaatatggcggagtgagcgagatacactatctggcacggtgcgttatcgactatcttgccgcagaactggatgacgcctcctcttcatggtcagggttgttttgcaaggccaaagaggatggagagagtgttgtgatgatgaccacgggctggcgtaatgtgccttccacggccaatgtgctctacgatatcgtggttgaggaaattaatctcacgttggcgcataaaggattgcccaccattatcaacgttaaattgcccaggattgcgccgccgtgtgaaaattacgctagcctcagccaggccgagcgcgatcgggtcaatcttgtgcaggatcatgtgattccagcggagaatttttaccgctggagtggcgtgcatgtcattttcggagatgacgtgctggtgactggggcaacggcggacaaagtgttgtatgaatcgctgtgtaacggcgcccgatcatttcgtgccatttacccagtggcgctagatccccgggtggcattaactgatgcgtcggtggaggatcggctgaacagcgtgagcataaagcagcatttggacgaaaacgtcgcgcaactgctctctgcaccgggctatcagcccattctgcgtgcgttgcgtctgttatttggcgaaaacaaccgggatagtttaccggctttcctgccaaatgtgccggtgctgacctggcttaatctgtataaatcagcgttaaataatgagtttttggctcagcctgcatgcgcgccatcactggtgatgctcagaacatatctgattcaaaatgggctgttgtgtgcgaaaggtaaggtgctagtgaaatga

SEQ ID NO: 82167 - DNA, 846 bp, Citrobacter koseri
atgattgattcgcactgccactcgttctactcgaaacatgctataggcaccatcgacgaacttgtttgtgcgtcgattgctgcgggtgtgacagtactcaccatcaccgatcatgctccgttcccggtggatgcgcagaaccgtttactggaagcggaactggagcgctatttcgccgatattgataaggcgcagcagacttataaaggcgagatcacgctgctacgcggtctggaactcgattatatgccgggaactgagcgttataaccggcaattacttgcacactatccgatggattttgtcatcggttcaattcactacgtcactgttgccgataaggcgatggtgaaggtctgggaactgccccggttagctgcagcctcctttctggacaaatactttgctcagcttgaggcattgctggaaagccagttgtttgatgcggttgggcacgctgatacgctgctgcgcgcaatcccagaggatgtgtttttgcgtcgctttgaaccgctgattacaccgctcgtacgcagcggtatcgcatatgagctgaatgcttcgggtctgcgtaaatccagccttgatccgacgacgggtaaagaggtgactggaagatggtcctatccctcccgcgctttgctagaaaaattactggagaacaatgttccattaaccatcgggtccgatgcccatgatccgcgcgatgccggagcggggatcgctgaactgttggcggcactcaggccattagggcttcaatccctctgctattatcagcagcgtcaacgcattgatgttttgcttaatgaccttcaatttcacgctgcgctagcatctcgctaa

SEQ ID NO: 82168 - DNA, 1029 bp, Citrobacter koseri
atggaattacatggtcatttgctttatgtggatatcacccagatctgtggcatcggctgtgcgttctgcatgtatgcggataagcacgcaacgggtaagagtatggtgctgtcaatacaggcacgtgacaacctgtcggcgctcattaatgatccggccgtaaaacgtatttccgtgagtggcgaaggcgaaccgctcaataacattaataccttttacgaattactggcgttgtcccgcgggggcaacagctttgagtttattaccagcggtttttttcgccatgagaagctggagaagatctttgatgagatcaatcgccttgtctctgccaatggtgatacctgtaatattcgcctcagttccgacagtcatcatattgaaaaagtaaaatggcgagcacatggatttagcctggattatgttcagcgcaaaaaaccgtcatcgatcagtttttcatttcgctcaatcgataccgatcgtgccttcacgcgcgaatatctggtgaatgaactggcctcatggggaattaacgccagcataaaacctgtcagtgtactggaagacaaattattgataggttcggacacgtttaacatcgactacaaaaacctagtacatccggcaagagatacgccggaaggttatctggatttgcagggatatattgccgcgatcgagtccaaagtggataaaccttttacctttggcagcctgaaccatgcgcccctgcccaatggcatggacgtgacaattaaacccaatggcgatgtgtttctgtacggtattgagaccgagcgtgttgctaatatccattctgatgtgatcgactggcatcatctggcgagccatgtgcgggaaaatcccttgtcgcgcgcgttatatacccagccgttaaccgaactgctggcgcgtctggaaaacactccgcagcttcgtgcgatcatcgcgacagccaataatccttactggctggttaaagagatggcgaagcattctgggttgcttgaacaatggaaggccgcatga

SEQ ID NO: 82169 - DNA, 3939 bp, Citrobacter koseri
atgtccaatctttacatttgggttgacgataaaaaccgcaataacctcatacgaacaatcgacaacctggcgcggcgacatccagattttaaagcgctgctgcgtgacggagataaaattgaaaataccctcaatcttttgtttcctcacggcatgccgatggagtacctcatctccaacctcagcattgatgagcggccggaagagaatttagatttagcctttcgtcctgtgctcggtcctgggcaaccctggccgttcccgccaggttgctcactggttgcaaaaggtttctggaaaaccggtgcgccttttttcaaaattcaggatattttcgaggttgcagatgcgcctgcacaggtctatgaaaaaagtcttcccgtggtggtttatcaggataaccccgccctacagcctcgaatcaaaagaaccgataatgcgctgagccgggagttagcccaagagctaccgccaatctccgccaacacacgaagtaaactggttgactggcgcgagtttctggaatggaaacgcaagctggtttccgaaaaaacccgtggattgcattttacaaaacgtggatggcaggaagacaaattggttttccaggtcgttggtgaaagcgaacaatatatccgtgacgtgctgcgtgccttgtcgcgccaggatgtagtggcgtttgatcctgcagtttctgaagatgagtggctgtttcgaatcagtgataaagacagcgccaaacgtacaccaaaagggattgaactcgggcaaccggaggtcaggccaacgcttgtgccaaacaggagcatcccccagggttgtccgtggcccgtaccgtgccttgtcgatgtgtttgtcagcctgtcagaggatgaccagaatcaactttcgacggcagaggatcatgaaagcgcccgcgacagtttactggccaggatccctgaaaaaggctttctttcggtttcggcggcgggcgatttagccttgatccgccgtcacgagcaggcacttaaacgcctgcaagatcagggtggttacgccccttatctctcatcctatctctttgatgcgcgccaagccaaaagccccacctcgttcgaacctatcatcgattggtttcgcgaggatctgaatattttccagcaagaggctgtcaacaaaatcctcacggcgccggatctctgcctgattcagggaccgcctggtacggggaaaacaacggtgattgcagaagccataatgcaactggcgcgtaaaggggagcgggttctgctggctagccaggcgcatacggcggtcgataacgcgctggaacgtctgggcaaacacccggatttgcgtgttattcgtctcgcacgtgatttgagcaaaatttccggcgagggcaaagcgttcatacaggaaacctccttatcccgctactacacctcgctggctgaggatgtagagaaacgctttctgacgccctggcgtgagacaaaagatcagctcaaccaattgcaatcgtggctcaatcaggcggagtttttacgccgtgacgcagaacacgccgggcaggcgcttaccgcgcatgaacatgcgctaaagaaggcagaacaaaacagaactctggcgtggcggaaattgcaggagcaggggcaaaaacacgcagatgcgaaacagcggcaaacacggttactggcgctgaaggcattcctcgaacagaatgaggaaacgatccctgagcgttgcccgctgccggaacccgccgcctccgcgctagcatctgcgttgttcgatcttgccagcgcgcaggtgaaacttcccgtctccgttgccgactggaccgccgtaccgtcgcaacaaccccagatgctgtccgggctgttgcgattctggcacaggttgtgggcgcaccgcaccgatctggaaaatgatgtggcccgcttgcgggccacagggccgtctgcactacaaagcccggatcgggccattcacctcgctgaattggaggccgaagagcgagtacttgccgataaacttgacgacgatgaaagtctgtttccggtatggaaagccaaacgacaggagattaaacagcttcgcgacagttctgctggtggcttaaatccggagctgtacggcaaaatgttccttgacccggaatcctggtgtcagtcgattgaaaacgcggaactgacgggtaagaaactggcggcgcgcgttgccgccttggtggcgagcagcaccgtgattgaacgggaattagcacgacttctggctcagactgacgaacttattgcgctttctcacgtgccggatatcgatgaatctgagtggcgtcaatgcgagcaagaaaccgcccatcagcaacagcgggagccacagattcgccaggctctggaagactgcattagccagcaggcggagtggttggcccggcgtgtctcgctggcaacgttgcctgattcaccctctgcggagataagcgtgcgctttgcgcaagagatggcgtcctgcgaagaaacgatcggtacgctgacgtcgcgccttgcggaacagcaggcggttcaggaggtctgggagccgttgttacaggactggagaaacgatctaagccgtcaggtttcgtaccaaaacgactggcatcactttaaagaaacgtttgtggctgaatgcaacctggttgcgattacctgtaacgagcgtgaacaaacattagaagaatcgggccaggtcagttttgatgtcgccattatcgatgaagtcagcaaagcaacgccgctggagatgttactgccgttgatgcgcgcgcgccgttcaatcctggtgggcgatcaccggcaattaccgccgctgtttcaggaaggcaccgatgcgcaaacctttagcgatgccgtcgatgaagcggacgaagacgggcagaatacccgaacatcgctgacccggcataaccttcagcggtttgaaaaaatggtgacggcatcattattcaaatcccacttcgaaacggctgatgatgcgatcaaagcgcgtctggaaatacagtttcgaatgcacccacaaatcatggcgatggtaaaccatttctatgaacgccgcctgagctgtgggctggagttccccaattacgacagaaaccacggtctggtgctggtcgataccgacggcaacaccatcgtggagcctgcacgaaatagtgccggagagcgggtcgtcaaagatatccagcgctcgccttcaaccatcccacgggaagaaaaagcggtaactgagggcgaccatgtgctgtgggtggatacatcccgtgacctgcaaggccaacttcataaagaagatgtggacgccagcggtaaacccgcgcgcagcaactggctggaagcacagcttattgctcacacgctgttacagattgataaacagtgcgccagccttggctattcagcgcaaaaacgctaccaagtgggtgtcgtctctttctatgcccgtcaatgtcggttgattcgcgaggccatccgcgaggttaaacctaacggacgttttgactgcctggatgtcgagatcaataccgttatccgctatcagggcaaggagaaacctaccattctcgtcagcctcgtgcgtaatgatggcgtggatacccaaagccatggcgggaaggtaagacgccgctccagccgcgccaacgtcgcgcgttacgaatttatcaacgtcgccttctcacgcgcgcaagagctgctgattgtgtttggcgcacgaaatatgtacgagtcctatgacgtcacgcttccacatatggacagcgagggtgtaacaacccgcacggtctataaagacattttggatcaactggacagaaatgctcagttgattccggcgagtcgcctgatgcgaaatacaccgcagagtaagcgtaactctccatcgtcatccggcatgcgtcacagagggaataagtga

SEQ ID NO: 82170 - DNA, 2424 bp, Citrobacter koseri
atgaagttaggatcttttgctgtcagtgtaccgcagtacaaaattgaaacgcaggtgatctaccagaccatacgaacccccacggtctttgagcgtatgctgatgagactgtgtaaaagctaccggaaaacgccggaaattgcgcaattgacgctggcgcagattttcgagcagcaactgggcgtcacatcggccagtgcgctggtcggtccttgcgtcgaggatctgatttaccttggggtgctagcctgtccggcatcagagaactatatgtcgcttcgtctggccgacatatcgttaacccctgaggggctcaactttcttgctcgcgaacggttacctgggcgtcagcaacaaaccaaggtccagcacctgtttttgcctttatcaaataccgttcagccattgcgcgccagcaatctgcctggcacgcccaccagcacagtatttatcagcaaggacgtgcttgaaccgcaggactgttccgcgtggatacgacaagagttagaaaaagagcgccatccgtggaaaacagcgaatacagagattcactccgttcagtccagcgtagctggcgtagtgtgggagcagcaccaaatcaccattgagtgtgatgggtccggcgtcctttccgttaaagcgcccggctctgccaactttgaacaatggctgcaaatggccgctgcagatatcgtgtggcagcacattttgcagccgatcctgacgagcgaacctgcggcaaactggcccagactcagcgatgagagtattcgccatgcaacagagatagcgccgttaagtcgcgcagcagacagcacaacggatccttccgccaccctgctgcacgtcatcacaaatgatgcagaaaaagataactacttcggtgaaaatctgatcctgctgcacggtaagaagagttccatactgggcatgacaattctgctcaggaacgccgaacctgaaatccgccagcttgacagcaaaaagggaagtctgtggctcgaaatgagagtgcctgaaggtttacctgcaggactggctactctgcgtatccagaaaaaggatggcgcaccgcaggcgcatttttccggatggggcaacgtcttttggcgagggcaagcgcagcgtgccgcgctcagcctcactgcggacagcaccatcagtgccgaaatctggcaacgactacaagcggaattacaatccggtctgaatgccacgcacagtgccacagcgcacgccctcacttcgctttggcttactccgcaggagacgattacgcactggcaatccagaaatgaggtgcatcctgttgcggaatggcttgccgacgcgagcgaattcgcggcggcgctggagaggtttaccccccactcgcgagcacagtggcaaccatactggcttaacacgcttaaagctctgatgatggtcggagtgacacgtttgcaaaccccgatccaacctgatgaagcgatccattacctcaccgttctgaatcagttggtgcctgaccatagcagtgatttttccgcgctcttgctggatcactgcagtccgcttactgatgtggcctcgctcgaacaactgcgtaaggccgttggcccgacatcggttctgccgaattcccttttcagcagcacgctgttgcaaatatggctggcagaggtattaacggatgcgccgctcactttgcatgagcctcatgcctttgcccagtcgctaacaacactcagaaatgcgcagcaagacgtgttacgcaacgtgggaatgaaatccctgacggatgcagctacgggcaatttaagccttaaaagcgtgaaaacatcagcactgacaagcgtgacacagtggcagaatgccgttgcagcactcggtacattacgtgcggccgtaacgtccgcctccttttcgcttatcgatgaattcgatacgcaagttcaggcctggcgagaactggcaacgcaaaagctcgcccatcccgaagcgcccggcaaacggtttgtcatctttgataccagcgcattaatagagtaccccaatctgccctcgcgtttgcagcagaatgacacgccagtcattgccagacgcgttcatcaggagctggatcatctcaaaacatcagacaaccccaacaaagcccgacgagcacgggaggcgattcggacgctggaacagatacacaaaatcgttcgttacgaatccgaagttatggagcttctacctgctgacctcgaaccgacatcagataatcgcatcctgtcggtggcgctatacctgcgactcagcgatgtcatcctggtgaccgctgataaaaatttccgcaacatagcatgcgctgaaaacattacggcgattctgcccagcgaatataaagagatgtcgcacggcaagaccagaccgcgcaatacgggagaaatagtgaaatga

SEQ ID NO: 82171 - DNA, 1146 bp, Citrobacter koseri
atgagcagacatgagcaggcacgctaccagattgagcgccagcggcgtcaggagctttttaaccagcgggtcagcgagacaacgcgggtgtatctcgaccgctatcgcaacatcttgaatgatgtacaaaaccaagggatcagcaagtacgtgcaggctgaattttccgcactgcaacgcgaactggagactctgacatggcttgttgattccgatccggccaccgcgcgcgatcggagtattgccctaggccagcaggtacatgcgttacccagacacgccagagcaatgcgccaggctgttgttgaagcagagcgtgtggcggagcacgttgctcaggaagaggcgcgggaagccgttcggcaaagggttgagcaagaaaccaaagcccgcgaagaagtggaaaccgtctggcagaacgaactgacaaactgggacgacccgctggccaggcaattagccttcaaagcgctggcggagcttcgtcgtcatctcctcgacgccaatcaccacaccacagttgaacaactgcgggctgaattaggcaacattaagcacgaatacgaacagcgttctcaggaaagaagagcgcaggagtatcaaacggcggtggccagtacaaccgaggattcgctgcaattatgccgtgagcagattgccgcagcgagccgtcaggctcccgaacacgcagcagcattggccgcaactcttgatacggcaagctcgctgtcgccagaggaactctcccggagaatggttgaagtcaccagcgaactcgatacagcggtggtggatgaaagttgccgccgtgaagtcgtgcaggcggtttatcgttcgctcgaggacgctgggtttgtaacggaaaaaccgcgtctgatgaacaaagatgacagcaacgaagtggttatccgcgcgatgagacctgcgggcgcacaagcggaatttaaaatagagctcagcggaaaactgaattacaagtttgaccattaccagggttctgcctgcaaaaaagatatcgatacggtccttcctcgactgcaatccatttatggcattcagttgtccacagagcgggtcgtttgggaaaacccggacgacaaggacagcgacgccagaccacaacccggcatgacaagggagaaataa

SEQ ID NO: 82172 - DNA, 1857 bp, Citrobacter koseri
atgagctccggacaacaatcctggcaagaaaatttccgccgcgaatgcgggatccggcgagggatcatcctgcacggcaacattgtcgatgtggtctacgacgaatccgctactggccagtggagaagcataccggaaaccatcgatgtcctgctcaaagagcgcggttaccggcatgttatccgctgggatcgtgtctctggcgtatctggtgtcaatgcccgggaatggaccgatctgatgagcgccgcgacgcccgcttcatcaccagcagaaggcgacgaatatgatatgggcacgccgttgccgacagcacgggccacacaaaccagccatgcattagaggtgaatccacaagactttctgacagtcgtcgcccggctgatgaagtcttctggccccgatcgtattgccttcgtgctggactggtctcacctgttgtttgggcaagccaacgcgctgagtgaagcggaacggggcttgctactgatgatgggtaaagccgcgcgtgacgcgcagctagcgctcaacgctgcggatatcgataaaccgcaaacgttgatggtttttttgtgtcagggcttatcggtattgccgccgtcgttatacctgcataacccgctgttcaaagaaatcaatgtgccgcttccgtcccgcaccacgcgggaaaacgccgtgctgagtcttaataacgtcctcctccttaacaccccaatactgaataagagccgggtgcttgcggatcttgtggattcgctggaagggcttacgctgcgtgatattcacaatattgcgaaactctcccgacaacttccgcaaaaaatgagcgccgaatcgctggtcagcatgtaccgctatggtgagaaaaaaagcccgtgggaagagctgaaccgcgacaaactgagcaaagcgatcgaaacgttgaaggtgcgcgtgaaaggacaagatcaggcgctggcagtcgttaaccaaatcctgatccgcgcgtataccggcttatccggtttacagcattccagcaaacaaagaacccctaaaggcgttttattctttgtcggcccaaccggtgtggggaaaacggagctggcaaaagccctcgcccagtttttgtttggcgacgatgaggcttgccagcgcttcgatatgtcggagttcaaccatgaacacgccgaccagcgactggttggcgcacctcctggctacgtgggttacgaagagggtggccaattaaccaacgcggtaaaaaaacggccgttctctttgttgctgtttgatgaaattgaaaaagcacatccccgaatactcgacaaattcctgcaaattctggaagacggaaggctgactgacggtaagggcgatacggttcaattttctgataccgttatagtctttacgtcaaacattggggcggcgcaaatcgcggtggacaatccggatgtcaaaggggcttttattgaggaagtacgtaatcattttgtcagtgaattgaatcggccagaattgcttggtcgtatcggtgagggaaatattatcccgtttaactttatgaccgatgaaaatttcctgattgatatcgcacgatcgaaactggaaccgctccgctatcgccttaacgagaaatggggcgtaacgggaatgcacttcgaggatgagacgaaagcgcttagatcgatcgttaacatggttgatcgcagcagcggcgggcgcggtgtgctcaatgttttaatccggtgtctgtttgatccgttgtcccggttcctgtttgaagaggttggttcacctgagcactccctgggtcgtgcaataaaggttgttcagggggggaccaaacccaattttgacttcgatctggagtaa

SEQ ID NO: 82173 - DNA, 582 bp, Citrobacter koseri
atgaactggctgaatctggcttcatggctcccctgcaccgaggttgaagggccgggaaaacgcgctgctctatgggttcagggctgcgacaaacgctgtgtcgggtgctgcaatcccggctacctgaaaatcattgagcgtgaaattattcacgcgaatactatgattgatcgtttgctcgcagcccatgaagaatgggggctagaaggggtaacctttttgggaggagaacctttcctccaggcgcaagggttggcagcagtggcagaaggtgtctcacacgccgggctttcggtgatggtgttcactggctacacgatgggtgaactaaatgaactcaatctgcacggcacgcaggcattgctgaaatggacggacgtgatagttgatggcccctatcaggcatccagccccgatcggacacgtaactgggtcggttctacgaaccagcagtttcactatttaaccaacaggtacagcgagtcgatagaaggctcaaccctgccagaccacgccatggaatggcggattagcgacgatggacgcattgtggtcaacggctggccttatgctattaaatga

SEQ ID NO: 82174 - DNA, 576 bp, Citrobacter koseri
atgtcatactatgcttactttacataccctgataggttgtcgatggactatcacctagctaacactaatgatagagagattataaaaaaatatagagtacaaagcgcatatgtgataatagaatgttgcgttagccacatcacggcacttgagcgtccccagttttcagacttgcttaataaaaaaacagtcgcgagtgatacattaattgtgcctaatctatctagtattggcatcgatgctttagacattagaaaggttattgatctatgtgagagaaaaaacctaaatctcatcatacattctttagagctattaagcctcaatgatatcactagtttcctagacgactttatattactggatatagaaaaagaaaaaagaaaacataagaacagaatcgataaggcaaaagaaaatgggaataaacttggaagacctgaaggaagcaaacatcatcatgaaattcaggaattgaaggatgcaggatacagccaaatgaagatatctctcttactgggcataaatctctccacggttaaaagaaattggcgaaatggaattattgagtattga

SEQ ID NO: 82175 - DNA, 753 bp, Citrobacter koseri
gtgacaaacaaaattactttcactagcaacagaatgacaacaatcaaagttattgatgactactgtaaaactaaagggctatctcgttctaaggttatatcttcattgttgaacattacaacaccagtattgaagcaggtgataaatcattataaagatattgaaagcatagaatcattactggtcaaaacatgcttagacacaggtcacataaaagaattagaccattcgacactaacaatcgaagagcatttcatgtccatctggaaaaataacattaagcatgaaagagaatttattaacaacgaagtctaccgacataaaccttcaagcccaaaaatgggaaatacagaacgtgaatccatacgtgaaatgctattatctttgacagaaaaacttaacgcgaaaaaagccatttttatatatacagaccgaagagtcaataataaatatttgttggcaggagggatttccaacacattaataataaaagaaacaacttatgatgattacttcttcgactttcatcagttaaccatattacctatattcgaccttatattacttgggacggaaaaagcacttatgcgtaataacttaacaactaaaacaccctgtatttgctggatccccatataccacacaaatgacaaagctataatgctcccaatcataagaaaagatgatgcgcctaattcatctttaaccggtagcaatgcaatcattataaaccccttttcaaaagggcaataa

SEQ ID NO: 82176 - DNA, 207 bp, Citrobacter koseri
atgacaacaaccaatatgaaagtactacgcatgccagccgttgccagcaaaactggtgtagccaggtccaccatctacgattggatgaacccaaactccccgcgctatgacgccacgttcccaaaacaacgtcgattaggtctgcaatccgttggttggctagaatcagaaatagatgaatggataatgctacgagtcaaagcatag

SEQ ID NO: 82177 - DNA, 651 bp, Citrobacter koseri
gtgaaatttttatccaagagtacgaatcaaagcgagatttctgcctgtctcgtgggctcggagatgtgtataagagacagccctgacagtgctgtactttggaaatatatagaacgtgaataccagcttattccgttcttgcaatcggctttggggctaaaaagtctgtttaagcataactgctttgctgctggggtttaccaacgtatggggtgttatatgtggacgattgatcagcatatagccatcaagtcttttatacatgctaatcgtattttaaatgagtgccggggagggctgatctacagctattttattgatgccgagagagatattagtgttaagaaaaaacagtcagctataaaaggtgggattgcaagggccgaactatacaccccagtaaaggaggaagtgattaagctgctgtacaaacatgtaccttctgggaagggatggaagaacagaacgatggcgtcgaaagctattgaatctgacttgttagcatttattaagggtcaacaaaaacttcaagaggggcttgtccttagtgaagaagaactcgtgacaaccattcaacgttgggggcgtagcgataaggatgttagggctgcatttgaagcaactgtgcggatttctgtaattaaagagtaa

SEQ ID NO: 82178 - DNA, 855 bp, Citrobacter koseri
atgaaaaaaacagagttggccactaaagaagaagtcgtatggtttgaaaaaactgtggagtacaaatttattaccgactgcttagaaaaacgaatcattgaaagcataatgcccctaagtggctttcgagaacaggtgggtgatacaattacagcattacgagatgcctttaaaaaattcaaattttatattattgagtttaaaagagatcttggggagtcagggtttaaactagaggttaatgaaaaattcactacacaattagcaggctacaatactgctaaaacttgttttaacgacaatctggataaccctttgattaaagggcattattttattggcgcccagtataaagaaaataaattccaattaattgtaagggattacttcgaacctgacaggaaagttcgtaagacattagatgaggcgttttcttcaaaaactggaatgacgcaagaggagttcgcactttatgtaaaccgtttcacgtctcataaaaaaactaataaatgctataagtgtccagactcaggtaatggaggttccactgttacatctcctgctggacctaatcccagagggagatttgggttgaatgtagaaaaggatataagtgtggtgattgcaataaaccctgataataaagaatgcataacatttccattaacattggtgcagttaactgatggattgggagggttaccagtaattaatatttctccggatgtcggtggaggcggtggtgacgaggttgtcgtacatactgagctcatcatcactcatcctcattactgtgacccagagttgggcgagctttcaggtccagatgatataaaagaagaaataactagctag

SEQ ID NO: 82179 - DNA, 972 bp, Citrobacter koseri
atgcattctaaaactcacgttgtatcgttaggtcacaccaaatatggtgagggtaaatctgtacccgtttccgtacgggctccggtagcagtttccagacccagaattatcccggttgtttcaacaaaaggaggagaaggtaagtccacccagtctgctaatctcgcgggttttctggccgatgcagggataaaaacccttttgcttgatggtgaccacgcgcagccgacagccagcagtattttccctctggtctatgaagccccctgtggtctgtacgaacttctgatgcagacggccgatctttctaaccccgaaaacattatctcccgcacgtcgattgagaatctggatgttatcgtttccaacgacccacgcaactttcttcctacagcaatgctgaatgcccctgatggcagggttcgtctgcgaaatgcactttcgcatcctctctttagtccatatggcgtaattattgtcgattcacagggctcacgctctgtaatgtctgagctgattatcttggcttctaccgggacgatggttggcgtggcaaaacccattcttcctgatgtaagagagtttatgcgggggactgttgctctgatggaagaactccttccgtacagtgcattcggtattcagctaccgaatacaaaattgctcatcaactgcatggactatgacaacctttcggttgaaacacttgctcaggttgaaaaaatcgtagatgaaaaacgctatagcgcacatgccgacaaaatccatatcgaccttctgatgacgcgtatttatgacctgaccatctatgttcaggggcatgttaagggggtaccggtccatcgtcttgagaaaaaaaccagccgtaaaagcgactcagcattcatctctatgtataacctggcctgcgaattattccccgaatggagagacaagtttgatgcgttagctaatgcgggggaagacgaatga

SEQ ID NO: 82180 - DNA, 1368 bp, Citrobacter koseri
atgaaatctaacaaccgcagaaatgtacctggactgttctcgcaggatgccgagcagagcgttattggtggcctgatgctggataatgactgctgggatgaagtcgcattacgactcagcatggatgatttttatctaaaggttcatcgagttatctttcatgagatgtcgcgtctggttgcagccgggcgcccgattgatctgattacgcttgctgagaacattgaaagccgcggtaaagatgcgcttgagcaattgggtggttttgcatacctggcggaactctcaaaaaatacacctagtgcggccaatatcgtcgcttactgtgaaattgttgcaagatacagtaagggtcggcagctggccgcgattggtactgagatggccgaaaccgtcagggaacctggtgccgatatcgaggcggtgatggaaaccgccgagcaaaagatcacttgtctggcagaacgttcagagccggaacaggccgttacactgcttgatggaatggaaaaactccttgttgagctggagcgtcgctcaggcgtacccgatggtattacaggcacacccaccggctttgaagattttgacgctatgacctgcggtttgcagtccggcgatctggtactcatcgcagctcgtccttctatgggtaaaacggcatttctgatcagcctgatactgaattctcttctgaacaaagctgatgtaatggcgcaactttacagcatggagcaacctaccgatcagatcctgatgcgtatggtttcctttctcggcggtgtagacctcacacatcttaaaagtggccagatggatgatgaagactgggcacgcgtttccaacgcgtctggcatattgatgggagagatgaaagaccgtcttattatcgatgataccagctctttgaccccagcgatgctcagaatccgtgctcgccgtaacgcccgccgttatggtcatccttcagtcatcggtcttgactacttgcagctcatgcgttgtccggaccaggaaaaccgcacgcaagaaattgcggagatctctcgttcactgaaagcgctggcgaaagaaatgggttgtccggttgtggccctttcgcaactgaatcgccagttggaaagtcgtgcagataaacggcctaataatggcgatctacgtgattccggtgcgctggagcaggatgcagaccttattgtctttatctatcgtgatgaggtctatcacgaaaacacggaagacaagggcgtcgctgaaattattatcagcaaacagcgccaggggccaacaggcacgatccgtctgcagtacgaaggtcggtatacccgtttctctgccacctctcatcaggtcgggaggaatgcatga

SEQ ID NO: 82181 - DNA, 1704 bp, Citrobacter koseri
atgagcaacgtcagtaaacttaacctcggtgcagccatgttgcagcgtggcaaatcaccggctcaatctgtggatcactctcctgttatagcccaaccggtaccggtaagtgaaatggcaatggtgctcacccttgaccagttacgtccgaatcctgacaaccctcgcaaaggacgcaacccacgctttgaggaaattaaagcctccgttcgtgcgcgaggactggactccattcctaaagtgacacgcgaccctgaaggtgatgatgtttacatcttcagtgacggcggtaatacccgttatcagatcctctgtgaactctggcaggaaactggtgatgaacgtttctttcgtgttcacaccattttcaaaccctggccaggacgactcaaatgtctcgttggtcatctggcagaaaatgaggtgaggggagacctgacctacatagaaaaggcctttggtgttcataaagcacgcgtaatttatgaagaacagttgggccgtggtgttactttacgggaactctctgagttgctgggtaaggaaggttatcctattgattattccagcgtaagcaggatggaggatactcttaattacctgtatcctcatatgccccggctacttgagagtggtatgagccgtggtcagacaatgccactcctgagccttcgttcttctgctatgaaggtctggaaatcattcggcagtgacgtaaaccctgactgtactctggatgaagtttttggtgcagtgtgtaggtgctttgatgaacctgaaagctatgcacttgatattttcagggatgagttcattggccaactggtcagggcgttgccgcaccccagtctgaattatgatcgctggttgattgaacttgatcctcgcgagcaaaaacgtcgtgagcagtttggagatccaccgccactcccggccctgactcctgcgcctgaacaggctggtgagcgggagcgtaaaactccaccggttgaaacactacctgcagacaattcacccaggactccggtcacgggtctgcgaagcggtacgctggtcacgaccacacgccctgagcctgcacctgaacagaactgtaatgctgtacttcccggttctgccggcagtgaaccgcgccgtgaagtgcagaacgacctctttggcggcaatcctgtgactaccggtcaggcagataacactgaaagtagtggagggggggaacttacagacgcacccttactcgtttcagcaattggagaacaggatgaatccttcacgacgtctgtaagttcagtggtcttcgcatctacaggcctggagcctgtgagcgacatctggcatatccccgctttacaggacgacatagagcatcttcaggatgtggcttaccgcctcactttcgaaattgcggagacgatgggctgcgccgactgtgtccgggaggataaagatccacgatcagcaggtttcgccatttctgaaacagccagtgaatttaaccttttccttgccggtctttcaggttcactgcctgacaaacagttcaatatgtttatgttctgcctgaattttattggttctcaggagccggctgatacggctgttttcgatgatgtcactgtcgttaaaacaatgcgccttatccgcgtgatccgccgtctgcgcgaacatcagcgtcttgctgcgaagggaggtgaaaatgtctga

SEQ ID NO: 82182 - DNA, 255 bp, Citrobacter koseri
atgtctgaagacctgaatgatgaaatggctcaggcctgtaccgctattttcatccagcgcggtatcgatgctatccgggcaaaaatgcacccggtacacccgtcaaaagaagtctgtgaatgttgtggcgcagacatccccgttgtacgacaactggcagtgccgggcgtggaattgtgcgccggctgtcaggatgtgaaggaaaagcaggacgttcacggggtttccggcagcagggggatgcgtcatgtctga

SEQ ID NO: 82183 - DNA, 744 bp, Citrobacter koseri
atgtctgataatgcaaaaattttcgcacgtatccggcgcctgatggcgctgggcacccggaacagcaatccaaatgaagctgcccgtgcggtggcactggctcagcgactgatgcagcgccatgggctgacgccggacatgctttctctgcatgaaatccgggagtctgtttgcgagaacctgaccagtaatgctgaaaacgtgccagcctggttaagttcactggcgacggtggtatgtatggcaaccggctgtcgctgctggttcggctggcatatccataccagttgtagcggagtgagaagtgtccgccgttcactgcacttttatggcttcagggagagagcagatgtggcgctctatatctataccgtcctgcagcgtcaactccgtgcagatactgatggccagatcgccgtttaccgaaagcgccgtattctcaggaacacgcttcgccgcagggctgaccagttccgggagggatgggtatcaggcgtctggctggtgctgcagtcatttgcgccttcagaagatgagaataccttgctccagcgctggctggcccgacgacactctggcgacacactgggaactgtcagtgtcaggtcggccggtaaatgccgtggcgataaagccgcgcgggtggcgggctggttagccgggagagataccgaagtgcatcatggcctgaatggttcgcaggctcaacagcagattacggcgggaggctgtacacatgactga

SEQ ID NO: 82184 - DNA, 237 bp, Citrobacter koseri
atgcagatgacagacttttcttcacgccagcaggtttctccggccgtccggcgtcgggcacagcaattgtttcatgcagtctgttccggccagaagttgttccgccgcctggctattaatgggaacgattatctcaagatagatgtgggacccttctggcgcatcctcagtaaggatggtggccagcaatggtggctgatggatcatgagacttataaccgtgaaatacggcggtaa

SEQ ID NO: 82185 - DNA, 1233 bp, Citrobacter koseri
atgaccattccggctgacagcatcgttgcccacacgctgtcaaggatgcagcggaacctcgaacggcgcgccgataccggtgatgtcacccgggagcgcagcgggcttctttttatgggaaatgtacatgatgcgtttccccggcagctgtttcttgatccacgtctgtcgccactggataaaatcgcctgggtgatgatccggctgtatgcacagcagaatgaaggcgctgttttcccgacttatgatgagctgcaggttcagctcgcgtcggcccactcagataaagcatccagagatacggtcagtcgtgtcctgctgatgcttcgacttacaggctggctcagtttgtgcaagcgcgtacgcgatgaccgtggccgcgtgcggggcaatatctatgcgcagcatgatgaacctctgggctaccgcgacgccgaaacgtttgacccgggctggctgacgcttgttgaagaaagctgcctcagcaagaataaagccgtccgtatgacagcgctggctgtggtcaatgacatcctgcaggacccgggaatgcgccatcgtcacagccgcctggcaatgattgagaaccgtctgagcgcgccggcgacaccagaagaaatggttcgtcagcgacaggcttttcaaccgggtccgaaatcaggactcagtaaaaaacgcataaaaaacagcccgaattccctgagtccggaaaacggactcagtctccatatgtctgatatttcacagagtccggaaaaaggactcagtacaaaatcaaagatttacaccggagtccggaattcggactgtaacgtacgttctttcacacacagtgtgaataaaaaaacgtacgtaccgggcggtgagcgtttcctgccggatgatttcctgaacagtctgaacagcgaagacaagcagatgctgagcacgcagatggttttgcttcctgagaccatggcaaaggcactggctgacatgctgcgtgagcaactggcccgtggaaggctgaacaacccgataggctggatgttttccatgctgcgcagggcacgaagcggtgagctgaaactttcggaggatacggtgccggccggttctggtgagaacgctccccgtccgcctgtagcacgcacagtactgacagccagtgttcctgttcagcctgaaaaccgaccatcacaggagcaggtcagagcaatgattgcggctatccggcaaaaagtgcagaaatga

SEQ ID NO: 82186 - DNA, 2010 bp, Citrobacter koseri
atgcggctttttatctgtgaaaagccctcacaggggcgggatctggcaaatgtactgggagccacaaaacgtggtgacggttttcttactggccctggtgttgcagttacctgggctgtagggcatctactggagaccgctccgcctgaggcatacggtactcagtatggtaaaccatggtctctctccgttctgcctgtgctgccttcaccatggcaggtgatcgttaaaaaggaaacacaggctcagttcagggttattgaacggctgctgcgccaggttgataatgttgttatttccacggatgcggacagagaaggggaagtgatagcacgtgaactgctggaatattgtcgatgggacggtacggtacagcggctctggttatctgcccttgatgagatgagtatccgtgcagccctgcaggatttgcgaccgggttctgaaacccttgggatgtatcatgcggggctgggccgcgcgcgcgccgactggttaatcggtatgaatctgtcacgtctgtatactttgcttgcagcacagtccggatttgatggtgtgatttcagttgggcgggtgcagacgccgacgctggcgttagtggtaagccgtgatcgggagatctcaacatttgtatctaaacccttctggcaggtgaaggcgctggtcagtgcgggaggaaaaacgtttccggcgcaatgggtgcctgcaaaggtctataccgacgaggaaaaacgttgcatacatcacaacatagcgcagcaggtggcgcagctttgtcggcaagctggcgctgcgaccgtcacagaatgtgagacgaagcgtgaaaaaaccgcagctccgctggctttctctcttggcacattacaacaggcctgtggccagcagtgggatatgtcgccccagcaggttctcgacactgcgcagagcctctacgagaagcacaaggccacaacttatccgcgtacagattgtggttatctgcctgagtcaatgcgtgaagaaatccccgcggttctttccgccataaagcgctctgatccggaatgtacctctcttctttcaggccttaatgcctcttttgtttcacgcatctggaacgataaaaaaattacagcacaccacgggattatccccacacgaaatgcgtttcagatgtctgcgcttagtgaagctgagcgacgcgtttatatgctcatccgacgtaactatctggctcagttcctcccgttgcatgaatctgacattacccggctacagctggatattggcgggcaaatgttcctcactacgggaaggacggaggtgataaagggatggaaagttctgttcggtaaggatgaagaagagagtgcaggggatgataaagacgatatcgcacttcctccacttgttaagggggagcggtgcggggtgagtggcgcagagttggtgcagcaaatgacccgtccgccggcacattacactttcgcaactctcatcggtgcgatgatgaacgcgtctgcgtttgttactgatatcgcgcttcgcaaggtgctgaaggacaacgccgggctgggaactgaagcgacccgggctggtattgttgagcaattgctgaagcgcgggtttattgtacgcaagggcaagcagctgcgtgcgacggagctgggtactgacgtcattgatgctctgccaacacagataaccgatcccgggatgacggcactgtgggagcaggctcttgatgaagttgctgcaggacgcctttccctgaatgactttttgcaacgacaggtcgaatggacacgtaaacttgtcagtctggggggacagcagcgggtgaatatcagaattccgcccacaccaccttgtcctttgtgtggtggtaaaacccgcatcagaaaggggcagaagggtgacttctggggttgtcagcgttatccggattgcaaagggatcatcaacagcgattcggggaaacgtaaaagtacccgcaaatctaagtcagcaaaatcaaagcataattaa

SEQ ID NO: 82187 - DNA, 204 bp, Citrobacter koseri
atgggaaatccattcggtttattagctgcagaatccggggttgaattacacatccaggttctgtccagtcagcgcggtttttatatcggtaccgcgaacgaaatggggcccatgtcccgtgagtcagtcgaatactacaaaaccagtcagcaggccgacattgctcctgaaaaaggggaatggacgcagcgcgaatatgattag

SEQ ID NO: 82188 - DNA, 285 bp, Citrobacter koseri
atgcaaactactatccgtaaatctgttcgtgataagcaaataaatatccgggcaactgatgaggaacgtgcagtgattgattatgctgcaggtctggttaacaaaaatcgtactgatttcatcattgagaaggctgtgcacgaggcccaaaatataattctggatcaacgcgtgttcgtcctggatgatgcccgttaccaggaattcattaagcagctggaagcacctgtgcagaatgttgaaggtcgtcagcggctgatggatgcaaagcctgaatggaaataa

SEQ ID NO: 82189 - DNA, 321 bp, Citrobacter koseri
atgcgtgtagtagggtattattccatcgcgactggctcagtgagtcatgtcgatttggggcgtagcctgcggcagaatatgccagatccaataccggttgttttgctgggccgccttgcagtcgatgtatgtactcagggacataactacggaaaatggttgctgaatgacgcagtggtacgcgtctcgagtctggcagaccaggtcggaatcaaggctatcatggtgcatgcaattaatgagcaggctaaagcgttctatgaatattttggctttgtgcagtcaccggttgcggccaacacgttattctacaaaatatga

SEQ ID NO: 82190 - DNA, 345 bp, Citrobacter koseri
atgcgtaagaaatgtaagacagtcagaaaagacacatcaaaactaagcgattttgaaataatgggaggtcccctcaaggggcatatacttatcatgttcctgggagcaattgctctgcttgtgatttggggcacatgttttttgctgttcagtctggaaaagcgttctgcatgtcagaatcagaaaagctattcacttgaggccaatacgccccttaagcagtatatagatacattctgcaagaaacagggacaagaaagtgaccacaatgaaaagcaagctgatactccacctttagcttttactatcgccagcaggacgtttttcttcagtttgcagaaatag

SEQ ID NO: 82191 - DNA, 1314 bp, Citrobacter koseri
atggtaaaaataaacctgcagacacggcatcggcttggggccatcatgctctgtgtgcttgcagccggttgcaccgattttaattctcgctctgaacctgtgagcaggctgcagggctcgccacgagttcaggatctgtatcagaatcgttcccctgaagttgttcgttacgatcgctacacgctggccagtacgcggcctgttgatgcgcagcgtgatcctctcaatcagattatcgatatccggatgccggcacaggtggtgaataccatcggggaaggtatgcgctatgtcatgcttgaatcagggtactcgctgtgttcaggcgaacctggtgtcttttcggagctgttcatcaaaccgctacccgctgtacagcgctcaattggccccgttaagcttggtgatgcgttacagattctggctggcccggcctggcgaatgcgggttgatgacctgaacagagagatctgtttcgttcttcgcgatgaataccgccatcttgcatctgcaacgtcagtttccacccagagcagctctgtcagccagggggcggggaaatctcctgccacaggttcactgttgaccggcacttcgcaacctgcagtaaccggaactcacagttatccgctgcctccggcacgtccggaaagttcgggtttgccagaatcagcttcatcttctgcagttaaggccgcaacgccggcagcctccggaacaccacgcaatccgttctctgccagtgggtcatctgagcagcttccgtctccggcgcagaaaacccaggcaggcactggcaaggtacacccttccactgagctggcgacagcgcctgcacctgcagcgatgaaggttaaatcagcccctctgaataaagccgcgctgggcgttccttcggtgacttccccgaaagcagaaagtgctgtccaggctaaaccaccgcattccacgacgccgggttccgttgccgcagtcagtgacaaacctgttttcactccgggagccccgctgacatcgttacctgccggacaggtctggactgcgctggccggaaccacgttaaaagacacgctgacgcagtgggcaacatctgttcgctgcgaaagcggcagcagcccgacatgggtcgttatctggccaacctccgtgaattatcgaatcgaggcgcctcttacccttcggggtaatttcgaatccgttgtggtgcaactgtttgagctgtatcgcccggcagagaaaccgctttacgcgtcagcaaaccgtctccagtgcctggtatacgttaacgataaaccgcttcagggcgggcaatga

SEQ ID NO: 82192 - DNA, 438 bp, Citrobacter koseri
atgggctacgccattgtggcaatcgcaatgctgatgatgcttgtaacgaacagtatcacctcagtggatacctctgaacagcagacacagcaggcaaatgccgcggcagagctgctggctgacgatatgttgcgaacagccagcatggtcaacgactggcgatacagtcacagccttcctgaaggtgggctgagtctttcacagttcagcttctcaccggcgccggatacccgcattcgtgctgcgatcagtggtggccggctctgggtatggacgcctgaacaacctggtctgcggcctgcgcttaaccgtctgtcatcaggctctgcgctggtcctttctgttacaggcggccatctgctcatggcggatggctccgatatgaatctctccttaccggccggggtgtcggaaggaaacattgtttatctcaactga

SEQ ID NO: 82193 - DNA, 1671 bp, Citrobacter koseri
atgacatccttactgcctcgtttacgcgcaaccgcaatagcgatatccgttactctgctctctggctgtgcctggcatgaaattaataaaatcgaaaagcaggcgcgcgcggaaagtgataccgcaacacgaatttttgacagcaaaacagcccgtccttcgcaactggtgacgtggactgaaaaaccctgggttgacctgaaacctatcgggctttcgtctgcggtatctgatgacagaaacgtgcctgactgtcccattctgatcaatcgtcctgatggtgtgacacttccggaactggcgcagcgcattacctctgtctgtggcataagggtctcgtttacgcctgatgcacttgcgtcattgtcgacaggcagctccggtaatgctgcaacacgacaggtatccggttccctgccagccccggatgataacggacgcgtatctcttgatgccataaacggtcagaacagtaaccagccccctgtcgtgagcgcaggtgccatggcgggtatcaaatgggatgctcaactgagggggttacttgatgtagccgaaagccggttcggggtttcctggcgtatggaaaacggtggaattctcttctatcgctttgatacccgtatgtaccagctgtcgtttatgaactccaaaatcaacagttctgcctcgattaattctggttcaggtactcaacttggcagtgatggctcttccagctctggtgaagtcagcactgagcaaaaaacagcatacggcctcagcagtgaaatttttgatgatatacgcaaaaccatagcgcaaattcttacgccgaacgtcgggcgattcttcctgtcctcttcaagtggcacgctgacggtcactgacacaccggaagtgcataatcgcgtggcaagttttgttgaatatgaaaacaaaattctcaaccgtcaggttcaactgaatttccagattttaaccgtcactcagtcggttaatcacgagctcgggatggaccttgatcttgtcacgaactcccttcgtaactacgggattaatgtcaaagggactttcaatggtgcgactacaggcgctgggtcgatgggggtatcggttcttgacacagcgaccggaaaggcgggcaaatttgcaggcagcaatctgattgttaaagccctgtccgaacagggtgatgtcagtgttgtgacccgccagacccgactgaccacgaatttcacgccggtgccctatcagctttcaaaccagcaggggatgatcaccagcagcgcatcgacggcaacggccaatgtcggggttacttcgacaatgaccactacgaccctcacgacagggttgttcatgacggctgtgccttccattcaggataacggcgacgtgcagctgcagttcgccttcagttatgacacaccgccgaagattgagaagttcatcagcgcggacggcaatacccgtaatgatttggccgcgtattccaaagaggcgattacccagaaattcaacatgcgttccggagaaaccatcatggtcaccggtgccgatcaggtttctaactcttcagataaacaggggattggatctgctgatttcttcggtttaggcggtggtcgaactggcgcaactaagcgttcaacgctggtcattcttatcacaccggtgctgatgccatga

SEQ ID NO: 82194 - DNA, 1302 bp, Citrobacter koseri
atgatctacagaaaaagcagaaagctgttacagcagggtgagcgcaccgctggcgttctggtcttgaatggtcgcaccggctgggttgccggcatgcactggacgcaatccggtgcaacaggccttcttaaccgtctgcgtctccaggatacgcactgggtagccagtggcaggggggccggcagagtgacggggctggtcagccccggaaaaatccgtcgcggggtgaagttgtattctctggcatctgtattccagagtgcagtcggcggcagcagtcatggtctttaccgtcttgatgatggcagtaacaaatgggtctttctggccacggtccgcgaccagcttacagtgatggccgatgtgaccggcacactgcaggaagtgtgcacggcccgtaaccattttctgacgttcaacgatcccggggacgaaggctggagctgcgtcgcagatcatcaacagaatatcagctggaagacgctggttgagggtctgtcttctcagaatatggcccgcgcccgtctgaaagaaacgtccctgcgcagacccctgaccgttattgccattgctgtggctatgatggtggccggtgcctggattcagaatgaatcctcgcaggctgcccgggatgctgctatcgaggcgagccggaaggtcgtgaaagtcatcaagcctgaagaggcagtacaacccgaaaagctccccggaccgtgggcgacacggttcactgtgccggcttttctgaaggcgtgctgggctacccgtagtcagtcccggatttcgatcgtgggatggcgtgtttcagtgggtgaatgtgatgagcaacagcaggggcttcgcctgcattacgaagctgcccagggcagcaccatcgaaaactttgaccgacgtgtcattgagctgtatggccatccggcaacgtttgattttgttgatggcggaaagaacggaaatgtctttattccttttggttttcctgacgcgcactcactgcaggatgagccgcttcgtccggcaaatgaatgcctgaagagtttcatctcccatatgcagcgtaaaactgtcccggttcagctcagtgaggtgaagcagcctgaaacactgcccggcactaaaaacgaacagccgaaaaccgactggcaggaatacacctttacgctttcaaccggactgatgcccgaactgttgcttgagggtatggacgccaggggggtccgcatcagctccatttcttacaccgtaagcccacaggggctttatcactacacccttcgtgggagcctctatgccaaaaaataa

SEQ ID NO: 82195 - DNA, 516 bp, Citrobacter koseri
atgccaaaaaataatgcacttcgctggcttttgccatgcggtctgactctgctgatgatgacgggtcaggcaaacgctgatgagagtatgaccatcaatcgcgtcatccctgaaaacgttgtaagcggtgagcttgagctggcccaggcgcgcaatatggtgcttgaacaacaggttcagactgcgcgcctgcaacaacagttacgtcaggcacaagcccccgctgagacgaaaaactggacggaaggggctccggccgggtatcccccgacatctgttgtggtcgctcctcagactcagacaccggaggcctcttctgtcagtcgtgctccggaacgggttcgcctgcaggaaatttacgggaaacctggcttcctgcgggcgcgtatcactctgccgggtggtggggtaacggaagttaagaaaggggatgtcatcccgggtatgaaggggaccgtggcgtcaataagtggcgagagcgttcgcctcagcgacggaagcgacctgacattctga

SEQ ID NO: 82196 - DNA, 1533 bp, Citrobacter koseri
atggagaaatacgcagaaattgaggattttgttctggttgataattctgccggacagatctctctggtcatcgataaaaatcggcgcaccgatgtacgtatacagcgctgggtgatggaccagaccaggcgttttccttatgcaataccggagtttgtctcgcttggtgagcttaaggcgcgccgtgagaaattccggctcactcagtcggcgcaactggtcagtacagcattcgatgattcatggagtgatgtgcagaaacgtatggtgggttattttgctctggcccagcaactgggatcgtcagatatccatattacggttatgcgcagtattggccttgcacgcatagagatgcgtatacatggcgagctggaagtgattgacgaactgacgagcgaggagggggactcgctcattcagaccctgttcatgtcgatgtgtgatatccggattcctccggctttcaacgacaacgacatgcaggccggacgtgtcgacgcgaaatttgcgcgcgcagcgggattgtttggcgcgcgctaccagcatatgacgacggccgatgggatctatgttgcgctgcgaaccatcattgatgacagcgacagggtgccgacgcttgaagagcagggtttcctgccagagcagattgttcttgctaaacagattatccgttttccaaacgggctggttctgctcaccgggccaacaggctccggtaaaagtaccacccttcgtattttcagcaatatgtggcttgagcgtacccggcaccgtaagcgtctgcttacggtggaaaaccctgttgaagggcgtatcgccggaggtatccagacacctgtcattaatggtgactgggacaagagcaatgccgccgtagtgcgctctgacccggatgcgatcctgctgggggagatgcaggagataaacgcgctcatcgccgccattcatgcggcacatgcgggtcacattgtgttcgataccctgcacagcaacagtgcagcaggctcgttaccccgaatggaagtgatgggtgctgacaaacgtctgattgccgatgcggaactggtgcggggacttgtgagccagcgtctcgtgccaaccctgtgccctcactgcagcctgacctgggcgcagaaggcatctcagttaccggcggagacacgcgcctacctggaaaaatattgtaccgagcccggggtatgcatccctgagaacctgcgctttcacaacccggaaggttgtgaacactgccgcaggaccattgagcttactggccgtgtgataagccggggcataaccggccggaccgcaattgtagaaattatccccccggatgcgcgttttatgtcgcactggctctcccatggaaccgcagcagcacgccagtactggcttaataacggcggtatcagccgccggactcatcttctgatccggctgaatgaagggcttgtcgatcccctgatgggggatgtcgaagtgcctcttgatgaagatgaattacttgccatggaggtggccagtgtctga

SEQ ID NO: 82197 - DNA, 1113 bp, Citrobacter koseri
gtgtctgagagccgtttccggccgtcacggccaatgaatatttttcagcgtgcccgttatcattttttacgtcattccttctccgggaagcgccgtaagccattttatgaggtgttacgtttcctgctggagaacgacaaggccgatgctgaagcctttcgtatgatcggtgacgtgtataccgattttggcctgcactggcacccttattcggagctggtcgaagactgcctgcaggcgcttcgtgacaaccgccccgggcaacagcttcaggatgcgctggctcgctggattccggcagaagaggccgcgttgctgggagccgggcgtaaaggcaagacgttatctgtcgcactggagcaatctgaaaggctgattgatgtgcggggccgaattctgcaacaggtgatttttgcatccacctacccggcgctgtttgttgtcctgttcggcgccatgatggtgattaacacagtaaaaattgtgccaacgctcagtaagatgtcagatccggccacatggtccggtgcgctgggtgtgatgaacagcatggcagagttcaccactcagtgggggcttgtatgtgggatttccttcgccggactccttgcggttgttctctggtcgcttccccgctggaccggacggattcgtcagttcgctgaccgttttatgccctggtctctctattccgatctgcagggcgctgtatttctgatgaacgtcgcagccctgctcgaggccgggctccctgaaattgacgtgctgaagaccctgcgtaaaacggcgtccccgtggctacgtgagcgtcttgacgcaacgattgccggtatcaaccgggggaattctctcgggcgtgcactgcgttacagtggctttaatttccccagtcgccagtcagccaactatctctccctgctggggaaaggggacggcgcgtccttactcatcagtcgctacgccgatcgcgcgcttgacgaaattattgcccgtgtgaaacggcgtgcgaacaccgcccgcggtatgtccatgcttctcattttactcttctttggtctgatgggctctatggcctttgagatccaggaaatgtcccgcatgccaatgcattaa

SEQ ID NO: 82198 - DNA, 618 bp, Citrobacter koseri
atgtctcagttattgaccgttttacgtaaccggaaaccagggcgcgtcggacctgaaccggacagagggtggggatcagcagaccagggtggctccggtattctgggtattcttggccttgttgttgtggttggccttatctgggggctgtgggctctgtttaatggcgggcaggaggcatccaatatctccgatattgcgaccaaaacaaagggctacatgggggggcgcacgggatatagctttaccagtggtaccacgatgaccggtaactttattcagcgcggattcgccccgggcaatatgcgtgtcgtgggtgatgctgattccggcacggccaccctctggaatgcctggggcggtcaggttgttcttgccccggtatcgagcggcgcagggatgaattccggcttctccattaccacgaacaaagtgcctatgaaagactgcatttcgctggcgcagcagttcggtaatggtggcattttcagtgagattgcgattaacagcacccagcattctgacggaaccgtaacttcggaagaggcgggcaaggagtgcacgaaaaacagtggtagtgcagggaccaacacaatgaaattccaggttaacgggtaa

SEQ ID NO: 82199 - DNA, 477 bp, Citrobacter koseri
atgtggcgactggttttcttactgctgcttcccttttccttctgcgtcagggcgttctgctttgacgcaaccggacagaagtaccatgttgacccgcttcttattgaggccataacgattggggaaagcagtaagcgtccaggtattacgcatgctaaccgtagccccaaaaccgggaaagtagtgagtacggattacggcctgatgcagattaattccacccatatcccggggctgattaaaaaaggctttatcaacagcgcgcaggatttgctcacacgtccctgccttaatgtgcagattgggacatggattctggccagacatttccaggtctgtggcatttcctggaactgccttggctcctataacgcgggttttcgaaaggatcggcatgaaacccgtgaggcctatgcgaatcgcatatacaggatttacgtgaaccttcttcgggagagaagggggatcgcgttgtga

SEQ ID NO: 82200 - DNA, 648 bp, Citrobacter koseri
gtgaagcccatgttgactacagagaccctggtgactgctgcgataacccctctcttttttgtgttactgctgctggtcagggatgaattacgtgctgagctggcacgactgagcggagatgatgaacgtcacgcctcagtgacggaaacgttctggattgctacccatacgggggtgatgtcgctgtactggcttgctaaggccggactgtggccaacgtgtaccgcactgcttttttgtgtctttgtttttcgtcttacgctcattgaccagctgaccggctatttgccgagagagatgacactcagctttctggtggcggggctgctcgtcgccggcgcagagggcgccctgttacgtcatgccggcgcggccctgacggtctggagttgcctgatgatgtggcggcttgccggctaccgtctggcggggcaggagacgctggggatgggggatgtctggctgggtggtgcgctgggtgcctggctggggctgttgccagcgttgtatgtcacggccgcaggcgcaggcggtttttttatctggctgatgttttcccggcgcgccggtggtcctatggggccctggttcggatacagcgcactgggtgcgatgctgattccgctttatcaaactgtaatgtggtga

SEQ ID NO: 82201 - DNA, 1473 bp, Citrobacter koseri
atgactgtagaaactgaaattccggtaccccgtaaggatcgcggatgggcaattgcgtcaaccggcgctgcgcttgtcatcctgattactgttgtgatctggggtgtgcagcgatgggatgaatactttgcccgccaggactggcaggttagcgccaggcaggtcacacggtttactcaggccgttcgggcctacacgggcaaatactacgatacgttgctgagttcagcgacaacgacaaaacccgttattgttactgcggatatgctgaaaaataccggtttccttgaaccgggtttcagcgaaaccatttcatctggtcagcagttgcgcgctgcgctagtccgtaatgcaaccaacaccgatcagttgcaggggcttatcgtcagtcagggtggaacctcgcttccgtatatgggcgttcgtgacatctcggtctcaatcagcacggggctgggggcgtatatctggggcagtaatacgactgtcacgggggctaatcagagctggacactacctttgtcggcttttggcatcacatcgacggcgggacatgtcgcgacgttgctcacaacggatgccctgaatgaggcccgccaggattcagaccgactgtaccgttttgccgtaacgggtaagcccgaccttaaccggatgcataccagtatcgatatggggagcaataatctcaataacgctgcagcagtgaacgggcagaccggtaatttcagcgggaatgttactgccggtggaaacgtctctgcaggcggtaatgtggccgctaccggtaatgtaacggctaatggcggaatgacggccaataatgatatccgcagtaataacggctggatgataacccggggcagtaaggggtggcttaatgaaacctatcagggcggattttatatgtcggataatgactgggtgagggtggtcaataataagaacatatatacaggaggccaggtgcaggcaggtacagttctttctaatggtcgcctggcaactaacgaatttttgcaactcaataaagttgcggctgctggggcgtcatgctcacctgatgggcttgtaggtcgcgatgcagcaggaggcatactttcatgtgaagacggtgtatggcagtcacccagtacaggcaacggtacctatgtttcagtggggaagtttaagaggacgtattcgggtaacaattcaacaaaaaaaccattcaaaatgtatgtaactggaggtaacccacccagtaagaaaatcaactatggtgattcagataactgtgtcaataccttctccctcatagggtgggtgaatggaatcaatgttgccaaatctgttagcgcaaactcaaaatggaacaaatcgggaacaattgtgtttgatgttccagtgggggcatcgtttacggtcacgtctgacggtatgcttacatatggctgtgattacggcagttttgacgtagttacatatcaataa

SEQ ID NO: 82202 - DNA, 2028 bp, Citrobacter koseri
atgaacttaaaacaaattaagaaaagttaccgtgcggatattgatggtctccgtgctattgcagtctctgtcgtgattttattccaccttggcatcgggtacttcccgtcgggctttatcggtgttgatatattctttgttatatcaggttacctgataactggcattattttatcatcactcagagaagatactttcagttactctgatttttttgttcgtcgactctggcgtatacagcctgcgttactatttgttggcattgtgacgttacttgcctcaagcattctttttgtatcaccggattatctggattaccttaaaagcgcgaaatataactcattattaatttccaatcagtatttttcgcgacagtcagtagcatatgcaacaccagaaagtgatatattcccattattacatacatggtcacttgccgtagaatggcagtggtatatacttcttcctttcttcattgcagtagccatttttcttaaaaagaggcttccgtcgactaaagatattaatgttagtgataattttattttagcattgtggattgtgattacatttatatctgcagcattagcattgtttatggcgaaaaaagaacctggagagtcatattattttctgagtacaagaatatttgagttctgtgcaggtggtacaacatacctgttgaccagacgaatgggaaatatttacaagaagattgtgactgtttcaaatatcctggcaatttccatcattatttacgtttcgacaaaagagcatgtgattgacatttacccaaatgttaatgcattaatagtcgttgtctgcacatgttttttaatcttatccggaaaacaagaaaataatcttgtcagcagattgttgtcattaaaacctttttcattttttggcaagctatcatattcactttatttatggcattggccagttcttgcatattgtcgctatgtcgatattcaattaaccggcctgaaccttatgtatatttgtggtggtattattgcaatgtctctaatcggttattattttattgaacaaccgatgagaagatttaggtatagtctgaagttaacggtgacactacttttagctttgcctgcacttttatacagtatcctctattctgtcgcagtaaaacaacagggctttcctgaacgtcttggtcctgtatattcgcatcagtacaaaacaattcaactctatgaaactaaagctattaccaggaagaaatgtatagatacaaatcattccctggagacctgtgttctgggtgatttggaaggaaataaaacagcacttgttattggtgattcaaattccaatcatttctgggggttttttgatgtgctgggaaaaaatgcagggataaaaattaatgcactgagtgtctcctcatgtttgacttttccagggatatggcaatatgactggtggatttataagaataaaaattatgaatattgtcacaataaaaccgccgagtactataatcttattaagaataataaatttgattatgttattattggtgaagtctggcaaaattattcgcatggtccgtatcttattacgaaaaaagatgatgcacgctctgatgccttaacaaaagaacggatgacccatgccgcaaaacttgcgatttcaaaaattattgaatccggggccaggccagttattatgaaaacaatatatcctatgccgaaaggctatcaggagtgtcgtcaacgtgaagccattctgagaagtgagttttcagaaacagcatgtgatactcagcgtaaacaagaaaaggaaagcctttatctgacaacgctttttgatattcttaaagaggaatatccttcgttaatatttattgatccaaagaaaatacagtgcaaacacaacatctgtatcagtcatgtcgattctatccccgtctatcgtgatgttggtcatttaactgattacgcctcttatgttttcggggaacagtatttaatagaattcggtaacccgttgcgatattaa

SEQ ID NO: 82203 - DNA, 864 bp, Citrobacter koseri
atgtcagtcagtcaaatcatgccggaagatgttgtacccgcaggcccgggtgtaacgccttcagacgttacgccaactgaacccgattcacgccggcgccccccctttaatctcaaaaaaatcgcccggacaggaggtctggcattgcttattgcttctctgctcggttctgtggccacgattgttgtcatggcagggaagatctctgatctgagtatccgggttaactctctggatgctgcgttccgcagcggacagatgagccagttgtccggatcggtttcaacgcttgaagagaaaagcctgaaatacgggaagcagcttgagtccctctcgtccgggttgttatctgccaaaaatcagatggccggttatcaggatgatctttcaaaattttccaaaaccctgaatgacttttcttctgaagaacaggcacagcgtacggtgacagatggtcactcggagcgaattgatgccctcagtacccgactgtctcagctggaagaacgggtagccacgacgctcaggactgaaaaccataacgctcagaatagccagaagacaccgcagccggttacgaagggtaaaacgcctgctaaatccggggctggtaactctgcaaaaaagcctgagcggtcagtcaggcgcgccgctgttgaagcaccgtttgtactgaccggcattgagcgtcgtggcggccagatgtttgtcgtcgttattccccgcggaaatacgcaaatctccgcgatgcggttgctttctccaggtgacgggatgctgggctggacactccggtcaatccgggacaatggtacagctgtattcagcgtaaacggtgctgaacagagtttacaggttcaataa

SEQ ID NO: 82204 - DNA, 624 bp, Citrobacter koseri
atggcaaatcgccgcattctgaaactggcctgtggtttatggtttgcctgcagcaactgtcttgcgggcacaacatttaacagcagcaatcaggcgatccctcaggcataccgggaaatcgccgcagcagagcgtgtgcctgctgaatccctttactctcttgcgatggccgaaaccactcgtaagaccgcctgggggaccagaccctggccctggacaattaacgttgccgggaaagggtatcactatgaaacccgcgaagaggcctttgaagcactgctggggtttatgcagagctatccgctcaaacgcatcgatgttggtgtggcccaggtcaatcttggctggaacgggcattttttcccgtcgtttcgtgatgcgtttgatccttatataaacctgcgagcagcagcccgtatcctccggtcatgctatgacgcaaagcccggtagctggataagagctgctggttgctatcaccaccctgcaggtggacaacccgctgcgaagtatatggctatcgtacgccgcaagttaagtcagattacaccggagattaaggtccctgacggggagccggttgttctggccagtcactcattaacctgggtagagcctcaatga

SEQ ID NO: 82205 - DNA, 531 bp, Citrobacter koseri
atgaaaaaaaatcatagcagttatttaaaacccgtcctgtgtatatatcttttggctgctgcgttcagctgcctggcttcactgaccgttgttggcgatctgggcgggaagccaacccggccgtattttgatgccattaatgcagaccctgattcgcccgctcctgatatgtcgtccctgccgcaacctcctgcatcactgtcaatttctgacatgttgcccgttattacacctgagatgacccctggtactgtgtcttcacgtccactccagttgccggggcttccgccagtttttgtggtcggtgatgacgagatgtcccgggcgtggttgcaacagcgtggtgctgaactgaaacggatgggcgccacgggaatggttgtggatgtcaggacggaaggggctctcgactcactgaggagacttctgcctggtacagagatggtgcccgttcgtggcggggatttagctcagcgactgaaactgacccattatcctgtactgattacgtctgatggattagcacaatga

SEQ ID NO: 82206 - DNA, 555 bp, Citrobacter koseri
atgacacccgtatttcttctgctggcagccgtgtttgtcgtcgcgtttctgctgctgcgcaaaaacagaggtgcgcgtgcgcgcaggcatcagcggtaccgacagacggccaaccgtgtattgctcaaactgccggaactgaaagccggtcagcagattttgtatttacggaaaattaatccttacgtctttgaggaaatgatcctgatggcgattgagcggcagggcataccggtaagacgtaatcagcgctacagcggtgatggtggaattgatggccagttctggatcggacaggaaaggtggattgtacaggctaagcgatttgccagcgctgttcgtccggaacatatccggcagtttggtgagttagcgagaaaagaaaaatgcaaaggcctctttgtgcacaccggccgcactggatttatcagctttaaacatttcagtgattaccctgaaatcctgcttgtaagcggcgcttcacttctggatctgctgtcgggagagtccgctgaatatattcttaaaccgttaaacaagagaccgtacaaatga

SEQ ID NO: 82207 - DNA, 855 bp, Citrobacter koseri
atgttgaaacatacggtttctgacgaagacgaggatctagttgaagatgttgagcacttactttcagaaatgactcctgcggaggtcgcttgtttaagagagattgaaacacaactgtcacgccccgaagccgttgactcaaaactgaacacagtgaaatggttcttaacggaattccgtaccgatggaaaaacttggctggaacacggctgtattattttcagccagtattacgacacggcggagtggatagcgaaagaactggccaagtccttaaaaggcgaagtggtagccgtttatgctggcgttggtaaaagcggcttattcaggggcgaacagtttaataacgttgaacgcgaattgattaaatccgcagtgaagacgcgcgagattctattagtggttgctacggatgccgcctgtgaaggcttaaacctgcaaaccttgggaacactcatcaatgtcgaccttccctggaacccatcccgtttagagcagcgcctcgggcgaatcaaacgttttggtcagacacgtaagtttgtggatatgctcaatcttgtgtacagcgaaacacaagacgagaaagtttataacgtgctgtcggaacgcttacgcgatacatacgacattttcggcagccttcccgatacgattgatgatgaatggatcgacaacgaggaagaactcaacactcgcatggatgaatacatgcatgaacgaaagaaagctcaagatgcgttctccgttaagtatcgaggtactctcgatcctgatgctcatctctgggaacgttgcgctacagtactgtcacgtagggacattgtaagtaagctcagcgaaccatggggaagctaa

SEQ ID NO: 82208 - DNA, 1116 bp, Citrobacter koseri
ttggccatcttatcgactgttttccagcgtaagatggctgagtggaatgaccatatcccggtagacagtttctgcccgtacggtgaggcattttcagaaggaattattgtggcgactaaaatgtggatgatccgcggcgatggcggaaaattgtacgatgactttagggacaaacaggttgttgcaatcggctggtcgcagctcgctccctatgtgaaaccgggatgttcaagagagcagttgtttacccggtatcaggagcttgagccacagactaagcctggcacagttcgttccggtgcttcccaggtctggcgctttgtgaatgagatgcagaaaggcgactgggctatcacttattcaccttctaatcggacctatttaatagggaaaatcgcctcagattttgagtttcatgctgagtggcttgaagatggcatgggcattgcgcgtaaagtgaagtggaacgcggaagagattaagcgcgatagtctgagtgatgcaaccagaaacacccttggctcaacgctgacggtttttcaggtgcctgattttgccgtgaatgaattagtgcagggcaaaaagcctgtctcagatgtcgtgccggaagtatctgtctcagatgaagaggatgaggtcgtttctaatcctctgcgcgacatggagatgatcgcttttgaaggtatcaaggatcgtatcaatcgtctcgactgggatgagatgcaaaatctggtcgctggcgtattacgcagcatgggatataaaactcaggtatcgcctgcgggtgctgaccgtgggaaagatattattgcttcgcctgacggttttggcttcgaaaatccgcgcattattgtggaggtgaaacaccggcgggagcagatgagcagccagcaaattcgtagctttataggtggccgtcataaagacgatcgcgggctgtatgtcagcacaggcggattcagcaaggatgcgcgctatgaggccgatcgttctacaatcccgttgacgctatggacacttgacgatttggtccgtgcgttagtggaaaactatgagcaagtggatattgaaactaagctgttggttccactaaagaaaacgtacttgcctgcctga

SEQ ID NO: 82209 - DNA, 231 bp, Citrobacter koseri
gtggtactgcgctcgctggtgagtccgcgcaatatgcaggtatcgcagggcgggctggtgtacaacgggtttggtgggaatgcgggagataacttgaatgcatcgcaagcgttaagccggttggggagtatcgccggaatgtcggtttccagcctcgctttgttccctgctttcgacagcgtgcgccaggcgttgccgatggtgcaggcattccttggaatggccttgtga

SEQ ID NO: 82210 - DNA, 234 bp, Citrobacter koseri
atggagataatttatagcgaaaacgcagcttcgcatttcaacctgtacggcttacagaacacttctgatgatttgatcgtcaatatggtgatgggggcgatgtttgttgtgttgcccgcgttctggccaggaggactggtgagggttggcggtgcggtggccgggatcatgtctgcgggaagcggagatgttaagaatggtggtgggcaaattggaaaaattatactcaaataa

SEQ ID NO: 82211 - DNA, 924 bp, Citrobacter koseri
atggaattgatgtttaactatcgaaaaaatggtaatcacacccatcaggtgcgcttattatctccgcttggggtttatcccattaaaacatttattatggatgattctgccctatttattagcgaggatatttgtttttcggttacacctttagtgactttcgttgactctggatttgaagatgaagggtattataccgagatggaatgggcttctatcaatgaaataaagttatactcgtcggtaatactaagtcttgatagaatgcatggttattcagttagttatccttattcaacctgccattatgtgaaaatgagtggtgatgtatctggctatctatctgaaataaaaaaagaattaactaaggcaataattatatctgctggagttaatggatggcatccattcagaggacagaacaatagaggtttgtctcttcctccagtgacaagtgatggggaaaaatatgatttaagagatcaaggattcgatgtcaaaatacaggaaaaagtatttgagaaagttgatgtaaataattttatcctaatcagaggtttatctaccttactgagaagtagaatgttattagttcatggatattttatggaggaagccatttattctctattcatatcacttgatgcttcatttaatatggtattagataagctaaaagaaattggaatatctaacccaacctcgaaagatgcagctatgtttatctcaaagacatttaattctccagaaacagaaaaatattttggtgaatattatgaagatagaataaaaacatttcatccaaaatctagatttggtgcatatcctcatgccccgttgacaatagatgactatttttttctttctgaggatcttattactgtttatttgtatcttacatgtggatacgtatcacaagaatga

SEQ ID NO: 82212 - DNA, 1008 bp, Citrobacter koseri
atggctggcaagatgtggatgattcgtggcgatggtggaaagctatatgatgattttcgtgataagcaagtcgcggcgatagggtggtcaccctttgcaccacatgtaaaaccggggttatccagagaacagttattcgatttataccaagagcttgaacctcaaattaaaccgggaactgcacgttctggtacttctcagatttggcgctttgtgaacgaaatgcagaaaggtgactgggccattacgtattccccctctaatcgaacctacttgttaggaaagattgtttcagactttgaatatcacgcagagtggcttgaagatggtatgggcattgctcgccaagtgaaatggaatacggaagaaattgatcgtgataacctgagcgatgctaccagaaatacattgggttcaacactgacggttttccgtgtgccggattttgctgtgaatgaattattgcaggggaaaaaacctgcacctgacgttacgccagaagttcctggttcagttgacgaggaagacgccgtatccaaccccttacgcgatatggaaatgatcgcctttgaaggcatcaaagatcgtatcaatcgtcttgattgggatgagatgcaaaatctggtggcaggggtattgcgcagtatgggatataaaactcaggtatcacccgctggtgcggataggggtaaagatatcattgcttctccggatggtttcggttttgaaaacccacgtattattgtcgaagtgaagcatcgccgtgaacagatgggtagccagcagatccgcagctttatcggtggccgccataaagacgatcgcgggttgtacgtcagcaccggaggattcagcaaggatgctcgctatgaagccgatcgttcaacgatcccgctgacgttgtggacactcgatgatctggtgcgtgcgttggttgaaaactacgaacaggttgatattgaaaccaagttgttagttccattgaaaagaacctacttaccagcctga

SEQ ID NO: 82213 - DNA, 231 bp, Citrobacter koseri
atgctggctcaggccgtcaggaatacacgcaagcaacgtaaactgactcaacgtgaaactgcagaaagtatgggcataaaacaatcaacggtttcagagtttgagaatcatcctgaggggacccgcctgggtacgctctttaagatgcttgctgctctggatcttaagcttcaggtcgtaagccggaggggcgaaaacaaatcgtctgataactgggaccaggagtggtga

SEQ ID NO: 82214 - DNA, 165 bp, Citrobacter koseri
atgaaattatttattaacggaattattcacttgtatcacctttttattttagcttctgaaataccaacatccatatttattaaaaaacgcaaaaatattataagacatcagtttgatatgataccttgggatatcaacatagatgtagaaacgccttcggtataa

SEQ ID NO: 82215 - DNA, 381 bp, Citrobacter koseri
atgataattggatatacgtctggaattttcgatctttttcataaaggtcacaggaactatttactagcttgtaaagaatcatgtgactttctaattgttggagtcgattcgaattatagggcaaaaatattaaaaggtgacatcagacctattaacgatatttcaactcgcctaaagcacgttagcgtttattgtgattacgcgttcgaaaaaatagaaaaatctggtgtatacatcaacaaataccaccctgatgttttttttcgctcgagagataacatgttaaaaatgcacaaagaaaatgacaaaatcatatacataccttataccgaaggcgtttctacatctatgttgatatcccaaggtatcatatcaaactga

SEQ ID NO: 82216 - DNA, 1041 bp, Citrobacter koseri
atgctcacttattgtgtttttattactctgttaattatcttattgtctattatactatataaaataaatcctaaatacatctattattcttttttattctataagaaaaaaataagtcaagataagaatttatttggtaaatgcattcagtatataaccaccacttttttgtttacagttctctatttttttattgaatatgttccattctcggattttcttggcaaagttatgccattattgcccgactatgttagtgctttattactgtctctaaaagggaaaggtgcgtcaataacaattatattggcatcaatagaatttattggtttgttatttttgttttttattttcatgaagatgccagcatcgtcaaaaaataaaatagtcaatgaggtaagtgttgataagattctaagctatagaaatataaatatattctcatattttggatcgatagaagatacaagggatattcaagtaattgtaacgtctgagaatagtgatttagaattagctagcttttcaagtacatcaatatctggcagggtaagaaatatggcatcatcaaaggatgatgttgggaatgttatatctgatccattgtatgaaaatattgttcgttttaaaagagcacataacaaatataatgattttaatctagggacatgcatttcctcgcaacctttgaagttacaaaaacatggtgtgaagcgtgttattcacgcgatcgcaatcaaaaaaaataccgacaatacaataagttacgacgtcattgctataaaaaaaataatttcctattcaataaagagttgtatcaacgactcttttgaaagcatttttattcctatctttggtatcggaagcgctcaacaagaccctacggatttaattattacacagttagaatcaataaaatccgtactggatgatgagttaatgcgcaccacatccacgttgagtttgaatatttatttgggcgtttatcgcgaattggattgtttatttttaaaaaaatcagcaataaaaaaatttaggtag

SEQ ID NO: 82217 - DNA, 573 bp, Citrobacter koseri
atgttaacttcaaaggaatttacatgttatcatggtaccacattgagcgccattccgtccataataaataatggatttaatttgagtcaatcaaatgaggattggttagggcatggcgtatatttttttactgatggtatatcagaccctttaaaaaatgcaattgaatggtctaaaaataaaagtaaaagtaaaagtaaaagtaaaaacgatgatatctgcataataaaagttaaggtaaaagtcgatgattcagaagttttagatttgagaaccaccaaaggtttaaatgtatataattttcatagggatagcatcattgacaattactatgatgtattaactaagagacgtgacatcactataaaaaaaagaaaagataccagagtagatgattgtactattatggatatcttacagcagacattaaattataaagtaattatacataatgtttatataaagaattatcaccaaagaaaacttgcattagagtcaagctatccaaatagtactgttttatgtgttaatgacctttctggcataaatattattgatgttataaatatttaa

SEQ ID NO: 82218 - DNA, 1362 bp, Citrobacter koseri
atgagaagaatttcagtctggtcaatgctgttggcctcagctattgcgatgtcaaccgccacaacggcatacgccgatagccaatggacagccgccaccacgacctttcctggtagcatccgtgccgggtcacgggaagttcccgtcaagcccggagataaaacggttatagccattaagagcttgcaggcgggcacgaccgtcaccattctcaatggtgctgaagtcctgacaccgaaaccactgaccgccgacgagaagggaaacctcaatattccgttgaccgttccggccgatgccgcaacaggccttcatccactcactgttattacgcaaaaccccgcgagcgtttcgcaggtcatgttgaaattgtcccagattgtcccgccaaaaaacacggaggctttcaggctgcaaacaacgtccgtcggtgagcgggcttaccagtcggcagtgtcggctgacggaaagctgttcgtgacttctgcacgcggcccgaaggatggtagccgcctaatgagactgaatgccagaatcctggctgtcgaagcggaggcaacactgcctaaagacaaaaagggtgagcagattggtgtcttcggcgtcggtgttgataatgcccataatcaggtctggacgacgaacacccttgccgagacggtgaccgtctatgacgcaaaaacgctttccgtcgtgaaggttttcccggagggatcggtctcgcatccacgcgatgtggttattgatgaagccaacaatcgggcctatgtcagcgcggcgctgaccggttttgtcgaagtgtatgacaccaaaacgctggagcacatcggtcagctggagtttgtggtggagcgtggcaaaaacctgtttaacagtaccgatcttaccctcgatagcgctggcggcaagctctacggcgtcagccgcgatacgccatgggtaggctggattgatctcaaaaccggcaagagtacggcggtgaaagtacctcaggcgcagggcgcaaccgacatcgctcgcgatccgcagactggccgtctgtatatcgcgtcccaggagacgaacaatgtcgtggttcttgatgcggacggtaaggtacttgcggatacctatattggtgccgggggagtatctgtcgtctgggatccggtgacatcgcaggttttcgccgccacgcgtgcaggcggaaccgtagcagtgctgaacaaggacggtaaactggtcgctaatatcccggtggatgatacgccaaacaacctgaccgccgggcctgatggcgcagtttatctggtgtctatgtatggctcgatcggggataaagttcagacaggctcagtgacgaaaatcaccgccaaaaaataa

SEQ ID NO: 82219 - DNA, 669 bp, Citrobacter koseri
atggtctgcctgacaaaaaagctgtcccatacgtttatactgaccgtcatcattgccaccgcggggtgttcgtccacatcaccggtaaaatattccggcattgaggccacgtccaggatgacgcccaacactgctgacgacagcgaccggatccccttccgctacgctgctccggttgactggagtaaataccgcaacatcaccattgctccagttgatatctatggcgggagcgacgcacagtttaatgacctgtctcaggaagaccgacgcaatctggcagactatatgcaaaagaagtttgccgaagttctgggagagaagtttactgtcaataaaaacgccggaagcgccccttctctcaggcttcagttgacactgaccggcgcggacacgacgccgcaggttgtgggcacttttacaaaattcgacctggccggaggtccttataacatcgttcagtccgtgcgtggcgggcgaggactgatgagtgggtacgtcaattatgtcgttgaggtgaaagatgccgcgaccggtgaacttctgctggcctatgtggcagagcagtatcccaacgccatgaacgtaggtgcaacgtttggctcaatgagcgcggcagagacaggagtggacaaaggcgcggagcagcttctggaaaagctacactaa

SEQ ID NO: 82220 - DNA, 486 bp, Citrobacter koseri
atgctgtacatcaacccagaattttttttgtcaggcaggacttacaatattcgtgcacttcaggtgcccacggcagcactgagggagaagatgccggagaccatacgggaagtgagtactgaacgtgccgattttatagggtgtctgccactccgctattctgggctgtcgttgcggcgcagacttataagactgatgctgacgctgcagaaatatggcgaagccagtggtggccctgaaagccgggggcggggcgccttttcaccagcagaagattatgcgcggagtgttatagatagggcgatggttcgcggagaactgcgctgccagccctccggtgcgatgacctgcgcctttctgacacagacagaggaactgcggagcataatggctggcgttcagcaggatatggcgcaacttcgaaaagaagtcaggcgcaaaacggatgattttctttggcggtttgcagcgggaacaaaagcatga

SEQ ID NO: 82221 - DNA, 291 bp, Citrobacter koseri
atgaatagctggcagatagccggggcgctggaaatcatgccaacgcagcaatggttcgtgtacggagccatgctgataagcgttgcatgcggtttgctgagaactgccggtaacctgtgggaattgtttcgcctgcatcgactggggcggcgtcgggccgtatactatgctgtcagggtgtggcgggcttcaccagggctgctgcgggtatttctcatggtggaatgcctcgttgtggatactctgtgtgcgctggtgctgctggtactaaacggcgtcaccctctggtga

SEQ ID NO: 82222 - DNA, 207 bp, Citrobacter koseri
atgacaatgtttgttgcagaggttctggtggctccgtccatcaggatcctgtttattactcatgttttcggggttgtcattataactgcatgcaggaagcgtcagaaaaaagcccgccggaacgcgggctggcagggtcagatgtggctgccgatggacagacacccggtaagcatcaatatcataatgccagtgaagagactgtaa

SEQ ID NO: 82223 - DNA, 618 bp, Citrobacter koseri
atgcgaacgctgactgaaaagaaacgaactgacatcctgaacgccgccactacagtctttctcgagcaggggtatgaacgcgcctccatggatggtgtggccagagccgcagagtgctccaaggccacgctctataattatttttcctctaaggaaatgctccttgacgccgtcgtcagggcttatggcactaactttctgacgcgcgccgccgatgaaatttgcagtcaggagaaccgccatcttcccctgtctgaaaggttgcaacgttttggcgagggaatgctgggaaccatgacatcggactggaaggggcttcagctgtatcgcatggttgtgggcgaggcaggccattcacgtatcggcgatattttttatgaatccggtgtcagggaaagtatgaacgctcttgcgacgctgatggagcagcatattgaggacggcgaccttatccccttccgaccggatttgagggcaaaacagttttctgcgctggttaaagctgaggctgacgagcttttcctgctgcacgatatgcctgtgtatacgcgcgaagatatcgccgtaatggtaaaaaatgccgtagacctgtttttatcgggcgcatcactacgctga

SEQ ID NO: 82224 - DNA, 366 bp, Citrobacter koseri
atgaaattttcgattctcaggcattttcgttctgcttatttccgtgcgggatatctgttgctgaccggattgctgtctgcagggcaggccatggcagacctgccttctgttgaagccccgacttcaggtggtggtggcgggacctataacatggctatgggatatctcaaaatgggggcgcttgcggtggggcttctcgtctgcgtgggggcattctttgctgtcgcacatgcgattattacctccttccacgatattcgtcgcgggaaaggcgaatggacgcagttccttctctacctggttgtcggcatcattctcatcctctttgtgatttatctggcaaccaaagcctctgaaattctttaa

SEQ ID NO: 82225 - DNA, 381 bp, Citrobacter koseri
atggccgtcatcgattttcttcctgaccgactgaataacccccctgtggtgtggaaaggttttacttccggggagtttgtgctggcggcccttactggcatcttcgccggcatcccgccagcagtaccactggcgatggttccctttatcggctggctggcatttccgacgtgcatgctgctgatgccgctaatcgttgtcttttttggcggcaactggattgcaggttacaagcgtggcaaaccagaaaattatatctggcaacgcctggaggaaatgcgctgtcgtgcccgcctgtcccgaagcatgattctggacagcagggcatgggaactgaaacgaacgaaatccgttccgttcatgcgcggagggaaagtatga

SEQ ID NO: 82226 - DNA, 882 bp, Citrobacter koseri
atgctgatcctcatgctggtatcgggtgcagcccgtgctgttgagctgatgaaatgggaacgtatcccgttacaggttcccctgacagtcggtcaggaacgtatcgtttttgtgaataaaaacgtgcgtgttggattccctccgtcgctcaacgacaagctgcgtattcagagcaatggcggtgcagtttatctcgatgcgaaagaagctttccccgtgacgagactggagctgcagaacgttgaaaacggagaaatcattatccttgatgtctcggcttctgccggcaaaacagtcagagaaccggtgaaaattgtctacgacggagaagtggccaccgctaccgcgagcgacaaacaaatggtaagcagcaacggtgacagcacagtccgtcagtcgtctgctgaggctaaacctgaaacacggaggttcgcgaaactcagtgcgccgctgcccgttgttctgacgcgttatgccgcgcagaacatgtatggcccttcgagaacggttgagccggtgccgggtatcagtccggtttccctgaaactcccccccaggatcaccacgattatgccttctgagcccgtgagtgtcacaccgatggctgcctggagcctgcagggtagcagcgttatcgcgctgcaggtgcgtaaccggtcagcaggaaaagtgattcttgacccgcgagtgcttgaaggtcagttcaccacggcgactttccagcaccgctggctggggcgtgccggtacgccggaagatacgacggttctgtatctggtcacgacagggcgtcctgaaagtgcctttattgctgaactccctttacccgcaactgaaacaggcaaggggagtaagcggagcaaccagggagcgcatcaatga

SEQ ID NO: 82227 - DNA, 1521 bp, Citrobacter koseri
atgaaaaagccttcttcaaacctgattgtgaaaatcgtggtccctgtcgtcatcacgggggccctggtcattggcattaaatcctgttctgacagaggggctcagggtgaaggagtttcgaataatacgaatgtcgccctgaaagatctgacaccagaagacctcaaagcactgggcgtggaaggtgataccgcgcaggatacgttgcgcaccattgttggcagttaccgcaaggtacagggtcggctcgatgaccttgaaagcaataataaaatcctctcagatgaaaacaaggatctgaaaaaaaagaatacgaatgttgatcaacaaatcagccaggccgtggggcaggttcgttctgaagaagctcagaaacgctctcaacttagtgcccaggttacagacctgagtgctcaggtagaccagctccttgaacagctcaaaaatggcaattccgggtcaactgcaggcaataataatccacccgcaggcagcgatattccggtggggctgggttatgacaatggtctctctggcggaacgggaagtgtctccccgacagacgctaacggtctgaagtgggtggagccgaaagacggtattgccaccgatgcgaacgggcgtccggtctcagataaaagcggcagtaatgccaccggtttttcttttgccacctcctttggcgctgcaggtgatgttgcaggacaggcgacctcagcggtcggtacagtggtgcagaatacggtctccggcgctgataaaaatgctgaacctgtttataccctgccggaaaactccacacttgttggcagccgcgccatgacagcgttgcttgggcgtgttcccgtagatggcaaggtaaccgatccgtatccgtttaaagtgatgatcgggaaagacaacctgacggcaaatggcattgaattacctgatgtccagggggcgattgtttcaggaaccgcaacgggggactggacgctttcctgcgtacgcggtgccattacaagcatcactttcgtctttactgatggcacagtccggacgcttccttctcctgacgggcaggggcagaacggcaacagtggcaaccagaacaataacggcagtatcggctggctgtcagatgacaacggcgttccctgcatttcaggcacacgaaaatccaacgcgtcgacctatcttcctaccattgctgtcctggctgcagccagcgctgcgggagatgccgtgacggaaaatcagaataccagccagaccaatggttacggcggcgtgacgtcaacgctcaccggtgatgccgggcaggctgttctgggtaaggcgttatcgggcggtacgcgtgagactgttgactgggttaaggcgcgatatggtcagacgtttgatgcgatttacgttccgccaggacagaaagtggcgctacacatcacacgccagctggcgatcgattatgaagagaaaggccgcaaggtgaagtacgacgatttcagccttgccggcagcagcacgggtatggactga

SEQ ID NO: 82228 - DNA, 249 bp, Citrobacter koseri
atgcaaaacaataatctcgaatttcgtgtgggttataccccgctcggtgggcggctgtatgccggctttgtccgaaaagacagtggaacgtgggaagggcaatgccatgaggtgactgaacaggtcatgtttgccctcgggcagaaactggcccgtgaaggtaacgatatgcagttttcactgcctgacgggcgcgtgcttcgcctgtcagcgggcaatgaaacggaggcgccggatgttcggtcttaa

SEQ ID NO: 82229 - DNA, 414 bp, Citrobacter koseri
atgttcggtcttaataacatggtcagaatgatactggtcgttttgccgcttgtgctcatgggctgcagcacgtctaaagaggaaatgttgccgccaggtgacagcaccatgcttgagttgtggaacgatggtgcatcggcaacacatgccactaacgaaagcagaaccaccctgcgccggccggttacagacagtgagcgtgaaatcgctcagcaggtccgggacagctatagccgcacccaggaaaatgaaattcagcagacgttcccgcgtctgccaaatcctgacatggtgatgtacgtcttcccgcatctggctggcggtaacacaccggttcccggctacagcactgtctttcctttctacagtcaggttcagtacgcactgcctggtgaacgaacgggggatctctga

SEQ ID NO: 82230 - DNA, 405 bp, Citrobacter koseri
atgaaaaaactgatcatgactgcgccgaaggttgtaccagacaaggctctgcttgccactgttatttttaccgttccgcctgccggttcggcttcagttggtatggctgacagtgtggcgctaagacagctgcagggggagatcgttaaacgactggagccccccgtattgctgtctgtttaccctcatcgtgttggtcgacgcagctgcctggcagtccacctcagcgatgtgcatgagaaaacgctggatatcctgataacggtcaccggcaatacgttgtggccgggagagcaggagtaccagtcgggcctgcggtggaatatttgtgtgccggatgccacagatatgatgtgggtgctgaaggagattgacagagtaaccagtgaacccggatgtgaatga

SEQ ID NO: 82231 - DNA, 2220 bp, Citrobacter koseri
atgtctttcagtagggttgacgctgttacgacttacgccagaaaaggtttcaggggatttttcggcacttttcaatactcatttttgacgctttgcattgcgaatgcaataagcattcaggtggcaaacgcggcagatgatgtaccgtctgctgccagttcaggcgcagaacaggttatggttgtaacagccgatggcagtggaggaactaaaagcgaacaggaaaagtcgtacaccgtgccggcaacccgggcaggaacgaagatgaacctgacgctgcgcgatatcccacagtcagtgagcatattaacgcagcagagaattaaagatcagaatctgcaggatatcgggcaggcgctggctaacgttacgggcatttcagcatcgcagaatgactcagaacgcgtggacttttactcacgcggcttttacatcaataactacacctatgatgatattccctccacccagacgggcgcgtggaactttggtgaaacggacggtgattcagccatctatgagcgtatagacgttgtccgtggttcaacgggattgatgaccggcacaggtaatccgggcgcggccattaacatgatccgtaaaaaggccgacagtaaaacctttgccggcaatctgtcagcaagttacggaagctgggataaccagcgctacgttgctgatttatccgggccgcttaatgagtcaggatcgcttcgtggccgtgtggtgacgggctatcaggatcaggacagctgggtggatcgctatcataaaaggaagaagttcctctacgcgaccatggcagcggatattaccgacaacaccacgctggacctgggttatgactaccagagcaggaacaccgacgggccgacatggggaggattacccacctggtacagcaacggcagccgtattgattacaatcgtgaagataacccttcagcggactggacgcattacaatattttgtcacgcaaggtgttcgcgaacctgaccaccaactttgacaacggctggcaggtgcgtcttaacggaacacatgttgaatcaaattttgacagtaaactgctctatgtttctggttacccggatcaggccaccggtctttttaccagcgctgctcccggctttgcaggctggtataaaggcttacgtactcaaacagcggtggatgcttatgctactggcccgtttgaattgtttggccgtcagcatcagctagtcgccggtctggattacagtcgtcagcgcaatcgctacatctattcatcctcgatgctttcaccgactgatattggtgactggaacagctggaatggcgatgtcgcagaaccggactggcctgcatgggcactttcagaagagaacactatccgtcagaaagcgggttatgcaacagcgcgcttctcgctggcagatcccctctctttaatcataggcgggcgttacacacagtacagcacacacggaacgtcggcagatatggagaagaacaacctgacgccgtatggcggtctggtgtatgaaatcaacgaaaattactccgcttttgccagctacacctctatcttccagccgcaaacctaccgtgaccagcagggtaattacctgaaacctgtcaccggtaaagactatgagaccgggataaaaggggactggaataacagccgtattacggcaagcctttcggtgttccgtattgagcaggataacctgggccagattctgagtgatacgtacgtcaataacagcagcgaaaacgcctacaaggcggcgaagggcgtagtcagccgtggtgttgattttgaaattaatggagcagtcactgacaatctgaaagtaacgtttggcgcaacgcgatatgtggctaaggacgccgatggcgaccgcaccaacccgtacatgccgcagaccagccttaaattgttcaccagctataacctgccagttctgccagaattgactataggtgggggcgttaactggcagaaccgcacctacaaggaagccactaacccttcaggtgtcaccgagcgtatttaccagggaagttatcctctggcaaacctttttgcccgttatcaggtcaacaaaaacctgtccgtacagggaaacatcaaaaacctgtttgatcgagagtacaacaccaacccttctggtggagtggccttcaacgagccgaggaactattcggttagcgtaaattacaacttctga

SEQ ID NO: 82232 - DNA, 408 bp, Citrobacter koseri
atgaaaattccattttgctgcctggcagcactgttcctttcggtcggcgcccgtgccggtaccgtgatatataccgactcctctcattccgtcactgttaacccgggggtgggggttatcgttgttgagcttgatgcacccgagcgtgtgcaggcgacgattttcggtgaactgtctgccgaccccactcttgcagagcaacgagcccggacagtgattgcttcacctgatttccgtcagcatcagcaacaactgactgaagcttatgtcggtgtcacccgtgcctggtttgtcgggctggaaaaatacccggccgtagtttttgacgaccgatttgttgtctacggcacgacggatgtcagcgaggcaacccggcagttcacagtctggaaggagaagaaccagtga

SEQ ID NO: 82233 - DNA, 339 bp, Citrobacter koseri
atgcgattcttttctttcagcggccgtaccggccgcattctctccctgctgttacttatcctgctgatgacggccggcatgtttgccatcgcagcggttttcatggcgtacgatcctgatggccacatcacgagacgctggttgcatgacagccggtgggggctgtttgcctggcgaatgtccctttacgcagccctcaccgcggtctggattatgaaagtccgtccactggccgtcatgcgctggccggatgcacgtccacggctgatacgcatggagctgctcgggatatttttcctgctggccacagagtatgtggcgtggacaacggctgtataa

SEQ ID NO: 82234 - DNA, 1521 bp, Citrobacter koseri
atgaccgcaaacagttttctggaatactttctcgttctgttcggctgggtaatgaacaatgctctctggggaatacttggtaacacggggctttttgccctgccgctggttttcagggttctgggtgtctggctgaaagtgagggaagagggggccgacgaagggaacaaagggcttcttgctcttccccgtatcgagcacgcgctgtatgtgtcctacctggtcatgctgttttgctgcattccgctgctgccggttgatatcagtgctattaagtttgacagctcccgcgcaaaacagtgtggcgtcagcgtgccgacaccacagaactcgggctacaagggactcgtcaatgattttgacgggcgtacagctgaggttccgatctggtggtaccttctgcacatgatgtcgaagggcacgacgcagtcaatgattgcctcgatcccgtgcggcaacaacctgcggcagatgcgcttcgacgtacaaagcacaaagctgcgtgaccccgttctgcgtcaggaggtgcaggaatttgcagaccagtgctactccagagcgtatttcaggctgaaaaacagcaacagtcagctcagtgatgccaccatcaactcggtgggctggatcggcagcagctacttcctgaacacttccggatactatgattactacacggccatgacgccacgcagccagtggccctacgacagcagcagggacagtggttatccggacaccggcgcgggcggatatccatcgtgtaagacgtggtggtctgctggttcttcaggtttgagcgcgcgggttctggccagtttcagtgatgttacccgcaagtcattgcagcgtcagttccccggacagcagtgggaagaggtagctttacgctggctcgtgagtccacaaaacgttggccagtctgaatccgggacgacataccgtattggcagcaatgattttgttggtacagcaaatggtttgatcccccgggcgctgtcaggcgtgggactggctatggggcaggttatcgccttacccggttttgacgccattaagcaggcgctgcccatgattcaggcgctgctggaaatgatggtcatcatagtgatccccgtgttgcttatgttcagcgcttatgagccaaaatcggttgtcaccatctcgtttgccttctttgccctgatgttccttacgttctggtgggaacttgcagggtggctggatgaccggcttatcactattctatataccggcctgtcagagcagggcatgggaagcagtgttccactggaggattttgtctcgtccacctatgacggctggctcatgaacctagtgctggggatgatgtatctggtgtttccggcgttctgggtcgggatgatgagctgggtaggggtaaatcttgggagtgcgatgagttcggccttagaacgtggttcaagtgaagctctgaagtccggtcaacgtggtgggcaagaaactatgagtttagccaagaataaaatcagcaaagggtaa

SEQ ID NO: 82235 - DNA, 228 bp, Citrobacter koseri
atgggaaacctgaagatgaatatagccagtgtgttaggcactcggttgaaagaagcacttgccagtgatgcaaaatttgttaagaaagcttttcctttattgcttaatacggcgtcttccacagctcaacgcgaactggaaaaacaaaaaaatagtatcgagtatgaatttagatgggggacatggcaacatacagggtcatggcgcgaagacgaagaccagctatga

SEQ ID NO: 82236 - DNA, 447 bp, Citrobacter koseri
atgattaaagagattctggctacggtttccttgttgtctgtaactggtatatttgcccaagacggattgactataagaaagctagcaactgataacgcaacgaaaagtgtatttcaccagatggctaaagggcaccagttaccgatttgggttatggttggaggtacaaatgctccagtacaagcagtaaccctgaataacaaaatttaccaaattatcagcgcctgtaagcctcacgactgtaccagtgaacagatggctgttatctactcaccggataataatgacatgtcaggcctgtattccgttgttgatgagaaaaacggtcaacaaacacttgaatggttgaatatcaatgatgaactctctattgacggcaaaaccgtactgtttgcagcgctgagtggtagtcttgaaaaccatccagatgcgtttaacttcaagtga

SEQ ID NO: 82237 - DNA, 633 bp, Citrobacter koseri
atggaaaaatatatttattttattaatagtaaaaatattaatatattgttaacagatgattgctatctatatcgagggctaaaagagatcactggtatgcctctgatacatatgtcacttggcggcacgatgaacgcaagtgaaaaaataacagggaaagggaaaattcgtgtattaattgataacagaatattttctgcgggagaatggcgaggatttatcagacttaagaaacttcttcacgctggtgctgactggatttggcttgatatatatgggcactgtagattctatcccaaggggagcgaatatgatatttatgttgactttcagggggggatgaacaacgcattatcagcactttataaggcgtatgtcagaaggcgtgtgaattatcttatgtatcactatccaagactgactaatatggaacttcatatccttcagagaatgcttgataaaaaaacactaagtgaaattcaacaggaatttaaacttaatgaaaaaaccgcaagtggctatcgtagccgcattgtgagaaaatttggatgcaggcgttatggagagtttattttgctctatgataaaaacaaacaaactgttgaccaaaaatggagaaaacctttactttaa

SEQ ID NO: 82238 - DNA, 135 bp, Citrobacter koseri
atgcttaaaccccctgacatacttgagtcggagggggagcagcaggttaatgaacaaaatataacgtatcgtatgctgtttaaagaaggggaggagaatgcgtattttaatcgtcatggtattgttggtttgtag

SEQ ID NO: 82239 - DNA, 444 bp, Citrobacter koseri
atgcgtattttaatcgtcatggtattgttggtttgtagtgttttagtcccagcttatgcggacggctggtatatcaataaacgtggcgaaccaacagttatgtcggaagatggttactggtatatgatactatcaaaaaccgtccagggggatgttaacatttacctcttaccccgtaataaagctgagtgtcgatcgtctggtcgctcatcgagtatgttcgtcaacggtactaagctgcgttggtggcagaactgtgatgcaaatatgggaatgtattggtacgcttatacacaggcaggtatcaatcacataattggcgagtttattcgtcgtcaaactgtaactattcgggacggcaatcttacgatactgttttctgctatgggcttcaattcaacagcccgccagtttattgacgaactttctaatcctggattatag

SEQ ID NO: 82240 - DNA, 249 bp, Citrobacter koseri
atgccgatcatagccccaattcctcgtgacgaaagacgcctgatgcagaaagcaatccataaaacacatgataaaaattatgctcgcagactcattgccatactgatgctgcacaggggcgcttgtgccagtgacgttgccagaacgctttgctgcgcctgttcctccgtcgggggctggatttactggttcacgcagtcagggggggaagggctggaatcattagctgccgggcgtgccctcagctag

SEQ ID NO: 82241 - DNA, 927 bp, Citrobacter koseri
atgaatcctagagtctggtgtctgggggacgcagcagtagatttactgccgaatggaactgcgtgcctgatgcagtgcccgggtggggcgccggcgaatgttgctgttggcgtggcgcgccttgaaggaaacagcggttttattggccgtgttggtgacgatccgtttggccgctttatgcgcgagagcttggctgaagaaaaggttgagaccgcgtttatgctagccgatcccaggtatcggacctcaactgtggtggttgagctggatgatgatggcgagcgctcattcacgtttatggtgcgtccgagtgcagacctgtttcttgaggagcgtgacctccctgatttcagggcctgtgaatggctgcatttttgttcaattgccctggcggcagagccatcgcgtaccacctcgtttaccgccatggaacggatacacagcgctggcgggtttgtcagtttcgatccaaatattcgccacgagctgtgggataatgaggttcagcttcgccattgcctggctcgtgtactgatgcaggccgatgtggtaaaactctcggaagaagagctggcgtttattaccgattccatgccagaaaatgtcggaatactcgcgctggcagcgcaatacaatattcctctgttgctggtcactcagggtaaatccggtgtgaaggcctgccttcatggttcaatttatcactacccgacgcttccggtggtgagcgtcgataccaccggagcaggcgatgcctttgtcgctggtttgttgtgggggttggcgcaacatggtcttccggacagcgaaacagagcttgccgcacgtcttgcctgcgcacaaatctgcggtgctctggcgacaacagccaaaggtgccatgacggccctgccttaccttcatcagcttaaggagaaacttgtctga

SEQ ID NO: 82242 - DNA, 1548 bp, Citrobacter koseri
atgatggctctttctcagggatacaataaaatgaaaaaaagcacacttgccgtagctcttggcttgatcttaagttctggtgcgactcatgccgccgattcgaatttaagcagtattgaagcacgccttgcggctatggagcagcgtttacaggccgcagaacaacgtgccgttgcggcagaaagtcgcgcgcaggccgccgaaaaacaggcgcagcaactggctgctgcccagcagaaaaccgaaattacagccacacaggtggaacagcgcaccgccagactggagcaaaaagccagcgatgaaggcggcttcgagttccacggttatgcccgttctggcctgctgatgaacagctctgccagcaaaacccagggagggccgacggtgacgcccgccggggaaaccggtggtcatgtcggccgtctgggcaacgagccggatacctatgtcgaaatgaacctcgaacataagcagacgctggcgaatggtgccaccacccgcttcaaagtaatgctcgctgacggccagcgtacctataacgactggacggcgtccagcagcgatctcaacctgcgtcaggccttcacggagatcggttacctgccgagctttaccggtgcgtttaaagattccaccgtctgggccggtaaacgcttcgatcgtgataacttcgacatccactggattgactccgatgtggtgttcctcgccggaaccggggccgggatctacgacatgaagtggggagacgaaggccgcagcaacgtgtccctttatggccgcacctttggcgatatcgagaacagtgaaaacacagcgcagaactacattttgtcgctgaataactactatggcccactgcaagtgatggtcagcggcatgcgcgctaaagataacgacgatcgcgtcgatctcgacggcaataaagtgaagggcgacgccgcgaataccggcgtacatgcgcttctcggcctgcataacgacagcttctatgggctgcgggaaggctcggcgaaaactgccctgctctacggccacgggctgggtgcagaggtgaaatcgattggttccgatggtgcgctgctgccggaagccagcacctggcgcctggcaagctacggtatcacgccgctgggcggcggctggcatattgctccggctgtactggcgcaaagcagtaaagatcgctacgtcaaaggcgacagctaccagtgggccaccgccaacgtgcgcctgattcagggcttcaccgaaaacttcgaaatgcagtacgaaggcagctaccagtacatggatctgcgcccggaaagctacaacagccgtaacgcggtgagcggtagcttctataaactgaccgtcgccccgacgctgaaagccagcgatgttggcgaattcctcaaacgcccggaaatccgcctgttcgccacctggatggactgggatcaccgcctggataactacgccagcgatgatgcctttggcagcagcggttttgcctccggcggtgagtggaactttggcgtacaaatggaaacctggttctga

SEQ ID NO: 82243 - DNA, 1371 bp, Citrobacter koseri
atggattttgtacaaatctcccgctcgctactgccgttactgggaggcaaagagaacattgtcagcgccgcgcactgtgctacacgcctgcgtctggtgctgacagacgacgccaaagccgataccacagcgatcggcaaaattgacggtgtgaaaggctgttttcgtaacgccgggcagttacagattattttcggcaccggcgtggtgaacaaagtttacgccgcatttatcgccgaagccgggatcaacgaatcgagtaagtcagaagctgccgatattgccgcacgtaagctcaacccgttccagcgcattgcccgcctgctgtcgaacattttcgtgccgattatcccggcgattgtggcttccggtctgctgatggggctgctgggaatggtgaaaacctacggctgggttaacccggacaacgccctgtacatcatgctcgacatgttcagctctgcggcgtttatcatcctgccgatcctgattggttttaccgctgcgcgggaatttggtggcaacccgtatcttggcgcaacgctgggcggcattctgacgcacccggcgctgactaacgcctggggcgtggcggccggtttccacaccatgaatttctttggcattgaagtggcgatgattggctaccagggcacggtattcccggtgctgctggctgtgtggtttatgagcctgctggaaaaacaactgcgccgggttatcccggatgcgctcgatctgatcctgaccccgttcctgacggtgattatctcaggttttatcgccatgctggtcatcgggcctgcggggcgtgcgctcggtgacggtatctcctttgttctcagcacgctgattgcccacgcaggctggctggctgggttgttgtttggcggtttttactcagtgattgtcattaccggcgtgcaccacagcttccacgcgattgaagcggggctgttgggtaacccgtccattggcgttaacttcctgctccccatctgggcaatggccaacgttgcccaggggggcgcgtgcctagcggtgtggtttaaaaccagggatgcgaatatcagagcaattacgctgccctcggcgttctcggccatgctgggtattaccgaagcagcgatttttggtatcaatctgcgctttatgaaaccgttcattgccgggcttattggcggcgcagcgggcggtgcgtgggtggtctccgtgcatgtgtatatgactgccgttgggctgaccgggctgccgggcatggcgattgttcaggcaagctcgttgctcaactactgtattggtatggggatcgcctttagcgtcgcgtttgtggtctcatacctgctgaaatacaaaacggaggcggaataa

SEQ ID NO: 82244 - DNA, 1410 bp, Citrobacter koseri
atggcatcacactctctgttgcccgccgtactacaggcggttatgaaagggcagccaaaagcgctgaatgacccccattaccccgcctggcacctggcgccggtcacaggtttgctcaatgatccgaacggttttatccattttgccgggcgctaccacctgttctatcagtggaacgcccttgggtgtcagcacaagcacaagtgctgggggcactggagttcggaagatttggtgcactggcagcatgaaccgattgccctgatgcctgacgaagaatatgaccgcagcggctgctactccggtagcgccgtggataacaacggcgtgctgacgctttgttataccggcaatgtcaaattcgatgacggttcgcgtacatcctggcagtgcctggcggaacagaacagcgacggcggttttgacaaacttggcccggtcctcccgttaccccatggctacaccggacatgtgagagatccgaaagtgtggcgacacggcgaattctggtacatggtactcggtgcgcaggatctgcagttgcaggggaaggtgctgctgcttcgttctgaaaacctgtggaactggcaaaatctcggtgaaatcgccggcagcgggcttaacggcttgggcgaagcaggctatatgtgggagtgcccggatatgttcacgctgggtgacaacacgtttcttatctgctgtccacaagggattgtgcgggaagaaaagcgctggctcaacacgcatccgggggcgtacctctctggtacactggactatgctaacgcgcgttttcagcacggcgcgtttcatgaactggatgccggatttgaattttatgcgccgcagaccacacagacggaagacgggcgttgcctgctggtaggctggatgggggtaccggacggcgaagagatgcgtcagccaaccgttgccaacggctggctccaccagatgacctgcctgcgggaattaacgtcccgtaacggaaagctctgtcaacaaccggtagccgagttgcaggctttgcgcggtgaagagcggttttatcagggcccggcgcagcagatgcccgcgctggatatacagcgtctggagttgatggtggaaagctcgggtgaggtgacgctcagtttctctgagacgctaatccttgagtggcataaagatgaactgcgtctggcccgtcgcagcctcgaaaacggtgaatggctctatcgttactggcagggtgacgcgcagaagttacagattctttgcgaccattcaagtattgagatctttatcaacgatggagaaggggtaatgagcagtcgctactttccggtgcatccggcccgtttaactctgacgggggatgcagaacttcgggttcactactggtcgttacatccctgcatggtagaataa

SEQ ID NO: 82245 - DNA, 1020 bp, Citrobacter koseri
gtgcaaaaaacaaaacgcgtcaccatcagtgatattgccgcactggcgggggtgtcaaaagcgacagccagcctggtgcttaatggccggggtaaagagttgcgggtggcacagaagacccgggaacgtgtacagtccatcgcaaggcagcaatgttaccggccgagtattcacgcccgactgttgcgcgaaaaccgtagccatacgctgggtcttgttgtgccggaaatcaccaactacggtttcgctgttttttctcacgaactggaaaacctctgtcgtgaggccgggttgcaactgcttatctcctgtaccgatgaaaacgccagtcaggaaactgtggtggtgaataacctcgtggcgcgtcaggttgatggcctgatagtcgcctccagtatgcaaagcgatgccgattatgtaaagctgagtgagcaactgccggtggtgctgtttgaccgccatatcaatgacacgaaacttcctctggtgatcactgattcgctgacgcccacagccgatctggtcgggcgtctggcgtgtgtaaatcctgatgaaatctatttcctcggtggtcagccgcgtttatcacccactaaagatcgtcttgccggttttatgcaggggctggagcgcgcgggggtaacgccgcgcccggagtggattattcacggtaattaccacccgagcagtggttatgagatgtttgccgccctgtgtgcacgcctgggtcgcccaccgaaagcgctgttcgttgctgcctgtggcctgctggaaggggtgcttcgctatatgagtcagtatcatcttctcgaaagcgatatccatatcgccagctttgacgatcactatctctatgattcgctgtcagttcgtatagacacagttgtgcaggatataccgcttctggcacagaactgttttaatataattacgaaaatgatcgagggggatgctgttgcggagctacagcgctttcttcctgccacaattcactggcgttcggcatataacccagaataa

SEQ ID NO: 82246 - DNA, 1692 bp, Citrobacter koseri
atgaatcatgccagtgaatccatcagtctgccagaactggccaacaacctggaggccttcctcgaatccagagtagatgaactgtcgaaaaccattacttcactggaattcgatactgccggcattaacgccttacagttcttaagtgaagacaaggagcgcgcagagacactttcggaaagtaaggcttcgctcttgcaggctgaacgacttatgaaaaccattcgagaaacgagtggatttgccggattgcgggcccccattgccagattcagacagtggcaggcagtcagacaggcacggaaagcttatattgaggccgaagcagcatttgaggcgccagacatcagtgctgaacgaaagacacgcattgcgaaccacaatcatcaggttaatattgaaaaatcccgcttgccggatatcaacgacaaaaaggccatcctcaaagaggaaaaatcggctatcaatcaactgcacaacttagcgagcgatgcaatacaagcagcacggaacagaggctggtgtgctccggactttcagaaacaatttgcgagatttgtcgttctggttaaaaacaataagattgagcaatcgctggcccaactgcaaaaacttgtctttcagcggcaacctgcatcgtcagactatgaggaatggaagcgtgaagcaggcaatgtgctatgcaaggcgtatcagcaatacgcggggatggttgcctcaggatcctatagtgaaatagcccgaaactctattcgacttgcgaccccgatgttgaaaaagaaggccggagaaatgcttactgccttcaaccaccctgctgaacaatggcaagtactttccgaatgtctgaccgatccccggaggctcaggacggatgccctatgggccatctattgggccatgtaccagtgtggtcagtgggtctccagcaccatatccgagtctgatgctcacgaagatgtactcactggaaaagtaaccgcacagatagatcgctggcttgctggatgggccacagagcggctccgtaagttcggttatccagaaatgcgctcatacatgggaaccctggagatcgccagtaccactgaggaaacgcggcttggcgcagacatcgggttggttgtggatcttaatatcggaagtcttgtctgtaaaaaagttgctctctttcaggcgaaaaagagtctgtctggagtagcaaacatcggtagtaatgcagggcaacttgcgaaactatccagacgcccgaatacaggcttttatttattttatcaccagtcaccctgtagggtgatggggcctgctccttccgtatgctcagcgcatgaactggaaaaacagctcacactactcggtaaaaatattgatgctacccacttgccgctgaacgtgtatacgatgggctgggactgggccagtttcgtcagttttggactctgcaatcccggttcgcaaacgggagaatcgttcagcacaattgaagaagcattcactatattgggcaatggtgacactcgcaatttgccaaaatatcttcatgtcatctccatcgctgacgaaccaggagtgaaggaattgcgaacaaaaattcatgaacactatagagaaacagccaagagtctaaccaaagagaaaaaacaccaccgctcactcaacaatgatggtccagacctggggcttcgtatgtaa

SEQ ID NO: 82247 - DNA, 336 bp, Citrobacter koseri
atgaacattgagcatgagtttcatgaattatgtgatgctttgaaagggcgtaatttacaggttgtttggtgggcaactgaatcgttctaccataccttcagtgaacgtaaagaatgtttttttctgatactgagcaggcttcttaatgaaaaaaaaatatatcttgcgaagcatgggattttgctgaacggaacggttgacgaacagattgcacgattcagacaggtatttccaaaatcagaggatgaaatggaggatggattctggttcttcgatgaaggctgccctgggggagccgtgtggttacttgaagatggttctcttgaatggacttag

SEQ ID NO: 82248 - DNA, 213 bp, Citrobacter koseri
atgagtaaaaatctcttttttaatgaccatttggttactggtcgtgtgttttttaaattgagggacagaattgcacgtattatcgacagagggtactacgaagtgtcctgttcacaggaggctcatgcacattacggcgataaatccacccgtgctgatgcttctttgtatttcatccatggcgcactgtctgaaattttcagtaaaatctaa

SEQ ID NO: 82249 - DNA, 156 bp, Citrobacter koseri
atgacacgtaactatatgatcctgtgctctggtcaattcaaacagagcagtagtggtattcctgttgaaggcttcatctcccgggcttacaccacaatatgggaagatctttgcgttgacactcttgccggagatgcgggaagagtgtacgcttaa

SEQ ID NO: 82250 - DNA, 216 bp, Citrobacter koseri
atggtggaattttccttaaaaaaggaaaacaaccacccgcccgggaagtgttttcccgtgggggccaggctacatgttctgtccgcgacagaccaaattacccggtatgatgttgaaagaaccttaactcgcacgagcctctgttttcaaaggttaaacagatttaacaaaccacccaaaggcgccactctcaggttctgtggcattggcatgtga

SEQ ID NO: 82251 - DNA, 375 bp, Citrobacter koseri
atgactactttcgctattactgctgatctacttagtgccaatacccgttcaactttggatttcatttccgtgatgtcggatattgaagggatgttacagacagctaatgcgctgaatatttgtggtattccggatagtgtcgatttggatggttttccggaacgatgcagtcagaccattcaccttgccagtgttataggtgaatcccttgagatgaatctgatccctgattctctgcgtaagtttgtcgatgatgtagtcctcacggggaaacgttttgacgctgaaggtgacactaatgcatggagctacggttttatgctgggaaccaaccgcgtacgggataactggcgtgaatgcgaccgggattgctag

SEQ ID NO: 82252 - DNA, 309 bp, Citrobacter koseri
atgagaagtatacttctttcactgatcgcccttgcaacaacacggctgaaccgcctgtatacggctatgaattcacgtcagtcagagtggatcatgaaccgcagcggccacagttgttttcggccggaagttatacctgataacggtgcttttaaggcggtgatctcccgtcgtacgggatacagttcgcgggatttctgctaccagcagtgtgctactgcaggcaggtttgcgtcagcgcgtatggccatgaaggccggacgtgagatggcgcagcagctggcaggacttcgttaccgtttcgactaa

SEQ ID NO: 82253 - DNA, 990 bp, Citrobacter koseri
atgaacaaatccactcgcggccgtaaggccgcgtcgtctcagaaagccgatctttaccagcaggtcaccgagaaaataattgccgccatggagaaaggcgttccaccgtggcgccggccgtggcgttctgcaaagaatgtgcatggcagtgctttaccggtgaatgccacaaccggccgccattacagcggcgtgaatattccactgttgtggatgtcagctgaagagcgggggtttaattccgatcgatggctgacatatcagcaggcgaaggctgtgggtggccaggttcgcaagggtgaatccagctcgatggccattatctacaagccttttgaaaagcaggcgacggatgacaatgacaacaagctgttcgataaggacggtagtcctgtgatggagtcgcttgcaatgctgaaaccactgcagctcttcaacgttgcccagtgcgacggactgccggacgctgtcacaggtgtgcagcaggcgacaacgacagaagatggctgtggttcaatactcagtgagcatcagcaagagcaggtgctggcaatactgaatgcgacaggcgtgacgtgcacgtcttaccgccagaaccgtgcgtattatcagtcatcagccgatcggattgtgatgccagcaatgccacagtttgtttctgaagcggattactggtccacattgttgcatgaactggttcatgcaaccgggcacagcagccgcctgaaccgtgaagggataacgtcgtcgtcgcgtaaattcggtgatccggtttatgccttcgaggagcttatcgcggaaaccggcagcgcctttctctgcgcagagctgggtgtctacggcgatgtacagcatgaaagctacctggccagctggctgaaggtgcttcgtgacgacaaaaaagcatttttccgtgcctgccggtttgcccgggaagcctcggaatttcttctgcagccgctgaaccatcagtcggaacaggctgcttaa

SEQ ID NO: 82254 - DNA, 951 bp, Citrobacter koseri
atgttttcatggtgcaaaaaccgtctggaaattaccgcaaaatctgtttgtgttgacgtcatgcagtcctggatagccggaacagaaacgccgcgttaccgtcatgccatacggcaggggataaagctgtttctggccggatgtgccgggatacttaaacccactaaagcagcggagtatgtcgcttaccctttacttaccgctgccggtgtcgggtcatcagtaccccctaacctggcattccagcattttcttgaattgctggaaaaggatgcgtggctcgacagtcaggtaatttcccgtatggagcggatctaccttcagtccggggtggacagcctgaaatgggaaagtataccggccagcgcgagacagataatgacgcagctgatggccgttcactatgctgactggtttggtgtcgccggtgcaggcggcacgtttgatccggaggagcgctggaactggctcagtatcatgccggagacgacgtgcccctgcgatatgctgatggtgatgccgtcacgtcttgcaacagagctgaacggcaacagcgggctgtttcgtgccctcaacacgacgtcggaactgtacgagcagctttttggcatggagttcccggcggggcatcaggccagctggagtcgcgagacaatgaacacgctggtgctgacgtttgtttctccgtggtatccaccctcaggggaggtgatgggggagatgtcccggctgtttgactgcgaaatccggcattactgggcttcgcctgatgtcggttcgttcgggtacaactgctttgaacagggagatcatgttgacagtggcccttatccggaagatgtatcgcgactgatgcctgaagaaggtgcccggatgtacctggtcactgattccactcctgccgtgccggtcccggtaacgacaaatcagtacggcagcgtgcgtgcctga

SEQ ID NO: 82255 - DNA, 2199 bp, Citrobacter koseri
atgataacaggaaagacatcaggattaatccctccatcggttgagggagttgttccccatgcagacatgcgtcctgcagaattccaaatgaagattcattcgggaatgcttgaaaccatgggacataatatgtattcctcggtggcaaagtgtctggcagagtttgttgccaatgcttatgatgctgacgctgctaatgtgtatatcgacatggattttgaaggtatagaggctgcaaaaaagcaggttcgttctgatgcccgtaacgagaaaaataatggccgacggtctgatatttccgcaatttatgatcccttgccttctgacattactattacgatatctgatgatgggcatggtatgtctgccagagaaatacaggattttttcctgtctatcactcgaaaccgtcgggaagatgagtttggtaaaccttcccggatttatacggactctggaaaacgtcgcgtgatggggcgtaaaggtgtggggaaactcgctgggtttggtgcagcggaacatattcgcgtcaccagtaaacgtgaggggcaaaattattctacaacattcgaaatggattatggtgagattaaagagaataaggatctcgcaaacgctcgctttactgcacattaccaggaagggctggacgatcattcgcattttacacgcatcacactgagccagcttcgttgtgactccatgaagtcaacgcgtgaaaccattcgtaatactctttcgcgtacattttgcattcttgatacagattttaaggtacatctaaatgatgagccgatacaggagatggacatagactgggagtttgtatggcctgctggtgcatcagaacaggagatggcaaaaacgatcattactattgatgagaatgatcctgatgggaagtttccggttgagtatctcattcggttccgagcacgggcagatgatcatgatgcagatgaaactatccggcgtaaacgaggaagccttccggcagaacgtcgtggagctaggatatattcacatggacgtttgacccatggccctagtctgctgaaattacattcaggtgttcacaactttcatgcgcaggattacatggaatgtattgttatagctgatgctatagatgaatttgatcatgattttattgtgacaagccgagagggtctaaataaggataatccggttgtgaatgccctttttaagcatgtcactgaactgatgcgtcaggcgttggcggcacattataaattcagggatcagattattgacactgcaattgagcatgatgatttcagtaagggaatccttagtcccctgagtagtgtaaatgataaatcacagaaggctgccagacagatcctaaaggttatcggcaaagaacatggattgcgtagtaagacttatcaggagatggcaccaatagttctgcaggcggtaaatgccagtgaagtgttaacccgattaatagaactggagtcagatccgcggagtattccggtactggcccactctatggctgaacttgcaagaatggagaaaagtgatttattaaaactctatcgtggtcgctcccgcgctatttctgcgctgtataaacttcatctggactcaatgcagaagcgtaaagggaaaggatatgaaaaggaattacacagcctgtttaaggagtcgccgtggcttatccgaccagagttcggttcgtatataactagtgacaaacccatggggcaactgtgtgccaccttgaatgagatactggaaattgatgacgctgttaaggaagatgcggatctcagtgaggattcaacccgcccggatctggtctttctggctacggacagccccagcccggatgatatcgtcattgtagagctgaaatcaccaggaattgaactggaaatgaagcatctaatgcagcttgatgagtacatgatgaaggtagaagaatatcttcagagtaagttgggacggcatgttaaaacaacaggatacctcattggtacccgtccccctcaggattccagtgccgtgggaaaacgacagcttctgaaaaaaattgcggagaccgggccgatgacacaataccgagtagtggacattctggagctgatcactcacgcacagaatgtccataagaacgggatagagatttttgaagcagaagaaaaacaacttctggatgatctcagttag

SEQ ID NO: 82256 - DNA, 981 bp, Citrobacter koseri
atgaagggatatcgcgttgctgaactattttctggggcaggtttgatgggaggtggtttccaggaagctggtttccgctgcgttttcgctgcagaactcgatcgtcgtgcagtcgaaacctacaaccgcaatatagaatccgttgcagaggtatgggatgtatcagccatcaaatcagatctggaatacgaagtactggttgccggtccgccatgccaaggattcagcacattaggccgacgagatccacaggatcacagaaatgcgctctccttgcatgtattcaactgggctcgcgctcatcgaccactggttgttgttatcgaaaacgtaccccagttcttaggtactagctactgggaaaaactccgccagcatttttctgaagaagggtatgaatgtgtaagttgggtcctgaatgcagcggactacggtgtcgctcagaacaggaaacgtagctttacaatcttttcccgaacgggactcccggaaaaaccccagccagtcttccggaagctcaccctacgtgatgcgcttgaaggtctgccagaagaaaccgatggtatgaatttccatctttccccttcccccaccgagctcgccctgtcaaggatgaagcttattccggaaagaggtgacaaacgggatctcatgcaacgagcccccgaactctgtccaccaagctggaagcgtatgggtaatcaagctgttgatgtttggggacgaatggattacgacaagcccgcgaataccctgcgctgttcatttcagtcaccatcaaaaggacgctatcttcatccgacccgaaatcgggtgatctcactacgcgaaggtgcacgaattcagggtataccagacagttggagttttagtggcgacagaacatccattgcccgacagattggcaacggcgtaccagttcctttagcccgggccgtcgccagtgcaatatctgaactattgagaaaaaatactaactga

SEQ ID NO: 82257 - DNA, 306 bp, Citrobacter koseri
atgcacctgacgtccttcggcaatatttataccgggcagtcagtttacgggatcggttttacgacaaagtctgaggcagagctggaacaaaatattcggatagtggaatttgttttaccctacctccttgcggatgaacgaaaagaaaaagcattaatgatttataactatctcgcagtggattgctgccaaagcttcgttttcaacaccgaaaccggaagatatagtattgccaaagaccgatttatgtcacatcaggacacaatggaatttccctctctggaagcagcactccatcacctctag

SEQ ID NO: 82258 - DNA, 279 bp, Citrobacter koseri
atgacatttgataaccttacagacaatcgcatcactgagacagcacgaattaacgccattgataagcaaattagcgatgcctgtaatgtgatttcaaagtgtgagcgttcagtcagacgggtagaacgaaatctggaaatagccgaagaccaccttgcagacctggaaaatcagagagatgatctcatcatcgcaagctggggagatacgccaaactggcagggaatattcggaatgagtgaggacacctcctctgccatgcgcagcataccgggataa

SEQ ID NO: 82259 - DNA, 546 bp, Citrobacter koseri
atgaaaaatctaatcattcgacctgtaatgtctttcgtgcttttgacccttgtggggtgtagtcagaaccaactcatggcgtttcaacaacaactgacagatgtcagcacgatgatgtcatctggcgagcagccgatttctgaaaaacaagctgaacgtaatgaggttgttcattctttcatcctgccagtcggcgttgatacagcagccatgcgcctgaagcagcattatggctttccctctgatgaagacgttgctgcagccagaaacaatagtcagggaaatgctggctggtccgcagcagcgatttcagaaggtgcgagctggtcagcacagccaggttcttattaccgcatgagccggaacagggctggtaatgaccatctgacattagaagtcagaggcgatgctaaacaaagtaacgtaacagcaacctacctctcctccactccggaacatctcaaacccgaatggaccgcacgcctgtggaaacaaattccggaagtcgcacgcggcaggacggttacccatgggagctcacaatga

SEQ ID NO: 82260 - DNA, 1017 bp, Citrobacter koseri
atgaaccgtctgaacatcacctccattctggccagcatcaccactgaacgggatgaaaaaatgcagcaactggtcacccggctttccgatggaaaaaaaacgtctgtcagccctgttgcgatacgttttaaacccgccgtaaaggacttcgtcaccctggtatcaggtcgtctgggtatctcatcagctgaactggttaatattctggtcgagggcatcatgcgtgagacgcttatcccccggcaggctgttatcacacacattcatgaacggttctggctgctgatggatgaacaccggctttcggttctcgatgtggcccgcctgctctcaggctggaacatcggcctgagcgttctggagaaccgtgaaaggacgatggattatttaactgcacctttgctgaagcaattagcagagtggttttatgtcagcctccagtggctggaaggaagtgataccaggcccgtacatctgaccgctttcagcgactggatgcaggttgcccggacgataaaaaaaagaatccagggtactgtatccgccgacatcctgacccaaccagatatttacctggtcagacagagtgaaatcaccgcagcggatatcacagacgacccaggacacgtattcatttttatccggcgctataaaacaattaataacacgacaatccgtgtcgttgaatgtatcggatattgtccatcctcaggggattataagacacagctaaattcgttcctcagcatgagtaatattcttttcagggaacatattttcaaaagcgtcgacaccttttatgcctccggttatttactggatgcactgaaagaaggaaaggtacttccggcttcagctctgtgggagatacagaaacttcaccatacagagtcaggtaagttttcgcaaaagatatggaccgaagaggaaagagaagcatttcttttccctgaggagtatataacccccgaatggagtaaatttgccagagaaataacagcgttcaacattcaatga

SEQ ID NO: 82261 - DNA, 555 bp, Citrobacter koseri
atgcaaagaatagtggtctgtggaattatcctctgctggggtctggtaagttacgggatcagtgctctcattacaggataccaggacgggatggtatatatctgggggcttgttttagtatcccctttttctttacgcgcagtgaacctggtacaacgcagactcatcaaccggccctgcatcctgagctaccataagcataaatcgaggacgttcgtacacctgtctcctgaccagccaaccgtcagtatttcatccaggcgcgtagcctggttctggaatggcgttctggacatcgtggcagaagccctcagggaaaatgaaaataccgtcgtgattgcatctcacctgctgacctcctgccggattaaacgcatcagaaagcatcttcagtctggttgttaccggagccatgtcattcatgtccccttcacacccgctgcgcgtgcagtcatgcagctcgaaattcttctggcccagtggcgctggcgcgtcccgtcaagaacgatatggcccgttcttgtcatccgaaaatcttttaatccggaaaaataa

SEQ ID NO: 82262 - DNA, 1545 bp, Citrobacter koseri
atgcgggggctaaagtggttaacaggtctgggccagtcaggcagggcagagcatacagtaaggccttccgtacagccatcacaggcgggagactacaggtgcgtgcggcccggtcaggcactgctggaaacagtggaacgacagaaactcatcaggatattgagagaaaattgcccgctgtcacaggcagcctgtgatgagttctggttaaaaccgcttcagcaactggcggggcatgttcaggaggtaccggcagcatggaccgggccgttctcttctcccgggggctttattgacctcagcctgtctgtggccgcaggttcagtaaggctggttcgtggaatgatgttacctccgggagctacacctgaagagcagtcagaacaggggccggcctgggtatgtgccgtattctgggcgggactttttcatcacctggactggctttcgcaggtggaggggagtctggcgggcggtaaaccctggtatccgggcatggaaatgccaggggctaactggcgggttcgtccacggcaagggggggcgggggcgatgaatggtatgtacattgccagcaggttaatcccggacgctgctgcagtctggttgcagcgctggcctgcgatttccggggcgctttttttgtacctcagtggtcagaaagcgcagtcaggcattctgaacagcatcatcagtgatgcgcttgccagtgtcgcttttactgcaggagcagcgtctgtcccggtaccttcagccgtagtcccttctgcactggtcagagggctgcatggtgatgaaaaaacaggggaaaacagcctcccagatttaatagacgacgatatgaaacaatcgtccagaaacaaagatataacacctgttcctgaccccattgagcctgcatcagcgggttacgatgcaaaccagacccggacaaatattgctgctgccgggggcgttacagagcaggttacattgctgtcggcatttgataattgtgatactgagacccctgagggtacaactgaagaatcagacacgaatggctcagtatctactgcagaccttctgagcgtgcttgatcaaatgtcaggttccccggcttccggtaccacagtacccgctgaaacagacccggcgacgaaaggtgatgcaacggccgcgcaggaaagccgtaatccaggggaagcgtttctgaactggcttaaatcttctgtccttgatggtacggtcagtgtcaatgagagcgacagcttcgctcatattctggctcagtttgtattcattgtatcgccggagtgtttttataaatatttatcgctgaatactaatgagtcagtcgataaatcggaactgcaaaaaagttttgaaacgcttgatgttcattattcacgaaatggtaaaggcctgtggcattaccataaatacgatacgccggacaaaagcggtcgttataccaaaatgtcaggttacatgctcagtgctgacattatttacagaaagggaacctgtccaccggacagtgtatggcttgcacgaagaaattaa

SEQ ID NO: 82263 - DNA, 372 bp, Citrobacter koseri
atgccctggcgaataataaggggcgaagaaaattatgcctcccgcttcatcgggctgatgtgtgaaaaagagccgcaactgaaaatagcacagcaactggcgttggacttctaccggatcctgaaaaccaaaaacaagccaatgctaagtaggtggttcactcatgtcagcgaaagcggctctgttgagcttcagcgcgttgcaggcgggatggaagctgatgcagcagcaatatgtgcagccattatcagcagatggagtaacggtgtagttgaagggcatgtaaatcagctgaaaatgttgaagcggcagatgtacgggcgtgccgggttcgagttactgaggcaacgggtgatgagtcctttggcttga

SEQ ID NO: 82264 - DNA, 306 bp, Citrobacter koseri
atgctacagcggcacgtgaaggtgctcctcaggccagactggtggcagatcgctggctccagtccggtacattccctgaaatgtcgacccggcctccgaaacctggccttctggatccctggcgtgagtggctggaagaacggcgcgaaagtggcgatcataatgccagccagatatggagagaaatggcggcaaatggcttcacgggtagcgaaacaaccgtcagggatgaggttgccaaatggcataacgatagggctgccctggttagtgcgccagcccgtcttccatcagcttcacgcgtga

SEQ ID NO: 82265 - DNA, 234 bp, Citrobacter koseri
atgtttagttatgacaaacttttcggtattaaagaaaaaaccaaaactgatttagataatgagaaagaaggtaaagatactagtgaagacagaactagaagactattttacgtcacatgtagccgagcacaaaaaagcctcgccattcttgcttatacagataatacagaaatgctaagaaaaaacctattacataaaggatggtttgattcgagtgaaatagaaataatttaa

SEQ ID NO: 82266 - DNA, 159 bp, Citrobacter koseri
atgaccccggtaatagtgttggtaaatctacgttgggaagggttctggactatttgtttgatggctcaattaagcctatctatattgatgaagagtttcaaacacctaaaaaagaaattgaacaacttttcactagaaatgaagtgcacgtatcattag

SEQ ID NO: 82267 - DNA, 237 bp, Citrobacter koseri
atgctaccaactaaaggatctcatccagagatgaacgtgctctacatcggtggattcattttgaagcagctacaagagtgcaaaagagggcgtataaagatcactcaactaatgaaaactggggaaaaagagctttctgtttctgtagaccatataattttagcgctggactggctgtatataatttcagctattagctgcgatcggaacgaggtttttattaatgaagttgcttag

SEQ ID NO: 82268 - DNA, 552 bp, Citrobacter koseri
atgtatgaaacaagatttgacattcataacattgaaggtgacttctacaatgtggaagctccagaaaataatgttgattctattatcaatgttataattggagatattgcatcagctaaagttaatatcgaccgcagtgatcgttctttccctgctaatgttgctaaaaaaatagaacataatatgcttaatagcaagcgccgtatagtcttgcaatacaaatcttactcctctcatattgaaagagcctacactcttgcagaacaaaatataataaatggtaaacaatcagctatggagttattaaatggaatgtactgtaattcattagataagtatgagatcgattcttttgaaccagacataacaaaagtacgacagcatgctgacgacataatcagtgatgtaattaaacaactgaggaaattcgtttatagttcagcaaatgtcactcaatacaaagagcaagtggaaattggcttaaatgttgtcgttgcgcatgcctttgtagagtgctgtgtcttggagaatccaaataatgctaccaactaa

SEQ ID NO: 82269 - DNA, 363 bp, Citrobacter koseri
atgcaagaattttggaaactctttggcagcgaacctttcgtagctatcgcttggatctgtaccgttgccagttgcatatatgcctttgtacaaaaaagcaacgtgaccaagattgaacagaaattcagggacctacacattacacatagtgacctaaaatttcaaaataatactcttaaacagaaagttgagactctagaaatctctaacaatgaattaaatgttcagaatacaattctgcaacagaaaataataaataccgaaaaaaatgatattcatgataattatcaagaagtgcatcaacacggaaaaaataactttaaccaaggtgtgattaaaggcgactttatttacaacaaataa

SEQ ID NO: 82270 - DNA, 915 bp, Citrobacter koseri
atgtcatcagaaactagtttacgtagccagcttgagcttccaaatgatcagcaaattgatgtccttgctgcgattctcgacaatgagaacgaacaggcgacatcagcccgtagtatgtctaccgaacctcaagaagttcttgagaaacaccccggtattactccttttaaggatctcgtttcaaaagcatcagagatcgttttggcaaggaatggtaatgagatagcgcaatatctacgctctatccttgaaaacaaaaatgattacctaaaccatcgagatgaagcagtgtcattgtcaattgcgctgaatatttcacaatacatagctccgagatttcgtgcgcttcctccatcacctaaaagaacgtctgatgatgaaccaaaccaattaagcattgaccgccaagtcatcgatatgcactgggcatggatacaaggacagaaaaaagcggtaggtgcagaagagtttgagcacctatttcagcgtgaagaatttgactggatcttggcagaaaaatttgcgcgtctaaattggacaactgacgtaaaaatcagggcattacagatcaatgcaaaccttcaatgggagttagcacagtatcaatctaaaaaacaccgtgattcatggcggaaacttcaacaaggagatgtccgaggtggcaagttgcattcattggggattgcacaagttactgagagacttgaatgttcagtaacaaaacggaaaaatctagcaaaacatattcctcattgggttaatgtttggcttgcttcccgcatatccgataaatcatatatgagtttagcgcagataatgagatttatgacaggggaaagccacgatgagaagaggcttaaatcatcattaaaagctgttttacaacgtttatattcatatgagaaaaagatgtga

SEQ ID NO: 82271 - DNA, 465 bp, Citrobacter koseri
atgaaaaaatccctgagaatacagtttggcgagcgggtaaaagagttgcgcgttgccaccggaatgagccaggaagcgtttgcggatcggtgtgggtttgcacgtagctatatgagccgcattgaacgtggcggttctaatgcatctctcgatgccattgaggtgctggctagcgctctcagtgttgaaccgtggcagttgttagtattcgactcatccgaagaaaacgacccagaactactggttccctatgcggcggatgggacgtgctttaatcccgaactagcgagtagtcgcgatggttcatttgcagtaggagataaagccgctcagaagcgttttggctcgtttatcgaagctcttgagtatctccgtagcatggagacggcaaagtggcgtaggccgaattctgcgggcaattggggaattgtgtctgctgttaaatgggataagcttaggaagtag

SEQ ID NO: 82272 - DNA, 498 bp, Citrobacter koseri
atggcgggatcagattttatattacctatggtagcgggagccgtgctcagttgggccagttacagcatggtcgcgcacgttacatcaaaacggcagatcagcactctacgagcaatctcatggggtgttctgggaacgctctcactagtgctgggagtaagtgcattcgcagctgttggcgctgaactcccgggagaaaaacaaaatgccttgtgcttgattaacgagccagaatgctatgcaaaagcacatcataaccccgtcaaaaagtgcaaacaggtaatggatgagaaagcgacgtttcgccatgtgtggctagatagcgaagagcaaccagttttcagcacctacctctggcacgacaagaacaaacaaactattcaaatattcgggcaacaagctaaggcgattaatagccttgggatgcaaacaccactccaatatttttgtgtattcaacgccaacaccggggaagtcatcgcggcttcatttgagtaa

SEQ ID NO: 82273 - DNA, 225 bp, Citrobacter koseri
atggttggatctgcaccaaaggtgattcatatatcgctaggtgagatgaaaatcagcgccgaattcattgaaaccgtattaacgcacttgcaaaccgtgttaagtccagaagcccctgtggtcatgaccttcaaaaaagcctacacacagactgggcatgatcttgagcaatttgttaagcagcttggcattgaaatcggtaatggcgaggtggaacaacgatga

SEQ ID NO: 82274 - DNA, 588 bp, Citrobacter koseri
atgaataaaaccgttgattttggggcaccgccagaattcggtatgcatcacttctatgtggagattcccgcagcgccccgtgacgctgttgtgatctatgaagactatggctttgacggtgaagattctcgccgagaaacagtagagtgtcgcctgatattagccagagagctctggactaagatccgcgatgacgttcgccgtgactttaacgctcgcctaaagattaagaaacaaggctccggtacttggtctaccggtaaagtgaagcttgaccgctttcttggacgtgagttgtgcgttcttggctgggcagcagaacatgcctcacccgatgaatgtctggttatttgccaaaagtggctggctttacgcccagaagaaagatggtggctttacagtaaaaccgcagctgaagcaggtcgtgatgatcaaacacaacgaggctggcgtaaagcgctctattgcgcgctatcggatggagccaatatcaaattggaaaccaaaaagaagcccaagtctaaaaagctacaagttgaagatgagacccaggatctgtttgggtttatggaaaagggagagttttga

SEQ ID NO: 82275 - DNA, 750 bp, Citrobacter koseri
  misc_feature (28)..(37): n is a, c, g, or t
  misc_feature (725)..(734): n is a, c, g, or t
atggccttgcaaccgtttgaatggagannnnnnnnnncctttaaagaacgaatggcaagccacggtcagttgctggtgtcgttgggtgctttttggaaaggcagaaaacctctcatcttaaacaaagcgtgcattctgggctcattgttaccagcaactgacaacccgcttgaagatttagaggtatttgagctgttaatgggcatcgactctgagtcaatgcaaaagagaattgaggcttcactaccagcatcaaaacaagaaacaatcggcgattacttggtcttaccctatgccgaacaaatcaggattgctaagcgcccggaagaaattgatgaatctcttttcgtccatatttggaagcgggtcaacaatcatcttggtacttctgctcacacttttgcgcaactagttgaggaactaggtgttgcacggtttggccataggccaagagtggcagatgtattttctggttcgggtcaaattccgtttgaggctgctcgcttaggttgcgatgtctatgcctctgacttaaacccgatctcctgcatgcttacttggggcgctttgaacgttgttggtgcgagcgcgcaaaaaagagtagaaatagacaaagcccaacgggatatcgttaagaaagttcaaaaagagattgatgagcttgacattgagtccgatggacgaggagcaaagtctgttttctcccacattcgcagcttgtttannnnnnnnnntactgcgttgaggtga

SEQ ID NO: 82276 - DNA, 516 bp, Citrobacter koseri
atggcgattaagcgcttttcatcccgcacagaaagattagatacggaattcctcgctgaatcgttgaaaggggctgctaagtatttccggattgcgggttatttcaggagctccatctttgagcttgtaggcgaagagattgcaaagattccagaagttaagatcatctgtaattccgagcttgatctggctgacttccaggtagctactggccggaatacagcactcaaagagcgctggaatgaagtggatgtagaagctgaagcgctactgaaaaaggagcgctaccagattttggatcagctattacattcgggtaatgttgagattcgcgtagtccctagggagcggttattccttcacggcaaagcaggctcaattcattatgcagatggcagccgtaaatcttttattggctcagtgaatgaatctaaaagcgcattcgctcacaattatgagcttgtttggcaagacgatgatgaagaaagtgcggactgggtagaaagaggatcttag

SEQ ID NO: 82277 - DNA, 255 bp, Citrobacter koseri
atgactggcactcctctgcgagcccttctttatgccttatttgagatatcgaaagaagttgaagtagacgatgttcttttgcatctcatggaaaactgcccgaattacctgcccaataagcaactgcttgccaaaatggcggattacctggctgaaaagcgtgaaggtctaaaaggtaccaaaacgttcaaccctgagcaggaagcaagcagcgcgcgtgtccttgcggaagccattcgaaaccagaggttgtaa

SEQ ID NO: 82278 - DNA, 786 bp, Citrobacter koseri
gtggatcagggtaacaaccattttgatgttgtcgcccggcattaccatctctacgccttccggcagttcgatggtgccagtcacgtcagttgtacggaagtagaactgcggacggtagcctttgaagaacggagtatgacggccgccttcgtctttggacaggatataaacttcagattcgaacttggtgtgcggcttgatggaacccggcttagccagtacctgaccacgttcgatttcttcacgtttgataccacgcagcagaacacctacgttctcaccagcacggccttcgtccagcagtttgcggaacatttcaacgccagtacaggtagacttcgcagtctctttgataccaacgatttcaacttcttcgcccactttgatgataccgcgctctacacgaccggtaacaacggtaccacgaccggagatggagaatacgtcttcgatcggcagcaggaacggcttgtcaatcgcacgctctggttccgggatgtaggaatccaggtagccagccagttcgatgattttcgcttcccactcagcttcgccttccagcgctttcagagcagaaccacgaacgatcggcgtgtcgtcgcccgggaaatcgtactgagacagcagttcacgcacttccatctcaaccagttccagcagctcttcgtcatcaaccatgtcgcatttgttcaggaacacgatgatgtacggaacgcctacctgacgacccagcaggatgtgctcacgggtctgcggcatcgggccgtcagtcgcagcaacaactag

SEQ ID NO: 82279 - DNA, 618 bp, Citrobacter koseri
atgaaaaagttagttgccaccgaaccgcgcgttgcggcgcttgtggagtatgaagatcgcgcgattttagccaacgaagtgaaaatccgcgttctgtttggcgcgccgaagcatggtactgaggtggttgatttccgcgctgccagcccgttcattgatgaagattttgatgcgcaatggcagatgtttatgccacgtccggaaggcgcgccgcgcggtatcgaattcggtaagttccagctcggtaacatggtggtgggcgacattatcgaatgcggcagtgacgtgacggactatgccgtgggcgatcgcgtatgtggttatggtccgctttctgagacggtcatcatcaacgccgttaataactataagctgcgcaaaatgccggaagggtgttcctggaaaaacgcagtctgctatgacccggcacaattcgcgatgagcggcgtgcgtgacgcgaatgtgcgcgtgggtgactttgtcgtgattgtcgggctgggcgcgattggtcagattgcggtgcaactggcgaaaaaagcgggagcgtcagtggttatcggcgtagacccgatcgctcaccgctgcgatattgcgcgtcgtcatggcgcggattattga

SEQ ID NO: 82280 - DNA, 651 bp, Citrobacter koseri
atgaccaacccggtatatgaacccgaaatcaccgctttgctgtgcatcgatctatacaacgattttctggccgagggcggaaaactgttcccttgggtgaaggacattgcaaaagaaaacaacatgcacgaaaacctgcgcaaaattgtggcggcagctcgggaggcagggattactgtttaccacgtaccgcaccaccgttgggaaccgggagattatgaagactggaaatatccgtcaccttaccagttgggggccgggcaacgtcaggcatttgcaaaaggaacctggggaggaaccttccatgatgactttaaggtacatgaaggcgatgtggtcgcaactgagcactggggatcaagcggtttcccaaacactgatcttgagcacaagctgaagcgctatggtaaggagaaaattatctgcgtgggtcttttagccaacacctgtcttgaggccactgcacgcataggtatggaacttggcttccacgttactctggtaagagacgcaacatctgcccgttctcacgaagccttacatgctgcgatggatattgatggcccaacctacgctaccgaagttctcaccactgaggagctggtaaacgcaatcaaaaaatccgccaactcacagttatctatagcttaa

SEQ ID NO: 82281 - DNA, 549 bp, Citrobacter koseri
atgggccgttcaaccaagctgcaggccgaaactaatcgggcattgattgtggaaaaggctagcggccttttcagggctcatggcatagctaatgtcagcgttactgacatcatgaaagctgctgggatgacagcaggcggattttataagcattttgaatccaaagagagtctggctcgagaagccgctagtctcgcatttgactcctccgctaccagctggagcaacgtttccttagagcaaggtgataatcagcagtatgagatagcccggtattatttcacgcaaaaaccaactgataagcgttgcccaatacttgcctttggcaatgatctaatgaaaagggacaaccccttactcgctgaagaatgcactacaggcatcaaaaatctgtttcaggtttttgcaggaacagttaaatcgagtggatacgaggaaagtgatctcgcgaagttcgcagcaatggttggagccaattatttaagtgagctgagtagtgatccagaattttcaagtcgaatcaaaaaggctgtccttgagcgcttgtga

SEQ ID NO: 82282 - DNA, 168 bp, Citrobacter koseri
atgcgattttgtgatgttactgaggcgtttgcccgcaaagaaggtgaaggtgatttaggccttgaatactggcagaaagagcatcagcgatttttcatccgcgaaggttatttttctgaaaatatggagttgatcgcagaagaatttgaagtgattgaagtgctgtag

SEQ ID NO: 82283 - DNA, 621 bp, Citrobacter koseri
ttgtcaccttttgacgtattgattacagcaattgaacagggtgaactcctgccaggcgaacgcttacaggagattcgcctggccgagaaatttggtatcagtcgcacgccgattcgtgaagctctgcatcgtctggaaacactggggcttgcggagcctgggccagcgcgcggtctggtggtggcaaaactgagctacgagcggttacggcagttgtttgccgttcgtgaagggctggaaagactcgcaatgcaactggcggtcagtgctgcctcagatgaagagattgccctgttgcaggacatggtgaataccgaacgctcgctcactgacagcaaggcgctgcacgatcataaccggctttttcatcgccagatctaccgttctacgcataacccgtatctcaatgaaatgttggataacctgcgcattcatctgtcgctgctgcgcggtaccacctacgccatgccggagcgaaccgaagaagcgaagcgtgaacatcaggcgattgtcgatgccctctctcgtcgtgatagcgtggcggcacaggaagcaggctgtgaacatattcgaaacggctaccgcgcacgtctggcgatcattagtcagcttgaaggatag

SEQ ID NO: 82284 - DNA, 1365 bp, Citrobacter koseri
atgaccacaacaggcacaatatcaaccgcccatttccgaggtgagcagttaagccattttattcaccactcgcatgagtgggatattccgtctggcgttctgcatgaagcaaagcgggcactgattgaccacctggcggtggctattggcgcggttaacgacgacgcggttaaggctgtccgccaggtcgccagaacctggaatgccgcaggtgacgcacgcattattctcggtgaaaccaccacgccaggtcttgcggcgatgatcaatgccacgatggcgcacgccgcagattatgatgatacccacccggcgggggcgggccatccaggcgggccgtgctgggcgaccgcactggccatggcgcaggcgcatccggtcagtgaggagcgcgtactgcgtgcctttattgccggattcgaagtgatggcaaaactcggcggcggctgggttccgggcgtgggacgtaatttgcagcgccgtggttttcatccaacatccatagtgggtcgcgccggggcggcggccgtcgcggcttccattctgggtctgtcagaagagcaaatcagtaatgcgctgggtgctgctgcgaccatgatgggaggcctgcaaaaatcctccggaactcacggtaagccattccatgcgggtaaggctgcgatggacggcattctggccgcacagcttgctgcggaaggttttgtcggtgcacatcatttctacgaagctgatggctgggtaaaaaactttatccaggatggcagtgccgaaatccctcccctggattttggtgaaagctgggaattgctgaccaacggttacaagctttatgccagttgccgtggcacccatgcctcgattgaaaccgcacgcaaactctaccctcagttaaaagggcgcgccattacgcgaattgcggctaaagtgcatccgatggggatggttaatgccggtattctcaacccgacgacaccgctggagagtaagttcagcattccacactgtatcgcccttgcgctttcaggctacgtgctgaccgacaccgattttacccaaaagactgttgacgatacggcggcacgcaagctgctgggctgtcttgaaatcgacgcggtggacgggcagtccgccagctcggcctttattgatgtctggcttgatgatggcgatgtgcttcatgcccggacggatgtctatcgtggtcacccgcagaacccgctcaccgacgcggaactgcgcgccaaatttgactccctcaccatcccggtgctcggcgcactgcgcagtgatgcgctgtatcaggctgctgcacactttgagcgccctggcgccctggcgcatatctctgccttgctggcgagttaa

SEQ ID NO: 82285 - DNA, 1326 bp, Citrobacter koseri
atgacagtagcacgacaatttgcggcaaatctgctcgcgttttcacgccagcctttttcagcggcggcccgggatcaggcccgtacggcaatcatcgataccctcggcgtgaccctggccggtggtgttcaggaaggggcagagaaactgcgccgcgtggtggtaccttcggcggcgtccggcaaaagccgtgtgtttggcaccaacctgaaactgaacgcactggatgcggcactgctaaacgggacggcctcacacctgctcgattttgatgattccaactcctggctgcacgggcacatttccgttgccgttcttcctgcgttactggcgctggcagatgaccgtgagctaaacggtgaagcgattttacgcgcatacctttccggttatgaaactgccgtacgtatgggcaaagcggtcagcccgttccagtactgtcacggctggcacccgacgaccaccgtgggtgtttttgcaggcgttgcggcatgcgcggtgctgcttaatcttgatgaagcgcagacggcgaccgcgctgtctatttgtgcgtcgctctcttccggcatcaaatcgaattttggtagtgaaaccaaggcattagtcgtggggcaggcggcccgcagtgcggtgatggcggtgctgctggctcaggaagggtttaccgcagggaaaacggcattcgagcatcatcacggctatttcaatgtgtttaacggcagtgaaaatgctgatgccacgccgttaacgaccccctggacggaaaaaccgttcattctcgatactgaaaaaagtaacaacttcaaatacttttcctgctgttacgccattctgtcgccgctggatggcgtgctggcgctgcgtgaagagacagacctgaaggctgaagatatcgagagtattgcggtacaggtgcatcctattcgttttccacacatcaatattccacagccggaaaacccgctggcgggcaagttcagcctgcattactgcgtggcgcgcgcctttgtaaccggcacgctgacgctggatgattttatcgataacagccgttttgctgacccacaaactcagtcactgatgaaccgcgtgacgctgaccacccataacggcaccgttactacgcatacggcgtatgtgaccttaaccgccaccgacgggcgtcagttccacaagacggttgaaggtgcgcggggttccagtgcgaaattcccgctgccggaggggttactgaaagaaaaattcctcgattgcgccagccgcgtgttgccgacgcaggaagcgcaggtgctttatcagcgcctgcttaacgatgattatcgttaa

SEQ ID NO: 82286 - DNA, 762 bp, Citrobacter koseri
atgacctggcaatttattcccgctgagataagcccgtggtttgccgccgtgatggtggcatgcagttttcttacctccgcactgaccgcagcaatgggtctgggcggcggcacagtcctgctcgcagtcatgggactggggatgcccatcagcagcctgatgccggtacacggcatggtgcaactgggttcgaatttcagccgcacgttgattcaacgcatgcatgtggtctggccgctggtgctgtggtttttgctcggtagcgcagtcggcattgccctcggtgcgcccgttgccgccatcatcccggacagtgcggcacgcattgcgcttgggctgtttatcctctggtcggtgtggcgaaagcggggggaagccagaccccttaaccggctgttgttcgtcattggcggaggcatcagcagcatcggcaccatgattgttggcgctacggggccgatggtggccgggcttatcagttcgcaggggctgaaaaagcagccgctgattgccactcatgccacctgcatggtgttgcagcacggattaaaaattctcgcttttggcctgatgggctttgcctgggcgagctggctgccggtgctggtgatgatgatcgtcagcggcgcgcttgggacctggctgggcacacgcatgctcgacaatctgccggagaagctgttccgcgttgcgttcagagtgaccatggtgttgctcagtctgcaactgttatggcagggcgttcagggctggctgcgttag

SEQ ID NO: 82287 - DNA, 1050 bp, Citrobacter koseri
atgctgaaaagaaacacatttattgcctcagcactgctgctggcatcttccaccctgtcaggccaggcgctggcagaagagacaacgaccgcaagcggagacacactgagcaaaattaaagcccgtggtgaactggtgtgcggcgtgcacccggcacgtcacggtttctcctctatcgacagcaaaggcaactgggaagggctggatgttgacttctgtcgtgccgttgcggcggctgtgttgggcgatgcgaaaaaggtgcgcttcacgccgctctcaacagcgcagcgtttcccggcaattcagtccggtgaagtcgacctgttgtctcgtaacattacggcttcactgacccgcgatgtctcgctgggtctgaactttgcaccaccgaacttctacaccggcaccggctttatggtgcgcgccaacagcggcgtgaagaaagtggaagatctggacggggcgacggtgtgcatcacgccgggcagcagcaccgaacagaacgtggcgcagatatttgctgcccgcaacatgcattacaccccggtggtgattgagaacaacaaagagtatgtcgcggcctatcttgcggggcgttgtgacgttatcgcccgtgacaaagtggcactgccgggcgtgaaaaacttcgatgcagaaaagccggaggatcatgtcattctgccgggcatctactcaaaagaaccgctggcgatggcggtacgtaagggcgatgaccagtggtacaacatcgtgaaatgggtggtttacgccacgttcaatgctgaagagatgaaagtcagccaggccaacgtggatgagcaactgaaatccgctgacccggatgtgcaggggctgttgggtgtcagcggtgatttcggccagaagctggggctggataaacagtgggcttacaacatcgtgaaacaggtgggtaactacggtgatatctataaccgccactttgggccgaaaagtagcgaaccgctggagcgtgacctgaacaatctgtggaccgaaggtggtctgctgtacggcttgcctgttcgttaa

SEQ ID NO: 82288 - DNA, 1245 bp, Citrobacter koseri
atgtcttataccgatcctgaaatgatgaaacagactgacaacaccaacgcgtatcttctcacacccgacacgcctgcaaagggcatcgggtctcgactctccacgctgatggggagtaaggccacgcgggcctggtgttaccagtttctgctggctgccttactggctggtttctcctggtggctctacaacaatgtggtggagaacatgcgcaaccagcgtattgccactggctttggcttccttgagcagagcgcacagtttgccattggtgaaacgctcattgagtacaccccgcgcgacagctatgcccgcgcggtgctggtcggtctgtttaacacactctatgtgacgctttgcggcattgtgctggcaaccgtcctcggctttattgtgggcctcgggcgcgtgtccagaaactggctgttggtcaaactggcagaaggttatgtggagttgctgcgcaatgtgccggtgattttgcaggtgattttctggtcggtggttatccgcaatttaccgtcgccacgggaagcgattgatcttggcatctttggttttctgactaaccgtggtctgacgttaaccgtactgcaggggcactccgcgtggcatctggcgctgtatgcgctgctggtcgccgtggtgttgagtgcgggcatgtcggtgctggcaagacgcctgcgcgaacaaaaagggcgcattattcccgttgcacgaatgcgtgtcgctttgattatcggcttgccgctgctgacctggtggttcgcgggtgcgccgtttgaactgaatcagcctgaactgcgcggctttaactttaaggggggatttaccatcagcccggagttcacggcactgttgctggggattgcgctctattcgtcggcgtttattgccgagattgttcgcgcaggtatccagtcggtaccgaaagggcagctcgaagcggcgcggaccttatcgctctcgccctggcaggtgattcgccatgtggtaatgccgcaggcgatgcgggtgatggtgccaccgcttgccagccagtacgtgagtctggccaaaaacagttcaattgcggtggtcgttggctacccggaactggccaacatcaccaataccctgatgaaccagaccgggcaggcgctggaagccatcgccatcatgatggtggtctatctgattatcagcggctccacgtcgcttctgatgaacctgtttaaccgctacgtcgccattaaagagcgttga

SEQ ID NO: 82289 - DNA, 1065 bp, Citrobacter koseri
atgcaacattcagcgattttttggttccgccgtaacttattcggcagcctgacgcaaacagtgctcacgctgttgctgttaattcttatcctttttgtcggcagcaaactggtgcactggagcatcacagatgccgttttcgcgggagatgtggcagagtgccgcgcggctgccggtgcgtgctgggcagtgatcggcgaaaagtaccgtcccattctttttgggctttatccctacaatgaacagtggcgtccggcgctgtgcatggttatctggtttatcagcgtagtgctgtcgctgtcaccgaaatgctggtactcgcgttttctctggccgctgtggggcgtgtcactggtggtcatgtcggtgctgatgagcggtggtgtgtttgggcttgccccggtgccgtctgccgactggggcggtctgccgctgacgctgttgctgttttccggcacggtgattatcggcatgccggtgtcggtggcactggcactcgggcgtcgttcgccgctgccgtttttgcgcggtctgtcagtcatcttcattgaagggctgcgtggtgtgccgcttatcaccattctgtttgtggcggtgaacatcttcccgctgtttttaccgacagatatggaaatcaacaaactgctgcgcattattgtcggcatcgcgctgttctttgcctgctatcaggcggaagtgattcgtggcgggctacagtcagtgccgcgtggacagtatgaagccgcggcggtgctgaatctcagctactggcacaccaccaccaaaatcattctgccgcaggcattgcgaatctgtctgcctgcggtgacgaaccacattatcgccgcgatgaagaacacctcgtttgtcatcattattggtctgtttgatgtgcttaccgccaccagtgccgtgatgcaggatccgcagtggcggcgttattacatcgaaacttatgtctttatctcggccatttatattgcctttggttttatgctctcccgctacgccatctgggtagaaaagcgcattgacgccagccgcactgcagaaggaaacgcctga

SEQ ID NO: 82290 - DNA, 744 bp, Citrobacter koseri
atgtctcaacgtcccgtgattgaaattaatgccgtcagcaagtggttcggcaaatttaaggtgctcgataatgtctcgttaaccgtgaacaaaggcgaacgcgtggtgatctgcgggccgtcaggttcggggaaatcgacgctgattcgttgcatcaaccgtctggaagagcatcagcaggggcagattctggtcaatggcattgagatgaacgacaacgtgcgtaacattaatcgcattcgccagagcatcagcatgctgttccagcaatttaatctgttcccgcacctgagcgtgctggacaacctgaccctcggcccgacgcttgtgcgtaaactgagtcagaagcaggcgacagagctggcgatgcattatctcgagaaggtgcatattgcgaatcaggcgcataagtttccgctccagctttctggcggccagcagcagcgcgtggcgattgcccgagccttgtgcatggagccggaaattttgctgttcgatgagccaacgtccgcactcgatccggagatgatcaaagaggttctggatgtgatgttggatctcgctgacggcgggatgacgatgattgtggtaactcacgagatgggctttgcccgcaccgtggcggacaaggtgattctgatggctgacgggaaaatcgtcgaaaccgcaccgccgacgcgtttcttcagtcagccggagcatccgcgtacccggcagttcctggaacagattttgagtcattaa

SEQ ID NO: 82291 - DNA, 603 bp, Citrobacter koseri
atgaacacgtcaccgtggaacaaagaccgtatcataggccaaaaaagaccacttcagatatctcatatctgggggatccgaatccggcttgaactggaaggtaaaacgcgcgatttagctctattcaatatggccttggacagtaagctacgaggctgtgatctggtcaaactcaaagtatctgatgttgcatatggtagctctgtttcaagcagagctacggtgttgcaacagaaaaccggtagccctgtgcagtttgagataaccaaagggacaagagaagctgttgctgcattgataaagcttggcaatttgcatagtaaagacttcttgtttcgatctagggtcggaactaaccagcacatttcaacccgccaatacaaccgaatctttcatgggtggatagaaaagcttggtctcgaagattcactttacagcacacattccatgagaagaacaaaaccttacctgatctacaagaaaaccaagaatctcagggtgatccaacttctgttgggtcataagaaactggaaagcacagtccgttatctgggcattgaagtcgatgatgcgttagagatctctgaatcgattgaagtctaa

SEQ ID NO: 82292 - DNA, 348 bp, Citrobacter koseri
atgcctaaaagcaacacaaaaaaaggtgttatttacaccgaaacgttcaaactcactgctcgcaatcttttgaattttctttcgaccagtgttgaagagccaaaagaagtacttaataaacaactcgatgagtttgaaaagaaagttgatgttttccctgagagctgtcagttttcacctgacttgcttgaattaggctgtgaccgttatcgtgaatgtattaccagggatggttatcgcatcctttactcctacgatacagaacaggaggaactaactgcccatgtcattcttggcaagcgacagtcagtccttcagtgtcttttcgagagactaatcgctttgtaa

SEQ ID NO: 82293 - DNA, 228 bp, Citrobacter koseri
atgagagtcgaaaccattagttatctgaaaaagcacgccgcggtgcttgatcttgcagagccattattggtcacacaaaacggtgtgcccgcttatgttgttgagtcgtatgaagagcgcttgaaaagagataatgcaatcgcattgctgaaactcttaactatctctgaaaaggacaaaagcgagggacgcacgtatagtcgtgaccagttaatggcaagtctttaa

SEQ ID NO: 82294 - DNA, 597 bp, Citrobacter koseri
atgttactgagtttaataaataaaaagttaaagtgtttactaattatcataagtatgatgggttcaggctgtgtaacacaatccccatatcattcctctgaccccgtagatcaggcattaaaagtttgtggattaggatactcatcggaagcggcaacgctttatcgaggtgcttaccagatgactaataaacaagtatctgctgaatttgaaacaaagtttagccaaaaccttgaaactcagatgaccagtatgtttaagagctttaagccttcggacggaagttccatgaagatcgtgagcgaacagataaatgaaagtcgagattgtgtattaagtcagataaacagttatagagaaccctctcgaagtgatttagtttcacaatgcattaccgactttaagaaacgtgtaggtgatactggtaatggttatccttatgtccgggactggacagttcttgaaagcgatccacgcaacgccaaaaataacttagttgttggctttatatttagccaaggaggaccaaacatccctgggaaaataatttgcaaaataaagaataataaatacgacgatcttatttcatccgaatag

SEQ ID NO: 82295 - DNA, 1926 bp, Citrobacter koseri
atgagcggttattcggtgacttatgaagagagatttctttttaaagaaatcggttcaatagctacgaaacctgatgttgctattactgaacttgtagctaactcacatgatgctggcgcaacggtagtaaaaataaatatatctgaaaccaatccgcaagtcctcactattgaagataatggagtaggacttacgaaagaacaattcgaaagcaggtggcttagattacgatacgataggcacaagcatcagggggcttatgtcgaatttcctagcgatgctgatgtccaaactaaacgtcttgcgtttggatgcaatggtgtagggagacatgcaggactatgtttcgatgataattatatagttgaaacatggaaggactccatccgcaattattatcatttagctgtatcctccggtcaaagtccaataaaagttgttgaacaccgtagcgagaaatcaacaggtcatggttctaagattacagtaaatattactcgtaactatgtcgactctgaacaaatatcagatattatatctgcaaggtttctttttaatccggaatttcatgtttatgttaacggccgcaaaatcaccttgctagagcatcctggggtggtaaaaacggaagaaataaatccaatcggaaacataaaaataaaactgactttagtagattcttctgctgcggctagaacttcaaatcagcatggtgtcgctttttggctgggtgggagattgttaggaaaaccttcttggtatattgctaaaaatcaaataatagatgggcgaaagtcatttgccaaaagatatactttaattgctgagtccaatgatctattcagctatgttgaacctgattggtccagcttcaagtcagactttacaactatagaccttatatctaatgagatcggtaggattcttcgaggctggtatgttgagttgtctcaaatagacatgcaacaagcaaaatccacggtaattcaaaaccatgttgaggatataaagagtctaaacattcttgctagaaaggaactgaatgattttctagacaatattttggaggaaagtccggatgttaaattggaatatttggagttagcatttaaagcagctataaatttagagaaatccagatctgggatttcacttttgagaaagttaattagcatttcacctgatgatgtagaagcgctgaatgtttttctggatgaatggaatgtaacagatgcaatgacaattcttgctgaaattgactctcgcataaagttagttgagatgatttccaagattagtggtgaccatagtgtggatgaattacatactttacatccactaatcgagaaagctcgttggattttcggtccagaattcgatagtgccgaatattcaagtaacagagggcttatcaaaacaatggagaccatatttaaaaaaagttataggaaagaatgttttttaaattcatcaaaacgtcctgatatagtcgtaggtagtaattcatctttaagcatgcttgggcttgaagagtttaatggtgaaataaagaagactaagactgtacttttaattgagcttaagaaaggcggtttcactattggtcgtgatgagatgaatcaggcaagatcttatgtggaagatatttggcatactggcgtaggatcttcacgtccttttattaaagcatttgttgttggtgatactatagatagatttgccagcaagtatcaagcagttggaaataatgaaaatgatcagtttggcgaagttaaagctattactttcgatgaaatggttaggactgcgcaagctaggctttttaatttacgggacaaagtattccttaggtacgacagcttagacaatgaagctacgatgagcaacgttatcaatattcctacacaagataaatttagcatttaa

SEQ ID NO: 82296 - DNA, 978 bp, Citrobacter koseri
atgaagctgtacataactggaaacgggtttgatttacaccatggtcttgataccagctatttttcttttgcctattttctgcgttcgcgccagagggattcgtacaacaacttagttgagtttgttggtttcacggacctgcctgaaaatatggataaactgaataaggatgaacatcctctgtggtgtgaatttgaaagtaatctggcaggattagattctcaggccgtgctggatgcatttaccgattatctcccaaatctgggtgacccagattttcgtgatagagactggcatgcatttgatattgaaatgcagcgaatccttgaaaatttgactgatggtcttttcacccaatttacgtcgtttatttcccaggttaaatatccagagcttaccactgataaaacactgcaactatgcaacaacgccctatttataaattttaattataccagaactattgagtgctattatggcataaaaagtagccagattctttacatccacggcaatgcatccttacctggagataggcttattcttggacatggtattgatccagaaaatttcaaagaacatcctcaagaaccgcccacggacgtaacggatgaggagctggaacagtggtatcagcacatgtctgataattacgattttgcatatgaaagcggaaaacagactctgaatcggtactttacacattcattcaaaaatacagaggaagtgatgtatgcaggccaagcatttttctctcaactcaacgcggtaaacgaggtgatcattgttggacactctttatcggcggtcgacatgccttacttcgctgccattaaacaacacgtgcagcccaattcaacctggacagcgacatggttccttgaaaaagaacgtgaacaacacctacatgcgttgcagagcataggcattgaacatcccctaattgtgccagtatgtagcctgctggtacgatcgtga

SEQ ID NO: 82297 - DNA, 1167 bp, Citrobacter koseri
atggaaagaaggaacataaataataagattaaaaaaatgatttttagcaaatatagcggccaatgtgcaatatgtggcatatcaaacgaagacgtacgactggaaattagtcatatttatcctaaatcttttggtggggaaagtatagaagaaaatttaattctagtttgcccaaactgtcattttaaattggatcaggccatcctcaacgaaagagagttcataactgcacttgttgatcttttaaagaattcccataaatacaagaacattgaaacaaacaaacagctaggtaatcagattaaaatcgaggttgatatttacgcagagttgacggagactcgtgaggataaaaagggaataattgtagaatgcaaatccttaagagccatttcagaattttatatagataaggtcattgatgaacttgaaacaataaacagcatataccctagcgcgaaaataatatttgcaaccccttcaagaattccagaaaaaataaaggaagtacttgtaagacatcatatttttgcttgggatattgattatatacttaatgaatttagtgatgaaataggaaaatcgaataacccatatctaaacttactgattgggagtattggccaaagcaaatctaatattaagattcgaaatctaagtgacaggcttaaaaaatgctcacctggaaagaaagaatggtctatatatcaaaaactgataggtgaaattctggctgagatcttttgtcctccactgcaatcccctatgcctgaaaacagcgattacttaaagaccaatagaagggattttatattatcaaactatgccaaagatggattctgggaatttcttcgcagtaattacaaagctgattacattgtggtcgacgcaaaaaattattctaataaaatcaaaaaggatgaggtgcttcaaatagcgaattatttgaaacctcatggtgcaggaatgtttgggatgatatttactcgaaaaggcggagatagccgaggatgcgaaaccacattaagagaacaatggatattacatgggaaattaattttagttttcgatgatgaagatgttgaaaatatgctggttgcttcttcaactggaacaactactgacattattggccaaaaaatagaaaagttcaggctttcaatgtga

SEQ ID NO: 82298 - DNA, 1200 bp, Citrobacter koseri
atggcacaagtcatcaatacaaacagcctgtcgctgttgacccagaacaacctgaacaaatctcagtcatctttaggttcagctattgagcgtctgtcatccggtttgcgtatcaacagcgcgaaagacgatgctgcaggtcaagcaattgctaaccgtttcactgctaatattcgtggtttgacacaagcttctcgtaatgccaacgatggcatttcgattgcgcagactaccgaaggcgcgctgaacgaaattaataacaacttacagcgtattcgtgagctggcggttcaggcgaataataatactaactctgattcagacttatcttctatccaggatgaaatcacggcacgccttgcagaaattgatcgtgtttcagaacaaactcagttcaatggaaagaaagtattaagtgaaacgcagagcctgaaaatccaggttggcgcgaatgacaatgaaactatcactattgatctgaaagaagttaccgcagaaaagctggggcttaaaggttttaacgtttcatcgttcaaaccaactgaactatcgacggcggatgattttactaaagcctttggcgctgatgcgggtgtcactgcggttacggttgctgaaaatactgctaatgatttagctgctgctcttggcattgatgatgcaaacgtagcatttgatgcagatagcatttcacaagataaaagtggcaacctttatgcaaaagttactattacggctgctgatgctgatgaagtgactgcattaaaagaaaaaggcattgatgttaaagcgggtgaaccttcttctttttacatcgctcttaaggcaggtgatgcggatattacaacgaaccccggtaccgcagcatttgaaattgatacagatggttttgatgccagcaatttaaaagctgaagttactccgactgctaatcccttagatgcaattgacaaagcgttgtcacaaattgatcagcaacgtagctctcttggtgcgattcaaaaccgttttgaatctgccattaccaacctgggtaacaccgtgaacaacctttcttctgcacgtagccgtatcgaagatgctgactacgcgactgaagtgtccaacatgtctcgcgcacagatcctgcaacaggcgggtacctctgtactggcacaggccaaccaggttcctcagaacgtgctgtccctgctgcgttaa

SEQ ID NO: 82299 - DNA, 1407 bp, Citrobacter koseri
atggcttcatttacatcattaggcgtaggctcaaacttaccgctggatacattgctgacgaacttgaccactgctgaaaaaaaacgtttaactccgattacccagcagcaaagcgcaaatacagcccgcctgacggcatacggaacacttaaaagtgcattagaaaaatttcaaacagccaataccgcacttaacaatgcagacctgtttaaaagtaccaaaatcaccagtagcactacagacttaggcgttgctaccaccgctggtgcgtcaccggggctgtatacagttagcgtaacgcaactggcgcaagcacagtcgctaacgaccgatctggatgtcagttcgcaaaaagataaattaggtgatctgaccgcagatacccgtacactgacaattgagcaaaagggccgcgaaaagccgttagaaattaaactgacgaacgaccagacatcattagaagggattcgcgatgcgattaacgatgcagacagcgggatttctgccagtatcgttaaggtaaaagaaggcgactaccaattagttttaaccgctgaaaccggtactgacagcgagatgactatctcagttgatggtgacagtaagctgaatgatcttcttgcctacgacagtacaactggtacgggcaatatgaagctgttggttgcggcccagaacgcgaatttaacggtaaatggtattgagattgagcgccagagtaacaccattactgacgcaccgcagggtgtaacgttaaccctgacaaaagaagtgactgacgcaaaagtcaccgtgaccaagaccaatgataagtccactgaagctattaaggcgtgggtcgatgcctataacgcactcattgataccttcagtacgttgactaaatacacggccgttgatcaaggcgctgaagaacaagactcgtcaaacggtgcactgttaggtgatagcgttgtacgtactatccagactgggatccgcgctcagttcgctaatggcaacagtacctcaacattcaaaacattaaatgagattggtattacgcaagacggggcaaccggtaaattaaaaattgatgataccaagctgaaaaaagcactggacgagaataccgcggctacacgcgaacttttggttggtgatggaaaagaaaccggtatcactaccaaaattgccgaacaagtaaaaagttacctggctgatgacggcattattgatagtgcgcaagacaacattaacgctacgctgaaaaagctgactaaacaatatctggcggttagctccagcattgacgatactatcgcacgttatcaagcccagttcacgcaactggataccatgatgagcaaactgaataacaccagtaattatctgagccagcaatttactgcaatgagcaattcctga

SEQ ID NO: 82300 - DNA, 795 bp, Citrobacter koseri
atgcagaaaagcttagcagaacgatttgactcatttgaagaagactttcaagacgttttatcgaccaaatcgatgcaatacaactcgttgttgaacgcaaacaaaatgtatgtggatgcagcaaaatataaaatatgggtcggacgggtcaaaaagttactggaagacagctatggacaggattctgaattttacaaagactttatcaaggctcaaaaaggattttatgcctcaaattatgaaattctcaccacacaattaaaaccggtttttgatgccgcaaaagctgatctagattatgccctccctctgaatactagcccagtattgaaagaaactgacagattagatctgataattaacgtgcttgaaaggtttccgtcgttctgtcgccagctgaaaaaacgatataacaacagagatagcattgaggtaaccgacgagtatgacgttcaggatctggttcatgctcttctcacccttcatttcgatgatgtcaggccggaagaggcttcgccgagttatgcaggctcgtcctccagacaggattttttgctcaagaaagaaaaaatagtaatcgaggtcaagaaaacacgtaagtctctgggggcgggaaaaatcggagaagaattaattattgatatggcccgttaccgcgcccacccggactgtgacacgctggtctgttttgtctatgacccggatggatgggtgaataacccgaaaggtgtggttgccgatctggaggggggcgattcagaaggcaagatcagagtggtgatagcgcagttctga

SEQ ID NO: 82301 - DNA, 5112 bp, Citrobacter koseri
atgagtttagaaataaaaaaacaaagtaacccgttttctactggtggtggaggagttaatttcgaaacaagagttcaagcagctttcgcactatccttattgactaaatcctgtgttccttgtttgagtaactatatgagggctaaagagttaaagtttcagaacaaatatgatggtgtaaacactgatgattttgtattgactgccacagacaattcaaataatgaaagtaagatctatgctcagattaagcatgaaataactattagcggctcatcaaactcagtatttgcagaagttataaatagtgcttgggcggattttaaaagtgtgggctttaagtcagaaagagattctatcgcgttaataacaggtaatttagccaaaactgacataaataatactttgccgttacttgaatgggctaagttttcatcgaattcaaaggattttataaagaaatctcaaacccaaggatttacaagtgaagcaaagctcgaaaggttagaagtatttagagatcaacttacttatgcgaataacggggtagctatctcagaagaagaattgtggtctttcttgaaatcgtttcagatattaccttttgacttagatgcagaacattcaatcgtagcaaacttactttgttcattgattcagtgttactcagacatattaccttctctagtcttagctagacttgtttcctgcgttcaaagtttcaaccagaatgcgggggttttaactcaagataatataccagaagacgttaaaggattatttaataaatcaagccgcttacattttgagaatgacttgataaagctttatgagcgcagtcagcatatttttgaaggtatttctacaaatataaatggactccatgttgataggtcagaacaactggcagcactatctagttgctatagagatagtgagtttttatttgttaccggtgcaagaggggctggaaagtcgggcgttgttaaagattttatcacaacaaaaaatatagatgttccagtcttctacttaagagctgaagatttagataaaagtcacttaaatgaagttttcacttccatgggaattacatcttctttgggagaaattgaaagtcatttctcattgcttcacgaaaaagtactcgtaatagagtccctagaaaaagttttagaactaaattatccaaatacttttgttgagttattgcaatacattagaaaacagtctggttggactatcattgcaactggccgggactatgcttatcaacaactgtcatttaatttcctacagccttgctctataaattttagcagcgtgaatattgaagggcttgaagatagtcaagtcgagcaagtttgcgagcatattccagagctaaaatctttagtatctaataactcattagtagaactactaagaataccgttttttattgagattgctgtaagagcaataaaaaatggcgctcaatttggggttggagatactgaagaagactttagggatatagtgtggcggactgtcgttgcaaaagaagctgatagaaagtcagggatgccagatagaagaagagaaacctttattaaaatagcaatagagagagctaaaaagatgctttttggtgtcagagcaagcagttttgacccggaagtaatcgcaaagttggaagaagaccatttgatctacagagatcaaaaatcatcttgtgtaagtcctatgcatgatgttttagaagattgggctttagaggagttcatcgatagggagcattttgataattctcataatgttgcaagctttttgttaaatataggaaatgaacctgcgataagtagggcattcaggttatggctatataggaagctaaaatttgatgatacaactaatgaattcgtagaaggtttattatcttctgatgagatagagagttattggaaggacgaggcaatttctgcaatcatgcagcatgactcccctggaatatttcttaattcacttaagcaccagcttcttaaagatgattgtgctcttttgacacggttttgttttattctcagaataacgtgtcaaagaccaatatctttatacaacggactactgataaaagataaaaaatcgggattgctaaaatcccttttcctaaagccatatggagaaggttgggaagcactattcaattttatttatgaggaaaaagataatttgagtagccctgtgcgtactcaaactattgaattgatagatgaatggtctggtctcattaatatacatgatgagttgccaagagcgtctgaaaaggttggttttttaagtttatggctccttgaaaaggttaaagactcatatcgtggtgaggggcaaagaaaaaaaatattaaatgctttattaaaagtttcaacagccattaaagatgattttgatgaattgatgaaacaggacgttttcatctcaaagataaaacctagacgattaagttatgttgatgaactgagtagtttggcacttataggctttaatattcctatgttgtgtaagttttatcctgacttcgtagttaaactttcaatgcatgagtggctgctggaaaaagccgaagagaatgattatggctacgtgtcatatcgaatagacgtagaggaatcatttgggctagatacagaacgaggttttttccctgcgagcggtgccaaaggccctttcaaatatcttcttcaattcaagccaaggctaggcttagattttattattagattgtgcaatttgacagcacaaaaatattcagaatcggaattttctaaacctcaagacaatgaagaagacactatttacgccttcgaaacagtagctaaacaagtcgatataactctaaatgatggcacagtagttaaacagtatgcatctcctcacctctggaagggatatagaggacagtctacgttgccctacttattacagagtgctcttatggcgttggagaactggttagttgagtacgttgaaaattgtggtgagaataatgaaatagattggatttttgattatgttcttcgctctagtaattcagtaatgcctacatctgttttatcttctgtggccacaggtttccctaataaagtaggtaaagccgcctttcctttacttaaaaaagctgatttataccatttagatttgattcgaatgactcaagaaatgggtgaaaatgagatgcatttctttggtcttaatagggatgcattgtcgaaaatatacatggaagagagaagagaagcagcacttagaccatggagaaaagagtcattagaaaccttattaacaaggcttcagttcgtaaatgacctaagggatgatgttttaaaaattgttgatgaactgaaaaatgaagctactgcaagtaatgaaaaaagccttcggtatatggtgcatagagtcgatacaaggacttgggaagtaattgaagacaaaaaaaatgacagagtattgtttcaaagctcatcagagcttccggaagatttaaagctggatcaacaagagtttaatgaaaagcatgcaatggataacaccgtaactagtttaaacttatggggtagaaaactattcgatgagcaattactagaagaaaaatacttctcttcatatcaggatgcgttaatagctactaaggggttgctcagcgccctccaaaaaggtgaagttcacaactttgccgatatggcggttggtacaatcacaactgttgcagcggtttgtgtccgtgatatccttttagaattgagctatgaagataaaaagtggtgcttaggaattatcctagagtcaatattcatgcacgcagacaatatgaatgggacagcagcacatgataagactgattattatggctctggagcatgtgcatttgtcttacctaagttatttgatttagatctagattcagaacaaatagaacagttgaagtttgctttagctacagcattaacgcatgagaacctgaacgttagtgcttgtgctgcaaagggagtaagagagtttctttggtctagagacgctgaattagcatcccgttgtataggtggaatggttgagtatgccagattacgaaggaaagatagtgatgtacgtaggttttattatttacaaggtgctgaattgcaagccgcactcgaaaaatggaatgatcttttaacaacttttcgtaacgacttggttgagggaaagtttaagctttcagttaacgatatatctttggaaagccactgttcgtggtttattcatttaccaatgctaatggttccttactgtactaaggatgagatacaaattcagttggtcaataggttaatgagttttgtatttgatgcggagtatcaaaaccatcgttcgagtggtgatgaaaaaataaatcatgaaattaaaaagcagattcaagactgtctctctgaacatgttgtttcttcaagaaacaataacttcatgccctttaaagatctattggtattagggtgttcaaaagctcccggcttcatttattcgttaacactctcctatcatgtctctgtagaaaaagaaggtgattatgatgctatatgggcactttggtgcctgttagcaccagaagcacacaagatagctttgaatgatgttaatgaccattatatcggtttacagaatgacctaaatcagctactgcgtggaatgatgtatgcggattgcccatggcaaggacatgagaatgaagagaaagatatgaagcaaggtgctaaatatttgctcggttttgcaaagcaatctgcacataatagccatgtatttgaagccttgtcttcattgatttataacttctacaacgtattcttcgaagaaggcattcttattttagctgagcattacagtgccaatcgatatattatcgggaagcaagtgaatacagcattctatatagaaatggtggttggaagatttttgcagatagaaaatcgaggaactcttagtagaagaatgtacgatatatgtctgcttctcttaacaggaatagtagaaactggctctgctagagcttattacttacgtgaagaattgattcgttctcgaaagatttcagcctag

SEQ ID NO: 82302 - DNA, 972 bp, Citrobacter koseri
atgtccctgtccgacgcgaaaatccgcagtatcaagccttctggtaaaccctttaaactgactgattcacacggtctgtatctgcttgtcaatccgggcggttcacgcctctggtatctcaaatattgcttcaaccgaaaagaatcccgtatcgcattaggtgcctgtccgcaggtttcactttccgacgcccgccagcagcgcgacggtatccgtaagctgctggcgcagaatatcaatccgcacactgaaaaagccgccgcgtcaccggaaaaatgctttgaggccgttgcggtggcatggcacaaaaccaacaaaaagtggtcggctgactatgcagagcgcatccttgccagtatgaaaaatcatatctttccggcaatcggtcatcagcccgttaccatgctgaaaacgcagcatttcacggcgttactgaaagttatcgagtataaaggctttctagaagtcgcgtcccgtacccggcagcaactctgcaacatcatgcgttacgccgttcagcagggactgactgaaaacaatccggcactgcatctggaaggcgttaccgcgccgccggttaaaaatcattatccagccctgccgctggagcggttgcccgaattgtttgaacgcattggcgactatcagcaggaacggcagcttacgagactggcggtggcgctgactctgcatctgtttatccgttccagcgaactgcgctttgcccgctggaacgagatagatttcagacacaaagtctggaccatccccgccacacgggaaacgattgagaaagtccgcttctctggtcgtggcgcaaaaatgcgtactccacatatagtgccgctttcccgacaggctatcgccattctcaagcagatacacgaaatttccggccatctggaactggtgtttcccggcgacgacaatcggaaagataatggttttgacattatcaaattatatttatga

SEQ ID NO: 82303 - DNA, 1041 bp, Citrobacter koseri
atgacttgggtggttggagggaactgctttaatgggtttgtctgcgtagccgatattcaggcaacaataacattgactggcggggaagttcgttattttaattgcattcaaaaaatacaccaaataggaagtaatttatgcgtggctttcagtggtgatattaggtcaggtttcaaaatcatcgagttattgagggaaaatattcatcaaaactttcaggatggtgaatactttgatattgatggccaatctaagatattgataggttttcttaattgctgttatgattatatcaatccgaaccataagccttatcttgaattaatgtttctatggaattcacaagaaggcgatggacttctatatcgcccattttgcatgaaatttaaatcgccaaactttactatgaattcaaccgcattgcctggggttgctcaatcaggtagtggaatgactaatagcacctttcaggcaatatcttcttttttagaggggaaggaaatttccacgccggagtacaaaaaattattttctaacattgaaggtgctccagatattatcactcttaaaaatttcaaaaacataattctgaatgaagcgtcaaaagttaatcagccgggtataagtcgaacattgatttcttttgaatcagaaataccctttgacgagatttatagtgagcaacaaaacaagaatttaaaagaagcatttatcaccctaggtttaggacccactgaaatgaaaactgaaaattacagattatttctttctgtgctctcagttcctgatgtccagaaaaaattagattatatcaaacgatataatccatttttgtataactcgataagggatatattgcaacaggggaaaaagtcaataaatatacagccaataacagaacttccgccaattgttgtcgatcgtcatgtgagtgatgaagaagaaattcactcttataaactaataaccacgtggcctgaacttaaagcatttttgggcgaaaagcgcattagtgtatcggctatgcaggcaacagcgtga

SEQ ID NO: 82304 - DNA, 771 bp, Citrobacter koseri
atggcaatattagactataaggttggtgatattcttttaatcaacaataaaagcaagatgcaaagttttaatataaatggtcaaagattaatcagaaaaacaaaaaatgtgaatgctacacatgtggcgcttagcctaggtaatgggatttttatacatgctgatgctgcaactggagtagatctcgttttttttgcggatattttagagcaatcagatggcaaatggcgtgtgataagaccacccttcataaatgctgaaaatgaagagacacttaagaaagaagccatctatcattttagtaaagcctacaattatggttttttaggtcaagaaaaatatgatgctttattttgctcgcaactagtagataaggtgtttcaatctttaggttttcaccttttcaaacatactaatgcattcccagtagatttcgagaatttatctaatagttcccaagattggattgacgttaccaaattttatagtgatggtttaaccgacaatacttttaagttgcttcgtcctcagtattttttacgaaaaaccatggtgtctataagccaaaggcagaacgcagcaagtaacggaatgataaatacattaaaagaaatggtcaatctaacaaattctttaccagaatatcaaagagagaaggttgacctaaaggatattgaaagttctataaaagaactggaggaggagattggaaatcggctatataatttctggaacgatgatttaaatgacttttcgaaacgtaatagttag

SEQ ID NO: 82305 - DNA, 246 bp, Citrobacter koseri
atgatggagattaaggagaggttggcgctgagtgcgcgtccgggaaagcttacgcttatccgggagggcatgttcctgaaatgttaccagcagtcattgttttcactggtgcattacgtgtatccggatattaaagttaccggacgcaggataaaaaactcggcggacgggttgtattcagcggcggctttcctgaggctgtgctggcaaaggtcctgccggatgccagttcatgtgcactggtaa

SEQ ID NO: 82306 - DNA, 1119 bp, Citrobacter koseri
atggaacttcagacaaggctcgtttttattgacacctctgcatacgaaacaaaaaaacttcagttcgggcatttcgttctgagcaggcttcagcaactcgtagaagaagaaaaaattcacctactcatcacagatgtggttcgcgcagaaattgagaagcatctaaaaaaatacgcagaagcggcggtaaaggagcataaaaatttccgtaaaaaagggagttttttatgtgttgctgatgaggttacagggggcggtcttttcccagagatcaacgcagaagctgtacttaacgcggccatgggcaaattccgggcgttagtggataaccggttaactgaaaccgtgtctgtcgctgatgtaaatccgaaacaaatatttgatgattatttttcaggtgccgcgccctttcaccgggaggcgaaaaagtcagagtttccggacgcattttcacttgcagctatagatgcagtggcaagagcacgtcagaacaaagtgtatgtcgtcagcgacgacggtgatatggaggcagtagcggcagctaacaataactttattcatcttaaaagcatcgatgtgcttcttgatctagttaacaggaatgatgaagagttggctgaactttcaacgtttgccgacagtattctcgagcaactgaaagaagacgtgataagaatggcccgggcacatctaaatgacgcagaatttatgcccgtatcgtcaagcgaatacgatcctgagatctatgaaatagagatatcttcagtgagcattgatgaagtgcagctgattgatgtcaataaagataacgccacctacgagatcactttcaaggttaatgtaacggccgcatacgattacgaagattactccggcgcagtctgggataaagaagatcgtgtgtactacggcgttgaggtctccaatgacacctatcgtcatcaggaactgtataccgcgtctcttgagattggatttgtggacggaataagggcaaatgcagagattcatctgctgagttttgatgacagtatctttagccttgatctggatactgcagaacatattgaatatgtgccggttgtctcggctgagccccaaaatcctgatctcttctaa

SEQ ID NO: 82307 - DNA, 387 bp, Citrobacter koseri
atggaggcggataaaatagataaactgcgtggttccctcgcgaaaaggttgaaccgccccgatatcaccagtcatttgccagattttcctcttctgagttcttatatatgggcatggcgtgatatcagcggaaatgaggctgtaaaggggtgggttgacagcatgactggcgaagatgaggcgtttcttaaactgcttctgcaactccggtatcatggaacgagttcggaagacggaaattatcgggctctgaaactgtcagacatggcagtgcttatgtgtgatcgcgacaagattgaagagcgcatcgaccgtatcggaaaagaagagaaattctcagaactggttggtgaagtagagcaggccatcaagagaaaccatttctga

SEQ ID NO: 82308 - DNA, 516 bp, Citrobacter koseri
atgatgacggcaagtaagcgcctaggtagtcaggcttactggcgcaactatttcgctttttcagccccgcaaaacgtccttccgccgacgatcttcgaccaattattcgagattgcagctcatcccggtcagcaacaggaactttctgatacgctgctcggctatatacaaatcaagaagtactccacccggacctggtttgaacacattctgacccagctgaccgctccgctgatagaaacaaggacatctgcagaatgcaggggcctgctgcagttcttatttaactacggagatgaattgctggagcgatacagggcagacaaccacaggtttgcgccacatgatcttgatacgaacggcgtggctgatcggctcattatcaggatgcaacagcatgattctgaagaaaacatggcagtactgacagaactggtcatggaaggccgcgcctggtactggattgcagaatattttcgccatctgctctggcagcacgggctggtcggtgactag

SEQ ID NO: 82309 - DNA, 231 bp, Citrobacter koseri
atgccgaaggtccgcccctggcacaaagcggaccgcctgaagcgttgcgaggtctgctatgagcgaaaggtggacgcccgcatagcattaaaaggtgtccgatattttaaagtgggcagattacttaacacgcttccccgtttcgccaatgactttctcaccatcctctttggtaattgctcctttctgacgttccggaatgatattgctgggcggcgtcctgcgggctaa

SEQ ID NO: 82310 - DNA, 1209 bp, Citrobacter koseri
atgtcgcgtgtctcgcaggccaggaacctgggtaaatatttcctgctcatcgataatatgctggtcgtattaggctttttcgtggtgtttccactgatctccattcgctttgtcgaccagatgggctgggcggcattgatggtcggcattgcgctcgggctgcgccagttcatccagcaagggctgggcatttttggcggcgcgattgccgaccgttttggcgcgaagccaatgattgttaccgggatgcttatgcgcgcagccggattcgcgacgatggggatcgcccatgagccctggctgctctggttttcctgctttctttccgggcttggcggcacccttttcgatccgccgcgctctgcgctggtcgtcaagctgattcgccctgaacaacgcggtcgtttcttttcgctgttgatgatgcaggacagcgcgggcgccgtgactggcgcgctattgggtagctggttgttgcagtatgactttcgtctggtatgcgtgacgggggcggtactgttcgttttgtgcgccgcgtttaacgcctggctgcttccggcgtggaagctgtcaacgctgaaaatcccggtacgcgagggcatggggcgcgtcatggcggacaaacggttcgtgacttacgtactgacccttgcgggatactacatgctggccgtacaggtgatgctgatgctgcccatcatggtcaatgacatcgcgggatcaccgtccgccgtcaagtggatgtatgcgatcgaagcctgcctctcgctgacgctgctctacccaatcgcccgctggagcgagaaacgttttcgcctggagcaccgcctgatggccggactgctgctgatgtcgctcagtatgttgcctgtcgggctggtcggtaatttacagcagatcttcacgctcatttgcacgttctatatcggctcggtcattgcagaaccggcgcgtgaaacgctcagcgcctcgctgtccgatgcgcgggcgcgcggcagctatatgggcttcagtcgactgggtttagccattggcggcgcgatagggtatatcggcggaggatggttgttcgatatggggaaagcgctgcaacagcctgaactgccctggatgatgcttggggtaatcggaatcatgacctttcttgcgctcggctggcaattcagccacaaacggacgccacgcggcatgctggagccaggcgcctga

SEQ ID NO: 82311 - DNA, 1023 bp, Citrobacter koseri
atgccatttcatggtttgaacttaacgttcatcattattaggggtttttcgatgtctttcacaacacacacccaggatgagcagcgtcagcctgccgcagttcccactctgctggcagcctgcatcgctatggcattgatgccttccaccagcttcgccgctaccacaacagaagaaacaatcattgttgatagcgcatcacaagccgacacgtccagcgatgaagaacaggactacaacgttaaaacgacaaccgctggcactaaaatgcagatggcgcagcgcgatattcctcagtctgtcagtatcatcagccagcaacgcatggctgatcagcaattacaaacccttggcgatgtaatggacagcacgctgggtatcagcagaagccagtcagactccgaccgcaacctctactactcacgcggtttcctcatcgacaactacatggtcgatggcatccccacctattttgaatcacgctggaatcttggcgatgccctttctgacacggccctgtttgaacgtgtggaagtcgtacgcggcgcaaatggattaatgaccggaaccggcaacccttccgcgtctatcaatatgatccgcaaacatgccaccagccgtgaattcaaaggtaatgtgtctgcggaatatggaagctggaacaaacagcgttacgtaaccgatttacaaagcccgctgacagaagacggtaacgtacgtgcgcggattgttgcgggttatcagaacaatgactcatggctggatcgttataacagcgagaaaacattcttctccggcattatcgatgccgatctggggagcacaaccagcctttccgccgggtatgaatatcaacgcatcgacgttaacagcccgacctggggcggtttacctcgctggaatacggatggcagcaccaacaaatatgaccgctcgcgcagtaccgctccagactgggcttacaacgataaagagtttaataaagtctttgtcacgctgaagcagcgttttgcggatacctag

SEQ ID NO: 82312 - DNA, 861 bp, Citrobacter koseri
atgtggcaggctatcagtcgtcttttaagcgagcaattaggtgaaggcgaaatcgaactgcgtaatgaactgcccggcggagagatccatgccgcatggcatttacgctatgcgggacgcgattttttcgtcaaatgtgatgaaagagagctccttcccggctttacggcggaagctgaccaactggagctgctttcgcgcagtaaaaccgtcaccgtcccgaaagtctgggcgcagggctcagacagagactacagttttctggtgatggattatctccctccccgtcctctggatgcccacaacgcctttatcctcggtcagcaacttgcccatttacatgaatggagcgaccagccccagtttggccttgattttgataacgccctgtccaccacgcctcaacccaatgcctggcaacgacgctggtcaacattttttgccgaacaacgcattggctggcagcttgaactggcggcagaaaaaggcatcgcatttggcaatatcgatgcgatcgttgagcatgttcagcagcgtctggcctcgcatcagccgcagccttcgctgctgcacggcgatttatggtcaggaaactgcgcgcttgggcctgatggcccctacattttcgatccctcctgttactggggcgacagggagtgcgatctggccatgctgccgatgcataccgaccaacctccgcagatctatgatggctaccagtctgtttctccgctaccgctggattttctggatcgccagccgatttatcagctctataccctgctcaatcgggcgagactgtttggcgggcaacacctggtggtggcgcaaaaagcgatggaaaggttgcttgcggcatag

SEQ ID NO: 82313 - DNA, 930 bp, Citrobacter koseri
atgatacgtatctatacgttaacacttgcgccctctctcgatagcgcaacaatcaccccacaactctatcccgaagggaaacttcgctgttcatcacccgtttttgaacccggcggcggcggaatcaacgttgcccgcgcgattgcccatcttggcggaaccgcaaccgcgattttccccgcaggcggcgcgaccggcgaacatctggtcgcacttctggccgatgaaaacggccccgtcgtcaccatcgacgccaaagactggacgcgacaaaacctgcatgttcatgtggagtccagcggggaacaatatcgctttgtcatgcccggcgccgcactcgacgatgacgaatttcgccagattgaagaacaggttctggagatcgaatccggcgccattttggtcatcagcgggagtctgccgcccggcgtcaagctggaaaaactgacgcagcttattgccgccgcgcagaaacagggtacccgctgcattattgatagttcgggcgatgcgctcaacgcggcgttatctctcggcaatattgaactggtcaaaccgaaccaaaaagagctgagcgcgctggtcaatcgcgaactcacgcagcctgacgatgtgcgcaaagcggcgcaggaaatcgtgaagagcggcaaagcgcgccgcgtcgttgtgtctctggggccgcagggggcgctggcggtggatagcgaaagctgcgtccaggttgttccccctcccgtcagaagtcaaagtaccgtcggcgcgggcgacagcatggttggcgcaatgacgctaaaactggcggaaaacgcctcgctggaagagatggtgcgtttcggcgtctcggcaggcagcgcggcgacgttgaatcaaggaacacgtctgtgttcccgggacgatacgcagaaaatctacgcctggctttctcagtga

SEQ ID NO: 82314 - DNA, 789 bp, Citrobacter koseri
atgacattaaagcggcccgatttttaccctttggcaatggcatctgaaaagtgccatatcatgtctgaaaatttactgaatgattggcttgatcataaagttccactctacattcggttggatgctttgccatgccagatcgtcaggtaccttggtggaggccaatttcttcttaaagattgggagaggaaaattaaatcaggcatggattattatcagcatgaaaaaatgccagagtttaaaataaggcagttttacccggagaaagatgcagaaattgaatgtcgacttctggaaggtgatttggggatatgtcgttatacctacaatgggcatgcacatggttactggcgggtaaaggctacgccagtgactcgttttgctgaagaccattacgtgctaacggatatggatactgtcagagaaaataataatattgcaggtgcgattgtggtatatggtaaagatgatagggattatttgatatttccaagtggagtttttcgagataaatcagaactgttttttgatgcaaatgaattgtcaccacaaagtgtagaaagcatacccggcgtgaaaaaagaaaaacaaacccgcatttctaggccagaaagaatagccctgtatgtcatgctgaaagagcattatcttgatggcaatggtgaggttaatttttcaaaaatggcggagatgcttactgtggcatccaaaaaatatggattcagtgactcattcagtgatgacactatcgctaagtggataaaacgtattgagaatgaaaatcaatag

SEQ ID NO: 82315 - DNA, 138 bp, Citrobacter koseri
atggccgacctgactgcctttgagcgtagtaagctcgaaaagctgtttgggatggggggcggttatgttttgaatttttcagaccgcacctattccgaattcttcattgattaccgtgtggaaatcgatgcagcctaa

SEQ ID NO: 82316 - DNA, 267 bp, Citrobacter koseri
atgaaaccggtatcgttcgtttcggtgtgggcaaaaaggaaagaactgagaatctcagatgatcgcctctcccggcttctttatactgatgaagatgaagaaacaactacccgtttagggtatcacattaaagactcagatcgtccgcttgcgatgaaagctgcaacgatagacttcattaggcagttcaattttttcatgaaccgaaatccccacctgaaaaacatgagagtttcagatgtgatgaaactctctgattctaactga

SEQ ID NO: 82317 - DNA, 591 bp, Citrobacter koseri
ttgaaaaactggtcaccagagcatactaaagaaatcaaagcttggcttgacatagataactatcgcaagctcgaagacatcagtttaaatgccttgtatcacgaactttgggcaagagcgcttctgtacaagccagggcctactgacgaagaaaagaaagggctatgggtgtacatgactgaaattttcagtgggaacccccatcttttcaaagggaagcaactcgattatccaacagttaacgatactctctacagtcctccacacatttttatcacggatatcaccaggcttgctgaacttagtgtgatggcccttagtgtgaatcttttcacttgggaggaaggaaacgatgaatattgtgttaatgcgcctcatcacgaagcttatgtgtcacaactcttgtcccccttatgtgagaaaacggtgttgcttgaaatcgatcttggtagtggtactgacgatgaaatagccgaatcgataaaagcggccctgccacaatggagatcggtaaaaggagtggaagttaatgaaaccggtatcgttcgtttcggtgtgggcaaaaaggaaagaactgagaatctcagatga

SEQ ID NO: 82318 - DNA, 993 bp, Citrobacter koseri
atggacttagtcatgtccttattacaaaagggattattagaaaaggcattagaccttgccatttctgaatcattcttcaatgcaacgtcgcctgatggtataaagaatgctttaaaagctggctatgatattaatgctgttcataataacggagacaatgccctttttagctgcagaaccctggaagccatggattgcctgctaagttatggaattaatatacaccatatcaacggacatgggcaaaatgcgctctttcatcaaaaaaacccagaaatactgaagaaactgattggactgggtttagacacctcgcatacggatactaatggctacacatgcatttttgaacattacaggaatgctgaaggactgacagaattaattaatgctggttgtgatataaatcacatcgataaaaaaggaagaaatattctcttcctgcccctctccccggaagttttatccgtagcaatagatgctggatgcaatgtcaatcaaattgatcattcagggaaagggtttattgacaatgtatatgattatgaattacatgatatcattctctcgcatattgatagatttgacagaagaacgctgcatgtagatttttgtaatctcgactcagcctttttcttgtattacctttctgaacatggattcaaaatagaacttaataaagaccatttcaccattaacagttacattggtgattataaagaaatcttatccatacttgatttcatcagtgaaattcatgatattcacttctataaatacaaaggcggccctctctataaagatatcgacaagcgaattgtaaagtggatgataagaaataagctcttggttgatttatcaaaaataaataaacacaaggattacgaagaaattaatttatacaaaatccgtcgcgaacagaaagaaacctccaagcatttaaaacctgctaaaagtatatctgtaacagttaaaaatggcggaagattgtga

SEQ ID NO: 82319 - DNA, 2598 bp, Citrobacter koseri
atgtctgaattagcacaagaatcaatcggaaccaatgacttcgaaaagtggctgaatgaacgtagtaactggcttcaaacggcagcaaaacagcttatcgagaataaacgtttaccaaatgaggtcgaactcactgagctggttcgactctgcaaactggaagcagctaaacaaaatgaccctgggttcttgaaggttgcacctggctcattctcagcagggttgctacagcgaattgtacgtattgaagaagtaagccaagtatttggtgtaaatgccatcaaaccaggggcgtccttaccattcggagctggtagtttagctgttatatatgggcagaatggctcagggaaaagtagtttttctcgtctgctcaaacaactctgtggctcacgttcaagggacgaaatccgcccgaatgttttcagcagcgaagagcatacatgcagtgctcaatgtcgaatcaccattgatggtaaacccgtagaaatcaattggcaggcgggggctgccccacatccgatgctcaagtatgcccaagtatttgactcgaaaactgcgactcaatatatgggacgcactgaatcaagctacgaaccgagcagcatgcgttttatatctttgctcattcagatctcaggaatggtttctgaacaattaagtcgagagaaggaaaagcttgtccgtgctcttccacttttcccaagtgatcttacagagaccgccgaaaatacttggttctactctcttaaagcatcaacctccgctgagaaaattgagtcgttttgccaatatgggaatgatttggaagatgagcgtatcaaaggtgaagctctgttagcagagaaagacatcaagggacgcctgattgcaattagtaaggaagagattgcctcagaaaacattaagcaggccatgaggttattgaaggaaggtcttgcggatgggaaagccgaggaattgtttaaggcaaaagaattggctgttgcagcaagaaaggctgccaatatagttgcgcagcaggcattcgcaacagcccctctacaaggcgttggtgaaacggcttggaagctaatgtgggatcaagcgcgaaactactctattgttcatgcttaccatagccgcgaatttcccgttactactggaggtgcgtattgtgtgctctgccagcagaaacttacggaggaaggctcagctcgactcaaaagttttgaggctttcgttacggctggtttagagaccacggcaaaaactgcggaagccactagcgctgaactcattgcgaaggtcgttcagttaccttcaatagaggattggattgcacggctggctcaattgaaatttgatgagacctttgctcgtgcctgttatgaaactttgaaagcaaggcgctcacagtttgaggcatgtaccgccgttggttctatcatcgcattcgattgggcgcttattgatcaggcagttgaaaaacgtgctatcgacttaattgctgagaagattagtttgatgcaattgcaacaagatgggcaacgccagcaacttgaaaaacgcattaagcaactcaaggcactgcaatggttatgtcaaaacaaaatggcaattctcgccgagcgtgagcgcttggttgcagtggatttgctagataaagctgtgagactaacggccagcaattccttgacaactaagcgtaccgaactagggagaactgagcttgatgctggatatcagagccgttttgatgcggagttaaaggtacttggtgggcgacgtttgccggtagtgccgcagagcaaagctcaaggtaaaggagtaataacttttgggcttacccttgtcggggcacgagctggcttcactcctgatgtaatactcagtgaaggagaagcccgcattgttgcattagcggcattcttggccgatacgactggttcgaatcagttagcccccttcatctttgatgaccctatttcgtcattagatcaagacttcgaagagcgggttgtagctaggcttgtcgagttagcgaagaccagacaggtcataatcttcacacaccgcctttcgcttgtttccatcattgatgctgtaattaaaaagcacagtgagaatccggctaatgagaaaattaaccataccgtgcagtcgcttagacgattagataaaatttcgggaatcttggcgcaacacagcttgcgggatgccaagcctgaaaagtcgcttaatatgattagggatcatgtcatccctaagctcaaaaagcatcaagccgatgcagatgccgatgtttatgatcttacggcaaaaagtgcatgcagtgattttcggataatcttggaacgaatagtagaatttgtccttttaaatgatgtgattgtccggttcagacgtgatgtcaatactaaagggaagctgcggggtatcaccaaggtaatagcagaagactgtgatcttattgacgcgctgatgaccaagtattcagtttacgagcactctcaatccgatgagctgcctctggttccggttgaactcgatgaattcgaaaaagatgtattggagctcattgcatggataaatgagtttaaaactcgaatcggctga

SEQ ID NO: 82320 - DNA, 891 bp, Citrobacter koseri
atggatatttctgacttcaatactgtcattgctttgacagaaacaggcagcattaccggtgcagcaaagttgctgcaccgggttccctccgcaatcacagcaagagttcataatctggagagacagctcggaaccactctgtttgtaaagtctggccgtcggtttcttccgacaaatgaaggtcaggtgctttatgagaatgcactgaagattatcgagctggttaccctggcagagcaacagatggtcaggccggtacctggtggtcggttccgacttggtgcgctcgacagcatggctgcaacaaggttgccagaaccgttggcgcgcctttaccagcaacatcagactgtgtcggtggagttggttaccgggataagccgcacactactcgatgcagtgcttagccatgaacttgatgcagccttcatcgctgacgcaccagctgatgacaggctggaacgtatgatcgcataccaggaagaactggttattatcgccgcagcaaatttcccgccgatacgttctgctgccgatttaaatcacacaacgttgctggtattcagcgacggctgctcatatcgcgaccggctaacaacctggttgagagaaactggactcagaccttacaggctggcagaaatgtcctcctatcatgcaattctgggcggtgtcagtgcaggaatgggggtgggcgtgataccaacccccatcctcgaaacgtttccgacacaggaactaatcacaatccatccctttgattctaaaaacagccaaataacaacagaactgatatggcgtaagggagaactcacggctaatacaggcgccctgattgatatcttgttctcaacatcgaaattggctgacaggcaagatgctgcaatctag

SEQ ID NO: 82321 - DNA, 780 bp, Citrobacter koseri
atgatgaattgtgatagcaatactttatttaacaagaaattaccgcatattctacttattcaggcgggtacacctcctgacgaactgagggatgagcatggcgatctgccattatggttcagcagggcaatggctctggcaacagatgcaattcaggtcgttaaggtatttagtggcgaaactctgccagatcctgatcccaacagaatcgcagttataaccgggtcatgggatatggtgacggataagctggaatggagcgaaaacacggcaaaatggatacgttgtgctattgaggctggtatgcctctgttcggtgtctgctatggccatcaactgatggcacatgcgctgggaggtactgtcgattaccacccacagggacgcgaaatgggatgtctggaaataaccctgacagaagaaggtaaagatgatccgcttacccgaggatttccggaaggttttagagcacatcttacgcacctgcagaccattactaaattgccacctggcgcacaatctttggccacatcaacacacgacaaaaaccagataatccgttatagcgcaaaagcggtctcaacccaatttcatccggaatttacacccgatattgcagcatcactgattcatctgcgctctgaaaccctacttaatgaagggttcgaaccagccgctatgcgtagtgcactagctgatgcaactgatgcaagaaaacttcttaagatgtttatatccattcatgctgcgcaggcactgacggtcattcccgagtgctaa

SEQ ID NO: 82322 - DNA, 696 bp, Citrobacter koseri
atgaaaaaactcggtttaatcggtggtacaggccctgagtctacattgctctattaccgcaaatttgtatatgaggcgaataaacgtacgggcgagaatttctttcctaatttaaccatcgaaagtatcaacgtatatgacgtactggccatgtgtggcaggaaggattataaatcactgacgaagtacctggcaaaggctgtcgggaatctggtggccgccggggctgaagttgtcgcactgaccggtaacacaccacatatagtcttcaatgaactccaggcgtgtacaacagttccgcttgtcagcattatcgagtccacttgtgcagaagttcagaatcagggcctgaagaaagtggggctcgtgggaacacgatttacaatggaggctgacttcttcaaacggcctttcaatgaagcaggtatccaggtggtcgttccgcaggctcatgaaattgattacatcgcagataaaatccacgatgaactcgaaagaggcattatcaagccacaaacgcgagacacatttactgcagtcattgcgcggatgtatcaggatgaaggtattgaggccaccattctgggatgcacagaacttccccttttgttcgcgggtacagagttacctgttaaagcactggatacggttgatattcatatagagacgttatttaaagctcttcagaaatattaa

SEQ ID NO: 82323 - DNA, 276 bp, Citrobacter koseri
atgttgatttataacgtttttggacggcatattggtgttcaacgcaagaatgatcggtggctagtatttcgtgccgacctgacggagagaaagttttctcgactttatgacatcgctattctagacgatatggcagaaggtgagattgctggctgggtgacattttccatgaagccactaccgagcgttatccaaatgtggagcgcatcgaataaggatttaatggatagcattacattgagtccgctcctggcacgaagcggccgaactaactga

SEQ ID NO: 82324 - DNA, 942 bp, Citrobacter koseri
atggaaattgagaaaaacacgattgatgatgttatgcgggctgtgtttgaaaatatcctgtcagatggggttcctgttgaaacaacacggggaccgacaaaagagattctgggtacacacatcattttaaacaatccgatttgccggattagcagaacagaatccaggggtaaaatattcacctgtctgggggagttaatgtggtacctatcgggcagtgacgatgtcgaatctattcgctattacatctcaaaataccgggattctgcagaaagtgatggcacgattaatggcgcttacgggcctcgtctctttggtaccaagaatggaatcaaccagattgagaatgtcatccggcttttaaaaaaacgcaacacatccaggcgagcagccatacaactgtttgacgcaaatgatatagcccatcccttcgttgatgtcccctgtactgtcgggctccagtttgcgattaggaatgattccctcgatatgtttacattcatgcgctctaacgatgcacgggcaggactggttcacgacatatttgcattcacgatgcttcaggaaatgattgcaaaaaccctcggtttaaatttgggtgtttatcgccactatgcggcaagtctgcacatctacatcgaggatattcccctcatcgaagctgcgctcaaagagggttatgcgccatctgtaccagttatggtagcaatgcccacagaggatataactaactacttatgcaacattgttgatgcagagaaacgcatccgtgagggcgatattccagatattgatgcgctaaggctgagtgaatactggaaagatgtccttcgtatgctggcgatattcagatgcaaaaaagataagaacctgccagctgctcaggccattgcagggaaattgcaaaatcagtcctacaaaatttatcttgagtggttgtga

SEQ ID NO: 82325 - DNA, 939 bp, Citrobacter koseri
atgaaacgacaggacctaattgatgaaatttcagaacagctcaaatcattcagtacacatgaaaccccgcttgagggattagatacccccgacaaaatcacaacgctcgccgcacagatactcgacagcaagcgtcgcattgagtacgtcggagccattggcagaaataagatatccccgctacggggaaatccccactgtgatatttttgatccgctacgggctgcgtggttgcatgtttatgaagggaatgtagatgaggcgtgctggcttattttcctgtctacccactttggcaaacatcttaagtacggttggcagttgtgcgccgacatttacggtggcctcggtggcgatgtatggacctgggagaaagtggttgcggaagtggacacctttcacgcctggtatgagggctgctatcgccagatgctggcagacggtcagaaaagaaggtttgggaaccacagaaagtacgaatccctcagaccggactgcaagcgcccccttccacgcgtcatcagctcatatgtagcgtgggtaggaaacgcaggtagtcatgaagcgcggtttgctgaagccaaagccgcatccagtagtcaggaagagtactttgatattctttaccggagcatgaaggcggttttgtcatttgggcgggctggaaggttcgactttctgacgatgctcatcaagttcggcattattgatgccaagccggggacgctgtatctgaacggggcaacaggacctctggatggcgcaaaccttctgttttacggtgaagcgagaaatgcggccaattataaagtattggacgatcttctggcgaggctcagcgccttcatggacatggggcagcttgaaatgcaaattcttgaagatgctctttgcaactggcagaaatcaccctctcgccacgtttactttggaggatga

SEQ ID NO: 82326 - DNA, 1083 bp, Citrobacter koseri
atggtttctgataacggatttaacccggactgggtgtcagcccccggagataccataatagacctcatggacgaacatggtttcaacgaagaagagctcagtaaaagagttggcctttccctgattaaaggtcgtgagttgatttctggtgagcttattctcactgagaagattgccaacaagcttgaatctctcttcgatgtcagcacgactttctggctcagtcgtgaagacaaatatcgccaacataaagatgcgatcattcgccaaaataatgaatgggttcagtctctgcctacgtcagatatgagtaaactgggttggattccgaagggcctgagcggtaataaaaaagtcgagtgttgcctgagctttttcggcgtttcatccgtacccgaatggtttaattattataaaaataaacagactgctatagctttcagaaaatccgaagctttcagaacggaagaaatggccgtaattacttggctcaagaaagctgaatatatttcgcggaaacagagaacttatgcatgggataaggaaatacttaaaggcagtctggaagatttaagaaaacattctcttgagcctgatcccaaagtatttcttcctgcgatacgcagcatactcgctgacgctggtgtagcgcttgtgatcctgccaacgccaaaaggatgtccagcaagcggcgctacctgtttttttgaacacggcaaagcgacactgataatgagttttcggtatctgagagacgatcatttctggtttacgttgtttcatgaggttggccatctggttctgcacaactgtgaacagcaccgcatagaaggaatgagtggcctttctgaaaaagaagaacaggaagcaaacgagttttccagcagcgtcctgattcccccagcataccgtgcagagtttgacacgctgactgggcggaactggaaaaatattattaaatttgcccggaaaattggtgtatcaaaagggatagtgctggggcagttacagcacgcccaaagaatcccctttgatcattttgccaaattcaaagtcaaatataaccgtgaagatctgtcctga

SEQ ID NO: 82327 - DNA, 1845 bp, Citrobacter koseri
atgccaataaacctacaccgcctgcttacgcaggctgccaatgctgacccgctcaataccgctaacgcagatgtacagcaaatgatcgctgacgggattgttattcggcgttctaagatatgccccgtaaagcgtaaacccgttaaggcggcatacaacacaaagaccgaagagttttattacaatgctgatggttccgctatgaccctgcgggagtggcgaacgctgcacggtgttcaaccgaagaagcaaaaacagcgctctgacacggggttgcggcaagtcatccagcccggtgacgcaattcattgccgacgagttgagctggagctgtggttaaacaagaagcctgctcgttatgctgacccgctgccgccagattttcccggtgttcgcgtagatgatgccgcattgaaacctcgcgagcacgccgttccggcatcgacaaccgggcagaatgcttttctcaaagcctgccgcgagttcctgatttgtgatgagaagaccatgcaccgcatcaacaggggcatgaataaactggaagcgatgcgcaatacagatttcaaacgctacggggactcagcggagtttcgtcaattgtggtgtggagagtcgaaacctaccgaggataaatttaacagtacaaatcatcattgtgacccgaacggcttggctgcattgtcgtctgtgccgtcactgaatacagccccttatgagttccgcccgctggttcgctgtgaccgaaacgcacgcgttagcctgctgccacccgatgggctggagtggaggccggggcaactgtctgttgcggatgcgatcttctcccgtggtagtgatgtgctggccgttctgcctacgggttatggcaagaccgccgccttcgcttatccattgatttatgagtcccgcgctggtgttggcctgtctgtaattgtggttcccactaataccctaaagcgccagattcttcgccagttgcgggatgctggcgttcacgctgtggcattcggtgacaagttgccgaggcaccgcaacgctcaacaactcgcggggctggctgccggggcgttccgtgttgctgtcgtttcacctgagcatcttgttccgtcgagtcaggtcttcgcggcgctgatggcttacggcgttgatcgttttatcatcgacgaagcacacacggttaaagactgggatttccggcccgcttacgaggccatgcagcactcgctacaacatgcctttccttcggctcaacgctgcgtgtttacggctacgctgctacgcgaaaatgagcgcagtttaatggcgtcgcttggctgccgtgatgattacgtaacattccgtgctgatgttgctcgcgaaaatatccagttgacgacagtcagacagtgccgcgaacgtttccgagcggctattggtctggtcgaggctctgccgaaagaagagaagacgcttattctcgtcaacgaccttaaaacgttgcgggcgtacctgaaactcttaggcgaccgggcgcggccatatcattcgaagacgatgcatctgagtaacgaggaacgccacgcaaacgccgagtggtttgccactacgccgggcgcgattctgattgctactaaagccttcgggctgggggctgatgtgccagacattcgcaacgtcattgttacctatattcctgatgacctgcctgacctcattcagatgattggacgagccgggcgtgatggtcaacctgcccgcgcatttctgctgtggtcatcgctggcgctggatgctgcgcctgatgagcttgcttacttctaccgccctgaaaactgcaactggcagtacatcgctaaatacctctga

SEQ ID NO: 82328 - DNA, 438 bp, Citrobacter koseri
atgcctgttaccgaacatgcgcagcgtcgtgctgcgcgtgcggatgcgctcgtcaccgcacaacttgccttcgccctgaacggctattccttcgatgggttagctgagcgccaccgccagactcttaatcgtgcggccatcttgcgccaagctggtacgccgctacagcggtattgcctgctcaataactgcgagccgtgggagtgtctggccgctgtgctgaaccgcatgaaaaggccggatggctcacgttgctggaaagctgtccgcctgtctgatcgggtttttaatggccgagtgtatccagtgcgcaagacgcctgatgaagtttacgccgccattgcccgccgtttatttctgccgaagcctgtgcatcaagaagtgatacagcacatccgtgcgcttggcctgttaccagttggagataaccaccaatga

SEQ ID NO: 82329 - DNA, 210 bp, Citrobacter koseri
atgacgaaatctgaatttgaagccggagcatgggaactaaaaaccctgctgctgggtgcgttgacgcgcaggcttaaggaggacgaggcgggagagtcacgcatggctgctgccgagttgtcatcctgcgttaacttcctcaagcagaatgccgccgattcgcctgatacaacctttaacaacgtattcccggaggatgacgaccaatga

SEQ ID NO: 82330 - DNA, 177 bp, Citrobacter koseri
atgacccctgaacaattccggcaatggttcgccacgctgccggagaaatatcaacgtgtagcccgcttcatgtacgacaacgcccgcaagtcgggcacacataccgcatccagtcttgcgctgattcattcgctggttactgaccagatcaattttgattcggagtttaatgtatga

SEQ ID NO: 82331 - DNA, 561 bp, Citrobacter koseri
atgactttgagcattaccgatatccagcacattaacgcgctggctcataaacacttcaagaacaacgaagagattgtagcggagactggtcatgctctgaccaatattgatgctgtaatccgtggcgtctatgtcgatgacttggccgatcagtggaaagacgatgctgatattactctggctgaatacaacgccatccgcagccgctataagcccggcaagttgcaccgtgatacagaatttatgattgcccgcgatatgctgattcgccctgagactgtgctggctatcgcacattcccgctttagcaacgcccacacccacccgatgccgaaagctgttaaagcgaagcctgagaaacctcagacgatgcgccgactgtctagtgttgatcttgacgaggcgcacaagctggagcgctttggctggcctgttgctgagattgccggaaggcttgaaattcctgtcgaagcggctgctcaagcgctgcgcctgatgcgtaatcgctggggctatcccgatattctggaagatgttaacacgcgatacggggctaagtga

SEQ ID NO: 82332 - DNA, 348 bp, Citrobacter koseri
atgaccttactgacacctgaaaacgtggcagcggctagggctgcccgtagcgcaaggattgaaaactggaaagccaacgccagccagcttaaacaagactttgctgatgaaactcactggcggcggctcgcctcacgctttggcgtgcgtatgccctcggcgtatgttcccggctctgagctgcgattgctgcgccgggcggccaaacgctctggtatctctggtgctgacatgcgcgatgcttttggtgggggcgttgcgcacctgcacgagcttaattcccactggcctgctttcgcgcttatcggcctgattcttgaggtagctgctgaaaaagctgctgcctga

SEQ ID NO: 82333 - DNA, 447 bp, Citrobacter koseri
atggttacacggacagaccagctactaagaaaagctatgcggggctatctggaacaccttggcaacatgccgctggcggaacggattacaaatgctgctgtattcgaagatatgtatcgcttcctgttgaatggttccgggcggctggagctgcgctgcgctgacgtggccgctgtccgtgtcttcctttggaattatcaataccgccgctgtgctgtgacgggtaagccgctgcgccttgcgtctgctgtattagatcactgccatcgaaccgggcgcgtgcgtgctgtggtgcatcgttctgctaacgctgctgagggaggctattatgcaggaagtttatgtggactggcccacgacagtatgagcgtaatgttggtaagttaccgacgccagtacaaggggataggagttatctatccccataaaactgagcaacttacttag

SEQ ID NO: 82334 - DNA, 729 bp, Citrobacter koseri
atgtacaagagatgggttgcgtgggggtctgtttgcatagttgttattgcgcttttgggaacggttcagttaccaacgtctgaagatataaccttcggtaagcgtttacttcaaaatattggggtgcttagctctctactttctgtagttgtattaatcattgtggctatctttctattagatggcatgatgaatcgaaaatattcgtttaaagttgaacggcttagttttggcggtttaaatattctttttgataactctgatgccctttttataaagtctatacagaattttctcgacacgaaaaggacgctttttaaaataaacgtccagcaggatgcttttgatgaggtatttaattcttattacgaggtctatcaatttattcgtgttgagatgcgagttctgaatattaaaaggaaaaaagatcttgagttatatatgttggcgaatactatgctcaaaaaactaaatgcatttctgactgagcaccaaaataattataggcgctggcataagtatgtctcagataaagatgaagttaaaattgacgagaagcctgatggtgaagcaattgttcttaggtatcatctgacgccaatcggtaaaattcagacttactattatcattttaataaacttgttaatgattttactgatctgaataaattctttcaagatagtgttgccagcaagtttagtattgacatggataaatggagcaactaa

SEQ ID NO: 82335 - DNA, 615 bp, Citrobacter koseri
atgcataaaacatttctaagttatcatcatgctaatgaacaggatttaaaagatagtataatagagacatatggcggggaatcttttatcgataaatccgtaagcgacggtgacattagtactgatgtaagtgaagaatacatcatgcgtaagatacgcgaggaatatctcgctgatactacagttactgttgtgcttatcgggagagagaccgcccaacgtccatttgtgaactcagaaattcaagcatctctatggggtgaaaatccagcgggattgataggtgtcgtcagagatgaaatctggaatgaagtttttaccgatgctgtatgttctgactttcgatgtaactgcggagtgagtttaaggcagatttctactggttatacactatatcttccttatctggtacaaggtaatcatcgtcttcaaaaaacagttccgcattacaccgatgaggaagtgtattgtgcagtggtaaggtattccgattttattgctgattgcgaaacatatattgatgaagcatttaataagcgagcaattatgaatcctgctgttaaaagaaatgcagatacagttcctgctatccgagctaaacctagactatggtaa

SEQ ID NO: 82336 - DNA, 441 bp, Citrobacter koseri
atgaagctcaacgccagacaggtcgagaccgcaaagccaaaagacaaaacctacaaaatggccgatggtggcggtttgtatctcgaggtttcggccaagggatctaaatactggcgcatgaaataccggcgcccctccgataagaaagaggagcgcctcgcttttggtgtttggcctaatgtgactgttgctcaggcacgagcaaagcgtgatgaagctaaaaaactgctagtgcagggcattgaccctaaagccgaacagaaagaagctcaggccgagaattcgggggcatatactttcgaaaccattgctcgtgaatggcatgaaagtaacaagtgctggagcgaagaccatcgttcgcgggttcttcgctatcttgagctatatatcttccctcatatcggttcgtccgacattcgccagctcaaatccagccagtga

SEQ ID NO: 82337 - DNA, 588 bp, Citrobacter koseri
atgactcggatcgcggtcgagctctccttactaatttttgtgcgttccagtgagttacgtttcgcgcgttgggatgaattcgacttcgataaatctctttggcgagtacctgcaaaacgagaagaaatcaaaggagtgcgttactcatatcgtggtatgaaaatgaaagaggagcatattgttccgcttagtcagcgggcgatgattttgttagaccagttaaagcagattcgtggtgataaagatctgctttttcctggtgatcatgacgcaactaaggttatgagtgaaaacacagtaaacagcgcattgcgcgcgatgggatatgacacgaaaactgaggtttgtggacatggatttaggactatggctcgtggagcgttgggagagtctggattatggagcgaggatgcgattgaacgtcagttgagccattctgagcgtaataatgttcgtgcagcatatattcacacttcagagcatttagatgagcgtaaattaatgattcaatggtgggctgattatttagaagcaaatgaaaattatgctattactccatattatttcgcaaaaaacaataatgattag

SEQ ID NO: 82338 - DNA, 2322 bp, Citrobacter koseri
atgaaaattgataaccaacctttgcttgaacacagcctaaaaagtggcatcaatttatttcttggtgctggtttttcagtagaagcaagctcaaaagatggaaaactcccagtcggaaatgatttaaaggatgaattacttgatcatttcaaaaggaaaaagccatcaactctagatctccctcaactctgtcagatattaagcagctcatcaaaaaaagaacttaaagactttttcattaaccgctttacggttacagaatttgatgaactttacaaatcaattgaaaacattaaaataaaatctatttttacaaccaatattgatgatctaattttcaaaatattcaaagacagcagcagatattatataaatgacattcaacttagaggccctgcgataagcaacggtgaagccattgattatatagggctacatgggtgtgtggcatatcctggctcagagtttgctttttcacctttagaaatttcttctagctttgagagagataaagataggtggttcacctacgtaaataaaattcaaacatcaccaacgttgtattggggctacagagtccaagatgcaggcgtattacaagctttatcaaactcttctaataagggtaggcaaagagctgatgcttggatcgtattgagagaagatgatgaagaagccagagagtactactcttcgttaggttttcaaataataattggagaaactatagagttactcaagtatttctctaaacttaaaagcgatgataaatcaatcccccagaagaatactattgaaaataagttcgaagaatataaaataccaacactttcctctgttcctgtgcgttctctcactgagtttttcttaggggcagagccaatatggtatgatatctttacaaataaaattcataaaacaaaccatttgcaaaaaacaaaaaacgagtcattcaaatctaagcatgtattaattatcggagcacctttaaccggcaaatcaactttactaaagcaattatctgttgaagccaaagaacttggctcggttttatatatcaatgagataacgccagaaaaagcgcgactgctttatagagagataaagatttccaatgagaaagtttatatatttatagataatgctgtggattcttctgaagcaatacaaacgctaatccatctacccaacattaaaataatagccgctgaaagagatttcatttacgacactgtttcatatcgattcacacctcagcagtttaatatattagatgtgtctggcctaaatgatttcgatatacaatcggttatagatagcattcctcaaggcattaacaaacagaatgactcattttctcatagcgatggtgatataaatattgagccaagcttccttgaggttatgacacatgtaattaaagacaacgcattggcagatagatttgtagaagcattaaaagaatttaaaaaaacggctgcaccagagcatgacttgttattgttagcgtgttatttgtatagttgccgcataccaatctcagttgatattgctgctgcatatcttagaagttataattacgatgcattaaaatcattccgaatgctatcaagtatggatacattcttatacccatatgaaggacagttaagcgtagataaccaagcctattttgttccgcgctccaggactgtttcagagatagtaatgaagaaaacttatcataaagacatggcaaaaatgttagagactttccatcaagaagtttcaccaaccagaataagccgatatgatatttttaaacgctacgcctatgacgccaaattgatggggcgtgcgttccctgattgggagcgagggttaaaattctatgaggaagctttcactcgtgataggacacactcattaaaacaacaaggggcattatacttagcccacaagaaaaaatatgagttagctttcatatggattgacgaagccaaatcaataactggcaacaacaacccaacaatcagaaatacctatgcagtaatattgttcaatgcaaattatgataaacctaactctccagaggtgttatcaactctggaagaaagtatggaaatactacaacgttgttataatgatgactataggaaaatttatcacgcaaggatatttgccgaacaatcaatcaaattcaagttgaaataccctgatatctccagaaagaaaggttatttagagttaagcatgaaatggctggagtctgaattgaaaaataggccaaatgatcgatggatgaataacctcacgcggaccattcgaagaaatttgcgctaa

SEQ ID NO: 82339 - DNA, 468 bp, Citrobacter koseri
atgaaaatcaatattattaacagctcaggtgagaataaccgctcccgaagcctgcaaacgctgttcgatattatcgacgtaaaaaaatgggaaattaatcaggctgctggtcgctatattcgctcccatgaggacgtgcagcgcatccgtaaccgactgaatgattttatgcagacgcacggcgcggagctgaccgccgctcttgcacctgagttgatgggctataacaaccagcatcacgctgtaaaacactgcgtgatgcagcattcggtggattacctgcgtgaagcgctgtcggtgtggctggccgctggtgaaaaaataaattattccgcacaggataatgacattttaacagccatcagattcaggcctgacgcggcttcacgggatgataatcgtgaaaaattcacgcctgcgcaaaaccagaattacgtccgaaaacgcgctgaactggccgcgcagtag

SEQ ID NO: 82340 - DNA, 471 bp, Citrobacter koseri
ttgggtaacggacataacgtaatccgaatccacgaagactggctgtatctggccgtggttgttgacctgttctcgcgcaaagttatcggctggtcaatgcaaccccggatgaccaaagatattgtcctgaatgcgcttctgatggccgtatggcgacgtaatccccaaaaacaggtgctggttcattctgatcaaggtagtcagtacacaagccatgagtggcaatcgttcctgaaatcacacggactggagggcagtatgagccgccgcggtaactgtcacgataacgcagttgcagaaagttttttccagctactgaagcgtgaacggataaagaaaaagatctacgggacgcgggaagaagcccgcagcgatatttttgattacatcggaatgttttataatagtaagcggcggtatggttcgagtgatcagatgccaccgacggaatatgaaaatcaatattattaa

SEQ ID NO: 82341 - DNA, 126 bp, Citrobacter koseri
atgagcagtgagcgttatcctgaagagtttaaaattgaagcagtcaaacaggttattgatcgtggccattctatttccagcgttgcaacacgtctcgatatcaccactaacagcctttacgcctag

SEQ ID NO: 82342 - DNA, 891 bp, Citrobacter koseri
atgtattactcaatgtttcttgagaaacacaaatcccccctcagccacgcacaatggttgcgcttgcgctatattgagcgccagctactgtgggaacgaaaagtcacttcacgcatgattgctgaagagtttggcgtctcggcgcaacaagctcgtactgatgtaagaacctatatggaggtagctccaggcaatgctattgagaagggggccggccgaaaagggtatttccccagtacgacattttcgcctgttttactgggagacaacgatctggtctggcgtgcaacggtagaatttccccccccgcaagcggcccacgcgcaggaaattccgctcatccatcgcgcagtgcatagccgcacgctggcaatttttttgtcagcaatcgaacagaagggacaagtaaaagtgacttatgcgtcaatggaaaacccggaaggcatatcccgtacactaagccctacggtaattatcaccgttaatgggcgccagcatgtgcgagcctatgattggggtagttcggcgtttaaggactttgttttggcgcgatttctggactcgccggaactgattgttcctgcccccccccctccgcgcaaagataccgcgtgggaggtcgtgatccccgtgcgttttatcgccaatccaacactaaacaaagcgcaacaagaggtaattaagcgggactacatacttgaaccatctgaattcagtattcgtgcaccaatgattttttatttatgccctgaaaacaatctgcctaaaacagatgatgaatatgcacaagctactgacgccagcagccacggcccctttgtctacccagttctagctgtgcacgcccaaacaggtgagcctattcataagtaccgccatgctggcgagtga

SEQ ID NO: 82343 - DNA, 1476 bp, Citrobacter koseri
atgtcgctagggtttttggagcaggctcgtaatgaatcaatggcacgtcgcgagctgtctattcaatctcacgccttgctggtcgtgcggacgctggattcaatatatagagcccttcagcgcaatccgttcgatggtgttgagcttgatgcgctggcggcaatcatgtatctctctgacgccatgctttattatgctgaccgcgagcgccagccaggaatgacgcgtaaagaagcggagttatgtctggttgggcacctcaatgaagcctatccgggacaagaagaatccgactacgcacaagtggccagcaagatttttgcggcgatcaaagatcctttccgcctccgttattatgatttctcgcaacgaacgcattccgaagagcagatagtccgtctggtacgccacgaccagctatccggctcagatgatattctctggtcgctgactgatgaaggaatgctgttctataccctccgtttggatgaaacgccgatagaacgcgctgcgattctggcctggcgcacgcttaaaactatccgtcgtggtgagatcgacaaggcagttcaccaaatccagtcaacacagcggcaactggagcaatatctgattgggatgcggatgaaagtgcgtgccgcccagtctggtgatttgagtgcatcttatgcacacgatattcgtccggtactcaatgattcctttgataaaacacgagaggttttggaacatatccagaactcaatgtcggccatcaccgaaatgctggttgaaggaagtttgaaattaaatcccgacaaattaaataagctacgtaaggcacaggagatttttgctgaggtctgcgcctttacgcagcgctatcaagactgcttactggatgtgaataaagattttgagcgagctcgtctgaaactcattattcccagagataatacccttttccgggaaacgctagaaaaaggtgtactcaaacccttgttatcccattcccctgaaactgtcgataaggaaatcgatagtctcattgcacgcctgttggctccccgaagtcaggatgacgatcggcatacattgtttgaccttgaggcactgctgaatctctatctcgataaatttgaacaagcacttccacatgagatacaggatcccaccgatcagccagtagctattgaaaccaacctgagactgagaggtatccctgaatctgtgattaagaaatgcagtgattgggtaagtaaccaattgaagaattggggccatgtgagctttagagatgttttcgacgcctatgagtgcgatgaattatcggaacaagaacaacaggtttgtttactccatatcggcagtctggcggctaacagcgatcccacaatagaagtagagataggtgacgatgctatcgaaacatcgctctggcgggctaacaatatcaaactgttaacggccactcccgtacacccctttgaggagtag

SEQ ID NO: 82344 - DNA, 897 bp, Citrobacter koseri
atgtacaacaacacgcatcaacaagcgaaacgctacgccgaaattgccacacaggcaattatgaattcgctgggatataaaatgggggatgagccggttcagtgtgcgcttgatctgcaaggtgatgtcctgtttgctgagattatccgtggtgttgcagcaggaatgaagctgcgttatctcgggattagtgagacatacggagtattactggctgcagatggccgaggcccgtttgctccatccttgggttggctgaacaaacgcttattacttgaaacagcgattgaacaacagggtaaggaacggaaagaacagcgcctgtttgcagggttgactctgattgcgttgctggctgatttgtttccaactccagacacagttcgtgtcgagttcggtcagagtcgtgccattaatgccacctcggtggttgcccggctcaatgatgttgccgaccaggtgattgcccagcgcaaggccgagagtgacgacaccgtagatggtctacttatggctgccaggtttgtgcaggaagaacgcattccccgtattcacaacgacaaggtagggcgtgtctcaagtattcgctcacaaacagaaatggttatgcgctggatacaagtgttgcaagaggaaggctttctggccgaagacagcagtctgtcgggagagtccgactggtatccgacccacaaactcagacattatctgcgccatactggcatcgaagagacggtgcgttttgtcatgagcatcagttcagccactgaagagcgatcctccgacttagttgaaagcgatatcgcagcattagcggataccctggagtttcttccgatcgatgaacgtccagttataactggaaccacagaaacgcaacgtttgacggagatttaa

SEQ ID NO: 82345 - DNA, 4437 bp, Citrobacter koseri
atgtggctgattaaacgggtttatatggatggcgcaggccatgaagaagctttctacaaggacctcacactggactatattggcctgtctcaagcggtcggtagccctgttgttgaaggcctgcgctcgcccgtcagtaatgcgaaggtggtgaccagtacttatcagcagcttgtgaatgggggcggtaagtccacctacatcgcgctgttgttatcgatttttgagccgtccgttagtgacttcacccaatatctggcaaatcatcgccagagtgaataccactaccgcaattacttctataaagaactctctgttgttttggttgagatggtcaatgaatcaggacaaacgttattactgggacatgctcatcagcgtaatggagatgatgttgaccgcacactgtttatttgtgatgcgcccgactccctgatgggcgcgccgtttgatgaaatcccttcttattcccgcgcggaacgcaattctgagctacgtccctatgccaatagcctgcgcagttttgatagctggcttaatctcaaggctggtagtgaaggtggcatgcattggcgtaaaaccagcagacagaacgagtggcgagcatttttgctggaacagcaaattaacgttgatcttatcaaaacaatggtgaccttcaactccgaagaaggtggcctgacccgttttatcgaatacaaaactgaacatgatttccttggtgcgttcttcgcctgcaccatgtctaaagatgcggctgagcggctgcgggaactggtagcgcatgaagttgaacgtcagggagagttagaggggatccgtcgtaacgagtccttcctgaaggatgtgctggctaactggctggcgtttcttgatccggctaaacagctggaaagcaccttggcgcagcagcaactgctggatgatggcttccgagaagcaatgcgcgatctcgcagcctttgtcggggatgctcaggttgaacagacgcagcttgaagataacatggatagtttgcaaacgcatattggccaggcgatgtctctgcgtgagcagttaggtaagcgcagagcactgcttgaatatgatcttgtgcagcatcagttcgacaaacaaaaagcgatagtcgatgcgcttcaagacgaagccgataccaatcagctccagattgagattactcacgctgctatagactacaaagcctatgctaaggccctgaatgagtaccgccaggcagatgaagatctgaaggtattccaaagtgaaacggaaagaccgctacaggtgattttcgagcgtactgctggcgaggccttgggtacattagagtgggcaatcgacaggcatcgccagcaggaggctacgcttgaggaagaattagggcagatggatagggaaagtaatacccttaaacaatcatacgacgaactacaaaagatgctgggtggcctggaggcggatcgtgagagatataaaagagacaaacggcagggcgaatcgcaacggaatgaattatgtgaaactgggttgatccagaaggatgaaacaccagtagcagcccaataccgactggaattaaccttacgcgatgcaaagcagagtgaagaactggctaatacaattcatcatcagaaagagcaggcgctggaagcacagctgaatgttgtgcgggaggcatcaattgagaaaagtgaggcccagcaaaaactcattctggctgaacaaaaacaccagtcagctgtggatagtgccttagttttagcaaaaacctatcaaaaactgccaacgtcaatgcaacatgacctagatattgaagacacgagttggcacagcgagctgtgtggattgcagctcgacaaggtattgaatgcgaactatcaaacgctgaatggaatgaaagagcgtttactgcaagcccggcacgaactggacgagttaaggaagacgggacatgaactggtcgctaagcaggtcaatcaggcacttgaagcgttttatgcggcgggcattgcacgggataagctctggacatttccacactatttggcctctgtttacaacgatgatgcacaaaagattgcagcggtgatcgatcaaaaccctggccgctacctgagcttggtcgcactcgataatgtaacgtttgaacaggtccataaaattagtgagatcctgctctggaagaaggcacctattgctatttacctgctgcatgaagcacaagatctccgccgagaaacgtctgaattagtacaggtcgtcctctcaaatcccgataagcacggatatagccaggccgcttacgaagccaggctgcaagacctggagaatatcgtagcgtcgcaggaggtcagtgtgaaggctgcggagagcgcccttaatgtactgaaatctttcaggagtgactggcgtttgcattacgaacagtatggtaagtattgggcgggactgcttgaccaacgggagcaggctctcttaatactggaaaatgctgatgcagcacttaagcaagctgagcatgatgagcaaaaactgcgtgacgagaagagagatgtccaggtgcggttaaacaacgcccagcagcagaaaattcaggcagaaaaagcacatgataaactgagtctttttgtagaaacagaatgggcgaagcgtgaaacggcgataatgaaactggagcagttagctgcacagattcaacgaagcaaggacactctttgcacccagagagagagacaggaacggctgagcgagatcaaggagaacaagcgctccgagaaaacccttttaaatatccagatgggcaactggagtaatctgtgtaacgagccgttctattcagagattacggcgactgaaggtatggaaggacgaagccccaaagatgcccatgagatggctgctcaggcgcacaaaaaactgctcgaagcagccaacggtgatcaagtgaccgctctcaagcaacaactaaaagatgctgaacaggcacaacgttacgcctctgagcgtttgatagctcaacccacttacaatacatatccggatgaggtaaaagcggcggctatcaatgagctaacggtaattaataaccgcatcgtacgcctcaacgaacagcagaagcaattcacgcaaaatctaattaactctcaggtaactctgcaaaattgttcccaaagctgtgaggaggctagtaaagcacttgacgaagattttgtctgggaagagaaacccaccgggatagaagcgatccatacgtctctggacgaaatcgtcaacaacctccatcaaactgaataccagctaaaacttcagtgtgaacaaaaaaagctgcagctgcaaaagatggcaaatgtgaaagaacggcttcagaatgctaaaacagctcaagcgatgatccagcccattacgccgacctcagcagcgggtctaccaggcagaattcagagcattactgaatatgctgacgatctggcaacacaatgccaaaagtatgccggtctaaatgaagcgctaaaacagcaaaatataaacgtctctacggtttggggacaattccgtaaaaggatcgaagaagagtccgctaaggagccagacgctcgagccagtcaggaatatttacggcagttggactcaatcgtaacttatcatgaagtgctgggcgatttggacagggtcggtacagggatcactcaggtatttgaagctgtgcaggatagcctggaacaattccagcgttcgattgatctgactgtcacccatctgactgctcatctggaaggggcgattaaacttctcaagcgcgcgatgtcggtaaaaattcctgaggattgccccgtactgcctggtcggcccattatcaaaatgaccgaccgactgaatgatgttgccgctgatctcaggggttttgccagcagccgcttgcagcagtggatagccaggggacagataccccgagcgcccaaccgggacgccttgacagctgatttggtccagtcggtatttggcgaaggggaactggaggtgcgtttgctgaagacgaatgccagctgtccacgatggactcctgtcacccgactcgaaggttcgggtggacagcgccttacctctgcctttttactgtttgtgacggttggtaaagtacgagagtacgatacgggtatttcaagtgcaggattcttgttagccgataacccgctgggtaaatcgaatgccgatgatctaatgcgaattcaaacccaaatggccaaagcctataaaatccagctcatctacctgactggtatttcggatgaaaacgcccaatcgatgtttgataaccatctcttcctgaacaaagttcaaaaactgaggcggcgggatttggtaaccgttgataaagaacgccatgccctgtgggcggcttctctggttgctaagtcacaaaacgatccggtcatttaa

SEQ ID NO: 82346 - DNA, 1056 bp, Citrobacter koseri
atgaatagtgtaatgatctggctatcccgacttgagtcgacagctaatagacatcgccttgccgccggcaaggccgctcgtacagtaaaagctaatgcggtgctggatgaggtgttacgtgtacacagccgggaggccttgagtcaggatgcacctgatttgctgagtcaggcagttacgcaactgcttcagaaggactggcgggctcagcctaagcacaaagcgagttggcagcgctattggcggggtatgagcctgccaggtaattttgtttacgaaggagccctcgttcctacgaaggcaatatcagaaatagcctggcatccttggttagcacaacgtattacaggacaacttaccctgccaatcaaggctcgcctacagcaactaaacacatatctctttcgccaaactaagggcgacaagccactattccctggccttctagggcaccgtgagcggtctctgctgatatttggtgacgaaaaagcgctggattctatgccacctgacggctggaagcatgtcactctgactttggctgatatgggcgcgtttcgacgtgcaccacctttaccgtatgagtcgtcacgctgccacgatcttcctgctatcattgttgaaaactctgatgtgtattatcgactatgccaacttaatcaagttcagactcgctggtcactggtcatttatggcgcaggtaacaaagtttccggccaggcggagtgcgtgtcacaacttcttaaggtcgaactggtagaacagctactttattttggcgatctggatgttgcgggcttaaaaatcgcccatcagttacattgtaagttgcttaacgattacggtatcagtttgcatttagatgaatggctttataatgaactgatcttaaatggcctgatgacatcagaagggaacgccaacaacgaacggtttgatttcgaattacagtgtggctggatgccacagtttgttttacgagaaatgaagactcttctggcgatccatcagcgtctaccccaagaaggtgtggcttctttaggtttagtcatatag

SEQ ID NO: 82347 - DNA, 252 bp, Citrobacter koseri
atgaacactatgtttttgctgatggcggaattcgaaacatcaacgataccgctatcggtagttgctgagcgatacctcggtatgcggcccgcgacagcagataaaaaggcgggttgcggtgaattaccaattcccacattcagagtgggtgacagtcagaaatccccgagaatggtccacgtcagcgaccttgccgagttcatagatatgaaaagaaaagcggcgaaagaagaactgaaatcctgccagtaa

SEQ ID NO: 82348 - DNA, 1395 bp, Citrobacter koseri
gtgagttcagtgtttaccccccgcccttatcaagacctcatcatcaaccatgaaatcgacactctgcgctgcaacatctgggcgggcatgggaatgggtaaaaccgtggcaacgctcaccacgctggaagatctcttcatggctggagcggagactcagcccgcgctcgtcctcgcgccgctgcgcgtggctgccagcacatggccggatgaagctgtgaaatgggggcatctgcgcaatatcgaggtgcagccgattgtcggtaacgccaaagcacgcgctgcggcgctggtgaacagcaacgccagcgtgtttaccatcaactatgacaatctggtctggctggtggaagagctgggcggtcgctggccgttcggtaccgtcatccccgacgaaagcacccggctgaaatccttccggctgcgtgggggtggtaagcgagctgcggcgctgggaaaagtggcacataaacacgcccggcgctggatgaatctaaccggtacgccagcgccaaacggcctggtggatctgtgggggcaagcgtggtttgtggatcagggtcagcgtctcgggcgcacgtacggcgcgtttacctcccgctggttcaactcgatacagtttccgggacagagctggacgaagctggagccgttcgctcattcgcaggacgagatacagcgggcgctggccgacgtcactatctcactggacgccgccgactggttcgatatcaaagagcccatccataacgtgatccgcgtggacatgccgcctaaggcccgccagcaatatcgcgaaatggaaaaagaaatgttcctcgagctgaacggcgagggcatcgaagcgccgaacgcggctgcgaagacggtgaagtgtctgcaaattgccagcggcgcggtgtacaccgacgacgccggaagctggtcagaactgcacgacacaaagttgcaggcgctcgacagcatactgaccgaagccgctggcgcaccggtgctggtggcctaccactggaaacacgaccttgagcgactacgcaaggcgtttccgaaaggtcgacaccttgaccaggatccgcagacactgcgcgactggaacgccggaaagataccagtgctgttcgcgcacccggccagtgcgggccacggcctgaacatgcaggacggcggcaacatactggtgtttttctcgcactggtgggatctggagcagtaccagcaaattatcgaacgcatcgggccaacccggcagatacaggccggacacaaccgcccggtgttcattcaccacattatcgccgccgacactatggacgaaatggtgatggagcggcgcaactcaaaacgaacagtgcaggacatcctgctcgatgccatgaaaaagagaggtatagcatga

SEQ ID NO: 82349 - DNA, 201 bp, Citrobacter koseri
atgaaaaataagtatcgcatcgtaaccgacaaatacgcaggttttgaagttcaaattaaatactggtggctaccgtttttatggtttcagtgcgacatggtcaacacccacgtaagtattgaaaaagccaaagaatacatagccaaacacaaatacgaacactgtttcaaaagacggattgttttcacggaggctgagtaa

SEQ ID NO: 82350 - DNA, 1236 bp, Citrobacter koseri
atgccggacgttcacgcacaactttccccctctgcggcgcatcgatggatgcgctgcccgggtagcctggcgctggaggcaacgcaacctgacagcaccagcgcttttgccgaagaaggtaccagagcccatgcactagcggagcagatccttaatgctcgtctgaccgggggtacagaccccgaagccagcgatgctgaaatgctcgatttcgtgctgcgctatgtcgatccggtctgggcgctggcgcagggcaacgaactgatggtcgaacagcgggtagacttctcacatatcgtcggtgtggaaaactccttcggtaccgccgacgccgttataatcgcgggcagcgagctgcaaattcatgacctcaaatacggtcgtggcgtgcaggttaatgctgagcagaacgagcagttgcagctctacgcgctcggtgcgctggagcagttcagcatgctgtacgacttcgagacggtacgcctgttcatccaccagcctcggcttaaccacgtttctgagtgggcgctgacggtggaagagctggaggcattcggcgaacgcgcgcaggaggcagcggctaacgtaattgtgatgttcaacattgccgattgcgaaggcgtcgaaacgctaccgatcgagaacttcacacccggtgaaaaacaatgccggttctgtaaggcaaaaggcggtctgtgcgctgctgaagctcaggcaaggcttaatgctgttgctgacgactttatcgacatgaccctgcctgtcggtgagcagttggcagaagccgttaaacgcgtgccactgctaactaatgaacagctggcggacatttacagccaggttggcttgattgagtctttttgcaaagcggtgtgcgaccgcgtaagcagtgaactgaacgcggggcatccggtaccgggctttaagctggtaaccggtaagcagggcaatcgcgcatggagcgacgaagaagccgcccgcgcgctgctgaaagaccagttccgttataaaactgaggaggttttcgaccttaagctgattagcccgaccaaagccgagaagctcattaaaaaggccagccctcgccgttggacaaaagtcgaagcgctgatcacccgcgctaacggtaagcccaccgtcgcccctgaatccgacccgcgccctgctctcaatatcaaccctgttaatgatttcgacgacgtgtccgacgatgcgctcgccgaggaattcatctga

SEQ ID NO: 82351 - DNA, 876 bp, Citrobacter koseri
atgagcttagaatcaaatctggaacttaataaccagttgcttacgcagcataacgcgttgcttgaacgtctcatcagtacgctggcctccggtgttgttatgcgccctgacgccatagcgcaggtacaggaataccgcgaagcggtgagcgaagcggtgagcgaagaccaaccaactttgacactggacgatctggagtttggcgacattatcgcgctgtccgcgttctatccggtggcaaagcccatcaccgaagaaatgctgcaacgtgccgttgcgtaccgcgacgcaaccggtgaagcgcgtgtagtgcagattgatgcactggacagcgcattgcagggtgtcaaacgggcaaaagaattgcttaaaccctctttgctcgacctgtcccgcaacattcttaagttctgggacgatctgccaactatcggcgagcgccgtgcttttgccgagcaactgctcgacgcacccggcggtgaacgcgctgcaatgaaacctaagaaggccagcagcaaagagcgtaaaggtccgttctactggaaggacgtaaaacaagagcttcagggttgtgaagacaccctggaagagcttcagcactacattagttgcggcgctgtggaaatcaacaaggttgagtatctgcaactgaaagaggaagcagaaaaagccagcgctaagccggatgctgaccagcctgattttaaagcactgcgccaggaggccaaagagctgattctgaaactggctaaaggaggttaccgggaagaagcgagaacaattctgggtaactttggcggaacaaaactcggcgaagtcgctgacgagaacctcgcagacgtgatcgctcaggctgaaaaagcactggagggttga

SEQ ID NO: 82352 - DNA, 588 bp, Citrobacter koseri
atgcaaatcaccaaagaacaagtaaaagcctggcatgcctgtaccgatggcttccgttggtttctggataaattcccacagggcggtgcgtacgccgatgtgcatggcgcgctgatcgccgataagcgtttcgatgatgcacgctggctggtcgataagatgtatcgcacacatctggataaacctgaattcattcaggcagaaacagcgaccaccgacaaaatggtcggtgaactcaccagcatggaacatccatccgatcaggtagaaggtgagaacagctccggcaacgacgcccgaatcggcagctccggcgactacgcccgaatcggcagctccggctacaacgcccgaatcggcagctccggctacaacgcccaaatcacggctacaggtaaaggatctgttgtggcctgtgcgggtggtgttgagcgcattgtcctgggcgaaggtggctgcgcatcagttccatggcacgacggtaaccgcacccgcattgcagtggcgtatgtcggcgagaacgacattgaagccaacaccccttattacattaacgacgaaggccagttcgtcaaggttgaggaataa

SEQ ID NO: 82353 - DNA, 147 bp, Citrobacter koseri
atgaaacctgaacacctccaccggctgacggggcgcgatgtgctccgctggcgccgtaaacaattcgacatcttcaccggcctggccctcgctactgcgttcggcctggttattaccttcattctccttgtagcgaggactgcttaa

SEQ ID NO: 82354 - DNA, 630 bp, Citrobacter koseri
atgaatcttgccaaccgagccaaaaagcgcagaacagaactaaacttaactcaggtcgaagttgctaaacgagcgggcataagccagcagtcgattgaagctatagagaatggaaaaacactaaaaccacgtaaccttcttgctttagcatcagctctagaatgcgatcctaagtggttacttcttgggggcgatgttgtcacagatttcaactacggagcccgaagagtgcctattctaagctatgtacaagcaggagctttcacaagcgctgaacagcttcatgaagaaggtgatttcgaatacatcctcactacagctgaattatcagagagttcatttgctctccgtatacgcggcgattcgatggaaccggaatttaaagagggagacatcgttataattgacactgacgtgtaccctactccaggcgaatttgttgcagcatgcaacggtagccatgaagcaacattcaaaaaataccgcccggtagggattggcgccaaaggtgaagaagacttcgaacttgtacccttaaacagcgattacccaatttgtcgctcttgggaaaaaccagtcaagatcataggaaccatggtagaacaccgcatattccgcagaaagagataa

SEQ ID NO: 82355 - DNA, 225 bp, Citrobacter koseri
atgaccagttctactcttgcttcacgcatcaaggagcgccgcaaagccttaggcataacccaaacttcattggctgaaagcgttggcatgcgccagcagtctattcagtaccttgagtccgggcgtgccactcgtaccagcttcattcttgaattggcaaaagttctgaaatgcgatcctgactggctattaaacggcgaaaatttagaacatcaaaaggcgtaa

SEQ ID NO: 82356 - DNA, 123 bp, Citrobacter koseri
atgaaatttattgcgggtagcgatatgcaaacacaatttgattccaccacggcgattaacgagcgccagaagctcaataaaatagctctctatgctcgcgcgcgtgcgcgttttgcgaggtga

SEQ ID NO: 82357 - DNA, 276 bp, Citrobacter koseri
atgccagttgttgcaacgttcaaaacagactggttccgggtgattaacgacatcacgcgcagcggcattcccctgcaggagattgccagagagctcgacgtgtcgaagtctgctatcatcggctggaagcagggcgcagcaccgaaccaccacacaggcgaagcgctgatagatttctggtgttatgtcacacagcgcccacgttctgatctgccagcacaggtcacctcacggcgatttgtttacgcctggcgcgtaaaacgtccgacaccatga

SEQ ID NO: 82358 - DNA, 381 bp, Citrobacter koseri
atggcacgacagaagaaaaccgttgaagtaccagggcaggagcccgcgccgcagtctgatgcgccacgcgctgacgaacagaccgtacagcagcgcgttggcgaactgctcgacgacgctgcgcttaatgaacgcaatgcgctactggcaacactcaacgagcagggcgccgccatcatcaaccgctttgaagagctgggctttaccgacctggctgaccagcagctgactgacaatcttgaattcctccagctcgtcaaaaaagccaccacggcggcacctgctgcgccgcatggctacgtgacgaacgaagagggcaaacgccatccggtgacgggtaagcccgttctgactgagcatggctggcacgttccgggctaa

SEQ ID NO: 82359 - DNA, 231 bp, Citrobacter koseri
atgtgtggaggtggtgcaccgaaggtcgtcgagaccgacccgcaggccgaagcggacgcagctgctgatgcagcggcaaaagcggcaaacgcagacgcagcggcacgcaagaagcgcaagaaaggctcttccctgcttgcctccggtgcagagggggcgtctgactccggtagctcgctgctgtcttccggcgcacaggcagcgcagccgaaacgaaacttaggggcgtaa

SEQ ID NO: 82360 - DNA, 1623 bp, Citrobacter koseri
atggatgaactcgccgtaaagctgattaagcgttccgatacgctgaaagccagccgccagatgcacgaaagcgtctggcgcgagtgctatgactacacctatccgctgcgcggcgcgggattctccgaagaggtgctcgacgcccagagcgcaaaacacaaggtggctaagctgctggacggcacggccaccgacagcgcccgcatgctggcctctgcgctcatgtccggtatgaccccggcgaatgcgcagtggctcaatctcgacagcgaatcactgcctgacgacgccaaagcctggttgtctgagtgcgcaacgctggtgtgggaaaatatccacgctgccaacttcgacgctgagggttacgaggccaacctcgatgtggtgtgcgcgggctggttcgtgctgtacatcgacgaagaccgcgacgagggcggcttcatgttccagcaatggccgctggcgcagtgctacgtcacatcgacgcgcaaggacggcatcgtggacacgatttaccgccgctaccagctcacagcagagcaggccatcaaagaatttggcaaggacaacgtcagcgagaaaatcctcgacgcagcgaagcaaaagcctgacgacaaatttgatttcctgcactgcattttcccgcgtgacacatatctcgttaacgcccgcatggcgaagaacatgcgttttgcgtcgttcaacatcgatgtgagcaacaagcgcgttgtgcgtgagtccggttatcacgaattcccgtgctgcgttccgcgctggatgaaaatcccgggcggtccatacgggatcggcccggtgtacgacgcgttgcctgactgcaaagagctgaacgaaaccaagcgtatggagaaggccgcgcaggaccttgctatctccggcatgtggatcgccgaagatgatggcgtgctcaaccctcgcacggtgaaagttggcccgcgccgcatcatcgtggcgaacagcactgacagcatgaaaccgctacttactggcgcagacttcaacgttgcattcaccgcagaagaacgccttcaggcgtctatccgcaaaatcatgatggccgaccagctccagccgcaggacggcccggcgatgaccgccaccgaagtgcatgtgcgcgtcgcattaatccgccagttgctcggtccggtctacggacgcttccaggctgaatacctgcaaccgctggttgtgcgctgttttggcatcgcattccgtgcgggtgtgttctctcagccccccgaaagcctccagaacgcgaatttcaacgtgcgttatatctctccgctggcgcgtgcgcagcagcttgaggatgtcaccgcaatcgagcgcctcggcatgaacgtggcaaaccttgccgcaatcaaccaggacgttgttgatctcgttgataccgatgaggcgacccgcgttgtggctgatgcgctgggcgttccggctaaagtcatccgctccactgaggcggtggcggacctgcgtgaagagcgacagaaagcacaggcgcaggcccagcagcaggcgctgatgatgcaggcaggtagcgaggcggcaggcgcagcaggccagaccgctggcgctgcattaggcagacaactggcaggtggctga

SEQ ID NO: 82361 - DNA, 231 bp, Citrobacter koseri
atgaaaaaacaggtaacaccagcagacttcaaacgcattttcgaggaaatgccgggtggtcagccggtgcttgaagaattaacccgccgcttcgggcgtgcggcgtatgtccccggcggtaccgagggcgaccgtgaaacatgttaccgggcagggcagcgatccgtactggatttcatcctgcgcgaaatcaacagagccgatggagtagaagacgatgtggaagattaa

SEQ ID NO: 82362 - DNA, 840 bp, Citrobacter koseri
atgtggaagattaaacacttattcatgaacgcagagcagggcgcagaacagcctggcagtggaggtggaggtggaggtgaagacgatggcaataatccgggtactggcgaaccttctggtaattctttgctcagcaccggcgcgggcgaaccgggcgcgactgactggctaccggaaaaattccgtgttatgggcgaagacggaaaactcagtattgaaagctctgcccgcaaactggcggaaaattacactcaccttgaaaaacgcatgggtagcggcgacgcaccgccgaaaacgtcagatgagtatgcacctaaggtagaggtcgagggattcaactgggatgagttcaaagccgatccgcgcatgcagagcttcatgaaaaccgcgcacgccaaaggcattaccaacgatcagatgagttttatcctgggtgaatatgcgcagcgcgctcctgaacttgtgaatggcgccgccgaactggattcggaagccgccaccacgcagctgcgcgaggtgtggaagactgacgcagaattcaagaaaaacatcagacttgcctaccgcgcgtttaactccctagccgatgatgccgacaaaggccgcatggatgagatcggcaataaccctatggtcattcgcatgctggcaaaagttggtgccgaaatgcaggaagacgctccagcaggtggcgatatcaatcttgccgagcaacagaccattcgcgacctgatgaagtccccggcatatatggacccgaaacacgcagatcatgaacgcatatctgctcaggtcaaagcgtactaccagaagcgcttcggtgaccaaaccgtagcgtga

SEQ ID NO: 82363 - DNA, 921 bp, Citrobacter koseri
atgtcttttgatactaacaagaacatgatcaccgctgcgtttatccagcagtttcatgattctttcgaaatcgctgcacagcagaaggattcccgcctgcaggcagcagtccacgaccgtgggatgatcaccggtgaagcgttcaccatcaacgatatgggtgaaatcgagatgcagacgattaccacccgtttcggtgacacggtgtgggatttgccggaagcgggcacccgtaacgcgctgatggctgactacggcgcctttgtgccggttgaaaaacgcgacctgcgtaaactgctggccgatccgcagggtccgtatctgcaactcaccctggcggcttccaaccgtaaaaaagacgatgttatctatcgcgcgctgctcgatgacgttctgcgcaaaacgtccagcggtggagcgtatgcgcctgttgcgcttccggctgcacagaaaatcgttgcgggcggcaccgggatgaccaaggccaagctgatcgccgcaaaagcgatgttccgtcgcaatgagtgtgacgagcagaacggcgaagagctgtacatcacctacaacgccgacatgctgacgcagatcctcagcgataccacgctgaccagcgccgactttatggcggtgaaaatgctccaggaaggcgcagtgtcaggtaactggctgggctttaagtggatcgcttacgagaaactggactcggtaacctctggcggtggtgaagacccggaagtggtcaccaaaaccgcagccgcatggtgtaagtctgctgtgcatttcggtaccggcgctgagtacaacgtcgatatcggtccgcgccgcgataaaaacaacaccattcagatctctgttgacgcctcgtacggtgctggccgtgccaacgagaaaaaagttgtcgccgtcgattttgttgcttaa

SEQ ID NO: 82364 - DNA, 564 bp, Citrobacter koseri
atgagttcgagcgtatccatctgttctaacgcactgctggcgctgggtgcgcatccgattaacgattttgtcgaagataccgaccacgcccgcctgtgttccaacctttacccgactgtacgcaataacctgctgcgtgcacacccgtggaactgcgccattaagcgcgtggtgctttcgcctgtcagtaccacacctgtttttggattcgggtatcagttttcgctaccgggcgatttgatccgtgtcctgtccgttggcgagcagcacgatgatattccataccgcattgagggtaaccgtctgctggcaaacattgacgcggtgcggctgcgctatgtctttcgcaatgaagacgaatcaacgtgggacgctgcgctcgtcaacgtagccgaggccaccatgcaggcgaaactcgcctatgcggttaccggctccgccagcctgcgcgacacgctgacgcaggaagcggcttacctgttgcgccaggccaaagcgatcgacggtcaggaagagccgccggaaatgcttgacggtttccctacgtacgaatcgaggttctga

SEQ ID NO: 82365 - DNA, 1989 bp, Citrobacter koseri
atgcgcgcgaatctgattaaaaccaattttaccgctggcgaactgtcacccagactgatggggcgcgttgatatcgatcgttatgccaatggtgccaaaattatcgaaaatgcggttgttgttgtgcagggcggcgtcgttcgtcgaccgggtactcgctttgcggccgcaacaaaaatcggtaataagaaatcccgcttaatcccttacgtgttcaaccgttcacaggcgtacatgctggaatttggcgacggctacatgcgtatttaccagaacggcaagcaactggttaacgaagataacacgccgtacgaaatcgccagcccgtatacgtctgacatgttgccggcggttaactatgtccagggcgctgacaccatgtttctggtacatcagtcggtcaggcctcatcgcctccagcggcgcggacaaactgactgggtgcttgaacccgcaccgttcatcgtcgagccgttcgatgaaatccgcgataccccgcaaaaatggtgcaagccgtctgcaaaagaatttgtcgggtcggagatcacccttactctgagcgacgacgaaccgccggaagatgcagacggcacgctcaccggaacgggatgggtttctgctgatgtcgggtcttatgtccgtatcaacgaaggtctggtgctgattaagagcattaccagctcgcaagtcgccgtaggtactatccgttccgacctgaccgcgacgcaggcggcgtcaccgggagcgtggacacgtgaggatacagtctggacaaacgagtttggctaccctggtgccgtaacgctgtatcagcagcggctcgttctcgcaggttcccctcagtatccgcaaaccatctggtggagcgaaacgggcgtttacctgtcgttcgagctgggcacggaagatgatgacgccatcagctttacactctcctcggaccagctaaacccaatcgtgcacctggcgcaaatgaacacgctgattgcgctgacgtatggcggcgagttcaccatcacatcgggtaacgactcggcgatcaccccgactaatatttcggtaaaaaatcccagcccgtacggctgtaatggtatccgcccggtgcgtgttggtactgaaatcatgtttgttcagcgcgccgggcgcaagctgtatgcggtggcatacgaccctgacagttttgtgtcctattcggccaacgatatgacggtcctcgccgagcatattaccgctggtggcgtgctggatatggcctaccagcagcagcccgatgcgtttatctggctggttcgcgcagatggcgtggcggtcacaatggctattgaccgtgcgcaggatgtgatcgcgtggtcaaggcaggtcacagatggcgtttttgagtcactggcgtccataccgtcagataccgacgatgtggtctatgtcatcgtccggcgtcaggttaacgggcagacggtgcgttatgtcgaggtgttcgatcgtacgctctacacagacgccgccgtaacgggagccagcgaaagcggttccgcagtctgggcggggctgtcgcatctcgaagggcagacagttgacgttgtcgctgacggggctgttatgccacaggctacggtgtccggcggacaaatatccctgtcccgcaaagcgaaggcagttgagatcggccttcatttcgaaagcaccataaaaacactgtcgccagaagttcagaccactgagggcacgacacagaacgcgaagaaacgcacaagcgaagtgaccatgcgttttcttgagaccaccggtgcagagtgcaacggccaggttatcccgttccgccgtttcggaccgcaaatcctcgataagcctgcgccactgttcacgggcgatcactactggggaaaactcgggtgggagcgcggagaagatacgctgacaatccagcagcgccagccgctgcctttccaccttctcgcaattatgtacaccttcaccagtaacggaggttga

SEQ ID NO: 82366 - DNA, 450 bp, Citrobacter koseri
atggtacgcaatgcaacagtcggggatatcccggcgcttatcgaactgggaacccgtatgtatctggagtcccgctattcgcagaattcaccttttgatgcggataaatgcgcagaactggcgcgcagtctgattaataacccggcgggatgtgttctggtcgcagagaaagacgatcaggttattggctggcttggcggtgggatcgctgagcagtggttctcccgtcagcttatggcgtttgaatacgggctgtttatcgcgcccgagcatcggggcggtagcgcagggccgcgtcttgcccgcgcgtttatcggctgggcgaaagaccacggcgccgcgcttatcaatatggggatcacaaccggcgtacatgaagagcgtacgggggaactgtattcccgcctcgggctgcatcgctccggcctgctgtattcgatggaggtttaa

SEQ ID NO: 82367 - DNA, 474 bp, Citrobacter koseri
atgtgtactggtgtggaaattgcggcgattggtgcatccgttcttgcggctggtggcgcggtttacagtggtcagcagcaaaagaaaatgtccaattatcaggcggcgcaggcggaagccgatgcaaaagcggcgcaggcagcggcgcgggtggaagccgatcgcatccgtaaagcgggtcgtgcgcaggcagctgcggcgcgggcttctcttgcgggttctggtgtggaaaccggtgaaggtaccgcgctgcgtatcacatctgatatcacgcgtgacgcagagcaggatgcatatcagaccatcctgaacggaatcaatcagggcgcaaggctgaattcacaggctcaggctgaccgcatcagcggcaaaaatgcgtcaacgtctggctatatcagcgcgggtagctcgctgctcagcgctggcggtaccgcctataacggctggaaaacatcggggagtaagacagcgtga

SEQ ID NO: 82368 - DNA, 2706 bp, Citrobacter koseri
gtgagaataccaaccggtaattttggcaacgtcacgccgcaggcgaatccgacccgtatcagtgtggggaatgctggcgcaatcggcaatgcgatcgcagggcttggcgctgccatcgggcagactgctgaagatgtgcagcgcgtgcaggataaagcggatgtggcggcaacacaggccattcttcttgacctcgactcaaagtccagcgaccgctgggagaaccctgagacgggcgcactgacgacccggcagggtttcaaatcctccggcgttggtctggacatggataaactggatgcgtccgattacgaggaagcccgcaaacgcgttcctgccagccagttgacgtattttgatgcgcagtggaaagcggggcagcttcgccgcgccagtacctacaacagctttgagcgttctcagacagagcaggcccagcgacagcagctcgacgccactgtcaaatcgtcagttgaacaggaggcgggagcttttgacgatccgcaggcggcggcactgattcgcggggcgcgtaaacattctatcgagctttacggtcaggcgcagggctggtcttcagagcaaattttacaggcagtatcggaagctgatcagcgtgcaatggaacagcgtgcacagaattatgcagtaaccaacccgcagggatggcttaacggtgacttcccgattaaagacagcggcgggctggatatgcgcactatcggcattgttgaatctggcgggaaacattttaaggccgacggcagtattatgacgtcaccgaaaggtgcccagggtaaataccagttgatgccggatacgggaaaagaactggccgctaaacgtggcgttgaatacaacccggctgacgaagagcagaattcgctgctggcgagcgattacgctaaccagctgtacggtaaatacagctccgaaacgctggcgggcgccgcgtataactggggagtaggtaacgtcgataaactgatcgctaaagtgggtgacccgcgtaagggggaaatctcagaggcggaattcgtcagtaaactcccggcagaaacgcgcggctggctgtcacgttaccgcaaaaataaaacaggtcttgatcctgtatcggtttataagattgataacattgctgaaaaacaaataaacgaacagcggaaggctttactccagcaggttgagccaatttacgataatactttagcccagctaaataatggtgaaatccccgatgccatgctggatgagagaaccatcatgcgagcctggggagagcagggcaatcagaaggttaaacaactggatatcgccattgataacgcgcgcaccttccaggccatccagtacgtatcccccgcagagcagcaggccgaactcgcaaaagtgaagcctcatgctaacgacccggactatgcgctgaaactcgacgcttacggcaagctgggcgcactggtacaaaaaagcaatgcgacaattcaggcgcagcgtgacgcccgtcgctttaacgaggcgctgtcaacgggggagaaactcgacccgtcaaataaatccatgcagaaagccgcagatgctaccgataccgcgcaaaatttccgtattaacgatgtcaccacgcacgacggcattgtgcagcaggtagcgcagaccggcattatcccgtcacaggtgacaacacagctttcggccatttcccgcgcccgcagcccggaggcggttcggcagggagcagaattgtttaaccgcctgtacgatacagacccggcgtctgttggtgacatgccgaaagatatgcagggtttttacctgacggttaaacagctgaccgattccggtatgtcttctgatgcggctatcgaacaggcgcagaatctgacgtacaaccagaccgatgcgctcaaagcgcagctggcatcaacacagagcactaaggagtataaaaaagaccgcagcaaggcgatggattccgccgtaagcagtatgtcgcagtggttccggtttgacccgtctgctgacgatcaaacgcccgaagcggcgcgttttcgtaacgactatcaggcgctgtatgacattaattaccgcaccacaggcggcaatgctgatgcggcgaagaaaatgaccaatcagcaggtcgcccgcacctggagtatcagtgaggtgaacggcggcgctcagtttatgaaatatgcacccgaggcactctatagctacggtccgtcaggctggcaggcggcgcagtggaaagccgaaaaagagcaactgatgtacggcgaccgccaggagacgataaccaccagcccgacgcaactcgggatcacatccggtaatgcgcccgttgttgagacgaaaacgcctgaaagccgtatcggtggtgaactggagattacgcctgatgtactgaccgcgcgtcagggggattacgccattatggtgcgaatgaaagataaggatggtatcgagtctgtgcagccgttctacgacaagcacgggcgcccaatgcgctggaaaccgtcgcttgaggactgggaaccttataagaaaatgcagcaggagcgtgagcggcgcgcgcagaatgaacttacgcgggggcaggatattcgcggatttaaagacaagcatcgcgcgctggatgagcagtacaaacgcctgcataacgagcgcatggacagggttaaaaattacttttcgtggagcgctgaataa

SEQ ID NO: 82369 - DNA, 339 bp, Citrobacter koseri
atgcatcaggattacaaaacacgccttaccgcgctgagcgataaacttactgacgtggtgctcgaagaagcagacccggacaactgggctgggggtaataaacgcgtcaatgccttgacaaagcaggaacgcggcgaccggtactgggacaagaaaaatgcggctgcatcgctgacgctgctgattaaggtgcattcccttattggcatgcacacacgcggcggggttcccccagaacctggtgaaattgatgaagaattcgaactgggtcagcgggtcaataaggccgagcgtgaagcggccgctattctcaaacgccttcagaaaggcgaaaaatga

SEQ ID NO: 82370 - DNA, 1611 bp, Citrobacter koseri
atgatttcgttccttgccttctttttaatgtgggcggaacggatgaactgggacgttcccgactgccactatcgcgcctgtaactggctggagcatcgcgggaatctcgcggtgcttcgctgtttccgtggtttcggtaaatccactattttgggcgtctataatgcctggcgatattactgcgaccgccagtaccgtattctgcaccagtcggaatcggactccacagcgcgcaaaaccagccgcgatacgcagaacgttttacgcaaccaccccctgacaaaaggcatgttgccggacggactcggtacggtcgaacaatggtgggttaatggttcgctggacatgcgtaatgccagcatgttcgctaaaggtatcctgtccaacgtcaccggcgcgcgtgctaacgagtgccagaatgatgatgtggaggtccccaataatattcagacgccggaagctcgcgagaaactgcgttatcgcctgagcgagcagactcacatcctgatccccggcgggcgcaaactctttatcggtactcctcacacacatgacagcctctacgatgaaatggaatcggcgggtgctgactgtctgaccattaagctgtttgagaaagaaaggcgcatcgaggcgaaagacgccacgcagctgcgttacgttatcccatttcgaccggagtatgtttttgcgggtatccataaagcggcgcggctgctggtcgaggatgttgactataagctgaccgccgacggcgtggagtttgctgcggcgccagagacggttattgatttttatgccggatgtgcctggcctgagcgattcgatcatgacgagttagaactgcgtcgaaaagaatgtcgtacggtcaacgaatgggacagccagtatcagctgcacagtaagcctgtcggtgaagttcgtctcgatcctgaccgcatccgcgagtacaacatccaccctgaaattcgctacgcaaaccgcaccgcgtcgatgtggctgggtaacgtgcagattgtcggcgctgtcgcctggtgggatgtggcaacaggcaaggttaaagccgatgcctcagcgctctctctgatacttactgatgcgcgcggccatttgtactggcagatttgccaggagcttaccggggagctggcggagtttgatgacgacgacaaaatcatcggggggcaggtcgcacagattaaagaactggtactcaaataccagatcccggttgtctgtgtggaggtgaacggccccggtagttttgcaggtaagttgctgcgtcaggcgctcaaagggaccggttgtggcgtacgggaggaattcagcgtcacaaataaacagaagcgaatccttgacgcgtttgaagcgccgttatcttcccgtttcttgtgggcgcacaccgacgtactggacggtccgatgtacgaccagatgcgggactttaacccggcgctgaccaaccagccggacgacttcatagactccggggccggggcgatcagcgcaacacctgtgcgtatcggaaaaatggtcgggattccgaccggacaggcaagagaacattggcagttaagtgacggagaccacgaggttgaagtcgattactaa

SEQ ID NO: 82371 - DNA, 864 bp, Citrobacter koseri
atgtcggtacccaaccagacgccctatatcatttatacagccaacggtctgacgactgtgtttcccttcgagttctatatcatcagtgccagcgatattcaggtgacgattaatggtgcggtggtcactacgggttacaccgtatcgggcactggtaataccggtggtggggatgtgacatttttaacgccgccagcaagtggtgtcacggttatgcttgaacgtgttgtcccgactttccggttgacggattaccaggacaacggtgatttgctggccaatacggtgaacaaggatttcgaccgcctgtggatggctattcagcgatatgggatacatttagggcttgcattgcgtcgtccgttattcggggggccgtacaacgcagaaggataccgaatttctggcctggctgaccctcttaacgaccaggatgccgcaactaaaaaatacgtcaaagagcaacgctcagctgccagagatgaatacgatgaacgttactacaatgtcaccggcgataccttaaaagggccgatgcaggttggtggtaacaggatcaccgggttggcctcgccattagacccaacgtccccggttcgtaagcgtgatcttgatgctgaaatcagcgccagacaggctggcgatgctgccttacagtcacagctaaacggcacaaatcccccgatggggagtgcattttctcccattagctggcatgaccaggtcatcaccgggagtatcaacattcccgcaaacaagaacgcctggagcttcggacccacaatcactattgctccggggcaaagtgtcacggtcggtgctggttcgttctggactattgcgaatggccaggttcagccttaa

SEQ ID NO: 82372 - DNA, 972 bp, Citrobacter koseri
atgagcaaagtacgtgtagatcagctgtctccgactgatgattcattaactgtgaacgttaaagatttgcaactggtaaatgacctggtaacagaatctgcaaatctccccaacggcatggttaatatttcccaggcggtttcagaaaggattgcagcactgtcatcaaatacagtgcgattctgtacctggaatattcagggctattatcttgtagctaatgagaattcaccagttgctggtgatacagtggataccagtcgctttaacagggatgtcgcaagtcttcagcgcgttcgtgagcaggtagagtggttgctgaaaattggcgttgattttgctggtatgcaggaagtctatttaacgatggattgcaaggatgataataaacctattagtagcatgggaagcatctgggagttatatccgtatattagctcatatatggcattcgatacgtggacatcagatatgtttcttcaacgtccggggggtaacattgcactgtctacacgtcagctaagtaacggaacaacaaccctaatgcctggttcgggtatttcgggtcattctgcatttaatgcagtatcgcgcgttgaaatgaacgtcaatggggctacgattgcagtatacaacacgcatctgagtattgacgatgcaactatcgcattacagatagcacagatcgcgtcgcttattgatgctgatactgcgtcccatattgttctgatgggggactggaacagcaatcttgattcaacttaccagccatttatagatcgcggattcacaatggtgaataggaacggagaattgaatacatataatggcggttttctttcaacttggggaccgtggtatttagaccgtatattccatcgtggattctctacccagggaagctatggcgttctcacaccccctcgtgagcttggggatcataaacctttgtttgttgacctgaccatctaa

SEQ ID NO: 82373 - DNA, 1323 bp, Citrobacter koseri
atgtctaagtccgttattaacgcaaatgttttaaacttaaaagatggggttgtttatccagatccaattcatggtggggagcatcctgataacgcatcattgcaacttgatgctggtcaagcattgaagtctattcgccgccttaaggctagaacaaaaacggccacattcacctctgtcagtgactttggattatctccctcaacggtaacaatcacggatcttttgaagttagcgcaaccagatacggtaatcaccatcactgttgttggtggaaatcaccctaaccttgatacaccaaagaatccagctggtgctaatcattccggtacgatggttgttgagtgcaattcgttaggttatgagcgtgttggattcaaattttataatgaatttgggttatggcgtcgttactttaatactgcatatgcttccggtcatgttttgcgtgattcgggctggctttggatttcatgtcaggggtctcagcaggttatagatgcagctgccgcaacttatcttggcaatttactttccaatcttcgtacccctggcgattatttcattgctggtggagttcttggaacatttactgattctccatatgtagatagtatcgcatctgacatcgaagtaaaaagaatgcttcaggatcgtggaattatccaaacggttcgagctaacaataataatcaggtagggtggcgtcgcttcattagttctgctggtgcgatcggcggttggattcaagaatttgtcgcaggaactccattaactaccactagtacgattaattttggtggtggtgtagtttctggccacctcgcaccagatactgctgcaactaaaaatattggtggggctgcactaccatttaataatatctacgttcaaaacgctcctgttgttatatctgaccgtgaagcaaaaatgaagacttcttctattcctgatgatgtgcttgatgcctgggctactgttgagtattcgcaatggaaattaaaggctgctgtagcggagaagggggagggttctgctcgcttccatgttggcattatagctcaggagatcaaagaaaaatttgagcttgcaggtcttgatgcgactcaatacggtattctaatccatgaaaaatgggatgcacaggatgctgttaattaccagccagctcaattcgatgacgatggttctcttactgtccctgagattctcccccaaccatctaggaatgctggtgagatctggatggtgcgcatggaagaatgtttagcgcttgaggctgcgttaatgcgccgggagttagaaaaattaaatcagcattga

SEQ ID NO: 82374 - DNA, 231 bp, Citrobacter koseri
atgaacaacgtttcagatgtggcggctggagcctcctacatcacatcactgagcagcggcggttactggctgctccagctactcgacaaggtaagccccagtcagtgggctgctattggtgttcttgccagtatcctcttcggattgcttacctacctgaccaatctctatttcaaaatcaaagaagatcgtcgcaaagaggctcaactctatggtcagcaacaggactaa

SEQ ID NO: 82375 - DNA, 375 bp, Citrobacter koseri
gtgaccgttaaagagaaactgttagcgctggccgttctgctggcgctgtttgcgggtacctattacgtcggttatctgaaaggctggtacgcccacagcgaaaagataaacagcgagtatgcagcaaagagcagaaaggccgaaaaagctgttgctgccggtgaaaagaaagcggcagcggccagcgcagaaggcaaagtgatttacagaaccatttaccgcgatgtggtgaaatatgttaacgacccgaatcatactaattgcaggtttgacgatcatgctgtgcagctgcgtcagcgcgccctcgacgcggccaactccatcagcggatttgatgcaggagccgtgcaggggagcgatcaaagccggaactga

SEQ ID NO: 82376 - DNA, 1089 bp, Citrobacter koseri
atggcttactataacatagttaaacgaccaaaagctgacggcacgatccggtatcgttgcaccgttggaattaaatccggtggtaagcacatccaccgtgaaacaaaaaccttcagcaaactggcgctggcaaaaacatggggcggtcgccgcgtactggaacttgaagcggatggcataccagacaccggggatgcaagcaaaataaccacaggtgagctgatcacccggtacacgaatgacccttccctgggcggtaaagccggtcgtacaaaacgctacgttctagacatgctggcggattgcgatatcgccagaatcacattaaccgatctggcggtggccgatatcattacgcattgccgggagcgcgcgggagccggtgcagggccagctacaattagccaggatattagctatctgtcaggcgtactggcgtcagcgaaacctgtatacggtattgagtacacccaaaacccggcaagggaagcccgcccggtacttatccaaatggggcttatcggtaaacctcagcgccggagtcgccgcccggtgggtgacgaattagaccgactggaagaaggtttacgaaaacgaagcgcacaccgaagcgcaaaaatccctttcacagatattcttcgtttctcaatattaagctgtatgcgcattggcgaggtctgccggttgcgctgggatgacgtagacaatgctgagcgtgcagtgctggtgcgcgacagaaaagacccgcgtaaaaaagaaggtaaccatatgcgtgtagctctgctgggcgaggcgtgggatattgctcaacgtcagcccagaaccagcgagttaatattcccctacaactcaagttctgtaactgcgggttttcagcgtgtcagaaacgcccttggcattcaagatttgcgataccacgatatgcgccgggagggtgccagtcggctatttgaggcgggttttagtatagaagaagtggcccaggtaacaggccatcggtctcttaacgtactctggcaggtttatacggaactgtttccgaaatccctgcatgaaaagtacgatgcgttacacgctaaaaagaagtag

SEQ ID NO: 82377 - DNA, 606 bp, Citrobacter koseri
gtgctcgaagacagtctgaagctcaggctgaacatggacaagaccagaatcacccatgtaaacgacggttttatctttctgggtcacaggatcatccgcaaacgcagccgttacggtgatatgcgggtggtctcgacgatcccgatagacaaggccagaaacttcgcagcatcgctgacagcactgttatcaggcaattacagtgaaagcaaagtcgatatggctgaacaactcaaccggaaactgaaaggctgggctgcgttctaccagttcgttgattttaaggccaaagtcttcagttatatcgaccgtgtcgtgttctggaagctggctcactggctggcccgcaaataccgtacgggaatcgcttccctgatgagatggtggtgtaaatcgccgaaatcgggtcagagcaaaacgtgggttttatttggtaaaaccaatcacggcaagctcagtggcgaaatcctgtaccggctggtcgggcaaggcaagaagctgttctgctggcgtctgcccgaaggtaatccctatctgaggacggaagccagaaacacatacacattgcgctacactgaagtggcaatggcgtttgccagcgtttaa

SEQ ID NO: 82378 - DNA, 456 bp, Citrobacter koseri
atgattaagaaaacattatgcagcttattgctggccgtactttgtggcggcatggttggccccgcagtgagtgcggagaatgaccatcggtatattagtattcgtaatacggatagcagttgggtgcagggcgtgtgttctttggtattccggctggataacggcggtgatgggacattcaataacctgacagtcagcttacaattaactgataaatcgggagccgttctggaaaaaggaactcttgatgttcagccgtttggcgatagcagtgcaactcgctcaaccctttcggcaactgaattcagctgtgatgcggttgaaaatacagccaacatcgtgattacccacgttgaggaaacgtcttcggatggttcagtccatgctctgccactgtcgatgtttgatccgcaatattatcaaccattaaaaatgagcgtacaaaaaagcggatag

SEQ ID NO: 82379 - DNA, 504 bp, Citrobacter koseri
gtgaaattaactctacgaattgcagcgttgaccattgtctgtatgtcactcagccagacagctttagctgcgtcttacagtgcggaggatcaggaacaattaacgctggaatgcctgctcaccaataataaatacgccagcgcctttattgcgcaggatagcgcgggatatgccctgggaacccagtctgctccgactgctgagctgaatcttgtcactaatcaaccgggggttaacacctactataattctcagatgatcgccggtggctcgctttactggatacgtgtcgtcaaaggcccctatgaatatattgtttacgataaagagcagcacggcgatatgtcaggtgtggttgtcacaaaaaaagggaaaagaatcttccacaaagattgcaaggaacctatcaaggtgggtacacaaaacgatggcagcatctttagccgagttgcgcaagaagatacagaaggcgatcgtattatcgatttaatcaacaaagcataa

SEQ ID NO: 82380 - DNA, 1569 bp, Citrobacter koseri
atggcctttactccttccacattatcgcgctgcctggcgctagccctgctggtgaagatctcccccgcgctggcagaaccgtgggcagagaaaacctataatccgaagccggatagcgatgacgtgattttgcctatgccctgcgaaggttcgatggtatttcgtcgggtagaaattccagtagccggtcctctggatgatattcccatcaccttaggggaagatggcggtgaatggggctttgtggaacacagttatcccacgtttatcgccggtagctttactgaaacgccccaaaataaaggccgttattatttaatggcgaaatatgagctgacggcattgcaatatcaggcattaacttccgatacttgcccgacaccatcgcgtaaacttagcctccctcaaaccagcatcagttggtttgaggccgttaatttctccgataaatataaccagtggttacgcgcaaacgcgctcgacaagctgccgaaagaagataacaagccaggttttttacgactgcccaccgaagtagagtgggagtttgccgcgcgcggcggtctgaaagtggataccgcacagtttcgtgattcccgttatccgatggacgacatcaaaaattatgagtggtattccggttcgcagtcctcaaacgggaaacttcagctcatcggtctgttaaatcctaacccgctcggcctgtacgatatgttaggcaacgtctctgagatgatgtttacccccttctacctcaataaaattaatcgattgcatggccaggctggcggttttgtggtgcgtggcggcagcgtgatgtccagtgagtcggatatccgcagcgctagccgtaaagaaattaactattacgataatgcccagccttttaccagtaaaacaatgggcctgcggttggtgctggtttcccaggcaattacctcaacggaccgggtcaaacttcttgagaaaaactggtcgactctcggtgatgataaaacgggcgcagagagcagcaaatccgggtccaatgatacggcgaaagcgttaggtagcctggcttctggcgttgaagacggcgagctgaagaaaaagctgaaagatctggaaaaccaacttcgtgccagcaaccagcagcagcaagaagaaagagcacagtctatccgcgccagcctgaatctgggctcttttctctgtaccaaattacaggacgatggtcgtttccttgacttcctcaatcacaattatgagctgctgtgcaaagataaagacagcagcgatgccaactgtgccatccgcaaaaataagctggcggaacaaaccgatcgtctacagcagctaacgagctactacgccagcagtctggtggattccggcaccctgtatgggcaagcagggctaaaaggcgaagtgaacgtgttcaatcagatgctgacgctgaataaacgtctttccggtcttaagccgttcctcgctgctcattggcagaatcagcaaaaatacctagcgaacggcaaaattgatacagctggctggctggatacctgcaaacaagtaaagaacggccactaa

SEQ ID NO: 82381 - DNA, 1215 bp, Citrobacter koseri
ttgtcctttaatcgtgcaagactgctcggtcgccttgcaatgcaagacctgtggcacgatcgcatcatctctttttgcatcgtctcctctcttgttgcggtcatcgcccctttactgctcctttttggcctgcgctttggcattgtgaaccagttacaaaacgatctggccaacgatccccgcaatctggagatccgcatgttgagcagcggaagctacgatcagcactggatcacgcagctacggcagcggcctgatgtcggcttcgccatcgggcaaacgcgctcgctcaatacgctgactgacttgcagacggacagcacacattttattgaaaatgcggaagtcattccgacagaggctggcgatcctttgctcggcacgcaggtgctccatcatgaccatgaagttgttattactcaggaagcggcacgcaagctggcggtgaaaaccggtgatacgctcacgctacgcgtgagtcgtatgctcgatgaacgccgcgaatggggacgtaagcgcgtgaccgtggtggggattttgccagccacctattttaatcgccccgctatctttacccgccccgcgttattaatggctcttgaacattttcgcgatggctatgcggtaacagcgttaggggtcgccagcggcgctcagcttaacggtaacgcgccgcgctacgcccgcgcaaggttgtacgcacgcgatattgaccatgtcgccagccttgaacgcgatttgcgcgcccaacgcatcgaaactaccagtcggctggcggatattgagaatgtaaaaagcattaaccgtgtgttgggcatcatctttaacacgatcgccatcaccgcgctcattggctgtatcgcctcgttaatcggctcgtttatcgccaatgtcgatcgtaaacgtaagcatattgctgtacttcgtctgctgggcttcacgcgaccagccgtaggcgtttacgtcattagtcagggcactttgctcagcctgatggcctatatcggcggttttggcatctattttttagccagccagatatttaaccgggcgctgtccacaagccaggccaccggtcagatgatttgcaagataacgcccttacacggccttatcgccctcttactgacgctggttgtggcgacgctggttgccggtatcggtgcctggcgcgcgatccatattgaacctgcgcagagcctgcgcgaggcataa

SEQ ID NO: 82382 - DNA, 726 bp, Citrobacter koseri
atgctgcacattgaagacttgtgcgtggttcgtggtcaggatcatcaggctcaccgtgtttacctgccgcagctttcgctgcggccaggcgaggtggtggcggtaacgggtgaaagcggctgcggtaaaagcacgcttctggaagccattggtttagtgttgcatcccagcaaaattgggcgtttcacgctcagcaaagggacacagcagcaggatattgccgcgttgcttctgggcgagcgacataatacactcgctgcgattcgggcacgcgaacttggctttgtattacaaaacggtggcctccttccctacctgaacgtcaaagataatattctcttgccgtgccagctgctgggagcccgccctgacagcaccatgctggatagggtcatcgacacgctaaaactgtcgccactactggcaaaatatcctacccagctctcctttggcgaacggcagcgcaccgcttttgcgcgcgcgatattacatcgcccggcgctggtactggcagatgaaccgacggcggcgctcgatccctacaatgcccagaaattatttagcctgtttatcgaactagtccgtcaggaagacatgatggcgctggtcgtttgccatgactggcctctggtcaaacacttcaatttaccctgtttagctgcgcagccagaatcgctgacggcgtcatcacagagcgaacggggaggtacttactttgtcctttaa

SEQ ID NO: 82383 - DNA, 1968 bp, Citrobacter koseri
atgacccggacttttttttgccgtctggcgctgccattatgcggcctgttgttcagcgggcacctctttgccgccgagggcgataaaccgctgcttcaggaagggaagaaaacgctataccagcgcatcctgacgacgccaggctgtaagcttagcgacaacgccggggatgaaaatgggcagcttcagcctgcctttagcagcctttatgtttatcaaaaggaagaggctaaggggcaaagctggcttaaagtcgggccggatagctatggcaaaacccttggctggttgccgaaatcctgtaccgtagactggaaaatgcagctgacgctggcgtttaccaacccggccaaccgcgatcggttactctttttcaaagagaaagaaagtctggataacattctttctgcccccgatcctgtctctctggtggcgccgctgcgcgccaaattgaagcgtgacggccacgctgaaggtattcaggcccaggagccggaatattttgtcgatctgcaaaagcaattttatctgctgccaatcctgagcggcgaagaggtcatgaccgaagatggcttctatacgcgcctgctcaacgtggcctccgtcagcaaggcggatgataacgcagcggcaaaacaagataacgacgtaaaccagttgaaaggctttaacgcttcggtggtgttcgttatcgattcaaccatttcaatggggccgtatattgagcgcactaaagaggcggtcaataagatctacgacaaaattaaacaagagcatctggatgggcaggtcaagtttggtttggtctcttatcgttcaaataccaaagccgtaccgggacttgaatataacacccgcattttcgccgaccctaaccaggtcaaggacggcgcggattttctgcagaaagtcgccgatcttaaagaagcgaaggtctcaagctctttatacgacgaggatgcctattccggcgtgttatcagctattgatgacattgactggagtccattcggcgcccgctatatggtgctgattaccgatgctggcgcgattgagggcagcaataaactttcaggaaccggccttgatgccagccaactccgtctggaagccggtaaccgcggcattgctatttatacgttgcacctgaaaaccgccagcggcaaagcaaaccataccaaagccgagggccagtaccgcgatctctccaattttgatagcacgcaatctaacctttatcaggcggtgaatgcaggcgatatcaaaatgttcggtcagcaggttgatgccctggcgtcagccattacggaacaggtgaaagccgcctatatgggggatgccgccattggcagcgcgctgtatgccaaagatgaggggcaaaagctcacggcggagcagaaattgctccaggatacggcgttaatcgggcatgcgatgcagttagcctatttgggcaaacgcaacagcacccaagccccgttggtgttccaggcctggattagcgatcgcgatctgattaagcagaacatccccacaacagatgttcgcgtgctcttaaccaagggacagctgagcgatttaagcgatgccgtcagccagattctgaaagccgctaatgaagggatgatctcgcccactaagatgtttgaacaactgcgcaccgttgcggcaacaatggggaccgatcctaaccagttgaaacagcaagacagcgcgagcatcggcgatcttggcgtgctgggcgagtatctggccgatcttccctacaaaagcgatgtgctgaatctcgatgaagaaacgtggaaaagctgggatgggctgtcacaggagaaatttatccgcacactgtcatccaagctgcgtcactatcaaaaatataatgcagatgtcgaccgctgggtcgagctggcgcaaggtagcgatccgcgcgatcgcgtgtatcccatcccactggaaatgatgccctga

SEQ ID NO: 82384 - DNA, 1020 bp, Citrobacter koseri
atgctagctaaaatcatcgcctgccaaccggcagagccgggtaccgcacaattgatggttcgcctgcgcggcgaaactgcggtgctgcccgatctgacctttacgctttgtaataacgagcagaactatctgcagcccgatggcagctggagccctgcacagcactggtttactgtcaacggcggttactccctggccaacggcagcggctttcgtatcggccctactctacttgaccctttgctggcaaacgcaagccaggtccagattcagatcaagctggcttcaggagaagtgcgcaataccaccctccaattggtgcgtgatgagttgctctcttctgaagccaggggcgcgacgggtaattacagcagcagcagtatgctggcaaccccagaaaccgactccgcaccagtggccatcgtagaagcgcccgtcgcagaatctgaaaccattgcgccgaccattcatgccgagccgcagccgcaacaaaaacctgcggcttcccgcctcccgctcatcatcgccgccatcctgcttttagtggtgattgctggcgcgctttggtggttcatgggccgggacaaaggtcaggaggtggtcccggcggtacaagctcagcaagcccccgccgccgccgcccctgaagcgacgaacaccgagcctaaagccccggctggctgttccgcacagagtttagacacgctgagcgagcttgaattcgtgcagacgtgcgttcaggaaaaactcgatagcgataaactgctggccattatccagtcagcgaaagaggcgaagaaatgcggcgtcgcccagcgcctgtacgcaaatcgcgcgcagggcggcgataccaaaatcgccctgatttacgccggtgagtacgatccgaaataccatcaggcaagcgaatgtttcaaagaggcggataaagataccgcggcctattggtacgaaacggtactacaatcagaacccgagaaccaaacggctaagcagcaccttgaggagctagcaaaatga

SEQ ID NO: 82385 - DNA, 2715 bp, Citrobacter koseri
atgaatagcgatcaaaaatctctcactcagggttgggcagctatcgctcagggctgtcaggacgcacttggctgggttgatgcagtgcgttccggttcacgtcgcctcgacaacgaggcggataaactcaaccttagcttgctccgcacgcgtaaccaggccaatagcctgacgttggtcgccagaacgccaatgaccgtcggtttttttggcatttctcaggccgggaaatcctatctcatctccgcgctggcagcgggcagcaatggttcactggaagccctttatggcgaacggcgcgtcgactttatcaaagaagtgaatcccgtcggcggcggtaaagaggccaccggcctggtcacccgcttcacccgccaggcccccgctgcgcctgcgggctatcctgtgcctctgcgcctgttcagtgaaatcgatctggccaaaattcttgcaaacgcctggtttaatgatttcaaccacgagcagctgagctttcaacttgatgaagccagggttgaagagcgactgcgccccttcctacaacgcgccacacaagcaaaaagctataacggcgtgagccaggaagatgtggttgccttatgggattacctgaacgcctcgttcagaaaatcggttgaaaaacttgaacacgcctattggccgcaggtgttgaaaattgcccctgcgctgagtcctggtgaacgcgcagagctattttctttattgtggggagaacttccggccctcaccgagacctatcgttcattagccaatgtgctgaccaaactcaatcatgcccggacggtgttcgccccgctggagacgctgatcgatcacagtaatggcagcattatgaacgtcgacagccttaaccggctaggctccagccaggatcgccacgtggagatccgctactggaaagaggaacagcaaatcggcagcgccagcttaacccaggcggaactggcagcgttaaccaccgagcttatcttcccgttagcggaagtcgaggccgacagcgtcgtggagcaggtcgatctgcttgacttccctgggtatcgcgggcgtcttaaaattaccgcactggaagaggccggtagagaggggcttaatcccatttgccagcttctgctgcgcggtaaagtcgcctatctgtttgaacgttacaccgataatcaagagatgaacgcgctggtcgtgtgcgccagctccgccaaacagagcgatgttgctgacgtcggtccggtattaaaccgctgggtagaaaaaacgcagggtaaaagcgccgaagaacgtcagggccgtaaccctgggctgttctgggccatcaccatgtgcgatatgcgcatcaacagcagtctgcaactcaccaccgaacagttaaaagaaggctgggaaggtatgctgcacatgaccttgctggagcgtttcgcccaatatgattggctgcagcaatgggcgcccggccaggcgtttaataactgtttcctggtgcgaaaaccggggctggataatccgttcatcgacctaaaagacggtacagaacaggagcgaaacaaggaagcgtgcatcaccgagcgctatcgccagaagctcgacgaaatgggcagcaccttcattagcgctaaaaacgtgctgcaacacgtcaccgagccgagcaaagcctggcacgcgatgctcgagctcaacgatggcggcatgggacgcttaaccaaagcgctgcgcggcgtcgcgcatctggaattcaagctggcacgtttgcagcaacaacttgagcagtgtcgcgaggagaccggcaatcgccgcctgggccgctggtacgaaaaagacggcgacgggcagctcgtgaaaaaacaggccatcgcgaaagagctatggcaggggctgtccgcctgctcccacagtatgggagagctaattaatcgtctggatctgccgacgcaggagcttaataacatctatttaagcattcgcgaccgcaacccggaaccgtcaagcgatggcgacagcctggcggcaaacgcgtttaccgccagcccatttggcaacaaccccttcggtgataacccgtttggcagcgatccattcgccgccgcaccggctgaaatcgccgtggttgacgcgccagcgtcaactgcccaggaaagagtcggccaggacgatgatttcgcccatcaggcgtttaaagcctgggtcgcgcatctgcgtgaactgccgcagcaagcgccgcagtggcgtcagttggggatgaacagcgaactgattaatcatctcagcgaagaattgatcaccgcagccacgcgcctcgatctggaaggcacgctgaaacgcgcgctggcgggtcaggagcaagcgggtacgcggcgtgaacatcttatggcacgccaggttctgcgagcccaactgactatgcgtgattttatcgcctggtttggttatctcactctaccgcctgaaaaggtgcccaacagctacgttggcgagaaaaataaagtcttcctgcgccagaaaccgctgatgaacgacgagctgccgcagctcgccgccgttgcgccgcagccgggtgtctcttatctgggagactggctatccgccctgatgagcgtcgtacttgataacgctggtcatagcgccacgcgcgatatttccgtcgaacataatcgccaacttggtcagattatcagccaattaaaacaagagaacatgccatgctag

SEQ ID NO: 82386 - DNA, 3069 bp, Citrobacter koseri
atgttgcccgagattgtatcttttgatcgtcaagtaaccctggtaggcgactccgggatccagtttatggattttggtttgtctccaggacgtttgcccgccggtgaatttgttaaattagccaatggcgtattgacccgtttaatctacaacgaacagcgtgattactatttttatcagcccagcccggcaaatatcgagaaggctaaaagccagtacgatattcccgttgagcagagtcttaagctgtttgacggaacatggttgccgcttcccctactccgtttcagcccgcctgacgtctatcaggaagggccgctaaactgggcgcgttttcgtatcgtcaagctggacaagcctgatatggatgggcatagccatcgaatgacgttggctatcgatactcgcgtaatggccaaacagcaggccgccgccgacctcagcccgaaccaggaagatgtcaatgccggggcaacctttgcggtggcgacagccacctatgcccttaactggtatctcacgcaagagtggattgtcgactggctgaaagaggtatttaaagaggcgagcaaaggccgggatatcgacgaacgcgagcaggagcttaaccagcagtatccgctggcgcactaccttaaccttctttcactgatggcgattcccgtcgaaggtttgcaaagtcagaccgcccccatcattgaattgccgcatttcagggtcatcgccaatcgggaaactaacgctatcaagcctattcccgttgatttgatcctcgatgtcggtaactcacgcacctgcggtattctcattgaagatcatgggcaatcaggttcaggtatgcagcacaactatgtgctcaaattgcgcgatcttagcgcgccggaacatgtttataccgaaccctttgaaagccgggtcgaattttcacaggccttcttcggcaaagatcactgctcggttcgtagcggccgccacgatgccttccagtggccgacgatcgctcgtatcggcggagaagcgggtcgtttagcggcgcgccgaaaaggcagcgaaggttcaaccggcctctccagccctaaacgttatctttgggatgaaaaatattacggtcagggctggcgatttaacggtagctacgtgcaggacagtaatccactcgccaccgctgcgccgttcgcgaatctgatcgatgaacggggcgaggcgttacacaccatcgaagatgagatggatcgcatcccggtctttacgccacgctattctcgcagttctctgatgacctttatgctcgcggaagtattaacccaggcgattagtcagattaatagcccggaacagcgcatacgtcagggacacgcaggtattccgcgtcagctacgccatattattctgaccgtgccgcccggtatgccgatggctgaacgttgcgtactggatgaccgtatgcgtcaggcggtcggtttagtctggaaagcgctacgctggcacaacggcgaaaacgatccttatgaggatgagcaagaagatcatagtcagacaaacattaaaattccgctgccaaaaatcagggtcgagtgggatgaagcgtcctgcgcgcagttggtttatctctacaccgagataaaccaaaactttgccggtcacccggagtcgtttttcgacgcccttagccgacccgacagcacgcaacgtgaaagaatatccatcgcatctatcgatatcggcggcggcaccaccgatctggtcatcaccgattatcatctcgatcgcaatggtcatagtgggggcggcgctaacgtccatatcatcccgcagcagcgttttcgcgacagttttaaaattgccggcgacgatattctgctagatgtcatccagtcctatgtgcttccagcctttgagcaggcgctgcgtgaaacgggggtcacatccgttgagacgctgatgtctcaactgtgcggctcgcaaaatattagcgcggcggaatccgtgctgcgccagcagctcaccctgcaactcttcgttcccctcgcgttgcacattctgggtaaatacgagcaattcgatccgctggacgagcaaacgcatatcgtgattaaccaacgtgtcggcgatctactgccggtaggttctctgcgtgatgaagtcgagggctttgttcgccgcgaagtacaaaaagctggtggcccgaccgatttcaaactggcggaggtaatgctcactctgccgctcgccagagtgcataacgatttgtgctcgggtaagttcaacattgataaagtgctaaccgcgctgtgcgaagtgctgagctattatcattgcgacctgctactgctgacgggccgcccttcgcagctgccgggcattcaggcaattatccgtcgcaacctgccattgccgccggggcgtattttaccgctgcacggttatcagaccggcacctggtatccgttccataaaaatggccatatcgacgatccgaagagcaccgcctccgttggcgcgatgctcacacagctgtgcgcaaatcacagcattcctaacttccatttccgtacctcggcgctgaagccttactcaacgattcgccatattggcaccattgatatggataacctgattcgcagtgccgatatcgtttatcgccatatcgaatcggagaacgggcagataaaactgccgacattcaccgacgaaaatggcgagaacaccacgcaaagtatcatcatgcgtggcgatttgcggctgggttatcgtcaactggatgccgaacgttgggccgccgcaccgctttataccttacgttttagcgaagaaggccgtaagaagttttccgccgccttctccgtggataacggttcaccgtacctgaaagtgagactggctatcgacaaaggcaaacgggcgcgccaactgggcttaatcagcgatcggctgatgattgcggatatcaccagcaacaccgataagtcattcagcaagcgtgatgtagatctggaactcaatactatgcccgatacggggctcattgatagccgacactggctcgatagcgggagtgttaaaaaataa

SEQ ID NO: 82387 - DNA, 1452 bp, Citrobacter koseri
atgcgaaattcgattcagggaccactacttcgtaccggaaataactcttcattcaaggcgctgggtgaaacgggctatcctgttttcaagatggccttccagctacgcgaagccatctatcgtcttgatgcagggcgcgatctggcccgtcatctggctatcccgcaaaacgatcagggcggtgacagaaccgactggtacagcagttttcccggcgatgttatcccgtggagcggcgcaagcgaagcggagcgagaatcggcgcgccagcaatttaatgcgtttcaaatggcagtgcagtcactaagcgaacagctgctcaacgcggagcaaagcggaaccggcggcgatcgtcgggtctttgcccagttgcttaaatctgtgacccatttccccgattatgagtttgtctatctcgttaatggaacgctggtgatcaccttttgggggtttgtccacccggaaggggaacaacgtcacccgatgcattggctgagttcatcgtccgttcccgccgccgccctcgcggccgttccgccgcaggccagcgccacggaaaaaaccgtcgaacccgctcccgctcccgcgccctttgttgatattcgaacgcgccgctggcgctggcgttggttgctatggctacttttggcgttactgctgctggcgctgctgttagggctgctccgcggctgcgctccttctctttccctgccgggcctccctggtctttctgcggataaaaccacggtcaccgctgaacctgtggctacgcacccggccaccagcacccatgacgtggcgatcagggggtcagaaaccgccgttggcgctcgcgccgtacccggcattgtggaagggtcaaccgcggacgcgcatcctgcgctggattcaacggtgcccgcgatgcctgccgacacatctgacagagcggtagacggcgatgcgccgccgccggctaacgcaaatgaagccagcgtagaaccgccactgccgcccggcgtacaggatacccacgacgagcagacgcctccgggcgtgactccggtaaccgccccgccgctcgttgcgccgcagggcgaaccgttaaccctcccggccacgctgccggacggcccggcgaagtttcttaacggcgaatggcgcgtgaatggcggtattcaggacaagcacaccggacgcccgctccagctgcaatataattttgaccagggcaacggcaccgtcagcgtccgccagtccagcggcgtaacgtgccgtggcccagccaacggtaacgtgcagcagggggcgctcaacattaccaaccctgagcaaatgacctgcagcgatggctcgaactttattgtgccgaccatcgagtgcaaatcaccttccgcgggtcatgccgattgtattggcagcaacgatggggaaaaaaccttcccgattcgtatgcttcaacctaattcctga

SEQ ID NO: 82388 - DNA, 1146 bp, Citrobacter koseri
atgcatatcacccacaacaataatgatttgcttatgcaacgattaacaactgccgcgccgattgatgaagcaacgctgacaacctatgaagagacggtcggtatcatacatcgtcatcttcctccttcactggcgctgctgtatgccaccgcgcgtcgcaatgccgaaggacgcctggagtggtggacagcacgtcaggggctggctaaacctttttccgcactgaatgacgccgaacggctgactgttgagaataaacgtcagcaatatcaggacattctggcggggttaatcagccagctggccgcgcgcggcgaagataagtcagcacatgcgttgcaaacgctgctcacccaatcacaccacctcgacggctatagcgtcggcggcgaaccggtgttggtcaattgggccacagccagcacagcggcccccctccatacagtagtggttatcccctggtggcgcggttttcttccttggctggcattattgctactgctgctcctgctcgtcggtgtctggtggtggtttacacatcgcccggccgtgaagctccccgttgttacaccaacccataccgaattaactgacaccaatcccagcgtgaagcttgagaaacgtcaggattttggccggataaaaatcaatctgcagtggaagcagggggaccacaaagagcctgtcgatctcgatattgccgcctttgtgcgcttaaaaaacggtgaaatcagcggcgctgaggcgctgagtcatttgcccggcaactatgaccagccaccgtatctgctgctgcaggaagatctgcgtgaaggcaatgacgtggatggcgaatggcttttcgtcaacggcagccactggcaggacattgatgaggtattgatttatagcttcatttacgctggcaccgataactggcaagggacaaacgcctccgtcaccctctatgtccccgaacagcagccgattacatccatgctcacggatagcgaccagcgtaataatgtcgccgccatcgccaggctcaaaaatgtcgatggcaatattcaggttgaacgccttgaccgtttcttccccgaccgcgagtcgatggataagcactatggctggggtttcaaatggacgcccggcgcgaccaaaaattag

SEQ ID NO: 82389 - DNA, 483 bp, Citrobacter koseri
atgagaaaatacgcacttcttgccgcccttgtctttacgggttgtactacgtccccccaggactgtgatttacacgcacaagatccaagctttattaccaaactgagctgcgccacgtcgggtggttatcgtcagcaggttgatcaaaaagaacagcaggttcgtctgagccaatatcaaaatgaatcggccaggcaacagcaggattatacccaaaacagacagcagaccttaaatcaaaagctggcagatgaacaagcaaggctaaatgccgtgcgttcggatctgtcgcagactctcgcaaaactgaaatcaagcaagattcaaagccgcgaacgccagcaggaaattgccaaattgcaggagctgcagcgccagtcacaaacggcaacgagcgccagcgaaatttcagcgattgagaaaaaggtcgccgaagccaagcacaaaattaaagttctcgaagaagcaaatacgctccgctaa

SEQ ID NO: 82390 - DNA, 738 bp, Citrobacter koseri
gtgaatacatttaaccgaactaccacatgcatcgtgatttccgcagcattgttacttggaggctgtgccaataccggaagctctctcctgtctgggacaaagccggatcctcgccttaccaccacagaacaatcacagttctttagcgcttctggtgcacaaggttgtggcgtaggcgccgtatccggcgcagctctcggcgcgttagtaggggcgttagcaggtgactcgaagaaagcgcttgccggcgctgcaattggtggcgcagctggctgtgctgcaggtatgaccgctaactactatcttgatggcctgaaaaaagattatgcctctacagccgatcgtctgcaggctatggataatgacatcagcaaagataccgcagcggttgaaaaatcgacgctggcgatgaaacaagttattagcgaaaaccaggccaccttaaccaaaatcagcatccaaaaagataaagctggatttgataaagtcggtgcgaaaacccagctggcgcaaattgatgccaacatcagcaagatgaaagagaccatgaaaggcatgaaggataaagaatctgcctataaggtcgctttacaaggtcaaacgaccaccacaagtgcagagaaaagcaagctggcaaatttgaacaaagaatatgccaatctcaatagcaagattgctgctctggaacaagaaaccaacgagctgtatgaacagcgccaggcgatctcccttggttaa

SEQ ID NO: 82391 - DNA, 1485 bp, Citrobacter koseri
atgacatcgatactggaaaaaatcggtaaggcaattgactgctcacgccgcacatctgatctggtgatcactgaagatcagcaaaccaccacccggaaattgttcatttctggaaccatggataatgacacccttcagttatggggggaagtaatggataccgatgccgaaaatctcaggatcacctttgttgatgatagtcgagatgatatccaccccgcacaaggtatccccggtcagaagcactttatcaccatcatcagcgatgaactccccggaattttgcgcctcttcaccttggaaggttggcgttcgtttttactccaggatcccaggctctgtcagtatcaccgcatctacgccctgtttatcaacgaagcatttgaaacacaacaatggaaggtcgcgccgtggaaaaaaatgctcccggatgagagtgaaagcgacgtcccaactcagacggcctccgtcacaaaaagcattatccgttgtttttcaactgactttcttcccccagatactattgcaccttggatcctgatatccggcgatacagtgatcgacgaatcaatgagactctgggagtcactcgcttgtcgggagttgttgaaatgtttcgtcaatgagctttttgctgccgaaataaaaaaggtcggactgtcaggaaaaccgccgcggaaaatccctttcggggaagaacatgcggctctgcccgcctttgacgtcattcaggaaacagcaaaatggatttttctggaaggaaacgaaaccgagcttaaacatacctttttgtccagtgaactggccagagaatggcctgagggcgttacgttttgtgaaggcattgtgtatcgactctccccggcactggagtcagcccgacttctctacaaggcccatatccggacagggggaaaagacaccctgaaatcgctgggcgatttgcgaaaaagtctgacagaggacacacaaaaaattctgcagcagtcgcgtgacctgtcttccacgttgtggaaagatatggccctggttatcagcactctgatccttcgctacagtctggaggccctaaaggcaagtggtccgcaaaaagtgtatgctctggcattttgtgcactggccctgtatatcgccatctcatacgggatgtcggtctatatcaaccggaatgccctttcactgctggaacaaaacagaataacctggagaagtaagttatatggttttctggatgaacaagattatcaggagcttgcgggtcttcccattaataccgcaatgtggtcatatcgccgggttgagcgaataacgtcggccattatgctcgtactggtcacgctattactcacggcagcagcaagtgaattctggtcgctaagtatgatcatgcattctggatacacttgggttatgagtgcgctgcagtttctgacatccacggccctgcgaggcccgaacgatttccagtgtgtccttcaaggctga

SEQ ID NO: 82392 - DNA, 204 bp, Citrobacter koseri
atgtgctgcagtaccggcgtatgtggttcagatatcgatcaggttctggttcatttctctgctgatgtgcagtggctgaaaggacgtggcgtacaggttgaacgttacaacctggcgcagcagcccatgagctttgttcagaatgagaaagcgaaagtattcgtcgaagcatctggaacagaagggcatccgctgaccgtatag

SEQ ID NO: 82393 - DNA, 153 bp, Citrobacter koseri
atgtggatgggagcgactcacttcctgacgcaacggtttaaaaacgtcagcacagaaatgagtctacatgtgctggcttataacctgaaaaggatgatgtccatctggggtaccgaagaattggccattaagctgcgagaacaatacaactag

SEQ ID NO: 82394 - DNA, 720 bp, Citrobacter koseri
  misc_feature (630)..(639): n is a, c, g, or t
atgcagatgttcaccgatgtagtggttgccattgacggtagtaagttcaaggcagtaaacagcaaatcgaacaacttcacgccccagaaaacaaaaggccacatcgaaagagtagagcaaagtatcgctctttatctgaataaactcgatgaagctgacaaggctgcggagcccgaaaaaaatgcagatttaaccgctgcaaaactggcatggctgcaaaaacgtctgaaagaactcaagaaaatccagcaggccgttgtgcagcaccctgataagcagctgtcactgacagatcctgattcccggctaatgaagataaacaatgttaaccgccaggtgagctataacgttcagactgccgttgatgctaaatatcacctgattgttgcgcatgaagtaacgaatacaccagaccgtgggcagctaacatcggtgacaaaattagcgcagaacgctgttggcaaagcggatattaccgtactggctgataaaggttattacagccggggtgatattaaatcaacgcaggatttaggtgccgtagccttagtaccaaaaggcgatacctctggcgctgaccgcaaaggtcttttcaatcgttcattgttcaaatatgaccaggaaaaagannnnnnnnnnatgaccaggaaaaagatatttatatttgcccgatgggtagcgagcttcagaaccgatttaaggtggttgaggatggtttag

SEQ ID NO: 82395 - DNA, 288 bp, Citrobacter koseri
atgactcaccacattaaaggtcaaggcagacatcaagtgacgttgctccctgaagtgctggatgattttgtcacagaagacaaccctgtcaggattattgatgtctttgttgatgaattacagcttgatgcgcttggcttcgagcgcgttaatgcaaaacaaaccgggcggcctggatatcaccccgcaaccatgctgaagctgtacatttacggatacctgaaccgcatccagtcatcccgcaggttagaaaaagaagcccatcgtaacggttacttgagcgattaa

SEQ ID NO: 82396 - DNA, 2196 bp, Citrobacter koseri
atgagcagtgcctacgatagcctcgatccccgcgtccgtaagtgggtttacaagcaggggtggtcgacattaaggcccttgcaggagagttctatcccggcaattttagcccgtgatcgagacgtgctaatcagtgcaggtacagcagcgggtaaaacagaggctttctttcttcctgcctgttcggcagttgcagatctcacgaatggatttggcatcgtctatatcagtccgttgaaggcattgattaacgatcagtaccgtcgtcttgggagccttggagatgcattggaaatgccagtgactccctggcacggggatgtaccacaaagcaaaaagaagaaggctcggacgaaccctgctggcattttactgattacacctgagtcacttgagtctttgctcataaattcaatgggctggctcaaacaggcattttcttcagtcgcatacatcgttattgatgagtttcatgcttttattggctcagagcgtggtgtacagctgctttctctgctcaatagaattgaccatgtgctaggatgccaggtaaatccaattccccgcgttgcgctgagtgccacgctgggggaactggagaaagtgcccgaaatgttgcgcccggacaaacgactcccctgcgtaactgttacagatagtaatagcacggccactcttcaggtacaggtcaaagggtacctggagcgagtgatccaaaaagaggaagaacttcagagttcagctgaacatgacgtttgcgctgacatttttagactttgccgtggcgattctcatttggtctttgcaaacagccgaaaacgcactgaaagcattgcggcaacgctgagcgacatgtgtgaggaacaaattgttccgaatgaatttttcccccaccatggttcccttgccaaggaattacgtgaggcgcttgaatctcgtcttcagaaaggaaatttgcccacaacagctgtttgtacaatgacgcttgagttgggaattgatatcggtaaggttaagtcggttatccaagttacgcctccgcattctgtttccagtttgcgccagcgtatggggcgttctgggcgacgcgattccccgtcagtactcagaatgctaattacagaaaatgagcttactgtgagtagcagtatcgttgatcacctacgactccagttggtgcagtcgatggcaatgatcaggttgatgatctctaaacaatggtttgagcctgccgattcccggcagatgcattactccacgctgctacaccaaattcttgcaattaccgcacaatggggtggagttcgtgccgaccagctctggtcacaactatgccagacagggccgttcagaaatgtagatttaaacgatttcaaaagcctgcttaaacatatgggagcatgtggcctgctcactcaacttgctagcggtgaaatagttgttggggtagagggggagaaactgactaaccattacactttttatgccgtgttcaatacaccagaagagttccgcattgtcaccggaaacagaacccttggaacagtgcctgtggactccccactgctaccagaccaacacatcatcttcggtgggcggcgctggaaagtgacagagatcgagacagagaaaaaagttatctatgtagaggcaaccaaaggcggtcagccaccacaatttagtgggggaggtatgtctgttcatgatgccgttcgtcaggaaatgctcgctatctatagggaaggtgattaccgcatagcaataggtagcaagaaagtagattatgccgatactgccgccagaaacctatttgcggaaggctgtagtaactttcagcgttttaaacttcaaaatgagtgttttattacgagtggacaacactgttacgtaataccctggatgggggataaagttgtcaatacgattacagccttgctcatacgttgtggttttaaagcaaattcatttgctggcgttatagaaatcgataactccagtgtagcttccgttcagcacgcgctcaaagaaatgctgttgtcaggcttgccatctgcatttgatcttgccacagatgttccagaaaagtacttagataaatatgacgagtatttaccagagtcccttcttgcgaaagggtatggtgcaaaggcgtatgaaacagaaggtacgcgcatctggttgcagaaacatttttag

SEQ ID NO: 82397 - DNA, 2310 bp, Citrobacter koseri
atggagttattgaagtttttggcggcgatttttgtcatttacttgttgttttttagaaagaaaaaacgtaaatctccaaagtcttatgcttcagaccccgtgaaagcaccgccaaaagaatggctcgctgacatcaagaaaaaagaggcggttgtgcgaaacgatgatagtgaagacgataaccttgcaacttttacattgagcggtggccgggctgttgaacttcgggtgacaaccaatcattaccggaacacctcaaagtcagcaggtgcactagctcgatgggtacttccgggtgagatgataactgtagctggtgtagcaattagcggtggccacatttacgtggggcaacgtatgaagccctccggtcaggaatcaggcggctattatgacgatggaagtgaggcatcattaattgatgacacatgtaagataaaacctacttcttatctttacgaggacagttcattaggatattggcccagtttttcctctctttccccagaagcccgcggtgcgtatgtcagttggcttgccagcgataggtctgatccattgtgtcctatcggctatgtttttatctacctctacggcctggaaagaaaagcgctcgtagattccactgatccaaaattccctgatgctgagttccgtaatctgttcaatgaagtcgctcggttaagatcggtattcattgagaaccgctccttccgtggatattcgacccaattactcgaagccatgtctattctgcgcccgaacatgggcttagccactgagctcgatagcaattcaggtttcagcaacagcatgcaatttaagctggctctggcaaaaactgtacatgaaggagttgctgtatcagctgaactggcgttgaactgggtaataaaccacaccgagtattcgctgcgtaccccggctcgccgctgtgctaaagagtttgctgcgcttttcaaacggcgttacaccctcaaatatggtgaagggatggtcgttaaggcgaataaaacgcgcctaaggttagattacacaccagcaagtcctagtttgcgaggtgttcgacttcctgttcccgacctgcctgatccaagtgcgttgaagagccctgtccagaaaattatggctcttgccgatatatgtacagatgaacttgatgcttatagtcgctaccttggtaggaaaggtacgtcagtcaatgatacggctgcaattatgctgctcccttcagagatcgttaatgaaagcgcagaaaaaatattaagctcattcaaacgctgggctgatgaggcgatcctcgtcaaggaggggttagtctcagttgctgacttttgggcacatatgaatgccagttgccccaataagatcaataaaaaagaggccgatttgatgcaggcctttgctctgaagatgggttacggtctggcacctgacccgtattatcaccatgtgaaggcggatgttgatgggacacttgttctatttcctgccgccgaaggtggacgcttctcaccttctcttgaatttatctcagccgtaatgacgctcagattaggggcgatggtcgccttgattgacgattctcttgatcaagctgaacagaaagtgcttgagaatgccatcaacaacaatcctggcttcaccgatgatgaaaaacgctctctacatgcgtatttaacgtggcaacttcataccccagctaatatgacaggaatgaaaagtaggattgagttgatgggggccgcagaaaaagctgctgtgggtaaggttatcgttagtgttgcctgttcggatgggacaatagcgcctgccgaaatcaaacagcttgagaagatttattcaagtttggggctggatccctcatctgtctcgagcaatatccatcagcattccgcaactgaacatgatctcgtctcgtctgtaccaactgatcagccagcagcagggttcacactggatgctaatgtacttgcccgccacgaatctgccacggatgatgttcgtaaattgctgaacacaattttcatcgaagaagaaccggaagagccagaaagcgctccagcctcatcaacggaggcgggggggcttgactccgcacatagccagctttatcgcagtttgctggagaaagaacagtggtcccgaaaagaggcgacagaattgtgcggaaatttgaatttgatgctcggcggtgcgcttgaggtgatcaatgactggtcctatgcggtggttgatgctccagtactggacgatgccgatgatgatatctgggttgacctggaaattgccaaagaattagagggatag

SEQ ID NO: 82398 - DNA, 789 bp, Citrobacter koseri
ttgaacgatctgattattatcgcactggccggttttactaccggcatgacaacagtgctttttggctttggcggcggctttgtagtggtgccctttgtttaccagctgctggtgcggcagccaccgctggcaggtgatgcgatgcatatcgccgtggccacttcaacggcggtgatgatttttaacgcgggctgggtcagctttcaaaactggcgtgcgggcaggctttctttgcccatcttattcccgctgttgtggtttatcgccgtgggcgcagtggccggttcgtggttggcgggaatattaagcgaggtggtgattcgcgagctgtttattttttatatgctgatgacgattggggactgtctgttgcgcaaaggtttcttaagcggcaatgcgccgcgtcgtttgtcgcttttgacggtcaccggtggcggtatgctaatcggcacgattgccgcattgctgggcgtgggtggcagcgtaatgacggtgccgttgttgcggcgacacggtcatacgatgcgagagtgtattagcgcggccaacccgctttccctgccggtggcgttgtgcggtgcggtgacctatgcgataagcggttgggacaaaatttcggcaggcggttttgtaggttttatcagcctgaagattctgggcctgctcctggtggctggctgggtgggtatagtatttagccgccgggcgatccccgccgtccctgatgtctggcatgcgcgaatctacgtgatgctgttgtgcatggtactggtggctatgttgctttaa

SEQ ID NO: 82399 - DNA, 768 bp, Citrobacter koseri
gtgcgaaacgaaaaaattgacgatttcgatcagctgaatcgggaggtagtagcgctaggaaacgactatgcggagggttttttcctgccgccacaccagcaccgccgcgcgcagcttctgtatggcgcaacaggactgatgcacgtttcaacctgtgacggagaatgggtggtaccgccccagcatgcggtatggatccctgccaaaacactgcatgccgtaaagtttgtgggcgtcacgacgcgcagcctgtatatcgaacccgcctgcgcggacaaattacgtaacagcagccggtgcgaagtgatcagcgtatcgccgctgttgcggcagctactgctggaggcggtggatctgccgccatgctatgacagcgtacgcgatcgggcgctgacggatttgatgctgctggaactgacggcgatgccggtgcgcgagttcgatattcctttgccgcagcagccagggttgttggcgctgtgtcaggcttttttactcgccccagccatccacgatccggtcgagcgctgggccagcgcgctgtttatgagcgccagcacctttcgtcgctgttttcgacagcaaactggcatgtcgttttccgcctggcgccagcaagcctgtgtggttagtgcgctggcattgctgataaaaggcaaacccgtgaatgaagtggctttgtctcttggatatgagagtgcctcctctttcgcaacgatgttccgccgcgttacagggcagccaccgtcatattaccatcctgcttga

SEQ ID NO: 82400 - DNA, 366 bp, Citrobacter koseri
atgcacattttgctcgatcaattcccgcaagtatgggtatccgctgcgccttcatccacctgggaggccgagctggatgctttgctaagccggggcgaacgttttgtcttattgacccgcaacctgcctgataaagagcactccagtagcacagagaaaaaagcgttcgctctgtggtttaaacgcaatcggaaacggcttgccgaagtttgcgcgggcagtattgtgatcgtccccaacaaaatggttgcgactggtttggctcctctgttagttccgttgtgcagggtgttcggttatccggttcgggtcgtgacagaagatcgtcttgatggcgaaatagccagtctgattggcgaatgttga

SEQ ID NO: 82401 - DNA, 654 bp, Citrobacter koseri
atgaaagccccacgaatacaacgagagcagattatccagaccgctcttgcactactgaatgagaatggcctcgaaggattgaccctgcgcaagctcgcacaggcattgcgcatccaggcgccctctctgtactggcattttgaaagtaagcaggcgcttatcgacggcatggccgatgcattggtgcaggacgtcgcccttcactttgccgacgcgcaaacatgggcagaccgcatccgacaagtcgccggagaactgcgtcaggcgctaatgcaacatcgtgacggcgcgcgtgtattcgctggcacatacgtcgtcacagacaatgtgctgaggaccagcgaagcgttgatttccgctattgttcaggcaggcgcagacgttcaacttgcagcgacgtgcagtttcagcgtgacctattacgtgctgggtttcgtgatggaagaacaggccctgggaccaggcagttcgcttgatcttccttcgagaaagcaggcattcatcgagctggcgcaaaagaaatacccccacaactggcgtgcgcgtgaagcgatattttcggaagagttcgaggggaggttctcggtcggtctggatctgttaatcgacgggatacaactgcgtattcatgcaggcacctgtccgcctggctga

SEQ ID NO: 82402 - DNA, 1446 bp, Citrobacter koseri
atgaaacaccatcttttgatcggtttactgacggcaagcctgacagggtgtgccggtatgggggggctggatcgcaatacacccagggcaaagatgctcacaacgacggcagtaggcaccgtcagcgatgcgccctggcgatggccatcccctcactggtgggagcgttatcgtgacccggaactgaacagcctcatagatcgcgccctgtcgttgagtccggatgtgcgtttggcccgggcccgtctggtacaggccgccgccatcgctgaacaggccggtgcgcagcgatggccgacgattagcgcagatgctgatgcggtacgcaagcgctacgcgcaggcgtatgacgcggccccgccactcgcaggaaatttcggcacgacgtttacgctgagcgcggacgtgcaatacacctttgacttctggggggggcagcgtgctgcgctgcgggcagcactgggagagacggcggcgcgagatgccgaggtcgaggccgcccggctgatgttgaccagccgtatcgccagcgcttggtttgaattgtcccatttgtttgccatgcgggatttggcacagcaatcactggaattgcggcgtcagacctttcagttagtcgaacgaagagttcacgctggcctggataccgaagtggagcgtcagcaggcacagggtgacctcccgctgaccgagcgcgacatcctgcaactgaatgagcagatcgccttgcaacggcatgccttatccactctggcagggctaccgctggatgcgctggagaatgcgcgaccggatttgatgacggcggcggtggacggcgagcttcctgactcgatacccgcagagttgcttgggcatcgtccagatgttgttgctgcccgttggcgagtggaagctgccacacaacatgtcgaagtcgccagggcggatttctaccccaatatcagcttgcgtgcgttcgcgggattggcacgcacagggttgactgtcggtttgtctgactggctgaccgcaggcagtcgcacctatggtgtggctcctgccatcagcttgcccattttcgatgccggccgattgcgggcgcaatacaaaagccgggcagcagagttggatgccgccattgagacttacaattcagcattgttgaacgccatgcgcgatgtggcggatcggctggtgtctttggatgctctgctaccgcaactcaacacggaaaaacaggcactggcggccagacaagttgctttcaacctggcacgaaggcaatacgaatctggactgaccgactacctgacagttctgaacgcccaaaacgcgctgctgtatgagcgtcgtgagcagttaaccctaaaaaaacgtgcgcttgttctggacgcggagctcaatcgcgctttgggcggtggctttagtgcaaccgatgcaacaagcaatatcctgtggaaataa

SEQ ID NO: 82403 - DNA, 1143 bp, Citrobacter koseri
atgagcactcctgaaaaagcaactgaacgacgtccttttgcgctacgtattgcgccctggctggggtgcgttgccgtcatcaccttcgtattcctggcaacgacgcaatggtctgaatggacgagcagacacagaatccagacgacccagaatgcgtatgtgaaatcggattacgctgtattaagtgccaaaatatctggttatatcaaaagcctgccagtgggtgactatgaaaaagtacacgcaggtgacctgatcgcgcaaatagatgacagcgaatatggatttgcggtagcggcggcacaggctgccctggctaaggcacaggcgaacctggataacctggacggtgaaattgcccagcaacatgcgcgtatcaaagcgtcgcaagccaacgtcaaaacggcagaggtaaggattatccagtacaagaataatccggcacgacaggcggaactcgtcaggcaaggcgcgttgtcacgtcagcgtttcgaaacggctcaggcagacttcgatcaagccgtcagccagcgtgacgcgactgctgcagagctggaactggcaaaccgttctatgaaagtcctgaagggtcagcgtgccgtgcgacaggctgatatcgatgccgccagcgctcagctggaaaccgcactcagaaatctgacctatacgcgtattgtcgcgccctttgacggcatgttgaataaacgccatgtgcaagtgggcaacctgatcagcaatggagcgcagattgtgtcgatcgtgccggactctcagtcctacgtggttgccaactataaggaaacccagcttgcccatgttaaagcgggacaatctgtgacactgactgtggatggcttgccaggcaaagcattccggggccgcgtttctgaaatagcgcccatgagcggtgcagagtccgctctgctgcccgcggataacgcatcgggcaatttcaccaaggtggtacagcggatcccagtgcgtatcgagctggagccgggccagaatgatctgagccgcttgcgggccggcatgtcggtagaaacacgcatcgacaccagaggggagattgttgcgccctatgcggcgggcatgcagaaaacagtgcaacttgccaccggccctggccgtgcaggagactaa

SEQ ID NO: 82404 - DNA, 1536 bp, Citrobacter koseri
atggcgctgatcaacttttttgctaacacgacgcgtccgcgccccatattgacggtcgcgacaatttttcttggcgcggtgctcaccacattgcaggggcgcttattctcggcggccctgcctgacctgcgcggacagttcggcctggacttgttggaagccgcctggctgggtacggcattgaatggcgcgcaacttgtcacaatgccgatcgttccctggcttgccacggtaattggtccaacccgtgtactgatcgcgcccagcctcctgctggggctcgtcacctttctgatccccgcattttcccaccactatccggtgctggtcacgctgcacgccattgccgggttgtgcctgggaatttatctgccgttaaccatttcgctggcgctgcgaagcttacacccccgtttctggttattgatcatgggggcatacagcctgcgcgtgtccacgggtatggacgcgggctatggcacctccgcttttctgatcgaggatattggctggcattgggtatactggataactgcctttgtcggcccgatcatcgcttttctggcatggaaggcgttgccgttgtcaccgctcgaccaatcccaattgcggcagggcgactgggcggggatggccatgttctgcctgggactggtactggccttcattggcattgactcggctgagcggctgggctggagcgattctggactcgctatgtccacgctggccggtggatccgttttgttctgcacatccgtcttgcgcgccctgagcaagaaaaacagcttttcaagtctcattgccttcggcaaccgcaatatttgcatctgtctggtgatcgcctgcctgttcggcgtgctgatgacccccacgtctctactgatcccgacatttctgacgcaaatggagaacctgaagccaatgcagaccggcacatcgacgtggattgctttcggtgcctaccttgctgcgacaccattggccatttacctggcaagacgaatggaaccccggctccttatcatctgcggccttatcgttattgccttgaccgcctggcaaggctctcacatcagccatgactggagggtggatcaattcgtcacgatccttgtcatgcagtcgttaggcgaaagcatcatgcttaccggccttattgccgctttcgtcaccaatctcaatccactgcacggtgtggcactgggggcatacgtatccatcgcccgcgtgctgatgccggttgcggccggtacagtcatgtcaacgtggctgcgaatatccggtgacaccagtcgcgcaagcctgagcaattatttttcggctggcgatccctgggtagtggaacgtgctgaaacaggggtggcgggaatcgctcaattactggcgcgagaagcgcacgttgccgcacatatcagcggttatcaccttgttttctggtgcagtttgctggcacttagcctggccgtcttcatacgtccatccccgcctaatcagattgcacctccgctgttgaaagtaaccagtggtacgtaa

SEQ ID NO: 82405 - DNA, 948 bp, Citrobacter koseri
atgatagcgatggcccgattatctgaaggatgtgccttagacaccgatcagtctgaaggtgcaaagacgtctgcggcgctactacgggtggcgcggaaatatgccgacgcgcacctcaataaagaaggtgtggcaacaacccccattccaggagtattcattttaagcgagaccgcaccttcaatgttgcagttcgccattactaaaccactgctcgcacttgtgctgcaaggccgaaagcgcgtgacgatgggaagtcatactttcgattttggcatgggggagtctttgctggtcacgatggatgtgccgacagtaagtcaggtaatcacggccagcgccgccaccccatattattcatttgtcgtggagcttgacgccgctgtgattaccgaactggttgacgatatggacaaactggaggcgtctccggatttgcccgtgagggttgaccagatcgaagaggatgttgcagaaactgcgttgcacctgctgaaattgctcgacagaccgcacgcgttgaagatgctgggtcgccagttggtacgcgagttgcactactggctgctgtccggacgatatggcaaatctatgcgcgccctgggaaatactgatagccatgcccgtcggatcgcccgggctgtcgagattattcgggctaaatatgatcagccgttgcggatcaaaacactggccgatgcagcgggtatgagtatttcggtgtttcacaagcattttcgcaacgtcactacgcttacaccgctgcaatttcaaaaacagttgcgcctggtcgaagcccgaaaacttatgcttgtgcaaggtgctgcaatcagcaccgctgcccaccgcgtaggctacgagagcgtgacgcagtttacacgtgaatattcgcgtatgttcggtcaaccaccggctcgcagtatccgtgacgctcgcgaaagtggatag

SEQ ID NO: 82406 - DNA, 756 bp, Citrobacter koseri
atgacaaccatttctcttgtgaccggtgccagtcgcggccttggtcgaaacacagcactgaacatcgctcgctatggtggcgatgtgatcatcacctatcgtaatggtaaagaagctgcagacgcagtggcggcagacatccagtcccttggccgtaaggcaattacacttcaactggacgtgagcaatatgtcctcctttcccgatttcgtgaccgccataagagcggcattgaaaagcaactggggacgcgatacgttcgaccatctgatcaataatgccggacatggagaaatgaccgatttcatgaataccacagaagagcagtttgatgcgctctttgatgtccacgtgaagggcgtatttttcctgactcagtcacttctgccgatcctgaccgattatggacggattatcaatttctcatcgggtctgactcgagtgtcattccctgggttctcggcctactcggcagccaaaggtgcggtagaagtgctcaccgtttatatggctaaagagttaggcagccgcggcattacagttaatgccattgctcctggcgcgatcgaaacggacttccttggcggcgctgtacgtgacattcccgattataacaaagcctttgcaggtatgacggcgcttggtcgcgtgggactacctgatgatatcggcccgatgatcgcaagcctgttgggcgaggacaaccgatgggtcaatggtcaacgcattgaagtttccggcgggcagtcgatttaa

SEQ ID NO: 82407 - DNA, 984 bp, Citrobacter koseri
atgaaagccgctttttatgaagtccagggcagtgctcgtgatgttttgaaagtcggcgaaatgccaataccggaaccgggtccagatgaagtgcgcgtgcgcattcatgtttctgggttaaatcctaccgatgttaaagcaagaactggcttctccgcagatatgccttatccacgtatcattcctcatcaggacggcgcaggcgttattgatgcggttggcgcgaacgtgtcaccggaaaggcttggtgagcgggtttgggtatacgaagcacaatacggccgggcaacaggcacggcagcagagttcgttgtggttccgtctcttcaggcggttcacttgccagatacggtctcattcgaagtaggagcttccctcgggatccccgcgctcaccgctcatcattgcctgtgttctgatggccgtctcgaaggccggcgagtgctgattcatggcggagctggagtggtcggaacagcggcaattctgttggcaaagtgggcaggcgcatgggttgcaactacagtaatgaacgcagaacaagccgccgtagcgaaggaaaacggtgcagatttagtgctcgaccggacatcggaagatatcgcgactattattatgaaaatgaccgaaggattcggcgttgaccgtattgttgatgtcgctttgaaagataaccttgatatcaatttagcttgtttgtcccagggtggggttataagcgcctatgcaacttccagcgcatcagacgagctttccattcccttgctgaaagcaatgaagcatggctgtgttttgcgtttcgtatatatctacaatgtttctaacgagttaaaaaaagctgctatagaagatatcaactcgtgccttgaatcaggatactatttgccaaaaatcggattaaacatgcctctccaaaatatagccgaagctcacgaggcactggaatcatccaaaattataggcaaggttcttatacacatgtga

SEQ ID NO: 82408 - DNA, 375 bp, Citrobacter koseri
atggtagatgttcgactgatgaagaagcaagcgactcatgagtatcggtgcactgttgaagcgaccgttgtggttgctggaggaaaatggaagccgctgattatttactacctgcttagcggaaccaaacgatttggagaacttcgaaaactcatcggcggcatcactcagcgttcgttgacactgcaacttcgggagcttgaatcgcacggtattatttctcgggaggtgtttgccgaagttccaccacgcgtcgagtattcgctaacagagtttgggctgactctgacccccgttctcaacgctatgaaagagtggggagatagctatctcatctggcaagaaatcaatgggaacaataaacatgctgaataa

SEQ ID NO: 82409 - DNA, 918 bp, Citrobacter koseri
atggccaatcttcgctctctggatcttaatctgctggtcgtcctgcatgctttgttagaggaacggcacgtaacacgagctgcacgacgtctcgcgctgtcacaaccagcaaccagtaacgctctggacaggtgtcgacatgtctttgatgatccattattggagcgtgtcgcaggtgaaatgcgattaacggctaaggcacagtcgttaaaagagccgttgtcccaggcactgcttgccatatcggctgttgtagagacaccacaaactaacttgacgcatattcgtcaaactgttcatctggtaatggctgatcaaccaggcctggcggtcatgacccatcttttaaccaaattaagtaccagcgctccgaaggtgaatttagcgctattgccatggcgcagcagtaaggatgccctccatcgtctggagaatggtgaggctgacattgcgatctcaacgtttcctgcgcttcctccagaatttcatcgtcaggaaattggacatgaaggctatgttgtggccatgcgggcctcgcatcctgccgttcaaaaatttaacgtggatgagtggttggcatggccccatatagttgtttccggcgaagggaatatacgtgggtctctggaagaagtattagctcaacaaggaaaagctcgtcatgttggtgcggttgtaccgaatttcaccatgatcgaacctttgcttaaagcaacggatatgattgctattacgcctataaattgtctttctgacacccaatccctggcgattttcgagccacctaccccgttgccaggcttcagtctgcatttagcctggcatacgcgaagagatagcgatttggtcgtgaaacatgtaatcgaaacactacgatccttctttcaaaaagagggtaacgtaacttctgttcgatag

SEQ ID NO: 82410 - DNA, 558 bp, Citrobacter koseri
atgtcgaaaacgcttgtgttacttttccatcctgatattactcgctcctgtgcaaacgctgctctttccactgccgcctcccagcttgctgaggtcgaaatcttcgatgtacagcaggcctatcccaatggcgtgattgacaccgatgccgaggtgcatcgcttgttgggcgtggagcgtatcgtcctgcagtaccctatgcagtggtacgctaccccaccgatattgaaggcatggcttgatgccgtgctaactcgattgttctacattaactacgagtcggaggggcgcaggctacgaggcatgcctataatggtctcggttaccgcaggcaatagtcctgacgcttatagccagggcggacgtaatatgttcaccatgtcagaactacttgctcctattcgcgctacagcccaccgttgtgacctgacctggaataccccatttatcgtgtaccgtgccaatcagctgtctcgggacgaactcaaggatgagggaacccgctatgttgaggtattaaaatcctggatttcttcaaccgggctgcgggagatctga

SEQ ID NO: 82411 - DNA, 588 bp, Citrobacter koseri
atgcatttcccctaccccagtaacacccgttatgatattaactggtttttatactctctcattaacagtcatctgaatgatatgctacaccgatactcaagggtactgggtgtaaggattgatttattctatataaagtcgacttccagatttcgtcagagcacttacagaacaattgagtcagacgtgcggaaattaatgaaaaaaacagaatcctgttcgttcgtaactggttacttctgggtcattgaacgtacaccagatcatggttttcatgcacatgttatattctatctcgatggtcatcatacacaaaaaccatttccgctggtacagagagttagtgagttctggagagagataacaaatgcagagggttattacaactggagtaattacaagaaaaattatcaggctgatattaaccgaaaaattaaccattcggatatcaagagcattaatgaattaagatacatcatcagctatcttgctaaagaggaacaaaaaaatgggatgtatatctggggaagtaatgaggttcctccgccaagtgggttaggcagacccagaaatagcgatagtctttag

SEQ ID NO: 82412 - DNA, 1188 bp, Citrobacter koseri
atggcattgatggactacaggcgtttgaggagatacaaccagtacctggggtacctggctgttaggtatgggatatggattgacaccaatacaacaaaaagttaccactctgctgctcagtatgctgatgaaattaacacagctttaaactctctctgtaaaaatcttaaagagcgaaaaaaaataatcagagagatgaaaaagcatgctgctatcaatattgttcctgataagtattttgactggatgaaatcaagcagacgtgctgcatgttattcatacttttggcttgtcagtaacgatatattacttccttccaggttaaataattcagacatcaatttcgcagagggtttattgatatcaactccgatcatcaaagatgatgtacttataactcagtcaacgagtcaatgggaaattgatgttgattcaaaaaatgataaggcaggcgtggaagatgttaaaggcgttaaaaagttgattgcagacttaaacagagaaaaagcaataaatacaattaacgctcaggattttactcttgataatggcccttcagccataaaaaatgtagtttctcacgtagctaacggtgttaatttccaatcgctaagtccattatacgactctgaagaaagctatatttcttcaagcatgactttcgttgataatctggctatgagcgttaatgataaaatagaagtcatcgatcgcctttataagtcatggcgtactgaatttggcaattaccctcaacctttttcatggattgatcttgatgatgaggataatctcctctggctgtgggattatatgcaaaagagctttattggttgcgatgtatctcctgccaccagaaaacaaatgaatgattttcttctggcgacatttgataactgggctggctggagcaaagaacagcacgctttcatcaaaaatgaatcatatagtttcgaactggatgcagacaaaaataagcaacactttctggctcgagccagaaacgcctggatccaaaaaagacatcgggagaagaatgcaaaggacatgtcagggattaaactgacagcacagtctaaaaagaaattacttgcgttgcaggatgcgacaggcattgaatcaaataccttacttaaagcatatattgatgatgcttataagaaaatgaaatctgtaaaaaacgattaa

SEQ ID NO: 82413 - DNA, 864 bp, Citrobacter koseri
atgcacgaaaaagaagttctgcagacctttatacaaccgctttccggcctgccccagtgggtatctgaacgcattctgctgcagataaatcagttagcccactacgagcctgtaataggcattatggggaaaaccggcgcgggcaagagcagcctttgtaatacgttgtttgccggggaagtatcacccgtcagcgatgtggctgcctgtacccgtgagccactgcgctttcgtctgcaagtcggtgagcggtttatgaccatagttgacctgcccggcgtgggggaaagtagtgcccgcgataccgggtatgctgcactgtaccgtgaacagcttccccggctcgacctggtgctgtggctgattaaagccgatgaccgggcactggcggtggatgagcatttttatcatcaggtaattggtgaggcttaccggcataaggtgctgtttgttatcagccagtccgacaaggttgaacccaccagctgtgggggacagttgtccacggagcagaagcagaatatcagccgaaaaatctgtctgttgcatgaactgtttcagcccgtgcatcccgtgtgtgcggtgtcggtccggctgcagtggggattgcggataatggccgaacggatgattcgttgcctgccgcgcgaggccagcagcccggtagtggcgcaactgcagtctccctttcgcacagcgacagtccaggaaaaagcgcgtaacgattttggtgaaaccgtcggtgcggcgctggatgcggtgagcgctctgccgctgataccggtcccggtgcgggccgtaatacaggctgtccgtaacaccgtggtgtccgttgcccgggctgtctggaatttcttcttctga

SEQ ID NO: 82414 - DNA, 462 bp, Citrobacter koseri
atgacaaccacgacacaaagcaacctcgcatctgctgctaacgaacctgattttgaactgaccgtaacgcaggtacctgacgaacagcgtatctgcttctggccgcagcacttcggcagcataccacagtggattaccctggagccgcagatcttcgcctggatggaccgtctgtgtgctgattactgcgggggtatctggaatttttattcactcagcaacggcggcgcatttatggcaccgaaaccggacaccgatgagccgtggacgctgtacaacccgatgaacggtaacggcggtgaactcagtgccgaagctgcagggattgcggtctgtctgatgacttacagccaccacgccatgcgtaccgaatgcgatgccatgacagagcactattaccgcctgcgggattacgcgctcaaccacgcggaatgtaacaccatcatgcacatcatcgactga

SEQ ID NO: 82415 - DNA, 480 bp, Citrobacter koseri
atggaacaacagttaccactgtttgcccgtgaattagcccctgccgaccagcagacggtcagggaagccttaaccctgctggcgtgccagctacgcgagcccggcgcgtcatttacctccagccatgccgtccgcgactggctgcgtctgcagcttgcttcactggagcgtgaagaatttaccgccctcttcctcgataaccagcatcgcctgatagcccatgaaacgctctttaccggcaccatcaaccatacgcaggtccatgcccgcgaagtggtgaaatccggtctgaagcataactgcgccgctgtcattgtcgcgcattgccacccgtcaacacatgccgaacccagtgattccgacaaacgaatcacagaacgcctgaaacaggccctggacctggtagatatccgcctgctggaccacctggtggtcggcggtatggaaatcgcctcgtttgcagaacgtggctggctgtag

SEQ ID NO: 82416 - DNA, 222 bp, Citrobacter koseri
atgaagattattagcaaacgccaggcaatggcgatataccgccagcatccgcagtcccgcctgtttcgcttctgtaccgggcggtatcagtggtccggcagcatctgccactatgccgggcgggaagtccaggatatcagcggtgtgctcgcggtcttcgcagaacgtcgtcaggaccgcaacggcccctatgttgtattacgcagcgtcacgttgaattaa

SEQ ID NO: 82417 - DNA, 360 bp, Citrobacter koseri
ttgtcgaataaaataccggcagaaaaccacgatatcactgaaccctggtgggggcttaaacgcagtatcacgccctgttttggtgcccgtctggtgcaggagggcaaccggctgcactatctcgccgaccgcgcgagtatcgccggcacgttcagcgacgcggatttacgccatcttgaccaggcgtttccggtacagctcaaacagcttgagctgatgctggtttccggtgaactcaatccccgccatcagcactgcgtcacattatactcaaaagggctgacctgcgaggccgacagcctcggctcgcatggatacgtgtacatcgcgatttacccgacacctgcagcaaccgcgtaa

SEQ ID NO: 82418 - DNA, 378 bp, Citrobacter koseri
gtgcaaacccaaccactatcctccacgcatgagacctcaccacgtccgtcccccgtggatatctggcagcacctcctgaaccatctgctggatcgtcactacggtctgacgctaaacgacacgccatttggcaacgatggcgtgatccaggagcatatcgacgccggtatctcactgtgcgacgcggtgaactttatcgtggaaaagtacgacctggtccgtactgacagacgcggctttagcgcagacacacagtcaccgcttatcggcagtattgatatcctccgagcccggaaggcgaccgggctgatgacccgtcatggctacagacctgtgacagatctcattaccggcaaatacaaaaaggaacaacaatga

SEQ ID NO: 82419 - DNA, 492 bp, Citrobacter koseri
atgaagctgtccctcacagtggaagccgatgccatcaacgttctggccctcaatatgggccggatcgccatagatattgatgggattgagctggccgacctgattaacgtggtctgtgacaacggttattcccttcgcgttgctgactcccccggaaagctggtcgttgaagatccgcttccgcccatcgcccgcgttaacagcattcagtgcagcaccgcacatatcaccgaggaagacaattcgctgctgtatgccctgtcgcaccagcatgaagactttggcgagtcggaatggattagctataccggctcaggttatctgctctacctgaatgcgtggtcatttccagtgctgcggctaaaacgccttggtttgtcgaaagcctgtcgccgcctggtggtgactattatgcgtcgttactccgctggcattgttcatcttgatgcctgtggcgaagtgctgcccggctctgccacctttgactggtag

SEQ ID NO: 82420 - DNA, 204 bp, Citrobacter koseri
atgccagaattaaccaccgaagccgctctcaccattctgattgactggcttcagggcaacatcgattgcgacaccgacattattttcgacaacgacgaagacaacaccgattcagcaacactgttaccccatatcacccaggcattgcaggacgttcgcgatttccatcatctgcagcttctgcaacaggccggaactgtttag

SEQ ID NO: 82421 - DNA, 849 bp, Citrobacter koseri
atgtcagaacttactctcaccgaacccgaagtgttaaccgaccacaccggcatgatttgctccaccagcattgagcgtattgtcagcggacggaatgccgcgctggcgcggattgaagtgctcatgcaacaacttgacgatgtttcgacgctgacccgcagcatcggcggaaaaaccgccgtggactgggctatgaagcagaattttcgctgcggctgctggttgatggaaaaaagagaaacggcaataaaagccattacccgtaatctcgatcgcgatatatggcgggatttgatgcaacgctccggaatgctcagcctgatggacgcacaggcccgcgacgagtggtaccacagcctggagaaagacgatattcccgctgtctgtgaagaaaacatccttagcacatttaaacaattgcaccagagcaaaggcgaggtgtttgagcgtggtgtgattaacgtgtttaagggcctgagctgggattacaagagtaattgcccgtataagtttggaaagaagatcatcgtgaacgggctggttaaatatgatcggtgggggtatgggcttaactggggctggcagcgcgatcggttagctgaccttgagcggatgctgatgatacttgacggaaaacctgttcctgacaaccgcgctgatgtcacccgtcgtctcagcgaccatattcatgaaaacaggcacagcaccagttatgaggatgagatgtttactgttaagtactttcagaagggaacagcgcatatcacatttaagcgaccagaattggttgataagctgaatgacattatcgcccgtcattaccctggcacgctggcatccagacagtag

SEQ ID NO: 82422 - DNA, 246 bp, Citrobacter koseri
atggtcaaattttttgtgacatgttcggtacggaacgcttacgtcacttctggccttaaactacaagcaggaaaagttttaggcatcctgcccttcagcgaatacttagatgttcgtggcaccgcatcattcagctaccggcggcttgaagacgagtacgcctgcttaacttcagattacgccgtagacgaagccatcgtcgccaacgaatataccttcactgaatcgggccaccggtttggttga

SEQ ID NO: 82423 - DNA, 453 bp, Citrobacter koseri
atgactaacaaaacaaacactctcaatcacaattcggtaggttcctgggcgaagcggtgctatatggctggccgtgctgctatggaggcgatgcttcgcccgtatgacctgggaacaacgcagtggtacgtgctgcattacctcacacaggaaggcgcgactatgcagcgtgacctggtgagagcgcttcaggttgagcgcgcaactttgagcgcaatcatcagcgccctcgttcgcaaggggcttgtggagcaagttcctgatcgtaccgaccaaagacagaagatactgcgaatgacagcggcaggcacaaagctctgggaagacttgcccgatctgacggtcattcacgatgtggcattcaaaggcctggacgagtcagccatcgctacaacgattcaaacactccaggctgcaaccgaacgacttgaaaacttcatgcacaggagctaa

SEQ ID NO: 82424 - DNA, 816 bp, Citrobacter koseri
atgacaatcttgctaacaggtgtgaccggactggtaggagcccggctaattcctcgcttagtcaatgctggtattgactgccgcgctttagtgcgaggcgggaaagaagtacctgccggcgcaatgtccgtggaaggtgatctctttgattcctcaacactcgcgcaggccgtagatggagtgtctgacgttatccatctggctgctgtattccgcagtcaggacaccgatttgatctggaaaagcaatctggaaggtacgcgcaacgtcatcgctgccctgaaagcccatgctcccaaggcccgcttcatacttgccagtacaagcaacgtctatggcacggacagcccgcacccggggcgagaagatgatcacattgagccaaagcacgcctatccggcaagcaaggctgcggcagagaaggcgctgcaagggagcgggctgaattgggcagtgcttcgttttccgttcatttacggcgaccaggacggccatttagaggagctacccaaacatgcgattgccggcaagtggcatccggcaatgagggtcagcacgatccaccaccaggacatcgccaccgccgttcagcttgctttaaacggcgcattcgatggtcgcattgtcaatatttccgatgaggctcctacctcgatttatgagttggcggcattggtaggtcaaacactggagccctcatccatgcccctggagaatccgtggcatcttcacgtcgatggatctcttgcacgcagcctcggctttcagcccatcgtgagaaccgtctatcaagctgttcaggaaaagaggatgtaa

SEQ ID NO: 82425 - DNA, 801 bp, Citrobacter koseri
atggttccagctcgtaccagatgctgcctgggctgttccgtatggtgtgccagaacggacttatctgcggagagtccttcggcgaggtgcgagttccccatatccacccgacgctgtttgccaaagccgggtacgcgctggcagattgtcactacagggctgctgctgatcggtggctattcaatttgctacttccagtcgatggcgcatggagtcacaccgggtctgctggccacgttactcggcgtgcaaccgattctgacgctactgctgaccgaacgacgcttctcaacctggcgcttgatgggggtgctgctgtccttgtcggggctgatgcttgtggtttaccaaagcctgatcttagctaagctctccttgctcggtatcgccttcgcgctgggtgcgctgctgtgcatgacctttggggcgctgatgcaaaagcgtatccagcagagtcccgccaaagttctgccgctccagtatctcgtgacgctggggctgtacctgtgcttcgtgccgttccagcccttctatttcgaggtgaacatagggttcctgttgcccctgttgtacctgggactggtgatctctgtcggagcgcaattgcttctgtaccggctgatccgcagcggcaacttagtcaacgtcaccagcctgttctatctggtgccggtggtcacggtcatccttgattatctgctcctcaataatgccatgccgactttggcgctgattggaatgggggcgatcctggcagggttagttctggtcttccgaaagcaggaaacgaagaacatctaa

SEQ ID NO: 82426 - DNA, 231 bp, Citrobacter koseri
atgccccgtgatttgtccctcacggcgcaggcgcagcatgtgtttggtatgctcacgtttgccctggtcgcgtacgcgcgtctggcaggcaaagaacggctgaaaaccttcacgttgcaggttttccagcaaagtgatggtgggaatgcaggtgtaacgctcactgcgggatgcgtgcttgtcttcgctgaacacgctgggcaccacgcaaaacaactcttcacgggttaa

SEQ ID NO: 82427 - DNA, 1245 bp, Citrobacter koseri
atgaatgatgttgttaaaaaaattgttcctcggttgcgctttcaatcatttaaagccttgggaccatggggatctcagacattgggccagttggctcagcgatcaattcgcaaaaatgcggaaggtaaaataacccgcgtcttaacaaactcagcagagtatggggtagttgatcagcgtgactttttcgaaaaagatatcgctaaccaaggcaatcttgaagggtattatgttgtagaagaaggctactatgtctataacccaagagtatcaacaacagctccagttgggccgatttcaaaaaataaaatcggattaggggtgatgtcgccgttgtatatggtttttaaatttaataacagcgaaaatgatttttatgctcattacttcaagtcaacacattggcatcaatacatgcgccaagtttcgagtacgggtgcgcgccatgaccgaatgaatatcagtaataacgctttcatgaagctacctcttcctgtatgtactccggaagaacaacaaaaaatcgctgactgcctgtcttatctggatgctctgatcacagcagaagtccggaaattggatgcgttgaagaaatataaaaaaggattgatgcagcaactttttcctcgtgaaggagagaccctgccaaagatacgttttcccaattttcaaggtacagcggaatggaagatatgttcatttggtgattttattgaggaatatcgagaaaagtctacatatcaagatgagtatgaagtattaacctctgccagaagtggtcttatcagacaacgtgaatactacgataacgaacgaattacagaacgtgataatatcggctttaatattattccgacaagttacatcacatatcgtagcaggagtgatgatagacgattttattttaacgagaacaatttgggtataactggaattatcagtacatattatcctgtctttcgtataaatgaaggtgtaaataagttttttattgaattacttgctcaatatgcagagtttattggcaaacatagtgtcgggacttcgcaaacagttctttcattaaatgaactacgccgaattaagttgcctattccaatagaagcagagcaacgagatattgctaattgcctatattctttcgacaacctgatcgtagctcaagatcaaaaagttgaagtacttaaaacctttaaaaaaggcctattgcaacagatttttcctaaggttaatgaggtggtttaa

SEQ ID NO: 82428 - DNA, 801 bp, Citrobacter koseri
atgagaacccacgaccggggttcgacaactggcggcagccagttggacagaccgcgaacgcagagaacgggctgcccgcagggcgagcgaagcgagtcaatccccccctcaccgccatattcagaaaaagagctcgtacgaaagtacgggcttttttttgcatattgcacgcgctatccggctgacaagggcaccgtaggcccggtaagcgttagcgccaccgggcgctcgaacatcgccggatggcggcgcaagcgccttatccggcctacaaaaactggcggcagccagttggacagaccgcgaacgcagagaacgggctgcccgcagggcgagcgaagcgagtcaatccccccctcaccgccatattcagaaaaagagctcgtactaaagtacgggcttttttttgcctattgcacgcgctatccggctgacaagggcaccgtaggcccggtaagcgttagcgccaccgggcgctcgaacatcgccggatggcggcgcaagcgccttatccggcctacaaaaactggcggcagccagttggacagaccgcgaacgcagagagcgggctgcccgcagggcgagcgaagcgagtcaatccccccctcaccgccatattcagaaaaagagctcgtacgaaagtacgggcttttttttgcctattgcacatgctatccggctgacaagaacaccccaggaccggtaagcgttagcgccaccgggctcccgcacatcgccggatggcagcgcaagcgccttatccggcctacaaaaaacaaagcccggtttcccgggctatga

SEQ ID NO: 82429 - DNA, 1908 bp, Citrobacter koseri
atgccgcaactttatagctacatcaggtggtcaagtgatcgccaagagaaagggacaaccagaaataggcaggtggcggcggcaaaagcctatgctgatgaggctggccttgaaatggttgaaattattgagcctggagtaagtgcttttcgtggaaaaaatagggcgggtaagttgggcgactttatagacgccgtaaaaaataatgctataccgtctgactcttggctttactgcgaaaacctcgaccgtctatcacgcgatcaggtagatgaagcacttcgtttattccttgagttgataggtttagggctaacgattgtcacaggaatggatcggaaggtctataacagggaatccatcagacaaaaccctactgatctgatgatttctattctgatgttcatccgaggcaatgaagagtcagagacgaagtctaacaggacagtaggcaatgttgttgctttggtcgaacgtcacaaaaaagggctgccagtaaacattaaatcagttggtcgccatcctttttggatagatgattctggttcgcaatatgaagctgtcaaagaacatcctgtttactggagtattgctcgtgaagctatagacatgtttttggcaggggatggtatatacacagtaaagagataccttgatcagaaatatccaaatggtttgaaggggaaggagtgggattatcaggtattaaagaaaatgcgtgataatcgtgcgttgattggggaaaggactatcaatgtcgctggtgctacttacaaacttgataactactatccgtggctatgtaaagatgaagcagagtttttaaccctggctgaacgtaagcagcaaaacaactacaagggtaagaaagacaaagtagaagaaatcaagttgctgtcagggctacaggtgttgcggtgtagcaagtgtggaggaacgatgcattccttcatgaatcatggtagtgctcgctacatctgtacgaatggggttcacttacagaaaaactgttctggctggtctatatcagctcaattagttgaacattgtacaatgatttcactactgatcgcttacatggacaagagtcacaaggatggtattgatactactgcgatagaagtagacattagtagaaaagaaacattgataagtgatcttgaatctcgcatagcaaacacggctcaagcaatagctattgctccagatgttagtgcgttagcggttcaactgaatgcgtttgatatggaacgtaaaaacactatcctagaagttgataagttgaaagaacgcttacattcattgaaaggaaaaggatctttcggtgtagatgtaactgagtttctggtacttattcaatgggctgtgtttacaaacatggaagatactgacaggaataagataagaaagattatcagttctattattgaaagtgttgtggttgacaaaacagatggatgtataactataaagataaagtattatcataaagacgaatggttagtgtttggtggagtgaacagaaaaccttattgggcttttactgtagagtattctactgatgatgaaatgggtatcgaaggcaaaaactcttctgactttattagtaatccgctatttcagaaagcagtagaacaactggatagtatagaacagagttatctaaatttgtttgagactgccaatactatgttaggtgtagtcggttatagtgaaattcgtgggtcttcattctggcctaatactggacaatatgaacgggtgaatgttgagtatgaaggtgttacgtatagcattgcgttaaatggtcgggttccgaaggtcatagcctcagcattggaagccactggattatcacgtaaagactttatagcacgttttaaggtttgcaaggccgagaaaaggtaa

SEQ ID NO: 82430 - DNA, 318 bp, Citrobacter koseri
atgaaagctaaagagcaaaaaaatttagaaaaggatgcagcagtagaagaaaaacggaaattaatcagagacgtgattgaaactctggcagagaaaggtatcccgcctgaaataactctcatgagggcagggcaggttaagggcagaggttcttccgctcttgttagcactgcaccaaatcaacgtatcaagtgtgtgtacaatagtacagaatacataattccggtagttggtaacgtcagctatgctaccaaacaagcgattgtcgaatctggcctcaaccgtgaacagtttattggaaaatacaaagtcgcttaa

SEQ ID NO: 82431 - DNA, 453 bp, Citrobacter koseri
atggaacgtaacttaaagccactgatagtgcttgcattatttgtttttattttctttggtttgcttgactttttttggaaaacaccaatgctggctttcggagctatatctctaatattaacagtattggctggtactaattatgtggctattaatttgcaaaagttagtatggaagaaaggcaaagagcctattgatatatggactatttgtagtgtgacaatatctgtagtcgctattccctttgcttatgtatatggaggagcatcaggtttagagactgtaatatatgggatactggttgtttgtttaagtataatagtatgctgggatacaaaaaacggaaaaaacaacaacaatgaaataaagaaatacatagaaatttcagagataaatgaatcggaaaaagagattgttgttacaacaaggataagaaaacaaaaagccccataa

SEQ ID NO: 82432 - DNA, 474 bp, Citrobacter koseri
atggccgcatttgatattttttctggtgccaaccttcaggtagaagtaggtactcatacgcctggctctactactccagctactgattttgttgtaatcccggagattgctgcatttccaacagtaggggctgaaaacgtagtaattgacgttgttacatataataacgcatataaccgtaaactacttggaaccaaatctgtaccagacattactctaagtgttaactatcaaccagataatgcagtacaccaaaagttattgcaacttgaagaatcacaaactcgtgcacaattcaaaattacttattatgaaaatgccacacatactaacgcatatagtataacttacgttgctttcgtatcttcgtctgttaccagtggcgataaagacgaagtagtaaaacgcgattttgtactatctgttgatggtggaccaatcgcaactgagattattacaccagaaggtgaataa

SEQ ID NO: 82433 - DNA, 690 bp, Citrobacter koseri
atggataccttaacggggccgggtgataattctggcggtgaaacatattccgttgctatccctaccgactctaatagtgttactggttggcctctaaatcctaataactctaaagcatatggttggggttcattgttatgtttcaatcacggaacatctgctggtagaactcaaatctatatccctgatgatggtgcaaatttatattttagacaaagatattctactgtatggaaaaactgggtaagggtatggacaaatagaaatactaccgtagatagtaatggatttattaaaaatgcatcaccaattgtcaaattatatagtgatggttcttcagtactcaatgatgaatcggaaggtgttaccagcgaacgtattgatacgggtacatatcatgtttacggtacaaaaggattaaacaccgacggatggactattgaaatcccacaagatattaatggtaatcgtctatgttttgttagtactgattatgatgaagaagatgatattttagtgattaatacttatacacgtaaatttgattatgaaactgcaatgattgttgcgggtgaagctatagatattccaacagatcgctggatagatttgcgagtggaaatgcctgtagattcaatctggaatcaaaagacaaaagataacgaacaaggttatcaggataatgaataa

SEQ ID NO: 82434 - DNA, 1704 bp, Citrobacter koseri
  misc_feature (1645)..(1654): n is a, c, g, or t
atggcagatatttttagtggtaaacacgttaagatttattataacgtcgataccggaaacagggcagtagtcacagcaggtaatattgaaatctcgcagctcgcacagtatccatctttcagtatgggaaatgaagtagcaaagattgaaacgtacaatgatgaatacgcaaatgcgattactggacaacagaccgttgacgaaatcgaaattgtagttaattacgtaccaacagatacaacacatcaattccttgatgcagcatatgacaatggacaggaatttcaaatcaccattttctataacgaagatctggaagccggtcgccttgagagtgtaatggttaatggtgtacttgccagtcgtaccatttctggggggaaggatgcggtagtaacaatgtcatatagttttgcacctacggagcttgtgagctatgccccaagagctataccagtaaccttacatcgtggtgattatggagtgggtagtgatggtacagtggactatccacaatacgaaccggacaaggccacaggcaacgcatttgtaaaaatctcagcaggaagtagtgataacccaacttccgtcgatatgatgggtattgagctggtagatggtaaaccagaaaacaccaatatcatgatgactacaacgggtgatttacgtatgtatgcccgtaacgcttctacagcatggacacgcctgtataccagtaatgaagcagatacacgctacttaattaaaacaaataacctttctgatttaagcgactttgtattagcacgcagtaatttagatttatatagtaagactgaggcagatgataagtttatggaaggtaaagacaacctttcagaaattacagatacagaagaagcaagaactaatcttgatgtgtactcaaaaagtgaaactgatagccttgctgattcagtacaaactaatttagatacctatattacaagcaataatgaaaccattgacagtattaatacaattatcattgtcaataaaaatcaggttgatcagttatctgattcagtagatacgcgttttgttaatgtggtactaaaaactactaccgtgaacgggaaaccgctaacagggaatattacgctaattaaatctgatgttggattaggtaatgttactaatgatgctcaattgaagattgccagtaatctatccgatttaggtaacattgcaacagcccgcagtaatctacaattagaacgttatcgacagggaacaactgaaacaagcattttaagtgctaacagtaagtatgcatttagactattcgataatgggctatgggggaattatgatcttgaaaatggggtgtatattccactttcaatagatcgtggcggtactggggctacaagtcttacaaatgctcgtatcaacttacaaatagatagattaattccttctggtgatggcagtacatttattggtaatacagaaaccggatttaaaagattaggtttttatcaatcaagtggcaattgggggttgttgaatgatgccggtaacggctgggttcctcttggaattccgcagggtggcacgggtgctggtaattcaactgacgcatccatcaatctaagctattatggaaaattcggttctcatttcnnnnnnnnnncatttcaatcttaccaatggaaatatggataccttaacggggccgggtga

SEQ ID NO: 82435 - DNA, 402 bp, Citrobacter koseri
atgaacctaaccgaaaatgtaaaggtgagtaccctttatgtacttaataatattcaacctgtaactaatagtttaagtactggacgcggcagggatgttttttcattagttacctttgactaccaattagaggccgcaaactattcaggaaacaccagattaaaaggacaatttaatatggagtttcttgttagtcctatgcccggtaataaacagccattatccggttatgacgaaatcgtaaagtactttgatgataattatctacccgtattcattggaaataacataaatgtactatgggttaactacggtagcagtacattaataacagataaaactacagggagtagttctattgttttcacaataaatattgaagcgatagagaaaagaatttaa

SEQ ID NO: 82436 - DNA, 1221 bp, Citrobacter koseri
atgaagatttatgttcgttttactataaaaccagttgggctggatgattgttcattaatcgatctaaccagatattcatacattattaaattctgtgatgcaagcggacaacaacgtatcttgcatgaagatcctaaaaataattttttgaaaaatggcgagtcaagacttcattcatttgaatacaacaaaaatacattagagattccattagttagatgtgatatatatttcgagggaattattacagataaaaacatattcatcaattcatttttaaatggcaatatcactaatgactggactgtatttaataaaaaattcagtaaagggatgacaacaaacagcgataattttgataagatatgccatatttctaagcatcgagtattcattgactcacaatttcctgttggacattcttttgatccttttgaaaagagtaaaattgagaggcagttaaaagcaaggctcgcacatacatcatcgccacaagattatatgaggggtcgatatcctgatcaaaataggtccagtttatgtggtcccgcagcatttttatatacattattgatagataatccgcagttatatagtaaatacatcaaagatttatggaataacgggaaagctatgcttgggaccctagaggttactccttctcatggatgttgtcatccggtaaaatatactaagccctcgggagaaacattagttcctgcgattgactggatttccatggctagtttacgtgataacgaaaaccattcatttgattatagttctccaacagattctcttagtggcgcaacattgcctgacgctatagctggttgggttgattctgttggtggtaaagtcatttataacagtgggacatctctagtgtcgtcatggcccagagatcaagtaatatggttaaataattatatttctcctgattaccatgttgcagtacttatcaatgacgggcttattagtgactcgtggaacataactccaacgcactggattgtatggactggaaagttaactactatgcagtcaaagcaaccagttgataaaaacacgccagatgatatgttggtagacttagagcttttttcatggggaaatattgaatacatgagccaatatggtaaaaatcatactctcaaagacttttgtaagtacatttatggcgctgtcatttttaaaaaaaatattgtgaggttattttga

SEQ ID NO: 82437 - DNA, 174 bp, Citrobacter koseri
atgcccactgcagacagacttaatgacaaaggcactcagcatgatggttatcacgaaaccattattacagcaggttccccctcagtatttattgacggcctgcctgccgccaaaaccggtgataccattaactgcggtggcgtggttatctcagtgagtcttgaggcgttttaa

SEQ ID NO: 82438 - DNA, 1239 bp, Citrobacter koseri
atgaaccaaaaatctttaatcgataataacctaaaactttttaaaataaaatcaccagcagaactcataaaattattaaagacaggaattgacataaacacgctaaattcatcgaaccaaaatgcgctgttcggttgcagataccctgagcttatggaagcaatgattaatgccggaataaatattaatcatactgacatgtttaacaggaatgcgcttttctatgcaacttgtccagaaaccctgtgtgtgttgactgaaaacgggattgatatcaatcatacggacacgctgggcaggaatgcgcttttctacaccagtgacgctgaatcagttcagttactggtaaaaaatggtatcagcataaaccaccctgaacttgaagataaaaatgcgcttttctttgcgaccaacgaaagctcagccagagaactcatcgacagtggtattgatattaaccatactgacagctatggaagaaatgcgcttttctacgtctgtgaagctgacgttaatcgtctgctgattaagaaaggtatcaatgttaaccaaagggatatatatggtcataattccattaacattaccggcatagatgctgacttactggatgtttatttcgctgcgggccttgatcctgacatacaggatcgaaatgggaacagcttaatttttcaccattataaaaaaccaattacagacattttaatcaacaatggctgcgatataaaccgtgttaataataatggagaaaccgtctttgaatacatacagaccatgttgttcagcaactatcaacttgaccagtgtctcagcgtgcttacaccttacattaaccttattaaagcaagaccattaattttcaatcgccttacttatggctgcattgagctaattaaatttttgcaaagccagaatatcgattacaaaattaatgaccgttgcgttgttagatacgccaacaaagacattaaaaactttattactgaagcgcagaaagttattgatctcagcaatatcaccctttgctcatggtatgacaccccgctggtcagcgtaaaaaacaaggagataattaaatggttcataagaaacaatgtaaatgtaaatattaatgacattgaagatcaggacattctcactgaaattcttacctaccttgcactgagggtacataaaacgcttaaaaccgtaattaaaccggagataaaacgcaccgcctgtaaaagaaggctgtga

SEQ ID NO: 82439 - DNA, 561 bp, Citrobacter koseri
atgtctatggatacccgacaatcattaatcaattctgcagagtttatgctgcgttccagaggttatgctgccttcagttacgctgatctggaaaaaatggtcggtatcagaaaggccagtattcaccattatttcccaaaaaaagaagatcttggtgtggaaattgttgaaacctacatcaatcgttcgactgtggatttcgaaaaaatcgatcatgactttccaaatgcttttggtaggctctgtgctttcgctgcattgtttcgggctgcaatggctgatggtatgttaccgctatgcggggcactggcagctgaaatggcagccctgccggaaaccatgcaaagccttacgcggaaatactttaccctgcaactgcagtggcttgagaaaaccatagaggaaggtactgcggctggtgaattcgcggcaacaggcacaccccggcagaaagcgtttcagattttaagtctccttgaaggcagcagctttgtccgctgggcaatgaatgacggcacagatctagagccggctgctattggtgctattgttttccattaa

SEQ ID NO: 82440 - DNA, 552 bp, Citrobacter koseri
atgacagagaaagtgaacggtattgatgttgctgcattccagcaattcgccgaaaaagtgacccaaaacccggaaaaagcaaaagccaggtttaacgtagagacccgctgggcaggacagacccgttcagtttctaccatgaagtcatatgaagtctttggtgacagcatcgagcgtaccttccatgtcgccgctgatgaaccatcagaaatacttggaagcgatactgcacctaacccacaggaactgctcatggctgcgctgaatgcctgtctgaccgtagcgtatgtggcggtagctgccagcaagggcattaaggttaattccctgaaaatcgaaacgtcaggcgaactggatctgcgtggtttccttgggttggatgaaaatgttaaccccggatacgattcagtccagtacaccgcgtttattgatgctgacgctcagccggcagaaattgaagaaattcatcaggccgtactgaagacgtcaccaaactatgcgaatttctcgcgttccattaagatggagccgaaactcgtcattgcacaataa

SEQ ID NO: 82441 - DNA, 336 bp, Citrobacter koseri
atgtctgcagaatggggcaatcgtctctccgcgctgatcaaaagcgtcggtaatctggccaaaacaaataaacctgttgctaacgcgtttcatggtcttgaaaccgctacgcgcgaaaacagtgttctggatgccaaaactcacgaactgattgccattgctgtggcagtgactactcgttgtgacggttgtatttccgcacacgtggccgccgccaaaaaagctggtgcaacgaaagatgaaatcggtgctgcagtagggactgcgattgcgcttaacgccggtgctgcttttgtctattcagcacgcgtaatggacgcctacgacgagctgtaa

SEQ ID NO: 82442 - DNA, 795 bp, Citrobacter koseri
atgcaagatacacagtttacgaatcataaagtcctgatcattggtggcaccagtgggatcggtcttgaaacagcaaagatggttttagagcagggcggaaaggctgtcattgtaggtagccgtgctgaaaaagcagaagccgcacgccaggaactcgtggctatttcgggtgaggagaatgcattcgctctgactgctgacttatctagtatggaaagtgttgcaaagctcatcgctgccctgaaaaaggagcacagcgatattgatatgctggtcaattccgccggcatttactatccaaaaagtttccttgagcattcagtcgtggattacaacaacttcctcgatctgaaccgggcattcttctttattacacagcatgttgctgcatcacttgtagatcagaagaaagctggatctattgtgaatgttactgcagtcgctgcacgccaggcggtagaaaccatcaccgcttcagcttactccatggctaaaacgggtctggatactctgacacgccacgccgcagcagagttggctgagcacggtatccgtgtcaatgcagtaagccctggtattgttgaaacccgaattttcgaacgttttattccgggtgaacaactggatggtgcgctggccagtttcaataacttccatccgctgggccggaatggtacaccgcgcgatgttgcggaaactattgttttcctgctttcagataaagcttcgtgggtaaccggggcagtctgggatgtggatggcggtgtaatggcagcccggaaacttggcaattaa

SEQ ID NO: 82443 - DNA, 336 bp, Citrobacter koseri
atgacaaatgtacgcacctacaatgaagacaactttcatgatatcgcatggggtgagggactggccgtaatcaggttctttgcaccgtggtgtccaccctgtcgtgagagtgaagcggaatatttgcaattcgcgaaaaaactggggccacatgtcaaagttggtgtagtgaatgttgataaatcacctgttttatcaactcggtatgaggtttttgggcttccttctgttctggtgttcagaaatggtcagctgatgaaacgtattacaggacagaaaactgcagagcaatacgcagctatttttcatcaattaccgaacacgaagcagacgtaa

SEQ ID NO: 82444 - DNA, 1110 bp, Citrobacter koseri
atgaagacgttatttaccccttacaacctcggtggcgttgagctgaaaaatcgcgtggttatggcacctatgacacgtactcgcacgttgaatgacatcgctgatgacgtagttgctttgtattacgcgcagcgtgcttcagccggattgctgatcactgaagggctgcctgtttccgaagaaggtcgcgggtatctctatacgcctggtctctataatgatgcgcatgttgaggggtggcgtaaggtaacggatgctgtccatgcgaaaggtggccgaattttcgcgcagctgtggcatgtcgggcgtatgtctcatacctcactacaacctggtcatattgcccccgtctcttcaggcaccattcctgcgactaatacaacagtatttgcctgggacgaaagtggtaaatccggcccggttgccccaagcattccgcgcgcactcgaaacgcatgaagttaaacgcgttacccgcgattttgtgaagtcagcacaactggcggtggaagccgggtttgatggcgttgaaatcatggcggctaacggtttcatctttgaccagttcctgagcagtgagctgaatacccgtaccgatgagtatggtggttcggtagaaaatcgtcagcgcttcctgctggagaccattgatgccgtttccgatgcaattggcggcaacaaagtcgcagtacgactctctccgttcggtcgcatctatgatcttgccccctatgccggggaagaagaaacctggtcagaaatggcgaaggctcttagccagcgctccctggcctacgtgcacctctatttccagccgacctacgtcaccgcaccgcaagccgctgagaaatttaaagctgatttccgtgaatcatttggtgggacgatcattgcagcaggtggattcagccgtgatattgcagaagaacgcctgaataacaacgaagttgacctggttgcgtttggtgtgccatttatcgccaacccggatctggttgaaagaatgaaaaataactggccgctggcggaaagcgatcgcacgacctattacggtgtaagcggctctccggaaaagggctataccgattacccggtatacagcgaacaataa

SEQ ID NO: 82445 - DNA, 699 bp, Citrobacter koseri
atgaaatcattaatgccccgaatctcagtagatgtctggtctgattatgtctgtccgtggtgctggatcgctaaaaaacgatttgaaaagggtctggaagagtttgaatattctaaacaggtcgatgtacgtcatcacagctatcgtattgcgagtgaccacccccctattccattcagatcggctttgtatcagaagtttggtggtgagcatggcgcagagttaatgatgaaccagattgaaagcacagggaaatcagagggattgatctataactttgacactatgctttttggcgatacacgtgaagcacatacccttgcagctgctgcgcgtgaggcagggctcggaacacagatgtcagaaaagttgttctctgcggccacaactgaagggcgttctatttttgacagggatgtattgattgctctggcaattgaagccggtatgacacagtctcaggctgaaagtgcccttgaaaaccctgtattcagggactctgttgatgacgatgaggcaaaggctcgtgcgataggtgcaagtggcgtacctctttttgtgatcaataataaatatgcaatcagtggcgcacagccagccgcgaattttttgagcgccttgagacaagtctgggaagaaaccaaagatgagtccatgttcatggaggggatggtctgcggaatagatggttgtaaataa

SEQ ID NO: 82446 - DNA, 906 bp, Citrobacter koseri
atggatatcaaagcattacgttattttttgcaagtcgcagagaccctcagttttaatcgcgcctctgaacgactcaacatatcacagcccgtagtgacacgtgttatcgctcaactcgaacatgagattggcactaggctttttgacagaaccacccgccgcgtttcattgacacccgcaggaactgttctgctgaatgaagtccggcctcttatcgcacatgttgagtctgtccagcagacggttcgtcatgttgtggccgaacaaagcggtaaattcacggtgggatataccactctggctatgcagacggtcactcctgatttactgcgacttttcagcgagaagtatcctgaaattgagttggacgtcagggaaatgaccacccatgctcaggtcgaagcgctgctgtcagccgaaattgatgtaggcttcgtattaacgccggttgaagatgaggcgctgacagtcattccgctgcataaagagcgactcagattagcggtatccagccgtcacccgcaagccgctctggcaggaaaaaataaaccgcttccgttggctgcttttgcaaatgaggagtttattatcccctgcaaagagcagttccctgccgtttatgatgaaattatcaggctttgtgaggaggcaggatttcgtccccgcctgcgttcatgtggagaaaaccagacgtgtgtcggactggcacgagctggtcttggcgtagtattcgtctctggcagaacagaggatattccttcagaagggttagaatttattgaaatagcagcaccgatacctgaattagaaattgcagttgtctggcggacacgtgatccatccgtactattacagccattcagggagttggcagaaataaccatagaaaacggtagcatagattga

SEQ ID NO: 82447 - DNA, 333 bp, Citrobacter koseri
atgtcagtcaagagtgttaataaagagacgttttcacaagaagtacttaacaacaaccttcctgttttggtggatttctgggcgccatggtgtccaccctgtgtctcagtcgcaccaaccattgaacaactttcaggtgagcatgaaacccggctgaaagttgtgaaggtcaatatcgatgaaaatgccgaactggccagcatctatggtattcgctcgataccctccttcaaagtatttaataaaggggagatcgttttggaatttggtggtgctttgcccaaaaaacagatagaagaaaaactgaatgattacttaactactgaaaaatag

SEQ ID NO: 82448 - DNA, 210 bp, Citrobacter koseri
atgaaagccattaataaagtttttatcatcactgctctttcactggtttcgttaaccagctttgcacagtctgtcaccgcaacaggcagtacgctcggtgaagcccatgcaaagatcgcagcaaaagcaaaagaagccggagcagaatattccatcactgaagcatacagcggcaacagagtgcatatgactacagaattaacacactga

SEQ ID NO: 82449 - DNA, 885 bp, Citrobacter koseri
atgtccgatttcagacagttgaactattttctgactctggctgaatgtcttaactatggcaaggcagcaaaagcgctgaacatttcacagccaccactgagccggcagattgcctcactggaggagaagctcggagtaaagttatttaaccggcatcattacggtgtctcactgactgaagccggaaaaatgttttacacagataccaaggcagtcgtcagcgcgtatgaacttgcctgtcgtaatgtccaaaaaatggctgccggagagaaggggcagctgtcagtcggttttatgatgcacgctgcgtattcaacaataccggagctcacaaggcgcgtagtcactgattttcctgatctacaactaaccttgcaggaagttactcctggtgcactggtaagcgcagttcatgacggtgattatgatgtcggattggtattcaacccaggcccgtctcgttttctagaaagtcttccccttcatcgagaaaaactctgtctggtagtaaatagcaagcatcgtttaggcgtaaagaagtccattagtgcatctgagttgcagagcgagccattgattgctacccctcacgccgttgcccccgtgttgcgtgaaacgattgacctttttctacgtcagcagggcgtcgctccctgttaccgtctggaaacacagctacagcaaaccattgtaagtctggttgccgaagggttaggagtagctcttgttccagaatcggttaaaaaacttaattacgcagggattgaatatcttgaactggaacagagtccaacgatagaacaagtacttatttggcataaagataacagtaatccggcgctggctctctttaaacaactagcaagagcattaactgaatcttga

SEQ ID NO: 82450 - DNA, 942 bp, Citrobacter koseri
atgttgtccaccctgaatgttgtactgcctgtctttgcccttatcctgcttggctggttagctcgcaagttcagaatcttaggcgaaaatgccctgagtgaactgaaccgctttgttgtctatctggcattgcctgctttgctttttgatatcatcgctaatgctaaatggagtgaccttgctcagcctgcatttatcagtgctttctcggtaggaatgatggtggtgtttttcctgaccatatttattcagttgagacgaacccgccatcttgcagatgctgctatcgacgccctgaacgccagttatgctaatacggggtttattggttttcctctcatcctcgtttttttaggccatgaagctctggcgcccacacttattgccaccattctgacggtatctatattgtttggcatcgggatcatcattatcgaaactggccttcagggggaagtaaagcggcgtatcatcatcggacgtgtagcgaaatctctgattaaaaacccgctgttaatgtctccggctattgccatttgtattccggtatcaggattaactatcccaggctctgtgaacgtttttctgaaattacttgggggagcagcttcgccctgtgcacttatcgctctgggattatttcttgccggtcagtcagataaaagacaaaacaatgaacaagctacggtaacgatgctggtcgtgcttaaattactgattcagcctgcgctgacatggttgtttgcgacaaaggtttttaatctttcgcctttgctggttcacaccgccgtgctactggccgcgctaccaaccggaaccggaccgtttatgctggcggagttttatcgtcgtgaggcatcgacaacgtcgaaatgtgtactgttctcaacagtggtctccatgtttactctatctgcttatttgtacctgattggccagtag

SEQ ID NO: 82451 - DNA, 834 bp, Citrobacter koseri
atgattatcaaacagatcctgaacaataacgtcgtcagcgtttccgatgtcagcggagctgagtttatcctgacgggacgcggcctgggatttaatgccagagtaggcgacattgttgaagagaagaacgttgagaaaaccttcagcctggcagaaggttccatctctgatcgcttcaaagtattactgaatgaagtgccggtagacgttattcagttgacagatgatatcgtcacactggcaagaaactcgcttggatatatgctgagcgactctttgtacgtatcgctggccgatcacttaaactttgcacttaagcggtatgctgaggggcttgagattcagaatcccctggaatgggaggtccgccatttataccgtaaggaatatctgattggacgtcaggcgctggcgctgattgcctcacacaccggtcagcttttgccggatgcggaagcctgcagtatcacgctgcatatcgtgaatgcatccatgaatatgccggatggacaggtcatggagatgactcggctgatttttcagatccagaatatcgtaaagtactggtttgcaataagtattgatgaacagagcctgaactatcagcgttttgttacccatctgaagttttttgcccagcgggttatggcgggtgagatccttaataatgacgatgcggaactgtttgaacagatgccgaaacgttatgaaaaaatcctgggttgtgttcaggccatcagtgaatttgtggccaagaattacaaccatacgatgagcagttcagagaagttatacctgacggttcatattggtaacgtattaaaccgtaagtaa

SEQ ID NO: 82452 - DNA, 1902 bp, Citrobacter koseri
gtggattatcaacataccgcgcgcaggattattgcgcttcttggtggcgatgcaaacatcaattctgtttttcattgcattacacgcctgcgatttagcttgaaagatagcgacaaacccgatcgtgagtcgctgatgcagctcgacggcgttatgggcgttaatctttccggcgaccagttccaggtcataatcggtaacaaggttacgcaggttctcagggctatacaggacgaaatccctcgtcttaaggctgaggataaaacggatgaaaaggttgaggaaaagcgccgaaatcccgtatccctggccttcgaagttatttcaggcatattttcccccattataccggcgattgccggagccggtattcttaagggcgttttatcccttttcgttactttcggttgggtaactgccactaatcaaacctatcagattatgacggccatcagcgatggtgttttctactttatgccgatggtgctggccttcagcgccggtctgaaatttggtgcgaatccttatctctctgttgcactggcggcagtgttgtttcacccggcactgacttcgttactgaaatcaggcgaccctgttgcctttgccggattaacagtttcacctgtttcttatgctaactcggtcatcccaattttattttcagtctggctgctgagttatgttgaacgattctttaatagaatcattcccgcctctatacgaatgatgttttcccctctgcttagcctgatggttgtggcaccggtaatgcttattttcattggcccagccggaatttttatcggcaactcgctttcaggcgggatcatctggcttgttgagaatatggggccgctggccgggattgtggttggaggaacgctttcgttgatgatcattaccggaatgcactatgtgctcgtacccatcatgatcaataacatcactcgcctgggtttcgaccctatcaagcctctcatctttgtcgcgaactttggacaggcaggcgctgctttcggggtgttcctgcgttcccgcaacaaaaagacccgcactctggccctgtcgacctctttcagtgccctgatgggcgtatctgaacccgcaatgtatggtatcaatatccgtttcaaaaaacccttcgcggcagcactgattggcggagccgcaggtggatgcctggcaatgacaatgggcgtaaaagcctatgcatatgcattaagtggattgtccggtttaccggcgctggctggtgagggattcggctgggcactggccagtattggtctggccttcgctgtagctgcgctggtgaccgttgcgttgggctttgaggagacatccgaaatccagccagattcaacaagtaaaactgagccatcatcagctcagactaatgaagtgcgtgcgggaatcagtcctgtacacgctaacgcaggcgaacaactttatgccccggccgagggaaagcttattcctctttctgaggtgagtgatcctgtgtttgccgatgaagtattcggtaaaggaatcgctattgtcccggtcaatggtcagttggtgtcaccggtaaacggccgggtaggttcggtatttgccaccaatcacgccattacgctggagagcgaatcgggggctgaagttttaatccatattggcatcgatactgtgaagctgaacggaaaaggctttatacggcatgttgaagacgatcaggttgtgaaagtgggtgagccgcttattagcttcgatctggatgctttgcgtgcagacaacatcgactccagcatcatcatcattgtgactaacaccgagcggtatgacgacatcagccttatttcacaaaatgaagtggaaccacgtgaggcttttctaaaactgacagcggcagctgtgtaa

SEQ ID NO: 82453 - DNA, 1470 bp, Citrobacter koseri
gtgaccttttctaaatcttttccggacaattttctatggggtggtgctacagcggcaaaccagctggaaggtgcgcatgatgtagatggcaaaggcttatcagcctctgatgtctttatctttgatattaatgcaccgaaagagacatggctggatcagtgggccgggatgacgcacgcacaggtggctgaagctcagaacccggccagcaaaaaatactatcctaagcgcaaaggtaatgacttctatcaccattacgaagaggacatcgcgctctttgccgaaatgggatttaaatgcttccgtatgtcgattgcctggacgcgtctctttccgcgaggtgacgagtccgagccgaatgaagcaggtctggccttctatgatcgggtgttcgatacgttacgtcgccataacattgagccggttgtctccctttcacactacgaaatgcctctgaccctggtcactgaatatggtggctggccaaatcggaaggtaattgatttttatctgcagttcgccacgactgtctttaagcgttatcgccataaagtgaagtactggatgacgtttaatgaaattaactgcgtcaagcatcatccgtacgtcagcgtgggggttattgaagaggatcatccggctcttgaacaggctaagtatcagggcgcgcatcatcagttcgtagcgagtgctctcgccactaaagcctgccacgagattattccggagtctaaagtgggttgcatgatcagctatcagatcctgtatccacatacctgccatcctgacgatattcaggcctgcgaggatgctcaacgtgtttccctgttcttcagcgacgtacaggctcgcggtgcttatcccgcctggacagaaagaatgtttgctacaaaaggtgtggtgttacaaaaagaacgcggcgacgatgaaatattgcgtcaataccctgtcgatttcgtatccttcagttattacatgtcaagcaccgtgagtgcacatcccgaaaaattggaaggtgtcaaagggaatctgatcaccggagggattcgcaatccgtatctgcctgaaagtgattggggatggcagattgacccgaaaggtctgagactggcgctgaaccagttatatgatcgctatcagaagcccctttttgtagcagaaaacggtctgggggccgtagatgttcctggcagtgatggtatcattcaggatgactaccgtatcgattatctacgactgcatattgaacaaatgcatgaagccattgctgacggtgtcgatctgtttggttatacgtggtgggggccaattgatatggtcagcgcaagtacatcacaaatgtccaagcgctatggttttattcatgttgatcaggatgatatgggcaacggaacgcttaaacgtactcgtaagaaaagttttggctggtataaaaaagtgatcgcctcgaacggtcatgatttgagttaa

SEQ ID NO: 82454 - DNA, 303 bp, Citrobacter koseri
atgccacagatgtgtgatacgtttactgttgtcgtgaagcgaatgtatcaggatgaagttattgaggtcatcattctgagatgcacaaagctgccccttctttttgcgggtacggaggcacctgttaaaacactggatatggcgtatatcctcattgtgacatcgtttgaagcacttaatcagtatgttactttgatttttagaaaaggacagagggcgttatgctccggtccagcgaatattttcagcaatacttttaatgcgaattatgtgtattcagggacagtctatggctgtccctga

SEQ ID NO: 82455 - DNA, 798 bp, Citrobacter koseri
atgccactcaccgataccgccatccgcaatgcaaagccgctcgataaaccctacaaactcagcgacgcgcagggtctttacctgctgattaaatccaacggctctaagctctggcagctcaagtaccgctttggcggcaaggagaagaagctggcgtttggtgcttacccgaccgttacgctggcgaatgcgcggaaactgcgtgaagaagcccgcgccgtactcagcgcgggtgacgatccgggggtaaaaaagcagcaggaaaagcaggcaaagaaaagcggtaatacctttgaagagatcgcccgtaaatgggtggcagggaatatccgctggactgaggcacacaccgccaaagccctgcgctcgcttgagctgcatgtatttccgctgattggcaggatccccgttgccgacctgaaaaccgccgatctgctgatcccgctgcgagtggcggagagaaagggcaatctggagaccgccgcgcggatccaacagcgcaccacggcgatcatgcgttatgcggtgcaggagagcctgatcgccagcaatccggccaacgatcttaccggtgccatcgcgccgccgaagaatcactaccctgccctgccgctggagaaaatgccggtgttgctggagcgcttcgagagctattccggcagactgttaacccgtctggctgtacagcttaacctgctgatcttcattcgctccagcgagctgcgctttgcccgctgggcggagatcgatttggatggcgcaatgtggacgatccccgccgggcgtgcgctattctga

SEQ ID NO: 82456 - DNA, 486 bp, Citrobacter koseri
atggcgcaatgtggacgatccccgccgggcgtgcgctattctgagcgcggcgcaaagatgaaaacgccacatctggtgccgctgtcaaagcaggcggtcacagtgctgaaacagctaaagctgctgtccggtaacagcgagttgctgtttcccggcgaccacgatccgcgtaagccgatgagcgaaaacaccatcaacaaagctctgcgggtgatgggctacgacacaaaggtggacgtgtgcggtcacggctttcgcacgatggcctgtagcgcgctgatcgagtccgggcgctggtcgaaggacgccgtagagcggcaaatgagccatcaggagcgtaacaacgtgcgggcggcgtatatccacaaggcagagcacctcgacgagcgtacgcagatgatgcagtggtggtcggactatctcgacgcctgtcgacagaagtttgttgcgccatatcggtatgacaggcaggttcaggtggcctga

SEQ ID NO: 82457 - DNA, 843 bp, Citrobacter koseri
gtggatgatcgcattcatattgtgcagcggttcagccgccatttacgctcgctgaatattcagatccagcgggtggagcagatcaaggttcgccatatcgaatgctatattcaggcgcgactggcacaggagatcggtaaacggacgctgcaaaatgaaatggccgcgctgcgtggcgtgctgcaacaggccggacgcaagcaggtggcagagcatgagcggctgaccaataaatcattggggctggctggcgcatcccgtaacggcaccaaccgggccatcacgccggagtattacagcaaggtgctggaagccgcccgcgacaaagatgcagggctggcggtaacgctggagctggcacggctggtggggctgcgttcgcaggaagctgtacagtgttgtcagtcattgaaaacgtggaaacaggcactggagcgcggcgaaacccggctgacggtggtgtttggcaccaaaggccatcgtccgcgtgaaaccgttattcaggatactggcgcagtgaaaaaagcgctggataacgccctgtctgtcgcagagcaacgtaacggcaggctgattgataggcccagcctccagaaagcgatgaattactggcgcaaagaaatcgcgaaggtcgggctgacggggatttataccccgcactcgttgcgttatgcgtggacgcaggatgcgctctgtcactatctggcgcagggattcagcgaaaaagaagcgctggcgctgacctcaatggatttgggccacggcgacgggcgcgggcggtatgtggcgcaggtttacgggcgacaggaagaggaatcatttcctgttctggtgcaatcatga

SEQ ID NO: 82458 - DNA, 1389 bp, Citrobacter koseri
atgagtgtttatctaagacgtgatactctcgatttgattttgaattcgaaatttgagcttcattgtttatctgtgaaaatttggcaagatcttcctgatggcattgaactgtccggacatggtgttattaagcagaataagtacgggactttatatctggagtttatttgtacaaaaactaaatatacgatgaaaggagatttagttacaaaatttcccagagatcgccttgacccctcgcagaagctattaggtgaatttatttcattaaacggaacaaaatttacctccgaaggtttctccatagaagtaaatgctttcaattgtgaatcgcctcatatacttcatactcaactacctttcattacatttgtagaagacagattgtctgattcgcgtgaaaattatttatattatgaatttgcagaatcgttgcatatacctgctaatgtatcaaatagcagaacgtcaagctccactaaatctgagagccattgctggaatgaaacgcttatcgaattagataattttaaaataaggatcaacgatgagaaaaatcatcgtatggttagagtagatggaaattttgaaccagatgacctatatgattgtataaatttttatattggcttttcgggaggggttttaccgcaaccgtatgtagtgataaaacatatagatgataagataatctcaacgattaagagcattaataaccaaaatacacataaacgttcttcaaatccgattccagaaaaaattgtattaagtggagagaaaaaagcagaatctaagcatagctatgaattttttagaaagatatatgaaattcatcaagtgaagcgtaattacttcaatagtatttatggtcaatggatacaggtgtggcatggatttcaaacgaaaaattcaatagctgaactggtgctttctgtcgcaattgaaggaatgctaaatgacatttatattcctgtatttaaaagaaatagaatagaccctctattggtttctgatattgataaaataaaatatcttattaaagatatggatatatcaggaaaccataagcaacgattgataggaagtgtttcatactggaaaaatattacggtatctaaagcccttgatattttaactgatgaaggagtgatcggtgaaaatgataagaaaatttggtctgagctgcgaaatgaagccgcacaccctcaggtgaaaaatattgatatactccaacagcaaataaaacgagataaaatgctgcaatgtcttaatctttttcataagctagtattaaacgtagttgaatatactgggcctgtttacatattttctatggataaagatacgcctgtagaactgatacgatataaagacgttctggctgattaa

SEQ ID NO: 82459 - DNA, 2073 bp, Citrobacter koseri
atgcctttgcaaataaaagacattatagatctgcaaacccttgtcgagtcggaacaggtagagttcaagctggcagggggaaaagacggcaaaggcgagttaccgaaagacttctggcccacctattccgcaatggcgaatggtcggggcggttgggtcgttctcggtgtaaaagaacaggctggaaaatttacaccagtgggtattgctgatcccgaaaagattaaggccgatctgtttaatcagttaaacgatcgcgatcgggtcagtgcgaatgtgctgagatcagaaaacgatgtgcaacaggtttctttgcagggaacggacgttctggcgatccatattccacaggcgatgcgcaaacaaaagccggttcacctgaaaaagtccccatttggtaacacctatcaacgtctgcacgaaggcgatcgcgtttgtgattatatgaccgtcaagcggatgcttgcagagcagatccacgacagccgcgataatgaagtactttccgaacactatacctttcaggatgatatcgatctggacagtctgaaagtctatcgcaatctgctatcggcaaataacccgcagcatccttatctggcctgtgagccgtttgaactatttaaaatggttggtggatggcgtaaagacagggaaaccggaaaagagggcatcacgctggctggcgttctcatgtttggcaaatgggatgcgattattgctgctgcgcctaactacatggtggattatcaggaacgccccgaagctaaaacggagctgcgttgggtggatcgggtgtgcccggacggtacatggtcaggaaacctgtttgatttttatcgcaaggtataccaaaagctggtcgccgatctgaaagtcccgtttacgcttgaagagggtcagcgcagaacggatacgccagtacatatcgcactgcgtgaagcgctggtcaacacgctggtccatgctgattttaccgatcgggtttctattctgatcgtcaaacgtcccgacatgtttggctttcgcaatcccggcttgatgcgcctgccgctggaggatgtcattgcgggcggcgttagtgattgccgcaacaggttactgcaccagatgtttttgctgattggtctgggtgagaaagcgggttcagggatgccgaagattttcagcggctggaaatcggctaactggcgaacccccaaactttgggaaaaaacgtttcctgcacagacgctattagagctttctacggctagcctgatcccgcagcatgttctggatgatttgcatcagcggtttagtgaaaccttcgatcagcttgatgattttgaacaggtgattgttgcaacggcggcgattgaaggctgggtcaaccatgaacgcgcttgccagttaacaacgcggcactcccgcgaagtcacgctgacacttccccgactggaaagtaaaggttttctggtcgcagggggtgagcagaaaagcaaatattacaccttgcccggcgtatcggtcatgacgccggatgaagttttctcgttgggtgcggttgtgagctccacacataacgaggggaactccgcatataacgagcagaggtccacacataacgaggggagctccacatataacgagcagaggtccacacataacgaagggaactccacatataacgagcagaggtccacacataacgaggaaagctccacgtataacgccggagacgatcaacctgcgtcccgggatgagtatggacgtttgcttaaccgctttatcgacagaccctatattgatgatgttgataatctcaccgaagctttccgggattcgttgtttactttagcagcggttccgcgtgaaaggctgcgtctgggggataaagagctgatgaagagtgtgatcctgaatgtgtgtcaggggcagtatatttccgttgctgcgctggggcagatccttagtcgtaaccctaacgcgctgcgtcagcagtacttgaaaccgctggtggagcaaggggagcttaagttggcgtttccgcagtataagaatgacccgaagcaagggtatagtgcggtttga

SEQ ID NO: 82460 - DNA, 591 bp, Citrobacter koseri
atgggtgaactcatcaatacattgctatcattaatttcatctaacttttttaacaaaaaatcagaaaacgaagcgctggagaaatttctactcatattttctcagccaaaccacgatccccggcttgttgaatattatttcgctctcgcaacacgacaccgttatgccaaatatcatgaaattcttttaatgatgaatactcgctatccattggcaactatctggatgtacaaaagcgttaaccgcattcagcaagttgtgcaatttactgacaatagggcagttgaaattacttctcaaaccggatggctggcaaaatcttcattacttgttattgatatattctttgctactgcatttctactttgcaccatgtggggagcgaacgatataagcgtaatatataacgctattggtcattctgagataacgttttccatgctatgcaatgctatcggctcaggtatcggtgcgatggtttctttcttaatactatcaatgaccgtttatggttggtgggaaatcatcaacgctcggccattcgttgattactataatttacatcgaaataatactacaggcacaaactga

SEQ ID NO: 82461 - DNA, 708 bp, Citrobacter koseri
atggtcaaaattgaaatactatcggttcgtaatccacagtgggtgaatgatgatcatagtgcaatcaattgcctgattaaaacaaacacactttgccgggaagtatcgtttaccgcttcgccatatggcccggagccgcacggtcgtgaaatctttgccaggtgtgttgctggcgagtatggagcaattgcttcatcaatgaaatcaagagttccacaacaaccactaccacaactgaatattcccgcgaagtatcagcgattagagacgtttcttctggaggctaataaggagaatagccgtaagtcgtttcgtagcgttgtcatcgtttggggctctatgcttgataatcttcttgatgaaatgttggagttcgaggcattaagaatggttgctctggggaagaatacagaaaaaccgcctaagactttcaatgcacggattgagcaagcactcaatgtcggcttaattaatcgtcaagaggcggagagatgtcactatattaggcagatacgtaatgcaatagcacatgaatgggatctgtctctggagaccaagaatcttttgccaagtctcagggcactttatgaggtagatcactcagctttgttggtcttccatgaggatttggattttctcttacagcaggtgtatagctcctcctgcgcaatgttggtgatgagatttctcgataggttaggaaaatga

SEQ ID NO: 82462 - DNA, 246 bp, Citrobacter koseri
atgaattttggtgccggactcggaatcatatccacgattaacatgctgtttgttattggttttgttgagatttattgtaaacagtgcccccacgaaggccctcatataaaatcgcttttgttttgtgatggttatcacgaaaaatcggtgtttatggagaggggctccgttatgtgtggagtcaggttgccccaaaacttcgttctatctccagtagtaagatacaattgcagtcgcgtcatttga

SEQ ID NO: 82463 - DNA, 189 bp, Citrobacter koseri
atggcatcccccttccgaagaaataaacgtttatgccttatttatcaagtcgataatacgatcgccttctgtatcttcttgcgccactcgactgaagatgctgccatggctttgggtacccaccttgataggctctttacaatccttgtggaggatttttttaccttttttggtgacaactacacctga

SEQ ID NO: 82464 - DNA, 873 bp, Citrobacter koseri; identical to SEQ ID NO: 12976

SEQ ID NO: 82465 - DNA, 336 bp, Citrobacter koseri
atgccttacacggcgaaacgatatcagacagaaaacggtgaggttccgtacaccgactggatgaaaaaattaagacgtaaagaccagaccgcagcgttaaaggtggattccagaattgcccgcgctatgggcggaaattttggagatcataaattcgaaagggacggtgtatgggaattacgggttgattacggtcctggttacagggtttattattcaatcgaagatggcgaaataattcttctgctcattggagggaataaaaaaactcagacagccgatttagataaagccgttagttatctgcaagattttaaaaagaggtcaaaaaaatga

SEQ ID NO: 82466 - DNA, 375 bp, Citrobacter koseri
atgaaaagtgtttatgttgttggcaaaggtttaatcgttgccggtaataaaattaccatcgatggaaaagagcatgtctcggtagaaaatagtgaaaacattgttgtcactgatgattgtattaaaattggtaataaaacagtggtttttaaaggcaggagtattaaggtagaaatacatgggaatgtaaataaaatagtaaccgaaaatgctgatgtcagtattcatgggaatgctggggatgttgaaaccgtgagtggtgatgttgattgtcatcaggttaatggcgatataaccactgtaagcggtgatgttacttgtggagatgtttctggtgacgtaaccactgtcagcggagatataaacagaaaatga

SEQ ID NO: 82467 - DNA, 312 bp, Citrobacter koseri
atgatcacggaatcggatatgcttactgaagctaaaaaaatggcagtagagatgatgttctggcctgcttgtcctgtagatgatgattattgtttcgacgctataatgtatacatcagttattgacaggaagtttgaagatgaacatggggtatatcttcatcaggtttacaaagaactatgctcaacacctgaattaaaaaaacttctaaaaaagaaagcaataaaattgattgcttttaagtacgatattgatcttgattcagctaacaagattttaatgaaaaatatgctaaggaggattgaaaactga

SEQ ID NO: 82468 - DNA, 504 bp, Citrobacter koseri; identical to SEQ ID NO: 12974

SEQ ID NO: 82469 - DNA, 294 bp, Citrobacter koseri
atgactgagcatgatgctatctgcatttctgcacttcatcaaatttttagtgatgaagaacatttgagtgagcaacaaaaagacattattctgatgtacgcttatggctataccctgaatgaaattgctgatttcaaaggactaaagccttcaactgtcagaaaatatctcgattctgtaagagctgaactgggaggtgtctcgttggcagggatcagaacactggtactcattcggactaatgcccttctcgtgtcaagtctttccaggatcagtgagagggggaatttatga

SEQ ID NO: 82470 - DNA, 216 bp, Citrobacter koseri; identical to SEQ ID NO: 12971

SEQ ID NO: 82471 - DNA, 1095 bp, Citrobacter koseri
atggctcaggggtttttcgttaaatataattctaccgttatggattcggtagataaaatcagctccagttatcaaacacaatttgctaatgatattatgtcgttagcgacggtatcggttacgttatatgtactatggaaaggatatcaaatacttgccagtaaaactcagacgcccttgcaggatttagtatgggatctatcaaaatttgcaatcataatcatgtttataactaatgcggatgggtatttaactgcggctactgatgcgttgcaaggcatgaaagatggtttttctggaggggtgagtgtctggcaaactttagataacttatggaaaagtacgcaaaatcttggtgcggaaatatactctttagataaatcaacatatgttaaagatcaaggtgtagttggtcagtttttaatatggactggctcgcttattttaatggctgttagtgtggttgtttttttaacagcagatgtaacgatgaaactcctgattattacagcaccgatatttatcttttgtctcatgtttggttttattcggagcatgtttaataattggttacaatcgttattctccagtattctgacagttctatttgccagtttagtgattcggatagcaatggattttcaagggatgatcctttcccatgctattcgtgctgcacaaacagggaatgtaaatcttgtatctacaggtgctatgggctttatggctgggtttttgggggctttattggttcttatagctaaaggttttgctgtccagttagcaggtgcaggtgttgaaggtgctgttcagggcgcagccatgatggggctgggtgctgctggtatggctactggtaagtctctgatgcttggcggtcgtgctggtttaggttttggcttagggatggccggaagaacgggcatgaattctttatcagggaaagcagggaatctgatggggcgtggtgcgcgaacagccgctgaatgggcgggtgaaaagggatatcaggcgctggctccgacaggtgctttggggatgaaggcgagaagacttgcatccctggaaaaagcacgagcgaggaacgccgcatga

SEQ ID NO: 82472 - DNA, 225 bp, Citrobacter koseri
atgagcgaaatccgatccgacattaacaatattaaagaagtttattctgatgatgagttaaaacgtttgctggaagctgttaatcagaattgcccagccagaattgtgttgggtagtgtggagaaggggaaagaagtaccactcaagtggtgttttaggacaataccagagcgtatttcagttgaagaaatcaatgaggttaaaatttatccagagttattctga

SEQ ID NO: 82473 - DNA, 321 bp, Citrobacter koseri; identical to SEQ ID NO: 12394

SEQ ID NO: 82474 - DNA, 1929 bp, Citrobacter koseri
atgagccagagttcaaacaaaatattttggtggcttaaaatcctgctgctgattagcttgccgcttatctttttggcggtagcggcttggattggtggggctatattcatggccggtaatggatacgaggccaaagatgcgacacccctgacgctataccaatattggtactattacggtgatatacctaaaactaagttatggctgatggggtctttcgttggcggtttaattattaccgcgttgccttgcttgctgccgcttctgccgaagaaaaccccattgcatggtaacgctcgctgggctaacagtcgtgaaatccgcgaggctggcttattcagtgatgatggtattatcgtcggcgtaaaaaaaggctttatgggccttttcatgcagtaccttgtattttccggttctcaacacgttttgatggccgcgccaactcgttcaggcaagggggttagtatcgtagtccctaaccttctttcatggcgtgatagcgttgtagttctggatataaaacaggaaaactgggatataacttccggctttcgctctcgtcatggccaagactgttttttgttaaatcttgcgccaagggattaccgttcgcaccgctggaatccactcttttatatttctgacgatcccaattttcgcattaacgacattcagaaaattggccagatgttgtttcccaagattgagaatgaagcgccaatttggcaatcatcggcccgttctctttggttaggtatggtgctttacctcatcgagacggaagagctgccggtaacaatgggtgaagcccttcgccagttaaccatgggtgatgaacgtctggctgaaattgtcgaagccagacaagaatctgaaacccctttatcagatgaatgttacttagctctaaaagaatatttagacacgccagataaaacacgtggttctgtccgtaaaggttttacttcggcgttagaacttttctataacccggtgattgatgccgtaaccagcggtaatgactttgatttgcgtgaactgcgtaagcgccgcatgtctatctatgttggcattacaccagacgatttagaacgtttggccccgctgattaacttgtttttccagcaagtcatagacctgaacacgcgggagctgccggagcaaaatcccgaccttaaatatcaggtattgatgttaatggatgagttcacggccatgggcaaagttaacattctgtcaaaaggcattagctatgttgcgggttatggcttgcgaatgctgccaataattcaaagccccgcgcagttacgagaaacctatggccatgatgcagcggaaacatttattgataaccatgcgttacaaatagtttttgcgccaaagaatcttaaaatcgccaaagaagtttcagagtctcttggtactaaaacagtgaaagccagatcccgcagccgttctactattgggagggcaagcggttcagaaaataccagcgaaactggccgcgcgctgttaatgcctcaagaacttaaacagatggggaaaagcaaagaaattattctgttagaggattgccctccgatccaatgctctaaaattacttggtataaagaccccacctttgaagccagaggtaatggccgcgatggcgttaaattcccttccccggaagtgacaattattgacccggccaacaggccaaaaggtgaagtttcctttatgagcaaccgggtagaacaggctgaagagacaaaaaccgaagttgtggaacgtgctgttaccgttgctgatattgaaaatatcgacaagctgaatcttgatgattttagttgtgatttttcaaaggttgaaatccctaaaggggatattaccgatgatgcgatggacgacatagttaatcaatttttctctggcttagaagctgcttaa

SEQ ID NO: 82475 - DNA, 2736 bp, Citrobacter koseri
atgaatgaaccaaacttagcaactaagaacaccgtccttatcgtcagttttgaggaaaggaatgaagctaaaaaagcggctggcaagttagagaacggcgaaaacgctttaggcttcgatgaggaagcgaaacactggtttgctaaaccgggtgcagacctgagcaagttaagcaaatggctaccagatcagcataaaggtaatccagtgcaggataataatccggctgctgaatttggcgctacgttagctgaagcaggctttgaactggatggcctgccggtgatggatggtaaaaagcaccgagtaagaacggctgacgacaaaaaaggcgaaaagaccggggtttatgcgggctacttagacggcgttccggctgggtggtatcaggatcaccgaatccatgaccagcccgttaaatgggtatcgactggccagcaagttgacgccgaagcccaagcccatttacgtgctattgcggcccaaaaccgcattgatagagagaatgccttacaacgacagtatgcgcataacgcccggagatctggccaagtatataacgcgatgccggttgctgacggtagccaagaatatttggttaaaaagggtgtaaaggcattccccggcgttaaggctgataagaaaaaccgggtggttattccactggtcaacgaagaaggcgaagttcgtaccctgcaacgtatcagcgccaatgggttcaagtcgctgaagaagaacggccagaaaaccggtaatttttttgttgttggtggtgaactgaaaaacggcgagccggttctctatgccgaaggttactcaacggcggccagtattagcgaagccaccaatcgcccggtagtaatgaccgttgacgcgggaaacctgcctaaagttgccgacaagcttaaagataaatacccggatagcttacatattgtgcttggcgatgacgaccgcaaaaatgccgttaacaaagggatggccaaagctgaagaagcggccactatcgcaaatggtgttttcaccgtaccggcgtttaccgctgaagaaaaagaacgcggtttaactgactttaacgaccttcaccaatcacgcgggcttgatgccgttcgcgatcaggttgaaggaatcattactgaacatactcataaggctgaaacaatggctgataaagaacatgaggcaataaatacaggcccggtgattactgaaaattttgaaagggaaatggacgctgcccttaatgtgaatcattcctctatagatttagagccgtatcaatctgaagaggatgagtatgcggagtatatggatcagtattacgctgaacaaaacacctcaccagctcctgtggccactgccgaacagaacgccgagccaactcctgtgaccgctgccgaacagaacaccgcgccagctcctgtagccgctgccgaacagaacgatgatgtagaaaacagcatcgagccacatatagaacaggaaaaggcccaaacggctgatgatgatgtaagagcatggttatcatcatcacgtgtttctactgcggatatgttagctgaagacgatgaacgcgagggccgtaaacgcgaagagttcaagcaagtagagcctgacgctgaagagccagtttttaaacgccagccgcaagatcaggattatttcgaagacagctcttataaacctgtagtgccagatagagtggccaagtcttatattgaggttgaaggtaaatattatttccaaaatcgcccggactcactggcctttgtggacaaaggcgcgaagcttcaaaccaaactgagcaatagccaagtagccggttccatgattgatattgctgaagcacgtggctggactgagatccaagtaaaaggtactgaagattttcggcgtgaagcatggttacaggctacggccagaggactaaccgcccatggctacaagccaaaagaagaggatttagcacggctgaaaaaagtagccggtgagcgcaacattaacgaagttgaagcgcgtgaagttgctgataacgtgaaaacgtcaccttctgccccttccggtacaacgtcaaaaaatcaatccgaagcccctacatccaaaaccggcaccactgagtcaagcagtacgacgcaaggcaaaaatgagggtgctaaagttgaagctgaagaaaaggttaataagctggccggtaagttggtagagcatggcgcggccccttatgaacataagaaagacaacaaagataattactatgtaacgctggaaaacgccgatggtaagcaaagcacaacatggggtgttgatttacaacgtgccatggccgagagtgaagctcaaccgggtgatcatgttgagttagaaaaccttggccgcaaagctgttaccgttgaaaaagatgttaaagacgaaacgggcaaagtagtcaaaaaggaaactatcaatacgttccgtaatagctggcaggttaaagctgatgccattcgcgatcaggaacgcccagcgcgggaaatcgttaaagaacatcctgatttagtaaacgaaattacagcggttaaactggctgagaaagtatctcaatcaatgaacgctgacgacaaagaacgctttatgagccgcgtccgtgacaaactagcggataaagtggccagtggcgaaaaagggccagaactgaaaatcaaagaggttcaaacggtcgataacccacgggttaaagacaccgaactggaacgctga

SEQ ID NO: 82476 - DNA, 153 bp, Citrobacter koseri; identical to SEQ ID NO: 40456

SEQ ID NO: 82477 - DNA, 1158 bp, Citrobacter koseri
atggccagaggtgacgacaaagagaagaaaccattctatgaagaaattgctgatcgtctgatcaaacagcttgaggaaggaaccgcgccatggcaaaaaccatgggaaccgggttcaagcagaatgccgcataacccggttagcggtactcgttacaagggagccaacgccctatggctggctatgcaacagcgtacagatccccgctggatgacgtataagcaagcccaaagcgtgaatgcgcaggttcaaaagggcgaaaaaggtacgttggttcaatactggaagtttaccgacacaatccccaagctcgacgataaagggaaaccggtactggatgataacggtaagaaaaaaatgattaccgtgaaacttgaacgcccaaaagtcttttcagcagtggtatttaacgcggaacagattcaaggcttacctccgttagaagttaaggcaacaaaacccgattgggaacgccatgaacgagccgaaaatatcttgcaggccatgagcgtacctatcaagcatgatcaagctgatggcgcattttaccgcccttctacagattcgatacacctcccggaacgtagccaattccccagcgccgataattactatgccactgcattgcatgaagctggccattcaactggacacaaaagccgtctggatagagatttaaccgggcgatttggttccgagtcctatgcaaaagaagaactgagagctgaaatagcctctttgatgattggcgatgaattgcaaataggccatgaccccggacaacacgccgcttacgttaaaagctgggtgaaggttctaaaggatgatcccaaagaaatactgagggcagcaaaagacgctgaagctattagttcctaccttttgagccatgagaaagaaaagacgcaggaagcccctcaaaacgcaccagaaagcgatacagccccaaaagaggggaataatagcgcattgcctttaaagctcgctgagaagcttgcagagcgttttaacaacgcagaagatcgggctaaattcatggaaaaaatacagtccagacttacccacgaaaaaccagatacggaaataaaaataaaggaaactaatacggttgtagtaagcaaaaaaggtctaaaacaagatacggatttagagcgttaa

SEQ ID NO: 82478 - DNA, 987 bp, Citrobacter koseri
atggccgttgaaagcttatcaaaactccttgagggtaaagtaaagactaaatccaacaaaactacagacctgaaaggcaaggctagtcgaatagctaatcgtgcctctgaagttatggttaaagtgagtggcaacgcaaaaggcccagctcatgttaaagcccatttagattacatcagccgaaatggaaagctggaacttgaaaatgaacgcggtgaaatcttgaagggaaaggacgacgttaaagccgttcataaggaatggactcaggatcaaggtaagcgacgtgccaacacacgcgatacaactaacgtagtgctgtccatgccgaaaggaacggaagctaaggccgtcaaagaatcggctagagcatttgcaaaaaaacaatttggtgagaactaccaatatgtttttgcacttcatgaagacgttgatcacccgcatgttcatatcagtataaaaaccttgggcttcgatggcagacgcttacatgtgaaaaaaggcgatcctcaaatatggcgtgaaggttttgctaaagagcttcgcgctagaggggttgaagctgaagcaacaccacgcgctacacgtggcgtagttaagaaaggtattgatcaggcgattcttcatattcgcaaacggggattaaccccggaagtcgataaagccaaaatcaaagagatcgtagaagagtttaaagatacgagggccggaaagcctgcaaaagcgaaaccgtgggaaaagaaaatacagacaaggcagcaggaagttagaaaagggtggctatcggcggcgcaggaacttaaccagagttcagaaccgggcgataaaaagcttgccgctgatgttgtgagttttgttaatgccatgcctcctatggctacggaacggcatgaaatggccaaagtagttagtcaaaaattagcaaaccagcagcccggtaaaaagcaaaactcaactggcagagataacgatcaggaagaacgataa

SEQ ID NO: 82479 - DNA, 516 bp, Citrobacter koseri
atgccgaggatcgttaagagagttacgccggaattaaaagagaagtggcaaaccttttgtcatgagcgtggtgttagtgaatccgatatgttggggctgttgctcgaaaaggtaacggcgggaatagtgcctaatgaagctaaagggttagaagaaccacgttcagataaagtaacgatacgtttgtcaccgaaagatattcacagcatgacagaacgcgctaaggctgaagggtttcccagcagaaccacatggcttactaatttagtgttggcaaccttgagcaaagaaccggtattaactgacgccgaagttaatgctttgcggggttccaatcgtgagctggccgcgataggtagaaacctgaaccagatagccagagcgttgaatgtagagtttcgtgatagcgataagctgaacaaggaattaatagatcggctgcttgaacagatagatggccatcgagacaaggtatctaatcttattgatagaaacatgaatcgttggggaggttaa

SEQ ID NO: 82480 - DNA, 717 bp, Citrobacter koseri
atgaaacctacacaacagacttacgaagaattgcaggttgcttatgaccatttcaatgaagcactttttgatggttcacttcccccctgcctgatcactctccagcgggaaaagaaaacatatggctatttctctgccgaaaggtttgttcacgccaatggaacccggacggatgaaatagcaatgaaccccgcctattttgccgtatgcccgccagaagaaattatgcaaacgctagtccatgaaatggcccatctctggcaataccattttggtaaacccggacgccgtggataccacaataaagagtgggctgacaaaatggagtctatcggtttaatgccatcctctacggggaaacccggcggtgccagaacaggtgatagcatggccgactatgctattgaaggtggccagttcatggatgaatacaacaagcttatgcaggatgattttcgtatttcatggatggatagatttccagcaagggatcgccttcttgaagccattgcatctggcaatgctgaccagttcgccggtgacttagaagccatggggattgaagttggtgaagatggagagttaacgataaagaacgagaataaatcaaacaggattaaatacacctgctctatgtgcgaaacaaatatttggggaaagcctgacttaaatgtgatgtgtggagactgtaacgtagcctttgaagtcgcacactga

SEQ ID NO: 82481 - DNA, 180 bp, Citrobacter koseri
atgaacaatgataaagctaaacaagctaacactggacacagttttactttagcaaaagctaaaactggaatgcagatcaacccggagctattaaagcagtttgaggctatatcagcggacgctggtaaagcgatattagagaattgcactactcgtattgaattgaaacaacaaccttaa

SEQ ID NO: 82482 - DNA, 240 bp, Citrobacter koseri
atgaaaaatcgcatagtgctaatcagcggcgttatcgccgctttagtcctgattctttttctggcgtatccctacctgaaaaacagccaatcattcttggctgtagtagctatttgcgtcacgtttgcagtattggcattggctataccatccaacttatttagttggctgcgaggaaagagagataagcccggattcatcaaaagcacttttataggcattttcaggagagcgaagtaa

SEQ ID NO: 82483 - DNA, 1125 bp, Citrobacter koseri
atgagcgccaaaaagggattggatttaagcgggctggataacttttcagctttgatgggaggcgacccggcccctactcaatcagcggcttcaacagacgtacctgaaggtttcgcaggaaaccttatccgtgtgcctctgaaaaaaattcataaggatgcagataacgccagaaagaatatcgacccgcaggaactccgtgagctggccgattcaatgaagtctgtaaatccggcaaccggaaaaccacgcggtaacaaaaacccggtaagcctgaagcctcatccagatataccgggggaatatattcttaatgccggtgagcgccgttgtgctgctgctgaacttgccgagttacctgatgttctggcgttcattgatgaggacgcggacgaatttgataatgcagtcgataacattcagcgcgtagctctttcaccaattgaaaccgctacgtttatccagcgcaggattgagaaaggcgataaaaaaagtgccattgcggcccgtttgggtaagccagcatcgtttgtatcagaccatattattttctttgatatggctgattgtatccgcgatatgtacgacagcggccgtgttgtctccatgcaggcaatggccctgttacatcgcgcctataaaaaacatgctgaagaagtagaggctttttgttccgaagcacaagacgagttaactactgctgatgtgcgggctttttgtgattcactcaaagagccggaatctaaagccgtgaatacgtcaggcgacaatgaagaaggtcaggagctgccgagcgatgccaacgcatggatcggagggagtgccgatagcgacgaactggagaagggcgaagagcaacaacctttagttattgacggcgaaccaatcagcggtggcccatcttctgatttggaagatgaagccagcaaaatcattaccgcagatgaggcaagcgacaagattaaaaaggcgatcgtccagattcaatatgatgaacgcccagcgcgattactcacgaaccgccgagcttcttatgggttcggttggattaaatacgatgatgatggcagtgaagacgagattgatctaaaggacgttagcgttgttgccattgttgaaggttga

SEQ ID NO: 82484 - DNA, 753 bp, Citrobacter koseri
atgaatatcataacagtgacgaatcagaagggcggggtaggtaaatctacaatcgccgtacatcttgctatggcccttcaggaacgaggcgacagagtgctgtttgttgaacttgatccgcagggtaacgccagtaagactttagaaaaggctggaggtgtggcggcacttcaggcaagccaactttttgaagaacaaccgttaactattacgccaaatgaaggcattacgttaattaatgctgatgcaaagatggccgatatagaacgcgccccgttaacggttatgtcaacctttaaagaccaccttaccgcgctggcgtctcagtttgaccattgtgttattgatacccctcctacccttggtttgcgtatgtcagcggcgcttatcgttgcaaatcatgtgttgtcgccaatagagctggaagaatattccattgatggaattacaaaaatgctgcaaaccatttttggtgttaagtcgaaatggaatcctgatctgaacttccttggcatgttacctaatcgctttaattcccgttctgaagaccagaaaaaaacattaatgaatctggtagagaactacgctcatctgttaattcgagcgcggatcggcattcgttcatcaattccagaagccctttccgaaggtattccggtatggcagttaaagaaaacatctgcgcgtgaggcagggaaagaatttcaggaagcttttaagatcatttttgaaaaaatgggggttgcaaaatga

SEQ ID NO: 82485 - DNA, 363 bp, Citrobacter koseri
atgaaaaaacgactaacgcaggccgaatttgaacatgccatttctaacctgtcacgcgcactaaagccagcaaatgtagaaattgttaaagcaattttggttgatggcagaaagcaaaatgacatggtgattgaaacggggttaagccgtacagcaatagcggcaatgacgaagaaagttagagaagcgcacaagttacatggcaaaccaccggcaggctgggaacgtatcgagctatgtataccatcatcaatggttcctatgttaagggctatggaagatgaggcgcgtaaacaggcaaacgctaagggtgaaatgaatgaatatcataacagtgacgaatcagaagggcggggtaggtaa

SEQ ID NO: 82486 - DNA, 510 bp, Citrobacter koseri
atgctgaagcgttggaatattattttcctagttttatttttaccgttgcaatatgcaattgctgatattcatggcgaaataatacgaattatcgacggtgatacagttgatgttttagttaataaaacgccaataagggtgagattagttgatattgatgcccctgaaagcaagcaacctttcgggcagaaatcccgccaatttttggctgatatgatctttcgccaacaagtaaccatcgttgaaaagggaaaggatcgctataaccgcgtgttaggtacagtttttaaggaagataacaccaacgtaaatgaatctcaggttagtaacggtatggcgtgggcctacagataccgtgaacaggcgactaatccagccatgctagaccttgaacaggacgctaggcaaaaacgccttggcctatggtctgatccgcaatcaagcattgtagagccttggaaatggcggcgagagaacaataaatttcgtgcgcacgaaaccgcaaaatga

SEQ ID NO: 82487 - DNA, 150 bp, Citrobacter koseri
atgaacaatgatattttagcactggccgagatgattaaaaaggcaatagatagccacacctcctttaagcttcctcccctatccgggagcgagtttaaagcggtgatggaagcattacgcgagcagaacgcaggctttcaggccgtctaa

SEQ ID NO: 82488 - DNA, 222 bp, Citrobacter koseri
atgaaaaacagtgattttgaagaagcccatgaaattaacaacgctatcgacgacatgattagcgagcggcaatttgtggatacctgccagtacgacgaccgcgaagaaacttttcggctcgtatctttaggtagtgaatttaagaaggctggaaaagattggtatcgctgggctaaagctacggctatccgtctttgggaaagtggccacatcgttaaatga

SEQ ID NO: 82489 - DNA, 552 bp, Citrobacter koseri
atggtaagtacacatcagtataatcgtaatatttatgtagctatgcgtgcaggtgcgattgtacttgctggctgttttgtgtttattgcaggtgtagcagctttctacagcgcaaaaggcgtattttataatccaatttttcattggccagcttggatatttaataaagttttaggtaaaacaattatcccatcatcgacggttgaatttacacgcttaaataatattcctgatttttttagccttggcgatatgattattggcggcatatatcttatagctgctactggttttactttttatctagcgtgtatgttaggcggttacatttttgggtttgttagcgattattgtcttacttataagcttggcgttgaaggagcgcgggcttataaaaaagaacagatggttaaaatgagacttgatagagagaaaaagaaagctgtatcagagttggaatcagcccagcacgagcattggttgcaatggaagaaattctacaaaagcgatttaagttatgatgagtggaagcagaagattttaaataagtaa

SEQ ID NO: 82490 - DNA, 285 bp, Citrobacter koseri
atgaaagttaaaggtatcccttatgctgaagtaaaggctaaagccttacagaatcccgatgtaatggccgcctatcttgcagagaaaaaagaggaggaattacaggagcttttggctgatcttcgccgcaaagctggtatcaatagtacccaagttgctgaacgtatggggattacccagccagcagtgagtaaattagaaaagaacgccagtaaagccagtgtttcaacccttgagcgttacgcggcggcatgtggtgccagcatcaaaattgtaatgggctaa

SEQ ID NO: 82491 - DNA, 321 bp, Citrobacter koseri
gtgtttgaactgatttttcacccggaagcacaacaggaaattttggatcttgatagtccaatgcaaggtaaagcgtttgctgcactggataaacttgaggcccaaggtaatcagttgcgttatccacatacggatattattcaggatggcctttttgagttacgagcgggtaaaaaagatattacacgtaccttttttgcttttgctaaagggaagaagatatatattttgcgcacgtttgttaaaaagacacctaggacaccaccggcagagatccaattagcattaaagagactggaggaattgacagatgaaagttaa

SEQ ID NO: 82492 - DNA, 303 bp, Citrobacter koseri
atggaactggatacttctcgtttgagcgatttgcagtatcgattttttgaggttgttagtcagtatcacccgcgtttactcggtgtatgggactggcaaaatagaagcgttgacgtagcaacgtttgagaaggctgtaaaagccatgagtaatggtgaacagatctttgcgcggttcttattgtctttatggtttggagaagacaacaacacgaagtttagttttatggatgccgccaatattcttgataatagtaaacgacaatttattgctgaatggttgatcgatccatggtggccatag

SEQ ID NO: 82493 - DNA, 1353 bp, Citrobacter koseri
gtggctacatcacaactggcgctttttaatccagccgacgaagcggagacttatcacaattccgggcggcatggtttcttttctgtattggctcagtggccaacgggtaaacgccaatcttcttacccattaagtgagatggccaccgttcttagcatggtcgatacctcacgcgatacatggataacccaagctgaatttatgcgtcctaaccggcgtgtagtaaacctcttacgtttggggttgctttttgtcgatatagatacctacaagatgagttgggcgcagggtagaacacctgaagctttggccgctgcaatcaactatttctgtcaacaagaaggcataccagaaccctcctttatggtctattccgggcgtggtattcaggctaaatggctacttgaaggaaccttgccacgtgccgcgctaccgcgctggaatgcttgccaaaagcatttagtatctaaactttcctcgctaggggctgatcccgcagctaaagacgccagccgggttttacgattggttaatacggttaacactaagagcggcaatatttgccgtgtagtaagcgttctagaacgtgatggcgcaccaatccgttataacttcgagtaccttgctgaaatgttattgccggtggctcgctgggatattgaaaagcaacgccagacaaaagcagaacagaaacttcaattgctgcccggaggccgacaaagcaacctcagaggttttagcggtcgtcagcttgcatgggataggcttgaagatttgcgcaagctggacgagctgcgcggcgggttagcggaaggggaaaggatgcgtcatttattttggcgtattaattttttgctgttgtccggggcgacaaattcaacgcagatgtatcacgaagcggccgcactggccacggagatctcccctgcatggtcttaccgttcacaagagttaatgacgctgtacagcaaagcaaagcagtatgaagccggtgagaaggtatctttcgggggcaaggaattttcaccactctacacgccaaaaaatgacactctaatcaacctgtttcaaattacagatgaagagcaacgccagctaaaaactatcatttctaaaaatgaagcgttagagcgtagacgcgcacgagacagaaagcgtgacgaggaacgccgcagagctgccggagccgttgagcgtgatgtttacgaagctaattcactgactaaacagaaaccgtgggaagcgttaggaatgagccgcgccaaatggtacagattgggcaaaccatcaggcagtgagacaactccctcccctattacttgtcatggccaaatggccgctaaatcagcctag

SEQ ID NO: 82494 - DNA, 315 bp, Citrobacter koseri
atgaaccagacacaagtattaagaccggcaacgccgggtgacgttctgctttctcagttcttggaaccgaacagaattagccaaacggcgttggccacctataccggatggacgagaaagcacgttaatcagctctgtcatggaaaagtggccataacaatagattccgcgctcatccttgcaaaagtctttggtaacaaccctgatttttggctggatttgcagaagaaagtcgatttatgggatgcactgcattcagaagatcgccgcagcagaatagataaggcgcgcccttttcaattactggcggcctaa

SEQ ID NO: 82495 - DNA, 261 bp, Citrobacter koseri
atgataaattaccgactcaaacccattaggacgcaagcaaagctttctcaggagaagctgggcgttcttgcgggcctagacgaaaccacggccagatcgcgtatatctcagtacgaaaccggcacttacagacctacctttgaaatggtgtgctcaatttctgccatcctcgatgtaccagagtgctacttctatattgttgatgatgattttgccgaagaggttttgcagctttaccgaagtaaaaaacgccagaaataa

SEQ ID NO: 82496 - DNA, 474 bp, Citrobacter koseri
atgatgaagcccggaaccatggaacggtcgctaaaaataacgagacagagaacaacgccaataaaagccatagcagatgtggcaatcaacaacaggcgaactggcaaccgtagccacaacataatgagaaagcttagggagcgcaaaacgcttcctaagccttttgccgccgccccagcgatccacttagctttcgtaacgccactatcatcatcattagaagctacacccccacccggacgaattggaacaacgttacttgtcggactccgggttttgttgcttaaccctttgaatgttctcatcacaatcccctttttgtatacatcccatacgctaatgataggccaaaatggcctacccatcaagaaatattcgactatttttcgtgcatacgaaggaaaatcaactcttccattatcatcaatatggtgtatattgattatcgaaagatgcaattttgataaaaaatga

SEQ ID NO: 82497 - DNA, 309 bp, Citrobacter koseri; identical to SEQ ID NO: 40473

SEQ ID NO: 82498 - DNA, 747 bp, Citrobacter koseri
atggaactcttttcaatattggcaacctgcgccgctttaacttttggtacaggtagcccagcagaacaggcttaccctgttagtgagcaagaatgtaaatcagcagcggcgatgtatcgtgagcagttgcaaaaagtacagctcaccgatcaggacagggatgctattgcacgtgttgccatagccgaagcggccaatcaaggtgattcgggtttagctggcgttgtgtatacgattattaaccggcgtcttagcggtcagtttggccagactgtgacggacgtagtaaacagccctaagcaatttgagccagttaccaaagttggtggtgactggaaaaagttaccttctgttaccgtttcacaatatacgcaagtacagaccatcatcaatttggcgttagaaggtcacttgcctgatattaccaatggtgggttatttttccagaatcccgcaattgtagctgacagagaaaaagcaggaaaagtatctaaaggtttaactaatttcggtggttccgcaccatcagcgatcattaaagatcatgccttctacgccagtattaataaaggtggcccgtctaactcttccccggttcaattaactgcttccgctgtgcctgagcctaaaaaatgggatgtatacggaactgcaaagttccaaaaaaatagtaacgccgaatggaatgtattttctaaaaatacgccatccaaaagcgtttatcaaaatgaaggggtgcagccatga

SEQ ID NO: 82499 - DNA, 1983 bp, Citrobacter koseri
atgaaattaatgattgtggaatctccggggaaagttaagaaaatacgcgagatccttggcgatggttggaaagtcgccgccagtgttggccatgtcagagatttaccagaaaaagatattggagttgccgcacctgacttcaaaccaacgtatgtggccactgagcgcggcaaagaggttttggccaagcttaaacaggacgttcagcatagtgatgctgttttcctcgcaactgacttagaccgggaaggagaagccattgcatggcatctgaaacaggcgctacggcttgagaacccgcagcgggtaacgttcgctgaaataacccctcgcgctatcaaagccgctctggcgtcaccaagggcaattaatatccctatggtagcctcacaagaagggcgaagagtccttgatcgccttgttggttacatggtttcgccgcgcctgtcagaaatgagtgggcgacaagggttatccgctggccgggttcaaagccccgccgttcgtattattcttgagcgtgaacgtgcaattcaaaactttaagcccacctcccattttggcgtaagacttaattttgcaggagattggtttgctgaatgggatgtaaaacctttcttggccgaaggtagcgaatatttcatggatgaaggctttgctaaaaaaatagccgccatccgggaagttgacgttatttcttatgaagagaaaaacgcatcaaaagcacctcctgcgccttttatcacttcaacattacagcaggcggcatctaataaattaaagatgaaaccaaaagcaacaatgacaaccgcgcaaaaattatatgagcaaggccatataacttatatgcgtaccgataacccaaacctttctgatgatgctctggttgaaatataccaactctgcaaagcaaagggcttacctatggcgtctaaacctcgcacatggaaagcaaaaggtgatgcacaagaagcgcatgaagctatacgaccatcacattttgacgttgaagaagcagggagtacgccagaagaaaaagctctctatcgcctgatatgggatcgcgctgttgcctgtcaattagaatcagctcgctatgccgttcgcgtggcccgcttccgggctactgacagtagcggcgaaaaaccagttgagtttgaggctgaaggccgaacgctgacgtatgccggatggacaacgttgtttaaagacgataccgaagccgatgatggcaaaaaggaagagaaacctaagaacccgatcccctctttgcaacgtggccagcaccttaccgctgaaagtgggaaggtattaagtaagacaacccgcgcccccagccgctttactgaggcgtcacttatcgcagaactggaaaggttaggcattgggcgaccaagtacctacgcggcgatcatggaaaacatcatgcgccgtggttacgtcaaatcggatagcgcaaacaaatatcttttgcctactgaaaccggtgcattagttattgatgctttggttaaaggcggttttagctttatcgagtacgactttacacgcgcgatggagggcgagctggataaagtcgcccatggccagacatcttacaaaaacgttgttggttctgtttatgaacgtctggaatcagaacttagccacctgaaaattgacgttgcacctcaatacccctgtccaaattgcggcaaggctcttttccgcaaaaaaggggctaccggcttcttttggggctgctctggttatccagattgctctaccacgttaccagatacagcagggaaaccggggaaaccaaagcccaaaccagaagcttcaggctttaagtgtcctgactgtggaaagcctcttatccggcgtaaaaaaccagccaccggcggcaaaaaagggtatgactttttcggctgttctggctatcccggttgctcatcaaaatttgatgctgtgaacggaaagccaaaattcgagaaaaagtaa

SEQ ID NO: 82500 - DNA, 255 bp, Citrobacter koseri; identical to SEQ ID NO: 40476

SEQ ID NO: 82501 - DNA, 309 bp, Citrobacter koseri
atggcaaatgtaaaaaccttcacccgtcagattgcctctaccacttggctaatgttgggtttgatgatgttaccgggtttcgctcacgcagccggtggcgatccaattaaccaagggcttcagtggttaattgatctcttaacgtcaggcattgcccgttcttgcgcaatcttagcgatcgccgttttgggttacttagcatgggccggacgtctccaagcccgtaatgccgggtttgctatcggcggtatcgtgctggtatttggtgcggcgtctattgccgacgcaatcattgctgtagtccagtaa

SEQ ID NO: 82502 - DNA, 252 bp, Citrobacter koseri
atgctatttgcagcgagaaaaatcactccagttgtagcgatacagaaaattattgcctcgtatgttacgccccacacaagtgaggggcgtgtagcaccggcaaagagaacatcttttcctgatgccatgacgctctccttactggactacagcaatgattgcgtcggcaatagacgccgcaccaaataccagcacgataccgccgatagcaaacccggcattacgggcttggagacgtccggcccatgctaa

SEQ ID NO: 82503 - DNA, 2451 bp, Citrobacter koseri
atgagtaatgcaactgcgacaaaatcacgccaatgggtgaatgaaaactctgttgctgagtttatcccttattctgttcaccttgacgaaaacactattaaaactaccagtggctattatcttcaggtaattaagattgatggccgcgcccatgaaagcgcagatccagaagatgtgattaactggaaagaacaacttaatgggctgctgaaaaatatagcctcaccaaatatatctctttggacaaacattattcgccgtgaagaaaatacatttcccggcggggagtttgaagaaggtagctttgctgaacagctaaataacaaatacaaaaatcatgttggtaaaaataacatgatggtaaacgagctgtatcttacagttctttatcgcccttcaggtattcccggcgttaatctccttcagcgttttgaaaaaaatgttgaatctattaaacgtatacaggctgaagctattgaagggttacacgaagtggttaacaccgtcaccagtagcctaaaacattatggggcgcgggttttagggtgttatgacagaaagggtataaaaaactctgaagtattagagtttttatcttacctgataaatcttgagtggattcctcgcgctttacctcgcaaggtactctctgaagcgttgccttttgatcgtccgttctttggtgaagatgcctttgaagttaggggcgtcactgaaagcaccgtgggcgcagtcctgagcattggtgaatatccagaaggcaccgaagcgggcttaatgaatgcgtttttatccgcgccattcccgttgattttgtcgcagtcgttcaactttttaagtaagccggttgcaactgaattattaggcagaacacaacgccgaatgaaaaacgccggggacttttccaaaacgcaaatggaagagatcgacgacgcgcttgatgatttaacttcaggccgtcttgtattcggtgaacatcatttagccctaacgattctggctaaagatgcacgaagcctgaagaaaaatctttctgacgctaaagccgagctggtcgattgcaacatgatcgtgtcacgtgaagattgggctatagagtctgctttctggtctatgttgcccggaaactttaagtaccgggcaaggccagcccccataagttcacgtaattttgcggggttttcctcatttcacaactacccaacaggccgcagaactggcaaccagtgggggccatcggtaacgctacttaaaactacttctggcgctccctattatttcaatttccatagtgagttaagcgccgagaaggccagaaaactagcgcaactggaagcggaaaagggggcgggtagcattcaggaaacgaaagaggaacaaaaagccctagggaatacgttaattatcgggccttcaggctccggtaaaaccgtaacgcaaggtttcttgatggctcaaagtaagaaatttaaccctactcaaattatcttcgataaagatcgtgggttagaaatctatgtaagagcagaaggcggcgtttatttgccttttaagaatggtgcccgtactggctgtaacccgttccagatggagccttgcgaagatacttatcagctccttgagcagatagttaaaaaatgtgccggtggttccttcacgaccgttcaggatactgacattagtaataccgttcgcggggttatgcgcctaccgaaacacttacgccggatctctgcctgccttgactttatggacccaacagatccagaaggtgtgggcgctcgtttggctaagtggtgtggtaatggaaccttagcttgggtattcgataacgaaacagacgacattgattttagtaataacacgatgtttggttttgacgttacggactttcttgataacgccgagatcagaacgccattaattatgtatttgttccatcgcatttctcaaattattgatggccgtcgaatgatgattttcatggatgagttctggaaattattgttggatgaatattttgaagactttgcacaaaacggcctgaaaaccatccgtaaattgaacgggttaatggtgtttggcactcaatcagctaaagacgttcttaaatccgctattgggtacagcatcattgaacagtgcgcaacgatggtctttatgcctaaccctaaagctgattgggatgattacgttaaaggcttcaaacttacagaacgtgagtaccagttaatcaaaaccgacatggcccccggctctcatcagttccttattaagcatggccataattcagtgatcgccaagctcgaccttgcagggtttagcgacgaactagccgttatctctggaacggctgacaacgtggaactattggaacgcatcatgcaacaagtaggggatgatcctaaagtctggttgccagagttccataaacagcgcgtagctgcctga

SEQ ID NO: 82504 - DNA, 645 bp, Citrobacter koseri
atgaaactgaaaaaattagcgttagtgctggccattgcaggaagccttaatgccgttagctatgctggcgttcctgtgactgtagtagctgacccgcaagccttggccagccacttagaagatatggctaagttcatcgagcaaattgaccagttaaaggcgcaatttgaacagcaggttaagcagtacaaatctatgaccggcgcacgtggtttagctgacgttatcaactctcaatatgacactgacgcactgagtggaattaatacagacagcattttacgcaatagcggtattaacgcggccagtgattacaagcttcctgaagacgtggccgacctttacgacacggcggcaaaaaacgccgccacttatgctggccaagcctcccgttcgcttgagcaagcacaatcccgtttcactgagctatcaggtttagtacgccgggtaaatacggcaaccgaccccaaagaagtgatggacttaaacgcgcggattggggccgaacaagcctttttacaaaatgaagttggtaagttgcaggttcttcagcaaacagcgcaggcaaacgatgcgttgtaccaacagaaggttaaacagatggccgttcaatcatctggctcactgcgtaatgtgaactggtag

SEQ ID NO: 82505 - DNA, 249 bp, Citrobacter koseri; identical to SEQ ID NO: 40481

SEQ ID NO: 82506 - DNA, 1014 bp, Citrobacter koseri
atgggtacgggaacaaacttatttgtccgtatttttgccaacgttgactcggcgttatcaacctacattaccgatacggtcggtaatgtaattggttatgcctcgccactgttcaccagcatgatgatcgtctggattgccatgtggggcattctgatgatgttcgccaaagttgatgaaccggtacgcgatggcgtctttcgcatcattcgtattggtgggattgtcgcgctgggcttaacggtcggtacttatatggatgtggtcgttaacgtcctacaaaaaggcccggaacacatttcagcggtggtttccggtacaacgggaacaacagccgacacgctggatgcgctctttaccaaaatattcaatgtggccaaagctgcatgggataagggcggggtcatgaacggaaacttcggtttatatctgatagccctgattgtgctggttgttgggtgtggattgacgttgtttgtggcgttcttggtcttgttgtcaaagttcatgataaccatcctgctagggattgggccactgttcatcattgcactgctatttaacaccacgcagcgtttctttgaagcttggttagcgatggtatgcaactttggcattctgctgattctttcggcatcggtaggttcgctgatgatctcgttaggtgacacctacatttcaaagatggccccaacagaaagcgcagcggccaatatggctaacttaggggatgcggcgatgttatgccttgtatttgcgctttgcattttagtggtaaggcaagttccttctatcgcttcagcattaggcggcggtgtggccatggccacgcaaggcgcgttcggctctgccatgaatgcgttacggccaacagcaatgaaacgcggtatgcaaaacgttaaccgagaagttaagacgactcaacgcgccctgacttcccccgttcgcggtggtcaagcggcttatgcctcctatcaaaaacgctttggtggtaattcagtcgcacaaggatag

SEQ ID NO: 82507 - DNA, 219 bp, Citrobacter koseri; identical to SEQ ID NO: 40483

SEQ ID NO: 82508 - DNA, 759 bp, Citrobacter koseri
atggccaataaaaaagcagccccagccaaagaaaaaaaagtaaccgacaaggattactttgatgaggctaaaagctgggatgaatctgagattgtcagagaaaagaaatcagcccgtagagcttggtcggcattttgggctatgactggtgttgtaattgttcaggcgattgcaatttctacaatgatgcctctaaaaacaattgaaaattcaattgttcgcgttaatgacaccaccggcgaaactgaggtgatcagcaacctgaaaaacatggatgagactaccgaacaggtgatgagccgttactggttggctaagtatcttcgccaccgcgaagggtatcactggaacacccgcgaagatgatcgccttcaggttggcatgttgtcagacggggccattcagcaacagtacgctgattacaccaatcccaaagttaacccttacgcgccaatcaagatttatggtgaaaccactgaggttgatattaaggtcaatcccgccattacatacctaaacggtaaaggtggagtgaaaccagagaagggcgagaaggatcagttcggtgaaacggtgtatacagcgttagtacgctacacggctaccgtgaagaaagacggtgaaatgccggtaacaacccattgggccgctactgtctctttcgtctaccgtaaagagccaatcaaggtggatgatcgcctgataaacccggttggttttcaggttattagctaccgtaaagatcaggaagggggttaa

SEQ ID NO: 82509 - DNA, 822 bp, Citrobacter koseri
atgctttcgcttaataaaaccaccttatcggttcttctcgttctcggcattttttcttctacggcgtttgcgcttgaagttccaagaggcggcgcttatgacaaacgagtcaagttcatttcatacaaccatgagcaagttgttaaattgattggccattatggctattcaacagatattcaatttgcccccggcgagaacgtcaccaacatagcaatgggcgacccggacgcttgggaagttgcgccagtagaaaaccatatcttcattaagccaacaggcgaacaagccaccacaaacatgacggttttaactgaccggcgcgtatacacgtttgatttatccgctactggtaagaaaaccggcgatatgtattttcaggtaaatttccgttatccgcaggacgaagcggcgcggcgtgtagctgaagaagatgctcgcagactgaaagaacggatgaatgaaaaagcgcctaacgcttggacaaactggaactattgggtattcggttctcgtgaagtctccccttggcgtgcttatgatgatggccgttttacctacttcaagttttccggtaatacctcgatccccgctatctacattaaacatgctgatggctctgaaacacttctgaacccaacgatggattccgatcacccggataccatgattgttgaaaaagtggctcctaggtttgttttacgcaatggcaaatatattgccaacgtctacaacgaatctttcaaccctcatggattaatcaataccagtggcacaacgtcacccggcgttaagcgtgtaattaagggaggggcgcagtaa

SEQ ID NO: 82510 - DNA, 1188 bp, Citrobacter koseri
atggctaaagaccgcgacgacttagatacagaaatcgaacaggaagatgctgatcgtggtatgccttcgatttccaaaaacaggaaaaccggtaaagcctccggtattggtcagaaaatcgtagctgtaatcatagggattatcgttattctggcgttaatagcggtgaatggtggctttaaaggtagtgaagaagataaaccgcctaagctcactggtaacaccagtgtagccaaccggcttggcccgccgccttctttaccgccgccgccagctccaccaaagactgagacgccaaaagaagatcggatgttgaatacagggcaaatagccccgccgccgccgtcttcagcttcgggaactggtggcaatgggaagcatgaacagacaccagacgaacgcaagcgggcaagctctattctggcgtttggcagtatttctaaacctcaacagcccggacaaaaagcaggtaatggccagcccgttcaaatggccggtgaggtacaggagggtaatagctcactatctgaaactgaccgcgctgatagtctttctaaccggcttaaaggtactgaggttagcggtagcagggcaagcctgttagtagacagaagttactttatcacacaaggcactttccttaattgtgcgctggaaacggctattagtagtgatgttcccggaatgaccgcctgccgtttaactgatgatgtctacagtacagacaagaaagttttgctactggaaaagggttcaaaaattgttggccagtatcagggcggcataaagagaggacaggcgcggattttcgttctctggactcgtatagaaacgcctaaaggggtgttggtcaaactggattcaccgggtactgatgcccttggccgctctggtcttgatggcttcgttgatacgcacttttgggaacggttcggtagcgccattatgttgaccacggttgatggccttattacctacggggctaatagcgccaacaatggcagcaatggcaaccaatacaactttggtgataccgcgcaaacagcgcgagattcagcgagcattgcgctggaaaactcgatcaacataccgccaacgttaaccaaaaatcagggtgacaatatttctatctttgtagctcgcgatctcgacttcaggggggtgtatgaccttaaagcagcctactaa

SEQ ID NO: 82511 - DNA, 237 bp, Citrobacter koseri
atgtttaatcgccagcgtgaggaactctttaaagcgtctggcgttcttcagctcaataagttctcgctcaaagtcacgcagccctacagcgtccgttacgatgtgatcgaatgcaccatcacgctcgtaatcatccaacgttctgatcacgtcagagggtttacggatagtcaggctgtaacggtcgctcagtgtcgccggtggccgcacaatctggatacgttcgccgtagggtaa

SEQ ID NO: 82512 - DNA, 591 bp, Citrobacter koseri
atgatttctaaattctcatggggacgagccctcatagacaaagagatggggatccataaccatgatagggagtataaggcagcaagtatagtttggggagatattagctccgatctggggtttaatttcctattaaaaaataaatataaaagccttcatattaactttgccccggtagttgcatcagcggttaactcagcccaacaaacatccaatatagaaaatcttttcacaactgatctaattatcccaaactttgaagaactaacttgggatcaaattctggaattaagagaagacaaatatataaaggcgtttaggaaaaaatatttctccattgagatgaatgacaaaaacatcgatttagagcttaatttcgatttagattcagccttatgggatttggctttgcaaattaaacctaacattacaaaatccagcatggaagcagtattaagcaaccttccactcccttccgtcgtaaatccattcggaatttattatggggcaagagaaataataagaaattataaaaataaaagaaaccactcttgggtatatttcattcaatcggcgaaaaacaaaacgtaa

SEQ ID NO: 82513 - DNA, 843 bp, Citrobacter koseri; identical to SEQ ID NO: 14695

SEQ ID NO: 82514 - DNA, 294 bp, Citrobacter koseri
atggctgaacatacgtacgtctgcgaccggaaacccgatcaatgcggtaaggacagtgccgtcaggttcgctccgcgaacggtctggcaggaagcgcaagcgcagtcccgcgcaatatatcagaaagcacctcccgaaatacgggagggcttcggctattcagctaaggttgctctgttcaggttgctgagtgtagccttccatgccctgacgggcatcaaaaagccagcgccggaagttactcattctttcaaggttagctttgcttggttttttgccacgattaccacttaa

SEQ ID NO: 82515 - DNA, 180 bp, Citrobacter koseri
gtggcctgtgcgggtggtgttgagcgcattgtcctgggcgaaggtggctgcgcatcagttccatggcacgacggtaaccgcacccgcattgcagtggcgtatgtcggcgagaacgacattgaagccaacaccccttattacattaacgacgaaggccagttcgtcaaggttgaggaataa

SEQ ID NO: 82516 - DNA, 876 bp, Citrobacter koseri; identical to SEQ ID NO: 82351

SEQ ID NO: 82517 - DNA, 1236 bp, Citrobacter koseri; identical to SEQ ID NO: 82350

SEQ ID NO: 82518 - DNA, 549 bp, Citrobacter koseri
atgaaagttaaactgcaaaatgttcgtctttccttccctgaattattcgaagcaagtcaggttaacggccagggggatttcaaattccgtgcaaccttccttttaccgcccgaccacccgggtaataaagctattgagcaagctatcaagaaagtcgctacggacaaatggggagccaaagcggaggccatcctttcccaaattcgcggaaaccctatgcgcttcaactaccgcagcggcgatgagaaagcagattacgaagggtacgccggtaacatgttcatcagcgccagcaataaggcgcggccattggttattgaccgtgaccgttccccgcttactgctcaggacggtcgcccttactcaggctgctacgttaacgccaccgttaccattttcgcatatgagaataacggtaaaggtatcagtgcctctctcggtggtgttcagttcttcaaagatggcgatgcgttcagtggtggcggtgttgcctctcccgacgacttcgacgatatcagcgaaggcgctgacgccgaaacgctgatttaa

SEQ ID NO: 82519 - DNA, 2067 bp, Citrobacter koseri
atgtctgaaaccatactctggggcgacctggaaacctattgcgaagtaccgattaaaaacgggacacatgcctacgccgaaggcgtcgaagtgatgctgttcgcctgggccatcggcgacgagccggtgagcgtctgggatttaaccgccggtgagccaattccgggccgtctgcgtaaagccatcgcagaccccgacaccctgctttatttccataattctcacttcgaccgtacggtgctgcgccacactcacccccggctggcaccgccggttgagcgctggcgcgacacaatggtgcaggcgctggcgcacggcctccccggtgcgctgggggcactttgcgaagtgctgggcgttccacaggacaaggcgaaagataaagaaggtaaagcgcttattcagttattttgcaagccccgcccgaagaacagcaaactgcgccgcgcgaccagtaagacgcacccggaagaatggcggcgttttgtagcttacgctggccttgatatcgaggccatgcgcgaagtgcataagcgcctgccgaagtggaactacaagggcgcagagctggcgctatggcatcgtgaccagcagatcaacgaccgcggcgtttgcatggatgtgcagctcgcgcaggcagcgatcgaggcggtagaccttgagcaaaaacgcctggcgaaacgcacgcaggtaatgaccgacggcgaagtgcaggcggccacgcagcgcgatgcgctgattaagcacattgttgaatcctacggcgtggagttgccggacatgcaacgcagcacgctggatcgccgtatggcggatcctgatttaccgtcggcggtgaaagagttgctggctatccgcctacaggccagcaccaccagcaccagtaagtacaaatcgctgatgaagggtgtgagcagtgacggacgtctgcgcggcacgctacagttctgcggcgcatcgcgaaccgggcgctgggccgggcgattattccagccccagaacctgccccgcccttcgcttgagcaggagcagatagacgagggcatcgaagcgctgaaagccggatgcgccgatctgctgttcgataacatcatggagctgaccagctcagcgctgcgtggctgcatcatggcaccggaaggcaaaaagctggtggttagcgacctgtcgaacattgaaggccgtaagctggcatggcttgctggcgagcagtggaagctggacgcgttccgcgagtacgacgaggggacagggccggatctgtataaactggcctacgctcgcgctttcaacatctcaccggacgatgttgataaataccagcgtcagatcggcaaggttatggagctgggtctcggctttggtggtggtgttgcggcgttcctgaccttcgccctggtctacggccttgacctcgatgagctggcaaacgccgcgctgccgaacattccccgtgatgtcatccgcgaggcaaaaagctggtacgacgaatcggttaaacgtaagtcgacctttggcctgtccgagcgtgtattcatcgcatgtgactcgctcaagcgcctttggcgcagagcgcacccggcgacctgcgatttctggtacgagcttgagcgtactgtccgcgccgcaatagccacaccgcaaaaaacgctgtactgcggttatctcaaagtccgtcgtgatggcgcatggctgcgcatacaactgccatccgggcgcgcgctgtgctacccgtccccttccattgagaaaggaaacatcacttatcagggcgttaactcttactcgcgcaaatggcaacggctcaaaacctacggcggaaagctggtggaaaacgttactcaggcagcagcacgtgacgttctggccgggaacatgccgctgatcgaggatgccggttacagcattgtgctgacggtacacgatgaagtgatcaccgaagcgctggacacagacgatttcaatgatacggcgctttccgcgctgctctccactaaccccgaatgggcgcctgatatcccgctgaacgctggaggcttcgaggcataccactaccgtaaggaataa

SEQ ID NO: 82520 - DNA, 222 bp, Citrobacter koseri
atgtcatttaaatatcgggacagtccgctgtattaccggtctgcacgtgaagccgcacgccttgaactggccggagaatatgaccgggcggcgaaggtctgggccaaagccaaccgtgaatcgcgtaacgaacttaaccaggactggagcgaacggcggaatgatttctgcctgatgcagaacatgcgcgaaaagcgtaaggcggtggacgatgaaaaataa

SEQ ID NO: 82521 - DNA, 201 bp, Citrobacter koseri; identical to SEQ ID NO: 82349

SEQ ID NO: 82522 - DNA, 270 bp, Citrobacter koseri
atggcctacgaacgtgaatgccttatcgaaaagcacctcgtcgccgaagtgaaaaaggctggcggggttgcctttaagttcgtatcacccggtcgccgctcggtaccggatcgcattgtgctgttacctggcggccgcctcgttttcgttgagtgcaaatcacccggcaaaccaccacgcgccgaccagttacgcgagcacgagcggctccgggcgctgggctttaccgtggtggtgctggatagcaaaaatctggaggggatattgtga

SEQ ID NO: 82523 - DNA, 1395 bp, Citrobacter koseri; identical to SEQ ID NO: 82348

SEQ ID NO: 82524 - DNA, 252 bp, Citrobacter koseri; identical to SEQ ID NO: 82347

SEQ ID NO: 82525 - DNA, 1287 bp, Citrobacter koseri
atgatcagtgatctactccctccggtggatttaacggagttgctgctcgaaattaacgcccataccggatttgctgatgagtttttccatgctagtgaagccagtgccagagttgatgatctgcccgtcagcatcagcgccgtgctgatggctgaagcctgcaatatcggtctggaaccactgatcagatcaaatgttcctgcactgacccgacaccggctgaactggacaaaagcgaactatctgcgggctgaaactatcaccagcgctaatgccagactggttgattttcaggcaacgctgccactggcacagatatggggtggaggagaagtggcatctgcagatggaatgcgctttgttacgccagtcagaacaatcaatgccggaccgaaccgcaaatactttggtaataacagagggatcacctggtacaactttgtgtccgatcagtattccggctttcatggcatcgttataccggggacgctgagggactctatctttgtgctggaaggtcttctggaacaggagaccgggctgaatccaaccgaaattatgaccgatacagcaggtgccagcgaacttgtctttggccttttctggctgctgggataccagttttctccacgcctggctgatgccggtgcttcggttttctggcgaatggaccatgatgccgactatggcgtgctgaatgatattgccagagggcaatcagatccccgaaaaatagtccttcagtgggacgaaatgatccggaccgctggctccctgaagctgggcaaagtacaggtttcagtgctggtccgttcattgctgaaaagtgaacgtccttccggactgactcaggcaatcattgaagtggggcgcatcaacaaaacgctgtatctgcttaattatattgatgatgaagattaccgccggcgcattctgacccagcttaatcggggagaaagtcgccatgccgttgccagagccatctgtcacggtcaaaaaggtgagataagaaaacgatataccgacggtcaggaagatcaactgggcacactggggctggtcactaacgccgtcgtgttatggaacactatttatatgcaggcagccctggatcatctccgggcgcagggtgaaacactgaatgatgaagatatcgcacgcctctccccgctttgccacggacatatcaatatgctcggccattattccttcacgctggcagaactggtgaccaaaggacatctgagaccattaaaagaggcgtcagaggcagaaaacgttgcttaa

SEQ ID NO: 82526 - DNA, 822 bp, Citrobacter koseri; identical to SEQ ID NO: 14689

SEQ ID NO: 82527 - DNA, 525 bp, Citrobacter koseri
atggcgactgagtgggtggatgtggctgataatgccgttaaaattgggcttggctctgcgctaacaatattgggcggttatttgacgctcaaattatcacagcagcacgagttaaggaaagaagcattaattcagcgacgtaaagattttgaggtgaaagctgagcgttacgtgaattttttatcctgttcaagaatgatgttacagaaatatatgatgtcctcattaagacatgactgtgaagattatattgaatatacaaggctgcatgaaacggtatcccttacatgcgcaagtaatactatgagaaagctggcctttgatgcttacaacgccgtatctgatgcctgcacaatgggaacagcaagtcgcgatgaaaaaaaaccagtcagggaaaaagctaaagtggctttagataagtttcagggatttgccagtgaagaactacgtcatgagaaagctgcaattgaggtaatgaacaaaaagcgggcattttggtcctttgggcgacaaactgcgcgatga

SEQ ID NO: 82528 - DNA, 282 bp, Citrobacter koseri; identical to SEQ ID NO: 14692

SEQ ID NO: 82529 - DNA, 978 bp, Citrobacter koseri; identical to SEQ ID NO: 14693

SEQ ID NO: 82530 - DNA, 357 bp, Citrobacter koseri; identical to SEQ ID NO: 14694

SEQ ID NO: 82531 - DNA, 321 bp, Citrobacter koseri
atgaaaacctatgccgttatcacactcgttaccgctgccttgttgcttagtggctgtaacagcgagccttccgaacaggatatttacactgctatgaataaggtcgttgcgcaggcgaatgctttcgtcaaatccatagcaggtaaggatgtcccgaaagacgcactgagcgaattaaaatcagtcaaaaagcatgactgcgtagaagtatctgataaaagctataaatgtaatgtgactgctgttgtcgataacgaaaagcgtactgctgctgtaactcttgtcaaaacggatgatggctggcaggtagttgacaaataa

SEQ ID NO: 82532 - DNA, 420 bp, Citrobacter koseri
  misc_feature (303)..(312): n is a, c, g, or t
atgaacagattcatgatttctgtgttttttatttctgctttacttatttctggctgttcaacatcaggcaaccagcatctaaaaaaagaaacatcacaaagtctgcagtcgaaaattatcaaaaataaaacgacgaaatcagaaatcattaccgcattaggtgagcccgaaaccaaaactacacttgatagtggcaatgaagaatggacttattcaatggataacaatcagtttgataccaccacattcattccagtggtcgggttgctgacaggcggttcacagacgcaggccaaaacgctnnnnnnnnnnatggaatggcagggtatcagaagatgcaggtgcaggatttggtggaaatcgaatttaaaggcgaaacggtcagcaagtggacgttctctgaaaataaaagcaggatga

SEQ ID NO: 82533 - DNA, 273 bp, Citrobacter koseri
atggataataaaacgattagctgccccttctgctttacacaaagcccgcacggcgtgcagatttgcaaaggctgccatgcaaaagtggcctatggtgaaagtccgctcagtgtggcattcctgtttcaattcgtggcattcggtctcgcctggttagtattttcattgactggcagcactcctgtctcagtcattacgttttttgccagcatcattattcttatctgcattattaaaaagaaatatgcagacagagttgtttttatacggtga

SEQ ID NO: 82534 - DNA, 1200 bp, Citrobacter koseri
atgaaaggcatgcagaaaataaaaaggggtaaacagtttgcgggcgtggtgctttacagccttaaatctggttcacaccacaaaattacgccttacgtcattggcggcaacatgacagccagcagcgccgctgagttaatcgttgagtttgatagcgctaaaaaattgcgtcccgatgtcgctaaacctgtctggcataattcacttcgcctgccaaggggagaaacactgtcagccagacagtgggcggcattcgccgacgattatatgacccggatggggttcactgaaacgcaccttcgctgttatatccttcacgacgataccaacgggcagcatatccatatcattgcgagtcgcattaacatggtcggtggaaaactgtacctggggaaaaatgaaaatctcatcagcacccgcattatcagcgagctggagcgaatacacggactcactgaaacaacacctgcaatcagtagtcgccctcaggctaaaagaaaaccctcacgcaatgagctgatgatggcagagcgaacagcagctccctgctctaagtctcagttgcagaccctgattgataatgtcttaacgcatcgtcccgatttactgacttttatcgacatgctggaacggaaaggtgtgacctgtaaacccaatatcgcgtcgacgggaaaaatgaatggattttcatttcagtaccagggcattgcctttaaagcgtctcagcttggaaaaaagtatggctggtcttctctgcaaacacagattgattttacaccagagcacctggctttactgaaaaaagagcaacagcagactgtgccagtaccagtaccagtaccatcatgcgagtctgaagaacaggctgcaaaccgggaaacgattctggagaaaatccttcagcttgaagaaaaaattcgtctggaacgacaacaggaaacagtgagtgtcattcaactcaggagcaaactgcacaatacagctcgtcagataccccgccagcgtcgtctgtattcgtggctagtattgctcggccatattgtggcacttctcaggcgcaggggcatgtctctgttacatgccactgcacatcctttccaccaaatcctgcacctgcatcttctgataccctgccattccatgacaacaaatcccgctaaagaacaattagttacaaacaaccaccatcctgcaccgtaa

SEQ ID NO: 82535 - DNA, 408 bp, Citrobacter koseri
atgaacaaagatattagcaaagagggtgacataagcaaagtatcaagacgcggtaaattccatactgacaaacttccgcctgatgaaatacgaagccactgcgtcagtgtcagattaaatgaagaagaattaattattctcgacagtaaaagaggccagtataaaaaaggggaatggctaagaatggcttccctgaacaaactcccaccggttctgcccgaaataaatcgcgaagcatggattaaactcggcagcctttctcaggatttaaattacctgctgaatcatctcgacaagaaaagtcctgacagcgaactaacccgtacagaactctttgccctgcgcagacaaatcaaaactcttcgggatcaccttattccttcaacatttctggagtcagaccgatga

SEQ ID NO: 82536 - DNA, 948 bp, Citrobacter koseri
atgagtatccataaagaatacggtttcttatactgcgagactaaaaaagatgtccaggaatgcattactgcaggtttcgatattaactctctcatatattcgggtcgaaatgcactgttcgataacagtcacactagtgcggttcaagctatgattgaagagggaatggaattagatcatacagatcattacggaaacaatgctctatttaccaataaaacccctaaaatactcagcctcttaatagactccggaatcaatattcaccatacaaataacaatggggagaattgtcttttcggtcataattttgacagagcaaatgcagaaatccttattaatgcaggtgttgacattcatcacacagataataatggacaaactcttctttataagaccttccatagtgcttactttgattactgggtgaataaaggttgtgatcttaatcatagggataagtatggcaacacggttctggatttgtctggctgtaaaggtcacaaatatgattttatcgcaatggcccttactcgtcatcttgataaaattgatactccccctacactttttaaacacttatcgattgagtccttacccttattggcgttactgcataaaaaaggcatccatttcacggtagatcaacactgtacattttcactttacgtgagagaaatgaaggaattttttgtcgaactaaaatcctatgcagatattggtcatgttcaattttacaatatggacaataagcacattggcagctacacggggatcgagacagtaaaatggtttattcgtaatggtatcagaatagacgacgatatactcagacagcgttccgactccgataagattttttcttatatatcaggaagagagaaaaaagatctgctaaaagaaatgaagccagagatcccccgttcacctgtgcgaaaaagactataa

SEQ ID NO: 82537 - DNA, 441 bp, Citrobacter koseri
atgaaaaaacacaattacccaacactgacaaactaccttgccaaaaccaaaaagaacgcggatctctatagattatataacccacaattttctgtattcggaaaacaattaagtgaagagcaggatttttacttttgttacttctccagacatatgattactcagagaaatatcttaaccctcttttctattcattcctttctctcttacaacgtaagcaagaaagagacaattaaatcatttgttcactttctcagaaacgcaaaccatggcaccttcaacaatgcattccagtttcgcgggtgcaatatcatttatcaaaacaagaagagagaaattaaggagatctcatggttttcattctcacggatctatgacgatatagtcaaaatcaaagagtatagtgctaacaatgaaatttataacaaacttgcagcctaa

SEQ ID NO: 82538 - DNA, 459 bp, Citrobacter koseri
atgagacccgcactgcccgtttcaggcagtgcatgccattgcggtaccgcagcttgccctgcgtctttcgtcactaacgagagttgggcgttagtcagagaatactccagcgcgaggagatccgacggacattcccctgagcattggccaatggagagcggtttctgcaacgcattgagccagtattcgcggagttcttcacccagagagctgtcaaagctgtcggtaaatgagataagttttactgtatcattttcatacagcataatgagtgcatcacctaatacttttccgttaagtaatactctggccgaaactggtgttataaataacgcctggcgaaaatcatcaggtaatgactccgactgtatagtaagcgggataatattatgctgtgcggcatttatctgtaaagatgaaaagccaatcgtcaaaatgatattcagggaaatacggtga

SEQ ID NO: 82539 - DNA, 123 bp, Citrobacter koseri
atgaactgctcagtacactttattcgcaaaacaaaatacgggcagagaaaagagggaaaaccattttcatacaacctgtcgatggttttatataacgaacagagcaaagacaagacggaataa

SEQ ID NO: 82540 - DNA, 393 bp, Citrobacter koseri
atgagtcaagttgttgattttttaaatgaagcaaaaactttttattttgcaaccgttgaaggagaccagccaagggtcagaccgtttaatgcagccatggagaggaatggcaaggtctatcttggtacaaccaatcagaaaaaagtttatcagcagttattggcaaattcaaaggtggaagtctcaggtatggcaaaaggaaaatggattcggctcaccggcgaagccgtaattgatgataccgtggaagcaagggaagcaatgcttgaagcaaatccgcctttgagagattggtatagcgctgatgatgggaaattcaccgtattttatttgaaaaacatgcaggcagttttatattcccttacaggagatccggagatattagataattaa

SEQ ID NO: 82541 - DNA, 1110 bp, Citrobacter koseri
atggaagaacaagaaaataaagaaatcgtggaagaacaaccagaagcgattgaagaagaagtaattactcaggaagtaaaagacgttgatacagaagccgagcgttcactatcaattgaaacaattgttgatgctgtaaaagaatcactaaataaagatgtggaagaaaatcgtgtacgcgagcttcagtctatttcgggtgtgttagggattaacaccgaagaagcaattaaaaacggtgtaagcgtagaggaatttaaacgctcactaaataaagaaacacaatcaattgataaggatatcaaaatgactcaaaaatctctaattgagcagggactacgctcactaaaaggtgaagtgaatgaattagattctttcgaaaagggaactcgtggttataacgccaatatgaatgaaatggtgcgttctactgctaatactacatctactgttaccgcagcaggtcttgttaaagaacaactatctgattcatatattcgcgaactattggcacgtactgtacttggtcagctacccgttaccgtatttggtggtcttgcaggtcttggcaacttctctattccagttgctaacggtatgactcccggagcacgtttctatggtgaagatgaagcagtggaagatggtttcgaatcattcaccaaaatcaccctaaaaccaaaaatgtttgcagcgggtatcaagatcactaaagcaatgctactaagcaacgctgccaccgaacgttatgttaccgatgaactactacgccagtgtgctgatggccttgaaaaagcagtattcgcacaactatctactaccgttcctgtagttgaaactgaagaggtaggtgtcattaccgaagatcgctatgaaatgtggctatgtgatgaagtcaaagtaattgagtctacttttgttgaccaggataccgtactaattggcgacttctcagagctaattttcgcaaactggaatgacggacaagaattggattttgacgatactacatatcgttcagcacaaactatcgctattcgttccttccagtatttggatactgcgattgcacatgaagaatcatttgtacaaatcaaattaaaagcataa

SEQ ID NO: 82542 - DNA, 405 bp, Citrobacter koseri
atggctttatcccccaaagaaaagaaagagttacaacaacgcttcgaaaagcaattactacctgaccttgatctgtcatttgaactaaatggcgaagtatataaatttaattttgataaaaatgagtcaggtgactatatcgacagttttacacaagcagtatggggaggttatcaggatgccgaggaatgggaaaagtatggtaaacatcaggagacagaattacctgaatgccctgaaccagtcgagggttggtgcgactgtgataaatgtaagtcgatgatttttcataaagagaaaaatatttatgtttgcctctcctgccataaacaaacagagccatttcttccaattgactggaactcaaacgattacgattggctaccttatgaagatgaatactaa

SEQ ID NO: 82543 - DNA, 321 bp, Citrobacter koseri; identical to SEQ ID NO: 12394

SEQ ID NO: 82544 - DNA, 765 bp, Citrobacter koseri
atgaactttaagaaattaaatcattctttagtaatcactgtcatagtactgttatggataagtacaggtgccaatatagtaatggctatagccgcttataaaggttttgtaattgccagagattattttaccgatataattaaaaaggatggttatgatctagtgaaaaggcttcagttggatttaatccctaactttaagaaaaatttagacttaaactcaataaatttacttgatcatgatgtccaatcatatgtcaatggtggtataggtattcttcaactagaaggggaaaaaagcaatctcaatatgaccttaactcgccgtctaaacactctaaaaacccagctacatgagcataataaactctaccgtgaaataagaaatgccatagaagatatttcaacttatggctgggaactactaccattaaaaaaagaacaactcataatggcacttgatcaaagtcatatactattcacctgcattcacaatatcgttatttatcttgatgaaatactaaagagaaatgcacccaattttgagcctatcgaaaatgatattttcccaagttattcacctgataaaaaaccaccagctttccaagatataaacaatttagtaaatggtttaattagatatcaacagcggctttactgttctgaggacgttacatcgccatacacagatactattcacgctgttaattcatatttaagaggtggaaaacatcttaagaattattttgaatacaaaaaaccttga

SEQ ID NO: 82545 - DNA, 246 bp, Citrobacter koseri
atgtacatgaatgtactctttccccatatcaccatacactttctcaaaattgaaatcgcagactttgcaactataaccgtgatgttcaaggcactctctacgtgcttttggatttcgttcgtaatatgtactccacttttcctttttatcaccttcaaagtattcttcttctacttctggtgtatagctatattgctcttgttcagtggcataccaacatttaccatcccgtaccagatactttaa

SEQ ID NO: 82546 - DNA, 573 bp, Citrobacter koseri
atggcaaaagtaaaagatgatggaacccgctatacatggcaggaaatagccgaccgtttcggcgtagagaattctacagtctctcgtatctggtcaggtaaagggcttgatataaattggcctaaaaagttggtggatgattggctattagcaaacgtgatcgaaccactacgcaacggtgatacaaaaggacaaatacagaaggcaactctacgtaaattagaagcagaagcggatataaaggaattggaactacgccaacagtctggcgaattaattccagtagcagtagtacagcaaacattatctcaatatttttatcaactacgtcaggtactaagaagtatcccggcaagtagctatgtagaacttttcgaatcacaagacgcattggaattaaaaatgaaattacaggacaagatcgattcccaattagaggagataggatcatacgaatacgaaggaacgtatagtgaggaacagctaccagaagatgatgaaggtactaacgaaagcggcgaaatcgttattacctccgaagaaacagaaacccgccgattgggtggagaataa

SEQ ID NO: 82547 - DNA, 330 bp, Citrobacter koseri
  misc_feature (271)..(280): n is a, c, g, or t
atgcgccgtaaagtgcattacgtaatcgaacctcagtatctttggacgagcattgccgagatggcacgaacccaacatgtgaaactgcttaatacattacaggcaggctttaagtacattgaggaagaatctttcgccagtgtcttccggggtttattctctgaaatcaatcttgcctcggaaaaacttggcaaaacatacggtgagcgaaatgaccgtctttgtaagataatcaaagagattgctgatggattgaagcagttctccactnnnnnnnnnnggggatgcttacgaatatctgatcggccaatttgcagcgggctcaggtaa

SEQ ID NO: 82548 - DNA, 276 bp, Citrobacter koseri
atgaataattcaatcagagtaccggaagataaagattttgtatgtgcatttgtgacttcaccggatagcttgtatgaggctattgaaacctatcgtaattatgtagatccagtcgaagagatagagtttgagcacgtccttctttatttgttgtgttctatactggtggagggtgctacagatgttaccattaatgatgaagtacgaatgtgtattgagtaccttgtcaatgaaaaaaatattatcagaaagaataacgcaggtaaaaaggtgtaa

SEQ ID NO: 82549 - DNA, 132 bp, Citrobacter koseri
atgacgggagatctttggctgcgactgttccagcgccgtacagagatcgcacacgcacagctctcccatctccctgagcagcagcacgatgcccagacgggtttcatcggaaaggtttttgaagagttgtaa

SEQ ID NO: 82550 - DNA, 1854 bp, Citrobacter koseri
atgatcgagctattaaaaggtgcaattataattaataagtcttttgataacacattagaagatttagactatacaaaagtcgttttgaatttttatcggcgaaatcattacatcaactcccttttctatgaaaatataactataagaggttcaaaagtctatggtgatataaaaaatgagaatagaaaagccttgatagctaacctcgttcagtctatacatttggatcttacacagaactctatcagagaatcaaaactatcttatgagctttcgcgatttattcaatttattagatggtgtgattcaaataatcttcatggctgtctcgataatgacatacagtgtattgatgctttcggcagttatgtagactatcattgggaacgagttacagcacgtaagtacaaatcaacaacagcctttaacgtactgaactcgataaaaagaattctcggaatgataatccaaccaagcttactcagcagtttaccaactattaatttttctcatcaaagtaaaatatcaactacaccaccagatgatcagagggcagcagaaaatgtacagcttttattaactttttttaatggaatatgtgatttcctaattgataaaaaagagtatcccttccaattgcgtgttccttcattcctcaacattgaaaatgattgtctgtggttgtttccatgccgaacgtggtgccagacagacttggcaccaaatggcaccagcaaccaatgcgtaaacaaagggtacaattttggaaaaggtcgtatagttacccatgaagagttaattgaacgtggagagtttttaaaaacaaacagatccagaattattaaagtggccaggcaatccataactagctctaataataaaagtcattcttatcaaaaaaaacatttagcaacgattgcgatctcatcattcacatttttattcatcgccaatacaggaatgaatccttctcaggtgctaaatataacatgggataacgattatatagttgaaaaagaaaacgttgatttcagaatcattaaacacagagcaaaaaataaaatcgtatattttagaataagcggtacttttcttcctattttaaagcgttacactgaactaagaagatattatctgaacaatcagccttctcgatttttcataccatcatttgattcgcgatatagtaatcatcgggatttgagtggcataagccttaaaataaaaaaattaattcataatgtgaattatacctctaagttaataaccccaagggaatggcgttgtctcaaatcagaatggataatatctaatactgacccttttgtggcatcaaaactgttacaaaattcagatgagacaataagaaatcattattcatcaggtaccttcacacgccaaattcaagagttgggtgattatcttgaacaactatctgaaacaaagcatattactgatatcgattatttacaatcgacacatatcggaggatgtaaacaaccaaatacgccaattcaaaatgctgaacataaaatcattaaagctaattgtgaactacctgaaggatgcctattctgtgaaaattatcttatacatgctgataaaaaagacctgctaaaattacttagctacaagtatatcatcgagcatacccaacatttatctaagacaatagatcaatggcatatgatatatgatccgattataaatagaattaatctgataataaatcagatagagcaaataaatccacccctggttgaacaagttaaaaatcaagtatatgttgaacaatgtttagattcatattggtcatttaaattaaatatgttatatcagattggagctgtttaa

SEQ ID NO: 82551 - DNA, 1422 bp, Citrobacter koseri
atgtcctcaagcaaaaaaatcacactccagaagttttatataagtcatgtttgtgataaaaatgaaacatatgcagaaatgatctcacttcaaactaacattaactactggacaaaaaaagatgaccatataataattaacagtcaaatcataaaaaacaatacatataactttttcccaataattttaaataatgatggctctccatggattcattcgaccctttttattattgacaaagcaaaaaatgattttaactacaacccatcaacttatcactgtataatatccgatcttacaaatttcaaaaactttatagacgataacaacatcaatttatatgactttcctgaacaaaaattattaagacctacctataaatatagaaactatctggcaactctaatacaaaacggaaaattaagctctcaaacggtcaaaagaagagtatctacaatgatatcgttctacagattcctaattcggaacgatatcttcgttccaaagtataacccttggagcgaaactgatatttatgtaaatacaattgataaagttgggtacaaacacaaactaaaaagaacgaaaactgatttagctattaaagtgcctgcagagataaatcctttttctgataaaatttatgatgagggccgcttaagacctctagagatagaagaacaaaccattcttattgacattctcatcaagttacaaaatacagaaatgttattaatccatttaataggactctttactggagctagaatacaaacagtcttaactttaaaaaaatccatctttttacattgttccgacactcttaattctgaaataagaatattaacaggtgccaacacagatatagatacaaaaaacaataagagcattgtccttgttatgccaaaatggttgtatgacatggtgcgcacatataataatagccacagagctttaaaaagaaggaataaaacaaattgtataatatcaaaagagtatcttttcttaagcaatcgaggagtaccatattatctaagaagaattcatttagaaagtcaatacttagagagcaacataaatactttacataatggagaagcagtcaggcaatttataaagtatcgcgtcataccattaatgagagaaaaattaaaaaaccccttctacacatttaaataccatgatctaagagctactttcggaatgaacctcacatcatctcttctagaaaatgtgaataaaggaaaaatttcgctgcatgatgctagagaatatgtaaaaaatcgaatgggtcattcatcaagtactaccactgatttataccttaattatcgaagtaacttatcaagttataaatcatatcaagaagattatgagttgcatctccaaaaactaattagcaaactgggagataaatcatga

SEQ ID NO: 82552 - DNA, 501 bp, Citrobacter koseri
atgacaagctcaacaaatgcagcaaaacgctggtggtacatcatgcctatcgtgttcatcacgtacagcctggcgtacctggatcgcgcaaacttcagcttcgcttccgcagcggggattaacgaagacctcggcatcacgaaagggatctcctccctgctgggcgccctgttcttcctcggttatttcttcttccagatcccaggcgcggtgtacgccgagcgtcgcagcgtacgtaaactaatttttatctgcctgattttatggggggcatgcgcatcgctgaccgggatggtgagtaatatcccaatgcttgccgccatccgctttattctcggcgtcgtggaagcggccgttatgcccgccatgctgatttacatcagcaactggttcacaaagtcagagcgttcgcgcgccaatacgttcctgattctcggcaacccggtgacggtgctgtggatgtctgtggtttcaggctacctgattcaggcgctcggctga

SEQ ID NO: 82553 - DNA, 243 bp, Citrobacter koseri
atgaacacgaagaaactgcggctagggccgctgcccaagaccgagagcgtcaagctgacctttgcctgcccggccagcttgaaagccgacctcgaccgctacgccgcgctgcacgcgcaggcgtatggcgaggccgtcgatgccgagaagttgatcccgcacatgctggaggcgttcatggcgggggatcggggattcaggaagggcaccacgacgcggagcgtgccgtccaagccgacgtga

SEQ ID NO: 82554 - DNA, 1275 bp, Citrobacter koseri
atgagccaggacgatacccccgacctcgccacgcggcaggcaggcaaggtcgcgcccgaggcggtggcgcttcgcgcccagccgcgtgccgtgacccggttgaaccggcgcacgctggccgtcctcgtcggcggcctgtcggtcgccgtgctcggggccacgatctggtcattgcaaccgcaccggcgcggcgcgggcgagcagaccgagctttacaacgtcgatcgcgtctcgaagtccgaagggctggacggcctgccgtccgactactcgaagctgccgccgaaggtgcccgagctggggccgccactgccgggcgatcttggcccggccatcgtgaactcgcagcagtccgccgtggccgcttacgcggcccccggccacgatcccaacgacgccttgcgcaaggaggcggaagccgcagcggcttcgtcggtgtttttccgctcgggcggccagggccaggccgccgccacggccacggtggcgccgccgggtgtgcctggtgctgccaacacgctcgcggccttcgacccgctcgcggctgggccggcctcggcggcgccccagcctgccgatccgacagctgtgcaaaaccggcaagaccagaaagaggcgttcctgaaaggcggctctatggaaacccgcaattccggaaacctgaaaatgccggcctcgccgtatcaggtcatggccggaacggtgattgcgggcgcgctggtgacgggcatcaagtcggacttgccaggcgacgtgatcgccacggtgacggagccggtctatgactcggccacgggcaagttcctgttgatcccgcaggggtcgcgcatcctgggtaaatacaacagccaggtcagctacgggcagagccgcgtgcaggtggtgtggaaccgggtcatcctgcccgatacgtcctcgctgacgctcgacaaccttgtcggcaccgatccagccggctacgccggcctggaagacgacgtggactggcattggaatcgcatcgtcgcgggcgccgtgctgacgacgctgctgggcgtaggcgccgagttggccgcgccagagaaccgccaggacggcaaccgcatcgtcatcgcggggcgcgacagcgcccaggacagcatcaatcaggtgggtcaggagatcacccggcgcaacatggacatccagccgacgctgaccattaggccgggcctgccggttcgcgtcatcgtgaaccgggatctggtgctgcggccgtgccagccgctgttcttcaaccggggagcttcccaatga

SEQ ID NO: 82555 - DNA, 999 bp, Citrobacter koseri
atgaacctgtctttccgcttttacgctttgccgttgatgcttgttgccctggcgggctgcgccacgcaaggcaagccgccgccgaccatctcgctcgatgagccggtgccggtgcaggcccagccgatgccggagccgcccgcgcccgtggaggttgtggccgtgcccgaggtgctgccgatgccggcgcagttgatgccggcacccgaggccgaggacgccaagcccacgcccgagccggccgacgagaaggtgcgcgtttcacgcgccaatgccgaggcgcgtgtcgcgcccacgcgcgagggctacgtcaacgcgattcaggtgtggcccttcaccgatggcgcgctgtatcaggtctatgcggccgtgggccgggtgacgatggttgccttgcagccgggcgaggagctggtgacggtggccgccggcgataccgtgcgctggatcgtgggcgacacgtccagcggcagcggtgccgacttgcgcgtcaacgtgctggtcaagccgatccgctcgggcctcaagaccaatctggtcatcatcaccagccggaggacgtacctgctggaactgacttccacggaaaagacgtggatggcgtcggtgtcctgggagtacccgcgcgaccggatgctggccttgcagcgccaggcgcaagcggccagcgccgccgcgccggtggatagcggcctgtcgctggagaacctgcgctttcgctacgcgatcggcggcagcaatccgtcgtggaagccgctgcgcgctttcgacgacgggcagaaggtctatatccagttccccgccggcatcgcgcaaggcgaactgccgccgctgttcgtgatcgggccggaaggcgacgggcaactggtgaactaccgcttccgttcgccgtactacatcgtggatcgcctgtttggcgcggcagagttgcgcctgggcggtgacaagggcgacgtggtgcggatcgagcgcacggatggcgtggcacggaggaactga

SEQ ID NO: 82556 - DNA, 705 bp, Citrobacter koseri
atgcgattcaagaaaccgcaggtgcgctacgccgacacgccgcagcctgccacgccgtaccaaaccgccggccaggtgtgggacgaccgtatcggctcggcccgcgtccaggccaagaactggcgattcatggccttcggctgcctcacgctcgcgctgctgatggccggcggactggtgtggcgctcggcgcaatccatcgtcacgccctacgtcgtggaggtggacaacgcgggccaggtgcgcgccgtgggcgaagccgccacgccgtaccggcccaacgatgcgcagacggcgcaccacatcgcgcgcttcgtgacgctggtgcgctcgctgtccatcgaccccatcgtcgtccgccagaactggctggacgcctacgactacacgaccgacaaaggcgcggccgtgctcaacgactacgcgcgggtcaacgacccgttcgcgcgcatcggaaaggagtcggtgacggtgcagatcaccagcgtcgtgcgtgccagcgacacgtctttcaacgtgcgctggacggaacgccgctacgtcaacggcgctgcggcgggcctggaacggtggacggccgtggtgtccatcgtgctccagccgccgcgcaccgaagaacgcctgcgcaagaacccgctgggcatctacgtcaacggcctttcctggagccgcgagctggattcttccgaaggagcaaaaccatga

SEQ ID NO: 82557 - DNA, 1371 bp, Citrobacter koseri
atgaatgacgtgaccatcatcgaccagttcctcaacaccttcgccacctacatcgactcgggtttcgggctgctgcgcggcgaagtggcgttcctcacggccacgctgatcgtcatcgacatgacgatcgccgggctgtattgggccatgagccacgccaccggccaaggcgatgacgtgatcgccaagctgctgcgcaaggtgctctacgtcggtgccttcgcctacatcctcaacaacttcaactggctggccagcatcgtgttccgctcgttcgcggggctgggcatcaccgccaccggctcggccatcacgatggagaacttcttgcagccgggccggctcgccaagaccggcatcgacgccggggcgccgattctggagcagatcggcgagatggcgggcttccccgaggtgttcgccaatctcgatcccatcgtggtgatgttcctcgcgtggctggtcgtggtgctgtgcttcttcgtgctggcgatccagcttttcatcacgctgatcgagttcaagctgaccacgctcgccgggttcgtgctggtgccgttcgcgctgtggaacaagaccagctttctcgccgagaaggtgctgggcaacgtcgtggccgctggcatcaaagtgctggtgctggctgtgatcgtcggcatcggctcgggcctgttcgcgcagttccaagtccaccccgccgagccgaacatcgaccacgcgctggtcatcatgctggcctcgctcaccttgctcgcgctcgggatcttcggccccggcatcgccacgggccttgtgtccggcgcgccccagctcggcgcgggcgcgatggccggtgccgccgtcggcgcggccggaacggcagtggctgtcggtgctgccgcgacgggcgtgggcggcgcggtggccgctggcgcgcgcatggccccggctgccgccaagctggccggcagcggcgcgcgtgccgccacgtcggcggctggcagcgcgaagtcggcgttccaggcgggttccgctgccgccggcggcggtgccaaaggcgcgatggcgggcttgggcaacgtcgccaagaccggcgcgcagtctgccggacgcgctgccgcatcccgcgcttccgctgccgggcagcgcatggccgcaccgttccgcgcgggctggaacggcgacgctggcgcgtcagccggccaggccgccaccagcgaagcgccggcaggcgctgccgctgcacaggcgcccgagcagcccgcttgggccaagcggctgcatcgccgccagcagctcacccacgccgcgaccaccgctgcccacgcgctgcgcggtggcgacggcggcggctccgggcaaggcccgagcctgcgcggctccgacgactga

SEQ ID NO: 82558 - DNA, 285 bp, Citrobacter koseri
atgcgatgcgtcctcgtccttggtgccgtgctgctggccgcttgcggcgagcagccggccgacaacctcgccgatgccctggccgccgatcgcgtgcggctcaaggcattgcgcgcgcaatgcgcggccgaccggcaggccacgggcgaggacgcttgccgcgccgccgccgaagccttccggcggcgcttcttttccggcgaggccgggccggatgaataccagacgctggccgacctgccgccgatcccgcccagcttcgaggaaccggagggcacgccatga

SEQ ID NO: 82559 - DNA, 726 bp, Citrobacter koseri
atgaagaagcgccttgtcgccgctgccatcgcggccatgctttgcaccgccactgcccatgcgcaatgggtcgtgatcgaccccaccaacctcgtgcagaacacgatgaccgcgatccgcacgctggagcagatcaacaaccagattcgccagctccagaacgaagcgcaaatgctgatgaaccaggcgcgcaacctcgccagccttccatccagcgtggtcggccagttgcgcgccaacctggcgacgaccgagcggctgatcgcccaggcccgaggcttggcctacgacgtgacgaatctggatcgggagtttgcccgcctgtacccggagcagtacgccgccaccgtcagcggcgaccagatgtaccgcgacgcccaggagcggtggaagaacacgctgggcggcttgcagaccaccatgcagatgcaggcgcaggtgtcgcagaacctgggcgaagacgaaagcgtgctggccgatctggtcggcaagagccagtcggcgcaaggcgcgttgcaggcgatgcaggccatgaaccagttgctcgccttgcaggccaagcagtcgatccagtcgcagcggctccagatcacgcaagaccgggccgcctcgctggaactggcgcggcaggcggcggccaccgagcgcgcccgcgaagtgcggcggcgcttcctcggggaaggcacgccgtacacgccgcagtccgtcaacttctaccgcgactga

SEQ ID NO: 82560 - DNA, 2454 bp, Citrobacter koseri
atgctgaacctcgccgaataccgccagcgcccggccttgctcgccgattggctgccgtgggccgggctcgtcgcgccgggtgtcgtcttgaacaaggacggcagtttccagcgcacggcccggtttcgcgggcctgacctcgacagtgccacgcaaggcgagctgatcgccacgtcggcccgcttgaacaatgcgctgcgccggctgggatcgggctgggcgctgttcatcgaggccgaacgcagcgccgccgcggactacccgcactcagagtttccggaggcgctgtcgtggctggtggacgaagaacgccgctcggccttcgaggacaccggccatcacttcgagagcggctatcacttgacgctggtgtacctgccgcctgaagaatcgcgcgctcgtgccgccaagatgctctacgagaacacgccgacgaatggcgtggactggcgcgagcggctgcaagccttcgtcgcggaaacggatcgggtctttgaccagctcgatggcgtcatgccggaaattgcctggctcgatgacgcgcagaccctgacctacctgcacgcgaccatctcgacgcgacgctatcgcgtcggtgtgcccgaggtgcctttccacatcgacgcgctgctggccgactcgccgctggttggcggcctggcccccatgctgggcgaccggcacctgcgcgtggtgtcggtgcggggctttccgacctcgacctggccggggattctggacgacctcaaccgcctcggatttgcgtatcgctggagtacgcgcttcctctgcatggacaaatccgaggcggaaaaagacctcgcccgcctgcgccgccagtggttcgccaagcgcaagaacgtcatcgcgctgctgcgcgaaacgatcttccaacaggagtcgccgctggtggacacggatgcctcgaacaaggcgaccgatgccgatgccgcgttgcaggagctgggcagtgatcaagtcgccttcggctacctcaccgccacggtgacggtgctcgatgccgacccggccgcagccgacgagaagctgcgcatggtggagcgcgtcatccagggccggggcttcgtgaccatctccgaaacgctcaatgccgtggatgcgtggctgtcctcgctccccggcaacgcctatgccaacgtgcgccagccgatcgtctcgacgctgaacctggcgcacatgatgccggtgtcggccgtgtgggccggccccgagcgcaacgcgcatctggacggcccgcctctcatcgtgacgcgcaccgatggcgccacaccgtttcgcttggtcacgcacgatggcgacgtgggccacatgctggtggccggcccgacgggcatgggcaagtcagtgctgctcgccacgctggcgatgcagttccgccgctacctcggctcgcgcatcttcgcgttcgatatggggcgttcgatgcgcgccacgatcctcgggcttggcggcgagcactacgacttgggcacggacggcgaaatcgccttccagccgctcgcccgcattgaccgcgaaggctaccgcacctgggccgccgaatggatcgaaggccgtttgctgcatgaaggcgtagcagtcggcccggacgagaaagccgccatctggtcggcgctgggcagcttggccggtgcgcccgtcgagcagcgcacgatgaccggcctgtcggtgctgctgcaatcgaacgcgctgcgccaggcgctcgcgccctatgtgctgggcggcgcgcacggcaagctgctggatgccgaccacgaccggctgggcatggcggacgtgcagggtttcgagatggaggagctgatgcacagcaaggccgccgtcatggccgtgctgcattacctctttgcgcgctttgacgaacgctttgacggtgcgcccacgatgctgatcctcgatgaagcgtggctgttcctggatgacccggtgtttgccgcgcgcatccgccagtggctcaagacgctgcgcaagaaaaacgtgtcggtgatcttcgccacgcagtcgctcgcggacattaaggattcgagcatcgcgcccgcaatcatcgagagctgcgcaagccgcatcttcctgccgaacccgcaggcgaccgagccgcagattcgcacgatctacgagggcttcgggttgaactcgcgccagatcgagatcgtcgccaccgcgcaacccaagcgcgactactactaccaatcccgcctcggcaaccgcctgttcgacctcgacctgggggcggcgacgctggccttcgcgggcgcttccacgccgcaagaccagcgcgacatagaccgcgtgctgctggacgccggcacgcccggcttcgcgggtgcctggctgcgccatcgcggcctcgattgggcggctgacctgctgccctcgttccccggcctcgcgccggattccctcgctgaccaaccacaggagatcctgccatga

SEQ ID NO: 82561 - DNA, 273 bp, Citrobacter koseri
atgagcggcccggatagcttcgcggccgggttcgaggtgcctttgcatcgctcgctcaccgagccgatcttgctgggcggcgcaccgcgcaccgtggcgattgccaacggcacgctggccgccgccgtcgggctgggcctgcaactgtggattcctggcgtggtgctctggatcgtcggccattcgctggcggtatggggtgcgcgcgtcgatccgcagttcatggccgtgttcgcccggcacatcaagcaccgcccgctgctggacgtgtga

SEQ ID NO: 82562 - DNA, 384 bp, Citrobacter koseri
atgacgcagatgaccattcctgctttccgtgtttccgtaaatccggctttgcgccttgcacggctgcgctgcctggcccgccctgcggggcgagggctgctgctggccgcgctgttgctgttcctggccggcaccgcgcaggccgctggttcctcgatgccctgggaaggcccgttgcagtcgatcttggagtcgattcaggggccggtggcgcgcatcgtcgcggtcatcatcatcattgccacgggcctcgcgctcgccttcggcgacacgtcgggcggctttcgcaagctgatccagatcgtgttcggcctgtccatcgcgttcgcggcttcgagcttcttcctgtcgttcttttcgttctcgggcggggctgtcgtatga

SEQ ID NO: 82563 - DNA, 1053 bp, Citrobacter koseri
atgagcgccgtttcccaatccatgagtgccacgtcgctcgaccggcgcatccagatgctgcgcacggcaatggggccgctgatcgccaccgcgctcgaagaccccgacgtggtggaaatcatgctcaaccctgaccgcaccctttgggtggatcgcctgtcgtcgggccgcgcgcctatgggcgtggagctgcccgaagccgatggcgagcgaatcatccgcctggtcgcggcccacgtcggcgcggaggtgcatcgcggccagccgctgctgtccgccgaactgcccgaaaccggtgaacgcttcgagggcatcctgccgccagccgcgccggggccggccttcgcgctgcgcaagcgcaccatcggcgtgatcccgctggagcggtacgtcgtggacggaatgatgaccgccgcccaggcgggctttttggtgcgcgccgtgcgcgagcgccagaacgtcctgatcgcgggggccaccagcagcggcaagacgaccttggcgaacgcgctgctggccgagatagctgccacgggcgaccgcgtgctggtgctcgaagacacggtggagctgcaatgcgcggcccgcgaccacgttccgctgcgcacgcgctccggcgtggtgtccatgaccgagctggtgcgctcgtccatgcgcctgcgacctgatcgcgtcgtcgtcggcgaggtacgcggtgccgaggcgctggatctcatcaaggtgtggggcaccggccaccccggcggcgtcgccacgatccacgccggctccgcgctgggcgcgttgctgcgcctggagcaactgattctcgaagtggcggtgaatccgccgcgtgcgctgatcgccgaggcggtcaacgtggtgatccagatcgccgggcgcggacgcaagcgccgcatcgagaacatcgcccgcatcgtcggcttcgacggcgtgggctaccaactggtggacgcgctggaaacgccgtttcccgagctgccgccgatccctgatgccgcacccgctgcggcgacttcctcgtcccctgaccaacctggagaactgctatga

SEQ ID NO: 82564 - DNA, 465 bp, Citrobacter koseri
atgagccactatcgcctgaacctctttatccagcccgagcacgcccagcggctcgatgaactggccgccaagaaaggcgtgtccaagtccagcatcgtcgccgctgccttggcgtcctggctgtcgccggacgcggccgaccagcgcgaggcggccatcgccaagcgccttgatcgcctctcgcgccaggccgagcgaatggagcgcgaccagagcatcgccatcgagacgctggcgctgttcatccgctactacctgaccgtcagcacgccggttcccgaggcgcaccaagaggcggcccgcgccttgggcaaggcgcgtttcgagcagttcaccgagcagcttggccgccacctgatgcgtgggcgcagcctggtgcgcgacgtggtggaggaattgcatcccgattcggtgcggatggaggacgcggcggcagccgccgatgcgcaggagcgtgcgtcatga

SEQ ID NO: 82565 - DNA, 2004 bp, Citrobacter koseri
atgcaagggacgaacgtgctgttcggtcagatcgccgtggtattcggcatcgtgatcgccggagtgtggggtgccacacaatggacagcagcagcccttggctatcaagtacgccttggctcgccctggttcgatcttcttggcacgccgatctatcacccgtggaagctgtttgagtggtggttttcttacggcgcctataccccggaaatcttcgacaccggcggagccatcgctggcagcagtggcatggtcgccgtggccgtcgccattgccatgtcggtctggcgctcgcggcaggcacgccttgtcacgacctacggatcggcccgctgggcgaacgcgcatgacattcgcaaggcgggcctcacgcagccagagggcgtgttcctcggccagcacgaccgccagtacctgcgccatgaggggccagagcatgtcctgacgttcgcacccacgcgctcgggcaagggcgtcggcctggtggtgccgacgctgctttcttggcccgcgtccgccgtcatccacgacatcaagggcgagaactggcagatcaccgcaggctggcgctcgcgcttctcgcattgcctgctgttcaaccccacggatgcgaagtcggcggcctacaacccgctgctggaggtgcggcgcggcgcgcatgaagtgcgcgacgtgcagaacatcgcggacattctggtcgatcccgaaggcgcgctggagaagcgcaaccattgggaaaagaccagccacgcgctgctggtcggcgcgatcctgcatgtgctctacgcgggcgaagacaagacgctgcgcggcgtcgccaacttcctcagcgacccggccagcccgttcgagctgaccttgcatcgaatgatgaccacgccccacttgggcgaggggccgcatccggtagtcgcgtcggcggcgcgtgaagtgctcaacaagtcggacaacgagcgttccggcgtgttaagcaccgccatgtcgttcctcggcctgtaccgcgatcccacggtggccgaagtcacctcgcgctgtgactggcgcatcgccgacctgatcgcggccgagcatccggtgtcgctgtacctggtggtgccgccttcggacatatcgcgcaccaaaccgctcatccgcctgatcctcaaccagatcgggcgacgcctcaccgaatcgctggacggcagcgacggcatcgaacgccgccacaagctgctgctgatgctcgacgagttcccggccctgggtcggctcgacttcttcgagacagccttggccttcatggcgggctacggcatccgcagcttcctcatcgcgcagtcactcaaccagatcgacaaggcgtatggacagaaccattccattctcgacaactgccacgtcagggtgacgttcgccaccaacgacgaacgcaccgccaagcgcatttccgagacgctgggcactgcgaccgagctgcgcgcgcaacgcaactacgcgggccaccggctcgcgccgtggctgggccacctcatggtgtcgcgccaggagacggcccgcccgctgctgacgccgggcgaggtgatgcagcttccgccggacgatgccgtagtgatggtgtccagcatggcgccgatcaaggcccggaagctgcgctactacgccgacgccaatttcaagcagcgcgtgctgccgccgcccgagctggcggacggccggtacgccgacgcgccgccactgcgccccgacgactggagtggcctggcgattcctgccgtgcctgccgcgcctgcggccgatgccgccgaaggcttccgggcgtcggccgacgacggcggcccgcgccgtcagcccgagctaactgaggccgtcgcctacgaccccgagctggccgcgcccgcggccgacctcggcctgctcgatgacgacgacgacctgccgcttccccttcctcgccagcttgatccggccatgcagcgcacggcccggctggcgtccctcgaccccaacgacggaatcgagctatga

SEQ ID NO: 82566 - DNA, 279 bp, Citrobacter koseri
atgaagaagatcatcccattcttgctggttgccgtgttgactgcctgcggccagtccgatgggccacagaagtccgccggttccgcagccaacatcccgacagtggaagagctggcggccaaccccgaacggctcaaggaactgcgccagcagtgcaagaccgaccgccccaagctgggcgacgtgttgtgcaaccgggtggccgaggccacgcgcaagcggttctatggcgacggggaaacgccctacacaccgccgaaggagccgcctaagttttga

SEQ ID NO: 82567 - DNA, 945 bp, Citrobacter koseri
atggaacttcgtcacttgcgctgcttcattgcggttgctgaggaactccatttcgcccgcgctgccgagcggctgcacatcgagcagtctccactgtcacgggccatcaaggaactggaagaagaactgggcgtgatgctgtttgcccgcaccacgcgcagcactcggctgacccgtgcgggcgagctgtttctggagcacgtgcgccgcgtgctctccgccttggagcaggcacgcgatagcgtgaaagcggcagcaaacggttttcatggccagttgcgcgtggcattgtccgacggcatcacgccgtcgcgcctttctgcgttgctcgtactttgccgccaggaagaacccgaggtcgaaatccggttcttcgaggtgcccctatcgcaacagatcaaggggctgcatagcgatctgtatgacgtagggtttgctcaatccgacgaagtgggcgacggtatcgtcgccacgcccgcatggagcgatgcgctgatggtggccgtgccagctcggcatccgcttctggcccacaagcgcatccccttggatgagttgcttcgctatccactggttctgtgcgatccacaggcatgtgagggccatgccaagcaagttgaacgggtgttgcgccgtgcggatgtggagccactgattgcagagagggtttcgtccaccgacctgatgatggccctagtctcggccggttttgcgctcggcctagcaggcagtgcacacattgccgccagccgtgagccgggtgtagtggcccggccgctagcttcgcgcgtgtcgcccctcacgacctatctgttgcggctggacggagatccgtccgacgagttggcgcggtttattgagcgcgcacaggccatcgaacagccggaaacccccaggcccatacgaggccgtaatcccgatcacccggaggaactgacgccatga

SEQ ID NO: 82568 - DNA, 375 bp, Citrobacter koseri
atgaactcgaagaacaccgggccgagcagcggctcggagaagatcggcctcacgctcacggcctacctgaacgtgcgtctcgaaaagcactccgactcgcacaagcgcaatcccatggacgtgttccgcgcgtcggtccagaaatggccggaggtcgtggaatgccatgcgctgaccggcgacatggactatctgctgcgggtggtcgtcaggaacatggctcactactctcgcttcgtgctcgacacgctgctcaagcaccccagcgtgcaggactgcaagacaagcttcgtgctggatcgggtaaagagcaccacggccttgccctatgagcattcggccgattggtgtagcggggatgcaaatagcgcttga

SEQ ID NO: 82569 - DNA, 195 bp, Citrobacter koseri
atgcaattccatctcgaagacatgacctgcggcggctgcgcccgcaccgttacgaaaacgatccaaacgatcgaccccaacgccaagatcgtcacggacccgccgacccgccgtgtcgaggtccagacctcggcctcgcaagagcagatcgccgcggccctgagcgaagctggcttcccgccgcgcgcgcagtaa

SEQ ID NO: 82570 - DNA, 759 bp, Citrobacter koseri
atgtctgcgcccaaacaagccacgctctaccggatggtcatgcccggccatacctgcccctacgggctgaagtcgctcgatctgctcaaccgcaagggctacgaggtcgaggacaaacacttggcgagccgcgagcagacggatgcgttcaagaaggagcatggcgtcgagaccacgccccaggtcttcataaacgggcggcgcgtgggcggctacgacgacctgcgcaaattcttcggcatgtccgtgaaggacaagaacgccgtgacctacacccctgtgatcgcgctgttcgccatggcggccgcgatggcgctggcggcgagctgggcggccttcggccagctctggagcattcaggcggcagagtggttcgtggcctttgccatgtgtctcctggcgctgcagaagctcaaggacgtggacggcttcgcgacgatgttcctcaactacgacctgctggccaagcgctgggttcggtatgcctatttctacccgttcgcggaggccatcgcaggcgtcctgatggtcgcgggcgtggggatgtgggtgtcgattccgttggcgctgttcatcgggaccgtcggggccgtgtcggttttcaaggcggtctatgtcgatcgccgggaactcaagtgcgcctgtgtgggcggggacagcaacgtgccgctgggcttcgtgtccctgaccgagaacctgatgatggtggcgatggccctgtggatgtgggccaaggtcgcctaccttgggatgcactga

SEQ ID NO: 82571 - DNA, 339 bp, Citrobacter koseri
atgcccaagatcaccgtcttgccccatcctgaactggcgcccgagggcgccgagctgaacgtgccggtcggcacctcgatctgcgaggcgctgctagacaacggcatcgagatcgaacatgcctgcgacatgagctgtgcctgcacgacctgccactgcatcgtgcgcaagggattcgattccctcaacgaggtcgaggagtgcgaggacgacctgcttgaccgggcctgggggctagaggcgcaatcgcgcctgagctgccaggccatcgtggcgaacgaggacctgaccgtcgagatcccgaagtacacgatcaaccatgccaaggagaaccactag

SEQ ID NO: 82572 - DNA, 480 bp, Citrobacter koseri
atgaacatcggtgaagcatccaaggcctcgaaggtctcggccaagatgatccgctactacgagcagatcggcttgattcccccggccgaccggaacgattcgggctaccgcgcctatagccaggacgacgtacaccggctgcacttcatccggcgtgcgcgcgacctcggcttctcggtggccgagatcacggacctgctgggactgtggaacgacaagtcgcgccggagtgccgacgtcaagcgcctggcgcagcagcacatctccgagctggaccggcgcatcgcgagcatgttggagatggccgagacgctcaaggcgctgatccggtgctgcgccggcgacgaacggcccgactgcccgatcctgcacacgctggagcaactcgataccagcgacgacgagcccgaagcgcgcaccggcgccgtgccacggcgtgcaagtggcaacgcagcggcaaagaagccgcgtgcgcactga

SEQ ID NO: 82573 - DNA, 2496 bp, Citrobacter koseri
atgagcatgccaataacgagtgatgctcgtgccaccgcagcagcgatcagcctacccatcgagggcatgacctgcgcgagctgcgtcggccgagtcgaggccgccctggccaaggtgccgggcgtggacagcgtgtccgtcaatctcgccaccgagcgggcggacatccgcctggccagtcctgtcgatcgcatcgcgttgatccaggcggtcgagaaggtcggctacgacgtgccggctggcaccgtcgaactggcggtcgagggcatgacctgcgcctcctgcgtgggccgcgtcgagaaggcactcaaggccgtgcccggcgtcaccgaggccacggtcaacctcgcgaccgagcgtgccaccgtgcgcggcgtggccgccgtggcggacctgatcgcggccatcgagaaggtcggctacgaggccaacccggtggataccggcgcgcaggccgacgaggaagccgccgagaagaaggacgccgagcgcgccgaactcaagcgcgacctgaccctggccgccgtgctggcgctgcctgtgttcgtgctcgaaatgggctcgcacatgattcccggcatgcatgagtgggtggcttccaccatcggcatccagcagagttggtatctgcagttcgtgctgaccctgctggtgctcgccattccgggctggcgcttctacgagaagggcttcccggcgctgttccgcctgggtcccgacatgaactcgctggtcgcggtcggcacggccgcagccttcggctattcgatggtcgccacattcgcgcccagtctgctgccggccggcacggtgaacgtgtactacgaggcggccgccgtcatcgtggcgctgatcctgctgggccgctttcttgaggcacgggccaagggccgcacctccgaggccatcaagcgcctggtcggcctgcaggccaaggaggcgcacgtgctgcgcgacggccgcatcgtggacatcccgatcaacgacgtggcgcagggcgacatcgtggaagtgcgccccggcgagcgcgtgccggtcgatggtgaagtgaccgagggccgcagcttcgtggacgagtcgatgatcaccggcgagccgattcccgtcgaaaaggcggaaggcagcaccgtggtcggcggcaccgtcaaccagaagggtgcgctgacgctgcgtgccaccgccgtgggcggtcagaccatgctggcgcagatcatccgcatggtcgagcaggcgcaaggttccaagctgccgatccaggccgtggtggacaaggtgacactgtggttcgtgcccgccgtcatgctggccgccgtgctgaccttcctggtctggctggtgttcggcccgtcgcccgcgctgtccttcgcgctggtcaatgccgtggcggtgctgatcattgcctgcccgtgcgccatgggtctggcgacgccgacctccatcatggtcggcacgggccggggcgccgagatgggcgtactgttccgcaagggtgaagccctgcaactgctcaaggacgccaaggtggtggccgtggacaagaccggcacgctgaccgagggccgcccggtcctgaccgacctggagattgccgacggctttgaccgcaaccaggtgctggcgaaggtcgcctctgtcgaatcgcgctcggagcatccgatcgcacgcgccatcgtcgagtcggccgtggaaggtggcatcgcgctgccgacgatgacagacttcgattcggtcacgggcatgggcgtgcgcgccaccgtggacggcgcgcgtgtcgaggtcggtgccgatcgcttcatgcgtgagctggggttggacgtgagcggcttcgctcgcacggccgagcgcctgggcaatgagggcaagtcgccgctgtacgccgcgatcgacggccgactggccgccatcatcgcggtggccgatccgatcaagtccagcacgcccgcggccattgccgcgctgcaccagctcggcctgaaggtggcgatgatcactggcgacaacgcgcgtaccgcgcaggccatcgccaagcaactgggcatcgacgaggtggtggccgaagtgctgcccgagggcaaggtcgaagccgtgcgccgcttaaaggccacccacggccagatcgcctacgtgggtgacggcatcaacgatgcgccggcgctggccgaggccgacgtgggcctggcgatcggcaccggcaccgacgtggcggtggagtcggccgacgtggtgctgatgtccggcaacctgcagggtgtgcccaacgccatcgcgctgtccaaggccaccatcggcaacatccgccagaacctgttctgggcgtttggctacaacacggccctgatcccggtggccgctggcgtcctataccccgcatacggtgtgctgctgtcgccgatcttcgcggccggagcgatggcgctgtccagcgtgttcgtgctcggcaacgcgctgcgcctgcgccgcttccagccgccgctggcggcggataccgctcattga

SEQ ID NO: 82574 - DNA, 357 bp, Citrobacter koseri
atgactccacgcaaaccagccagtgccccaccgaagggcccaagcaccgatctggcctccctgtcacagaatgacgtgaccatcctggccgagactttccggctcctgggcgatccgtcgcggctcaaggtcatgctgtgctgcatgaaggggtccacgtcggtaagcgacatcgcggaagccgtcgaactctcgcagtcgttggtcagccatcaccttcgactgttgcgtggagcccgtctggtcaagggcgcgcgccagtccaagcagatcttctatgaggtagcggacaagcacgtgagccaggtgctgctggacatggccatccacatcgttgaggacaacagcgacgactag

SEQ ID NO: 82575 - DNA, 1311 bp, Citrobacter koseri
atgctctccgtcctgaataaccgcacctaccgccacctgttcaccgcccaggtgatcgcgctcgtcggcaccggcctgatgacggtggcgctcggcctgctggcctacgagctggccggcgcggatgcaggcgcggtgctcgggacggcgctggccatcaagatgctggcctacgcgggggtcgcgccggtcgcgcaggccttcgccgaccggctcccgcggcgctcgctgctcgtggcgctggacctcgtgcgagcggccgtcgcgctgtgcctgcccttcgtcaccgaggtctggcagatctacctgctgatcttcgttctgcaggcggcatccgccggcttcacgccgaccttccaggccaccatcccggacatccttcccgacgaagaggactacacgaaggcgctgtcgctgtcccggctggcctacgacctggaaagcctgatttccccgatgctggccgccgcgctgctgaccgtcatcagctttcacaacctgttcgcgggaacggtgctcggtttcctcgtttcagccgctctcgtggtcagcgtgcggttgcccacgtccgtccccggcccgcgccgcggcatctgggagcgaacgacgcgcggcacgcgcatctacctcgccacgcctcgcctgcggggcctgctggcgatcagcctggccgtctcggcggccggcgcgatggtgatcgtgaacacggtggtgctcgtgaaggcgcgtttcggcctgggcgaagtcgaggtggcgtgggcactggcggcgttcggaggcggctcgatggtggccgccttcgtcttgccgtccctactggagaaagtagccgaccgacccgcgatgctcaccggcgccgctgtcctcgtcgtgggcacggcgatcggcgcactgctgccgagctatgcgctgttgctgccgctgtggctggtgatcggctttggctacagcgtggcgcagacgccatccggccgtcttctgcgccgctcggcccacgccgaggaccgtccagcgatcttcgcggcccacttcgcgctgtcgcacgcctgctggctcatctgctacccgctggccggacgcttcggcgcggccatggggctgcaatcgacgttcgtcgtcatgtccttgatcggcctagctggcgtggcgctggcgcttcggctgtggccggccagcgacccgtcggacttggcccatgaccatccgaacctgtcggcggatcacccccacttgcgtcagcacgcgaaccaaggcgggcaccatcacgtgctggtcgtggatgacttgcaccggatctggccgaaaggatag

SEQ ID NO: 82576 - DNA, 258 bp, Citrobacter koseri
atggaagacatgcataagcacaccacccatcccgacctggtgaagcggctcaagcgcgccgaggggcatctgcggcacgtcatcgggatgatcgaagggggagaaacctgcctcgacatcgcccgccagctcgcggcggtggaaagcgcggtgacggcggccaagcgcgtcctgatccacgaccacatcgaccactgcctgtcccatgacgaggactccgttctgaccgaaatgaaggcgctgaccaaactgctctga

SEQ ID NO: 82577 - DNA, 1098 bp, Citrobacter koseri
atgtcccaatcccacgcacatgaccatggtcacgatcacgaccatgatcatgaccacaccccgaccgtgaccagcgccaacgagcgcaaggtcctgctgtcctttttcctgatcttcggcttcatggtcgtggaggccgtcggaggcgtgctgtcgggctcgctggccttgctggccgacgcgggccacatgctgaccgacgccgcggcgctcgcactggcctacgcagcattccggttcggccgccgcgcggccgacagcaagcgcaccttcggctacctgcgcttcgaggtcatcgccggtttcctgaacgccgtgaccctgttcgcgatcgtcgcttggatcgcctacgaggcgtgggagcggctgcaggcgccgcccgtgatcctggccggcccgatgatgatcgtcgccgtgctcggcctgctggtgaacgtgctcgtgctgtggatcatgacccgcggagagaccgatcacgtcaacgtgaagggggccatcctgcacgtgatgggcgacctgctcggctcggtcggcgccatcgtcgctgcgatcgtcatctacctcacgggctggacgccgatcgatcccatcctgtcggtcctggtcgcggcgctgatcctgcgcagcgcatggaagctgctcgccaagtcgatccacatcctgctggaaggcgcgccggaggatgcttcgccggagaaggtggagcaaggcctgatgggcgccgtgccgggcctggcggccgtcagccacgttcacgtgtggcagctcacctccgggcgcacgatggccacgctgcacgttcgccccaacgtggacgaggaagcacgcgccgtggtcaagcgcgtcgaagcggtgcttcgagagcaattcagcatcgaacacgccacggtcgggatcgactggaactcgggcaccgacgagaacgtctgcagcttgcagcccacgtcggagcgtcaggaccacagcggccacgatcacagcggtcatgaccacagcgggcacgaccacagcggccatgatcatggcaatcacaagcatggcggcgggcacagccacggccatgaccacgaccattccgctcctggtcacaggcattga

SEQ ID NO: 82578 - DNA, 378 bp, Citrobacter koseri
atgacgtcccgcaaaaccaccagcgccgacaccgcgcaatgctcgaccaccagccacgacgcggcgaccgatgccctcgcaatgtcgcaaagtgacgtcgctgttctggccgagaccttccgcctgctgggcgaccaatcgcgattgaagatcctgctgcagtgcatgcatggctcggtcgccgtgggggacatcgccgaagcgctcgacctgtcgcagtctctggtcagccatcacctgcggctgctgcgcggtgcgcgcctcgtgcgcggcgaacgccaagccaagcacatcttctacagcatcgcggaccagcacgtcagccaggtgctgcaggacatggcggtccacatttccgaggacaaagccgacgactga

SEQ ID NO: 82579 - DNA, 1239 bp, Citrobacter koseri
atgcgtaaaaaaatcagaatcgttgtggtggcaggcgtcatcgcagccgtcgggggcatagcgattgccgcccgcgacgccaaggacgagggcaaggccgcggcgcccccggcgggcgcgccgatggcgccgcaggtgcccgtggccgaggtcatcacccgcacggtcgcgccatcggccgagtacaccggcttcctggccgcgcccaagaccgtcgagctgcgctcgcgggtcggcggcgccgtcgatgctgtgagcgtccccgagggcagcctggtgcgcaagggacaactgctgttccagatcgacccccgaccgttccaggtcacgctcgacacggctgcggcgcaactgcaacaggccgaggtgctggccagtcaggcccaggccgacttcgaccgcgccgagcgcctggtggcgaccggcgctgtcgcgcgcaagacctacgacgatgccgtctccgcgcgcagtgcgcgccaggcccaggtgcaagcggccaaggccgccgtcgctgcggcgcggctggatctgtcctacgcccgcgtcacggcgcccatcgccgggcgcgttgaccgcgtgctcgtgaccgagggcaacctggtcagcggcggtgtcgccggcgcggccacgctgctgaccacgatcgtgtccatcgacccgctgcacgtgtacttcgacatcgacgaagccacgtacctcaacgtcgtgagccgctcgcggcccgctgcgggcgccggcggcaaggcctcgctgcccgtgcaggtcgggctgaccacggacaagggtttcccgcacaggggcgcgctcgacttcgtgggcaacaccattgaccgaagcaccggcacgatccgcgcgcgcgccgttgtgcccaacccggatgggcgcatggcacccggcatgttcgcccgggccaagctgtccaccggcgcggcgcgcgaggccgtcctgatcgacgatcaggccgtgggcaccgaccaagggcgcaactacgtgctggtcgtgggcgagaacaaccaggcccagtaccggcccatcgaactggggccggtggtggacgggctgcgcgtcatcaacggcagcctgcaggccggtgagaagatcatcatcaagggcctcgtgcgccccggcatggcggtcacgccgcgcatggtgcccatgcagccgcccgcggcaccggccgccggcgcggaccccgccaaggctgacggcgcggccggctcggcggaggcccgcaaatga

SEQ ID NO: 82580 - DNA, 3177 bp, Citrobacter koseri
atgaatttcccccgcttcttcatcaaccggcccatcttcgccatcgtcctgtcggtgctgatgctgatcgcgggcgcgatcagctacttccagctgccgctgagcgaatacccgcaggtcacgcctcccacggtgcaggtcaccgctagctatcccggtgccaacccgcaagtgatcgccgataccgtggcatcaccgctggagcaggcgatcaacggcgtagaaggcatgatgtacatgcagtctcagatgtccaccgacgggaaaatggtgctcaccgtctccttcgagcagcatatcaacgccgacattgcgcagatccaggtgcaaaaccgggtctcgcgggcgttgccgcgcctaccgcctgaagttcagcgcatcggtgttgtcaccgagaaaacgtcgccggacgttctcatggtggtgcatttgctttcgcctggaggtcgatatgatccgctgtacgtctccaactacgccacacttcatgtgaaggatgagctggctcgtacgccaggcgtcggcgatgtcctagtctggggcgccggggagtattcgatgcgggtctggctcgaacccgccaaggtcgctgctcgtgggctgatcgcgagcgacgtggttgccgccatccgcgagcagaacatacaggttgccgctggttcggttggtcagcagccggatgcctcggcggcgttccaggtcacggtcaacactctgggccgactgtcgagcgaggagcaattcggcgagatcgtcgtgaagacgggcgccgacggccaggtaactcgcctgcgggatgtcgcccgcatctcgatgggggccgattcctactctttgcgcagcctgctcaatggcgagccggcggtggggatacagatcatccagagcccgggcgcgaacgcgctggatgtgtctagcgcggtgcgcgcggcaatggaccgacttcaagctaagttccccgacggcattgagtataggatcgcctacgaccccacggtcttcgtgcgcgcctcgctccagtccgtcgccgtcacgctgctggaggccatcttcctggtggtgatcgtggtggtgctgttcctgcaatcctggcgcgcgtcgatcatcccgctgatcgccgtgccggtctcgctggtcggcacgttcgcggtgatgcacatgttcggtttctcgctgaacacactgtcgctgttcggactggtgctgtccatcggcatcgtggtggatgacgccatcgtggtggtggagaacgtggagcgccacatagcgctgggcgaatcacccaaggacgcggcgcgcaaggcgatggatgaagtgactggcccgatcctggccatcacctcggtgctggcagcggtcttcatcccctcggcgttcctgtcggggctgcagggcgagttctatcgccagttcgcgctaaccatcgcgttctcgaccatcctgtcggcgatcaactcgcttacgctgtcgccagcgctggccgccatcctgctcaagccgcaccacggcgcggccaagcccgatcgcgtcacgcgcatcatcgacggcgtgttcggcggcttcttccgccgcttcaaccgcttcttcgaccgcgcctcgaattcctacgtcgggggcgtgcgccgcgcggtgcgcggcagcgccatcgtgctgctgctctacgtcggcttcctgggcctgacctggctgggcttccacaaggtgcctgcgggcttcgtgcccgcccaggacaagtactacctcgtgggcatcgcccagcttccgaccggcgcctcgctggatcgcaccgaggcggtcgtcaaggagatgaccaagatcgcactggctgagccgggcgtcgagagcgtggtggccttcccgggcctgtcggtcaatggaccggtgaaccagccgaacaccgcgctgatgttcgccatgctcaagcccttcgatgagcgcaaggacccgtcgctgtcggccttcgccatccagggcaagctcatgggcaagttcagccagatcccggacggcttcgtcggcatcttcccgccgccgccggtgccgggcctgggttctatgggcggctttaagctgcagatcgaggaccgggcgggcctgggtcccgaggcgcttgcacaagcacagggccagatcatgggcaaggccatgcaggcgcccgagctggcgaacatgctcgccagcttccagaccaatgcgccgcagttgcaggtggacatcgaccgggtgaaggccaagtcgcagggcgtgtcgctgaccgaggtgttcgacaccctgcaggtcaaccttggctcgctctacgtcaacgacttcaaccgcttcggtcgcacctaccgggtaatggcccaagccgatgcgcagttccgcatgcaggctgaggacataggcatgctcaaggtgcgcaatgcagcgggcgacatgatcccgctgagcgcgttcgcgaccatcgagcgcagttccggccccgaccgggtgatgcattacaacggcttcccctcggcggacatcagcggcgggccagcgccgggctactcatccggccaggccaccgccgcgattgagaagatcgtgagcgaatcgctgcctgacggtatgacctacgaatggacggacctgactttccaggaaaagcgagttggcaatactgctatctatatcttcgcgctggcggtgctgctcgccttcctgttcctggcggcccagtacaacagttggtcgctgccgttcgctgtgctgctgattgcacccatggcgctgctctcggcgatcgccggcgtctggctctctgggggggacaacaacatcttcacgcagatcggtttcgtggtgctgatcggcctggccgccaagaacgcgatcctgatcgtggagttcgcccgcgcgaaggaaagcgaaggggccgatccgctggcagccgtgctcgaagccgcgcgcttgcggctgcgcccgatcctgatgacgtcgttcgccttcatcgctggcgtggtgccgctggtgctggccagcggtgcgggcgccgagatgcgccacgccatgggcatcgcggtgttcgccggcatgctgggcgtgacggtattcggcctggtgctgacgccggtgttctacgtcgtggtgcgcaagctggcgctgcgccgcgaagcgcgccatgcccgtgtcggcatgaccgaccagcacgcatga

SEQ ID NO: 82581 - DNA, 1506 bp, Citrobacter koseri
atgaaaacatctttcgcattcacacgacccgccaggacgctggcgccgctcgccctcgcggcggcgttgactggctgctccatggcaccgaagtatgaccggcccgcagcgccgatcgacacggcttatcccttgggcgcggcctatgtggaaccggcggccgcgacgcccgacgacgcgatcacggccgagatcggctggcgggacttcttccgcgacccgctgctgcagcagttgatcggcatttcactggagaacaaccgcgacatgcgcaaggccgcgctcaacgtggaggcggctcaggcgctgtaccgtatccagcgtgccgagatgctgccgaacctgggcgtttccgcccgcggcgcgtcagagcgcgtaccggccgacctcagcaccacggggcaaagcgacgtgctccggcgctacgacgtggccggggtgacggccgcctgggaactggacctgtggggccgcatccgcagcctcagcgaccgggcgctggcgtcctacctggccctcgacgagacccgcatcgccacgcagatgagcctggtgtccgaggtggccagcgcctacctcacgctgcgtgccgaccaggaactgctgcgcctgacgagcgacaccctcgccacgcagaagcgctcctacgggctgaccacccaactggtggaagcgggcaactccacgcagctcgacctgcgccgcgcagagatcgcgttgcgcaccgccgaggccaaccatgccgcctacacacggcaggcggccaaggaccgcaacgcgctggtgctgctgttgggccagccgctgacgccggagctgtcccggcagcttgacgaggccatggcgctgccggacgacatcgtgccgaccggcctgccgagcggcctgccgtccgaactgctcgcgcgccggccggacatccgcgccgccgagcagatgctgatcggcgccaacgccaacatcggcgcggcgcgggccgcgttcttcccgacgatcagccttacgggctcggcgggcacggccagcgcttcgctggacggcctgttcgattcgggctcgcgggcctggagcttcctgccgcagatcacgctgcccatcttccgcggcggcgcgctgcgcgccaacctggacgtggcgcacgtacagaagcgcatcgagatcgccaactacgagaagtccatccaggcggccttcgccgaggtggccgacggcctggcgggcaagcgcacgctcgatgagcagatccgcgcggagcagctcctggtggcggccagccagaaggcctacgagctggccgagcagcgcttccaggagggcgtggacgacaacctcactgtactcgacgcgcagcgcacgcattacggcacgcagcagaccctggtgcgcacgcgcctgacgcggctgaacaacctcatccatctgtacaaggcgctgggcggcggctggactgagcacacggtgcaatcgggcgccacggcgcagcagtccgcccggtcgccgggatga

SEQ ID NO: 82582 - DNA, 393 bp, Citrobacter koseri
atgaggattggtgaactcgcgcgcttgaccggcacgccccctgagaacatcaggttctacgaacgggagggcctgctgcccgctcccgagcggtcccgcaacaactaccggcgctatggcccggcccatgtcgagcggctttacctgattcgcaactaccgcgcgtcgggcatcggcctggatgacatgcgcaacttgctgggctggacgcatcgcgagtccccggaacccgagctgctgacgcaggctgtccgggaccatctcgcctatgtcgaggaacgcatggcgcaactgacccgggtgaaagagcacctgctcgcattggaacggcaggctgttccttctgccgctcgggagatttgcgaggagcgaccaggttgcggcggttcatga

SEQ ID NO: 82583 - DNA, 1197 bp, Citrobacter koseri
atgaccgaccagagcatcacgcgccgaaacatcggcgttctcaccgccgcgcaggcgctcggtggcgccagcgcgcccatcgtgatgtcgctgggcgggctggtcggccagcagcttgccaaggactcggcctggatcaccttgcccgtgagcctgttcggcctgggtcttgccatcggcaccttgcctgcggcgttcatcatgcggcgccatggccgccgcaacggatacgtggtcggggtcggcttcggcgtggcctcgggcctgatcgccgcgctgggcatcatgctggcctcgttctggatcttctgcgccggcaccttcctggcgggcttctacggcgcgtatgtgcagagctaccgcttcgcagccgccgacaccgccgaggacgcgctcaaggccaaggcgatttcctgggtaatggtggggggtctcgcgggtgccatcatcgggccgcagttggtgatcttcacgcgcgacgcggtagcgggcacgccctacgtcggcagcttcctcagccaggcgctgctgccgctgatcgccctgccgatcttgctgatgctgcgcacgccgcgccagaccccggccgaagccgccgccgacagcggccgcacggtgctgcagctcctggcgatgccgcgctacgcgctggccgtggccgcgggcgtggtgtcctatggggtgatggcgttcgtgatgaccgccgcgccggtggcgatggtcaaccacgggcattcggtggacaacgccgccctgggcatccagtggcacctgctggcgatgttcgggccgagcttcttcactgggcggctgatggtgcgctacggcaaggagcgcgtgaccgccgtgggcatggtgctgctcgccgcctccggggtggtggccctgggcgggctcggcctgtcccacttctggggctcgctggcgctgctgggcatcggctggaacttcagcttcatcggcgcgacggcggtggtcaccgattgccacaccccggccgagcgcagcaaggcgcagggcatgaacgatttcttcgtcttcgccgccacggcggccgtgtcgttcctcgcgggatcgatcctgcacagctcgggctggcaggcggtcaactggatgatcttcccggccctggcgctgatcttggtgccgctgctgtggcagaccgcgcgaaagccggtgcggctaggtccgggctga

SEQ ID NO: 82584 - DNA, 699 bp, Citrobacter koseri
atgagagtcaacaagttcagcctgttgttcattgcgggcgccgtcgtggtcgccatcggcctgatggccgttcagaagaaggtggtcccgtcgggtgaagtgatgcaggccaatgcgagcggagatcaccaagggcacgcgatgccctccagcgcctcggccaatgacagcccttccacgaccgcgtatcgcgccgtgaacgaccagatgcacgcggggatgggagcgcagttcactggcaacgccgacgtcgatttcatgcgcggcatgatcccgcaccaccagggcgcgatcgacatggccaaggtggcgttgcagtacggcaaggacccggaggtccgcaagttggctgaggaggttatctctgcgcaggaaggcgagatcgccatgatgaataagtggcttggagaacgcggccaacaggcggcgaccggcagctcgggcgacgcctcgacgaccgcctaccgtgccggcaatgaccgcatgcacgccgacatgatgattgacttcagcggcgatgccgatgtggactttatgcgcggcatgatcccgcatcaccagggcgcgatcgacatggccaaggtggcgttgcagtacggcaaggacccggaggtccgcgagttggctcaggaggttatctctgcgcaggaaggagagatcgccatgatgaagagctggcttgccgctcggggaaagtga

SEQ ID NO: 82585 - DNA, 267 bp, Citrobacter koseri
atgaaccaagccagcaccccgcgcatcatcatctatagcactccagcctgcccggactgtcgggtgctgaaggagtggctgtcccagcagagcatcgtgtttgaagaacgcgacctgaccgacccgaagatttctgcggaagccaagtcacgaaccggcgtgcgcgtggctccgatcacgctcatcggtaatgaggtcttctatggcacctttgcgagccagaagccggggctgatgaaggcgctcggccgttcgacaagtagatga

SEQ ID NO: 82586 - DNA, 1932 bp, Citrobacter koseri
atgaccgaccgccgcgacgacgatttccgcgtgcgccccagcgccccgaagaaccggggcaagggccaggggcagagcttcgtttccaaggtgctcaaacaggcgggcaaagccagcagcggcaagtccacggtgcgccgtccggcatcggcgagtggcaccggccagcggcccggctcgcgcctggggcgcggccacacggcagcacgcttcgccggggcgaagctgacgcctatgtcgcggcgcgcgaccatcaagacgctgctggtgaaccaccagcgggccagcccgcagtcgctcgccaagcacctgcgctacatcgagcgcgacggcgtgggccgcgacggcgagccgggccaagcctacgggccgcagacagacgtggccgatctcgacgccttcaaggaacgctgcgccgacgaccggcaccatttccgcttcatcctctcgcccgaggatggcgcggagctggaagacctgcgcacctacacgcggcacctcatgggccgcatggaggccgacctgggtacgggcctcgattgggtggccgtgaaccactggaacaccgacaacccgcacacgcacatcgtcgtgcgcgggcgcgacgacaccggcaaagacctcatcatcgcgggcgactacatcgccgatggcttccgctatcgcgccgccgagctggcgaccgaatggctggggccgcgcaccgaactggagatccagcagaccttgcagcgtgaggtggagcaagagcggtggacgagcctggatcgcaccctcaagcgtgagataggcgaggccggcggcgatggcctggtgcgcgtcgaaaggttcaacgccccccgcttgcagcgccaacgcctgatgctaatcggccgcctgcaacacttgcagcgcctgggcctggccgacgagacgcagcccggcacctgggccatccatgccgatgcggaaaagacattgcgcgagctggccgtgttcgagccgggggacgatggccgaaccatcctcggccgtgtggccgcgaaggggctggccgacgagctgcgcgaccggggctatctggtcatcgacggggtggacggcaaggcccattacgtcgcgctcaacgcccgcgacgagctggcgaactacccgagcggcgccgtggtggaggtgaaaggctcggccgacgtgcgcgcagccgacaagaacatcgccgcgctggcgagcgatggcctgtaccgcactgaccatcacctggcgatcgggcagggccgggccaaggccggacgcgacccgcaagaagtcgtcgccgcccacatccgccggctggaggccctgcgtcgggccggcattgtggagcgcgttgccgaagggctatggaaggtgccggacgacctggccgagcgtggccgccagtacgacgcgcagcgcctgggcggcgtggccgtggagctgaaatcgcacttgcccatcgagcggcaggcccgcgtgatcggggccacgtggctcgaccagcagttgatcggcggcggctcgggcctgggcgacctgggctttggtggcgaggccaaacaggccatgcaacagcgcgccgacttcctggccgaacaggggctggccgagcggcgcgggcagcgcgtgatcctggcgcgcaacctgctgggcacactgcgcaaccgggaactggcacaggccgcgaagggcattgccgctgaaaccggcctggagcatcgcccggtggccgacgggcagcgcgtggctggcatctaccggcgcagcgtcatgctcgccagcgggcgctacgcgatgctggacgacggcatgggattcagcttggtgccgtggcggccggtgatcgagcagcggctggggcagcatatcgccgccgtggtgcgcggtggcggcgtatcttgggagcttggacggcagcgcgggccaagtatttcttga

SEQ ID NO: 82587 - DNA, 468 bp, Citrobacter koseri
atgatggccgccgattcgctgcacgttgccgtgcctctcatcgtgtcatcaggcgtgtcgttccggctgttgctaccgtgtcgtcgcgcgtgcagtgcggatgcattcgcatcgcacttcgcgctgtctccggcgcagccgtccgatgtgcaggcgtcttgcctcgaacgcgcttggcctgcggccccaggcttgtccatctgcgcgttcgccggtgggctggctgcgggtgcagcagagccaccgggccgccgatgcccggagcgggagcgaggggcaaaggcggaaggcaagacaaaaggacgcggcaccgggccgcgtcgaaagccagtctgcacatgggggtggcgcggcacggagcggctttgccgccgtgccgcgttcggcgcgaaggtcgcgccaatgcaggcatgtccgcgtgcttcgcacgacaggacacgccagagcttgcagggagcgcagccatga

SEQ ID NO: 82588 - DNA, 600 bp, Citrobacter koseri
atgacgacccatcccaccaccgcacacacacccaaagcagcgccgcttcctcgctcgcgcctgcgcgctcacctcgtgctggcgggcttcgccgccgtcggcctcgctgcgctgacctgggcggcattcgtgcagccgctgccgcgtctgatctacaacctgtccgacagcgttccggtcggttggtatcgcgtcgagccgcagcgccacggcgccgactcgctgtcacgtcccttgtccgtgggcagcgtcgtcctgaccacattgccgccagaggtagccgcgctcgctgcgcagcgcggctacctgccggcacacattccgctgctcaaacgtgtgggcgcggtcgcgccgcaacacgtctgcatcgtcgccggtcaggtacgcatcgacggcgtgccgatggcggctgcgctgcccgccgaccggctgggccggccgttgccatcctggcagctttgccgtcgccttgaggcgggtgaactgttcctgttgagcgtgaccaatcccgcatcattcgacagccggtatttcggcccggtcagcgcatccgccgtgatcggcgttgcgcatccagtgtggctggagacacgcccatga

SEQ ID NO: 82589 - DNA, 546 bp, Citrobacter koseri
atgaccacatccgcattgtctgctgccgcacctgccgccatcgcggccacggctgcgcacacatcaccttccagccaacccgccagcgcgccgttgacgcgcgtatcgctcgcctacattgaaccgcgtttcaagctctacctgcgcttcggcgaaccagcccgcacgctccagctcgatcgctggcggcgctgtgccatgtttatgccgggtgcaatgttctgccgcgttcgttggcaggccaacgactacggcacgatccgctggcaactcatggtgatgcaggctgctacaccgcttgatgccgtgcagcgcatcccaggcgtgcagccaggcgcgtgcctgctgctgcatgccgaaggtgacgccaatgtgcgcgccgtgctggaacgcatcgacggcatcgaggcgctgggtatcgctgccatcgacgtgtcgcccgcgtactggcgcatgctcgccaaccggctcgccgtgcatttgccgctgcccgaatacaccgccgagcggcacgccgcctggctggccgggagggcgctgccatga

SEQ ID NO: 82590 - DNA, 288 bp, Citrobacter koseri
atgagcgacaacagcaacccacccaacggcaaacgcccggccaagcgggtcggcataggcgcgcgtccgcccgccaatccgcacgccgaggcttggattcgccaaggcgacgcggatgcgctcaacaagggcgacctctacaccgctcgcctgaccctggacatcacgcccgccatgcgggcgcgcatcaaggtgtcggccttcacgcaaggcgtgaccgtggccgacttgctgcgcggtttgctggagcgcgagtttccagaacaccgcatggagaacacgccatga

SEQ ID NO: 82591 - DNA, 639 bp, Citrobacter koseri
atgatcgtcgccttgctcaaccagaaaggcggcgtcggcaagaccacgctcgccacgcacatcgcaggggaactggccttgcgcggcctgcacgtcgtcctgctggatgccgacccgcaggggtcatcactggactggacacagcgcagaagccagcagggcttgcctcggctgttcagcgccgtgggcctggcgcgcgaaacactgcaccaggaagtcccagaactcgccaggcgagccgatcacgtcatcatcgacgggccacccaggatcgccgccttggcgcgttctgcgctgctggcggccgaacgggtgctgatcccggtacaacccagcccctacgacctgtgggccagcgcagagatggtggcgctgattcgtgaggctcaggtgttccggcctgcgctacgcgcggcctttgtcatcaaccggcgcgtcagcaccacggtgatcgggcgcgaagcacggcaagccttggccgaacagccgttgccagcgctgcgcagcgaggtgcgccagcgcatcgtctttgccgacagcgtggctgcggggcgattggcgcgggagacggcccccgatagtgcggcagcgcaggaaatcaccgcgctggtcgatgaactgctgcggtggccgtcatga

SEQ ID NO: 82592 - DNA, 825 bp, Citrobacter koseri
ttgcagcagcgcgaacagctcgacctgttccgcgccctgccgggcgaggacatggcaccgcgcgatgcccaggacttgatggcctatccgtttttctcgctagcgaaatcgcggcgcaccgcgccgatcgactttcgcagcggcaatatcactatccgcgtggaaggcacgcaggagcatggcatcgccaccatctgggatgccgacatcctgatctgggccgccagccagatcgtcgaagccaaggacgctggcatccagccgtcccggcggatgcaggctacgccctacgagatcctgcgcttcatcgggcgcggcaaatcgctgcgcgactaccagcgcctcaaggccgcgctcgaccgactgcaatcgaccacggtggcaacgtccatccgcgaaaccacgggaaggcgcttgcaccgattttcgtggatcaacgagtggaaggagctggccgatgccaacggcacaccgctgggcatcgagctgatcctgccggactggttctatgcgggcgtgctggacgccgccctggtgctgaccatcgacccgacgtacttccgcctcacgggtggcatcgagcgctggctgtaccgcttggtgcgcaaacatggcggccggcaggaatacggctggcagttcgacttccggcatctgcaccgcaagtcgggcagcagcacgcggttctcggatttcgcctacgacctgcgggcgctggttgcccggcaatcgctgccggggtacgagctgggcatcgtacggattcccgaggacgacatggaattgctgaccttccggcccgtgccgcagacggcacggggataa

SEQ ID NO: 82593 - DNA, 285 bp, Citrobacter koseri
atgcgacccgctcccttgcggcctgccgccgctcccgttgccacacccgcacaaccccagcgctatctcaccaacgatgaagctgccgattacttgcgcctgtcaccgcgcacgctggagaaacagcgcgtcatcggtggtggcccgaagtttcgcaagttcggtcgccgcgtcatgtacgcagtgtccgacctcgatgcctgggccgatgcacgcagctacgaggcgacttccgacccggaatatgccgaacggcacgcgggcgactaccgtgatggtcgctga

SEQ ID NO: 82594 - DNA, 807 bp, Citrobacter koseri
atggctgatcgcagtgccgagccgtggtatgccacggcggcctatctctacgttctgcacctggatagcccggcgctggcctgggagtacctgcgccgtcacccggactaccagcgcgactggctgcgctttcgtcgccaaccggatgttgccgggcattgggggctgcgcctgctggaagatcccgccctggatgcgcgggacgcgcacccggcctggttccccgatcacgatgccgtggtgcagctctacccggatgccgatcctccacccgacgccctgtgctttgagttctggaagctaccgggccacaaacacctgatccatgacggcaagcgcctggtgctggtggcacgctggcccggctgctgcctgcgcttcgtgctcgccccaggcttggccgatggcatggcgtacgcctatgccatccgggcctgcaccgcgccctgcgaacgctatgcagccctggcgagcgaattgaacaagatcgctgtagccgccggtgccgcacctgcggcgaccgtccggccacgcccgccgctgtccgcattgctggaactgcacacgctgcaggcgctggacgcgaccctggcgggtgcgtccttgcgggaggtggccgaagggctgtttggtgtggaagccgttgccgccgactggcacgcagacagtgctttgcgcgcccgcgtgcggcggctggtgcgccggggcgatgggctgatgcgcggcggttatcgccgtctggcacagcttccggctgtcacttcgcatgaggggggacgtttcgcatccgcagcagaacgtccctga

SEQ ID NO: 82595 - DNA, 318 bp, Citrobacter koseri
gtgctgggggtgcgtcgccacggcgaaacggcgtgctacgaggccatcgtcaaaacgtcatgggtgaagcgtaaactggcagtgtcaagaccgatgaactccgatgcgttgctgaaatcgtccgagtgcgacggcggcaacgcactccaatggcatgccgcgtcggtcagcttgccgcagcccgcgccaggcatcatgaccgtttcgatctggcacgcaccgcttcggtgcaacactgccgattcagaccgaacgggtcacagaccagaccgaaatagacacagtgcgcctcgctttgcggtggcgctcaatcggtga

SEQ ID NO: 82596 - DNA, 348 bp, Citrobacter koseri
atgacattgctcatcaccgcggacgagcgcacgcgcctgctgtccaacggccaggcccgcgcagccgggcaggacactgacccgctgcctgtggtgcgcctgttcacgccagatgcgcatgccacttggctgctggcttcgctcgaccccgccgatggcgataccgcccacggcctgatcgacttgggggttggcatgcctgcactgggaacggtgaagctgtccgacttggccgccatcgtcgggccgcgccagcagcccgtgatgcgggatcgatacttccagccggtgcggcggctgtcggaatacctgcgactggccgaagacaacggctcgatcaccgattga

SEQ ID NO: 82597 - DNA, 315 bp, Citrobacter koseri
atgcagaagcgaaccgtccagcgcggccgaccggccggctcaaccaccttcgacgccgagctggcccaggccttcggcgcggcggtgcgtgcgctgcgcacggaacgcggcatcgcccaggaaacgctggccaacctggccggcgtcgagcgttcccatatgggcaaagtcgaacgcggcgagcaccaacccacgctatcgctcatcttcaagatcgcaggcgcgctcggatgcagcacgacagtgctgatggccgaggccgaagaccgactcggccaacctggcaccatcttgaccaagaccgaagatcaatga

SEQ ID NO: 82598 - DNA, 1788 bp, Citrobacter koseri
atgacactgctccacaacgaccccattacccagcttgcgttttccgtatatgagaacaaaggcgtcttcgctgttctactggggtcgggcctgtctcgctccgcagaaattcctacaggttgggaaatcacgctggacttggtgcgacgcgtagctgaggctcaaggcaccccaacgcaatcagactgggcgaagtggtatcgcgaaaagacaagccaggaaccgaactattccgtactgttggaagaaatcgctagttcgccggacgagcgcagagcgatcctgcatcgctacatcgagccggatgaacaggatcgcgaggaaggtcggaagacgccaaccaaagcgcaccacgccattgcgcagttggttcgagccgggtatgtgcgggtcattgtcaccaccaatttcgaccggctcatggagaacgccctccgggaacaagggattgaaccaacggttgttgcttctgaggatgcgctcgctggtgccgaacctttgacccacagccgctgctatttgctcaaactgcacggtgactacaaggatgcccgtatcctgaataccgatcaggaactgagtgcctaccccgatggctacaaccgattgttggatcgcatctttgatgagcatggtttgatcatctgcggctggtcaggcgagtgggatcatgccttgcgtgaagccttccttcgcgccccaaacaggcgttatccggtctattgggccgcacgcggaacactgggatcgggcgcacaagaattggcgacacacagagcagcaagggccattccaatcaatggtgctgatgagtttttccaaagtcttcagcagcgagtagaaacccttgaacagagccagcgtcagaaccctctgagcgtagagttgctggtcaacagtgccaaacgctatctagccaagcctgagcatcgcattcagttggatgagcttttcgcccaggagactgatcgactgctcgatcaattggatagtgagatattttctgtgcaggggcaatggagtcacgaagattttcgtacaagagttcagcagtatgagtccgtaaccgagccgctggcccgcatggccggcgtccttgggagatggggcgacggcaaggactttgatgtggtgatggatgtgcttcgcagcatgtaccaccacgctggaaagatcggcagcggtctgacttacctgctgcatcttcgttcctatcccgccgttttgatcttcacggcctatggggtcgggctgaccaaagctgcgcgatgggacacgctactcaagctgttcttatgcgtactcgcctcggaaaatcgcgaaccacaacgagttgtctcgacactgttcctctggtcgtgggcaggcggtgagcaacagatctggcagcaaatcgaaggcttagatcgacacaagacgccattgagcgatcaccttttggaagtgatgacccactggcgaaagagcttcacaggggctgatgcaaatttcgaactgttgttcgagcgcttcgaattgatgggatctctggccgccttccatgagaatgatgaggcacagctggagaaaaccatcgaggcatcagcggcacgcaatgatgtgcttgcatggatgccagttggtcgatccggttggcataacgccgtcgcacggaaactgcttcaagagcttgaggatgaatctcaagttgctgagcttttgaaggcaggcttcgctaaggggagccgccgtttccttcaactcttcgtcgagaatttcaagctgtacaccagacgcatgaactggtaa

SEQ ID NO: 82599 - DNA, 315 bp, Citrobacter koseri
atggcaaacatcggcaccttcaccgcagagaaagatggcttcaccggcacgcttcgcaccctgacgctcaacgtcaaggtcaagctggttcctaacgacaagggtgacaacgagagcgcacccggctaccgcctgcaagcggctggccacgacatcggcgcagcgtggaaaaaaaccagtgaggccggacgcccttatgtgtccgtgacccttgacgacccatcgttccctgcaacggtctatgcccgcctgatcgaaggcgaggacggcgcacacgacctgatctggtcgcgcagcaagcccaaggcggcgtaa

SEQ ID NO: 82600 - DNA, 537 bp, Citrobacter koseri
atgaaccacttcatcgtcatttccggctgctcaggcggcggtaaatcaacactgctcaccgaactccagcaacgcggatatgccgtggtggaagagccgggacggcgcatcgtgcaggaacaaacgcatacgggcggacgagccttgccgtggctcgacatggcggccttcttgcgccgagccatcgacctggcgcgggaagaccatgccaatgctgcacacgacaattcgcaatgggtgttcttcgaccgtggcgtgatcgactctgtagcagcattgcaggcgctgaccggcgagcctgtgctggacaaacttggccagcagtatcgctaccattcccatgttttcctggcaccgccgtggccggacatttatgtgcaggacgcggagcgccgccatgacatggctgccgcgctgctggaattcgagcggctccagcgcacctatccggcgctgggctataccgtctcgctgttgcccaaggtcggcgtagcgcagcgcgccgactttgtactggaagccctggcaggtcgctga

SEQ ID NO: 82601 - DNA, 2085 bp, Citrobacter koseri
atgaacgccatcaaccacaccgaagcccaagccatccacgccacggccagcgccgcgcctgccgtgctgctggaagccgccgacccgagcaagaatctgattcttgtgccgctgtcgcggttggtatcgcgccctacgggccgcaacgtgcgcaagaccccgcgcatgtcgattcccgaactcgccgccagcatccagcgtgtcggcctgctgcaaaacctgatcgtgaccgcgaccgctgacggcgagcgttacgaagtcgtggccggaggccgtcgccttgccgccctcaagctgctggcgaagaagcgccgcatcagcaaggaatgggaggtgccttgcctgctggtggccgatggcaccgcccgcaccgccagcctgaccgagaacgtgcagcgcgaagccatgcaccccgccgaccagttcgaggcatttgccgcgctggtggccgaaggccgccccatcgaggacattgccgcagatttcagcgtcacgccgctggtggtgcaacgtcgcctgaaactcgccaacgtgtcgccgcgcctgctggccgactaccgggccgaagccgtgagccttgaccagttgatggcccttgccatcaccgacgaccacgccgcgcaggaagctgcgttctacgatgcgcccacatggcagcgcagcccgcacaacctgcgcgaccgcctgaccgagcgcgagattgatgcccaccggcatccgctggtgcgcttcgttgggctggatgcttacgaggccgcaggcggtggcacccgccgcgatctgttcgcggaagccgatagcggcgtgtatctgaccgatgccacgctgctggaacggctggcgcaggacaagctggccagccttgccgccgaggtgaaggccgaaggctgggcatgggtggatgccacccccggcacgacccatgccgacctgcaagccttccagcgcgccccgagacagcgccgcagcccgaacaaacgcgaagcccaacgcatcgagaagctgcaaaccaagatgcaggcgctggccgaggccgtggatgccgccctggacgccgacgatgaagaaaaggccgacgctttgcaggaggaaggcgaacacctgggcgaacagttgcaggcgctggaagatggcttgcaggactacggggaagccgtcaaagctgccgccggtaccatcgtcaccatcgaccgcaacggcgaggccgtgattcatcgtggcctgctgcgcgaagccgaggccaaggcactgcgcacgcttgaacggctgcggcaaggtttcggcagcgagggcgaagccgggaacgacgacaccggcgaggaaaccgacgacgcccccaagcccgccgccatgtccgaccggctggcgcaacgcttgagtgcccaccgtaccgccgcgctgcaaatcgaagtggcccggcatccgcaggtggcgctggcctcgctggtgcatggcatggtgcagaccgtactgcacggcagccactacagccacgacctgccgctgggcgtgaagctgacccagcaagatcggctggaaggcatggccccggattggccggaatcgcccgccgccgtggcactgcgcgaactgcaacaggtagcgggtgaagccttgccggaggacagcgccgaactgttcgccgcactgctggcgaagccgcaggatgaactggtgcgcctgctggccgtatgcgtggcatccacggtcgatgtggtgacgccccgcgccacgcagcaccagccgggtgccgaactggcgcaggcagtggggctggacatgtcggcatggtggcagccgaccgcagacggctatttccagcatgtgccgaaggccgcgattctggaatccgtggacgagttcgcaccggagcacgtcacccggctggcgaagttgaagaaaggcgacattgccagcgaagccgaacggctggccgatggcaccggctggatgcccgccatcttccgcaccgaagccccgcagcaggacgcgcaggacgtgaagacagacgaggaagccgaagcaccggaggaagccgctgtcgtggcgaatgagcagccgcaggccgagccactggccgcgtga

SEQ ID NO: 82602 - DNA, 828 bp, Citrobacter koseri
atgcttgcatcccgtttcgcttcccgttccccggtactgcgcagcgattccccgctgtccgatgaccagattcaccgcgtggccccgtccatctttgcggaagcgccccacgaaagccgctcccagcggtacgcctatatccccaccgctacggtgctgaccgaactgcgcaaggaaggatttcagcccttcatggtgacgcagacccgcacccgccacgaagatcggcgcgactacaccaagcacatgatccggctgcgccatgccagccagatcagcgcccgaggcgaggccaacgaaatcatcctgctgaactcgcacgatggcaccagcagctaccagatgctggccggcatgttccgtttcgtttgcagcaatggccttgtttgcggcggcaccgtggccgatgtgcgcgtgccgcataagggcgacgtggccggacaagtgatcgaaggtgcctatcaggtactgcacgggtttgaccgtgcgctggaatcccgcgaatccatgcaggccatcacgctggacgaaggcgaggccgatgtattcgcccgcgccgcgctgtcgctcaagtacgacgacccggacaagcccgcacccatcaccgaatcgcaaatcctgatgccgcgcaggttcgacgaccgccgcccggacttgtggagcgtgttcaaccgcacccaagagaacctgaccaaaggcggtttgcatgggcgtagcgccaacggacgccgtcagcagacccgcccggtgcagggcattgattccgatattcgtctcaatcgcgccctgtggctgctggccgatggcctgcgccagttgaaagcctga

SEQ ID NO: 82603 - DNA, 1416 bp, Citrobacter koseri
gtgggccgtcaaggagaaaagcgtcaggtaggtgcggcccgcaggcgcagccgaggacacggcctgacgcgccttgatggcacgcggccacgggctacagtcgcgagcaaggtgatggggtcaggagagacggctggacatggcaacggccgccgtgatgtgcaaaccgcacgcaagcgaagcgcgcaggcccgaagctgcaagccgggccgtaggcgtcagggatgtgcaaggctggcgaatgccagtcccgtcagggatgagcgaacagcgaacctggagcagcgcggtccgcgaagcggagacgcaaggctcttcttggcttattatctatttgtaagcacctacaaccgaatcactttttccaagttcaggaatctcaaatataaaaaggatagagctttgtctgatgtcaactacgaaaagcaagctcaggactattacagcaaggctcccatcattattttgggtagtggagcctcggctgcccatggaatgtctggtatgtgggggcttgcgcagcatttgataaagaatactgacgtttcagggctctctgatgctgagatggagtcttgggggatgttctgtaagacactgacagaaggcgtggatttagaggcagctctccaccgagtagcagtatctgaagtgctgacgtgcagaatcatcaattccacttggtcacttataaatcatgaagactgcggcatcttcaagagtggcttgcaaaatagctcgatgttcccgttgagccgcctgcttgaacatatgttcaaaacaagcctaaaaaaaataaatatcatcactacaaattatgatcgtttggcagagtacgcgtgcgagcaaagcaggattcatcactacactggtttcacacacggttttttccgtcaactggccacgcccgatgaactgacctgctcgcgcagagtgaatatttggaaagtacatggctctctagactggttccagtcaccactagaggacactgtcgcaatttcgggctcacaagaaatacctgaaaactacagcccacagattgtcacgcctggcacgcaaaagtatcagaagacgcatcttgagccatttcgctcaatcataaataatgcagacgtagccattaacgaggccggatcatatttgtgcatcggatatggattcaatgatgaacatattcagccaaaacttatggccaaatgtcagcggcatggcgcaccagtcaccatcattacatacgcgctttccgagtcagctaaaagacttatccttggcggcaaagcacaaaattatttagccatagagcgaggagaaacggacaatcagtctattgtctactcctccctgagcagctctgcaattacagtagagaaaaacatctggagccttgagggctacttatcactcatcatgtag

SEQ ID NO: 82604 - DNA, 1728 bp, Citrobacter koseri
atgccaatattcaactttagagatgaagaagcactcgggaaagttgcctcggttgacaccacgaatgtcattgtggacgtcgagaatgtgtctcatctgaagaggcttcaggttaatcatctcgctgtacttcagagtagcaggccaggacagcacctgattggtcttattacgcaagtgacaagaaagcgcggcattgagaatctttctgatgacggaatcgtagaccagaattcagagttgaatttgtgccgcattgcattaattggaaccatgctggatcgcgatggctccaaggataatgttttccgccgaacacttgaaagtgttcctgaaatagatgcaaactgctttgctctcgaaggcgagaacctcactggatttatgcgcactctctccagtgtttcagccgacggcaatgcattgacgctcggaaaatacactctggatgacaatgcagtagcctaccttaatggaaataaattcttccagcgccatgcctttattggagggagcacagggtctgggaagtcttggacaactgccaaaattattgagcagatgtcaggactttctacagcgaacgccattgtcttcgacctccacggagaatatgtgccattgacggggcctggcattcagcatttcaaggttgctgggcctgcagatgttgaggcccaacgcactatttctgatggtgtgctttacctgccttattggctactttcttatgaggcgctagtttccatgtttgtggatcgcagcgaccaaaatgcccctaaccaagccatgattatggctcgggagattaatcaggcaaagagaaagtaccttgaagaaaacaatcaacaagacttgcttaagcattttactgtagacagtccagtgccgtttgatcttgacttcctgatgtcgagattgaatgaaataaacattgaaatggttccgggttcgcgcggagacaagcaaggcgatttcttcggaaagctcgcgcgaatgatttctaggcttgaaaacaaaatttccgatcgccgactaggatttatgttcaatggcggtggagatgttctcgatttcacttggcttgagaaatttgccagtgctgctcttggaagcacaggggagaacggaaaagcaggcatcaagatcattaacttcgccgaggttccatcggatgttttgcctctaattgtctcccttgttgcacgagttacgttctcagtgcagcagtggacaccgtcagagctccgccaccccattgcgcttctttgtgatgaagctcacctgtatatgcctcaacgaaatatggcagattccgccgacgacatttctttggatatattcgagcgcatcgccaaagaggggcgaaaatatggcgtcagtctggttgtaatcagtcaacgtccatccgaagtaaacaaaacgctgcttagtcagtgcagcaactttgtatctatgcgcctgactaatgccgaagatcaaggtgttatcaaacgcctgcttcccgacagccttggcggattcagtgacatccttcccacactcgatactggcgaggcgttggttgttggggatgccagcttgttgccaagtcgcatcagaatcgacgaaccacagaataagccaaatagcgggacagtgaatttttgggatgaatggcagaatccagtcaaagataaccggctagtgattgctgtcgataactggcgaaagcagaatattcaatag

SEQ ID NO: 82605 - DNA, 762 bp, Citrobacter koseri
atgattaatcttgcgaagtggtgcgttgaatctgaggagacatttgcgaagcacaagttacgccgaatggccgttaacgcagcgacgcagacgcaagcggtcaacgcaatcgcgaaggctatacctgactactacacagatccgcagcgcgttgcgtctttgctgaagaagctaggtaaaccggctgctgctgcccatgtcgagcagaagctcccgacgaagatttccattcgctctggcgatctcggcgaaattctttgcaacgcttacgttctcgaagctacgtctttcagcctcggcatcaagcgcctgcgctggaaggatcatcgcaacatgtcgatgcgcggcgaagacgtgcttgcctttgagctggggccgaagaacaaccgcttgaaaatcctcaaggctgaagtgaaaagccgggccgcaatgagcaccgccgttatcggtgacgccagagtagctctttccgcaaatagcgaacttccatcaccgcatgcactcgccttcgtcgctgatcgttcgcaccagaccggcgacacaatcctcggcgatgctctggacaaggctcaactagaggacggtatccgaccgtcgcaggtgtctcacatgctcttcacgttctcgggcaacaacccggtaaagctactgaaaacgaatctccaagcctattcgggttcagtgccgcagcactatgtgggccttcatgtccaagggcaccaggacttcatcaaggcggtctttgcggcagtgagcaaataa

SEQ ID NO: 82606 - DNA, 3498 bp, Citrobacter koseri
atggccgcgacacttgaagaactcaggacgagcatcgatgcagccacagtgccaggattccgtgcccgtctgcttgcacgggggctggcacgcgggatgatctggcgcgagggcgtgctgcctgaggaggcgccgaacttcggtctagagttgtcggatgacctgttgtcctacggctactcactgctgctgcatggcctccgctacaccgacttaggaggtgatgctgcgacagcgcgcaaggcattcgaggtgtctgctgaggcgcttgaagctgtggtcgaacggggagcggcctatgccgagcgtgactttcaccgccttgtcgccgcagccgcctaccacctaggtcgattctcggctcgggcctactcgctactattcaaaggactcgccaagacaaatctttcaacgatggagaaggcgctggccaagctcatgctccgtgaccttgatggcttggctgaggatattggtgcatggttcgccgctggtcgaggaagtgaagaggcacttgtcgccgcgctgagccagtcgaacgtgcaagacaacggcgtgggtgcaatagaggaagaagcacatgacgggagaatcgacgttgtgctcattgccctcgaagacaacttcatggctgcactggcgaccgcgacgctagcgctggagcgcggcgatgaagcgttgctgtcacgagcacgcgagcggctacagaacggcatcgaggttgccgctgacctcgaactcgtacctgcgtggtggattcatcgcctgactatccacctgctgggcgacctctgggacaccagcttccacaaggtattaccgctgggaggactccctggtagcgatgtcggcgattgggcacgattgcgcaagctctttatcgcttctctctatcgcagaagcaaagccgagatagaactctggccatcgcaacttcaagcagcgcggcgcgtgctcgatacaggcgtgaacctagtgctatcgctgccgaccagtgccggcaagacgcgcatcgctgaactgtgcatactggctagcctcgcacgcggcaagcgaatcgtcttcgtcactccacttcgggcgctatcggcacagaccgaggccgggctacggcgcacgttcgccccactgggcaagaccgtttcgagcttgtacggcagcatcggcgtcagtggagccgacgtcgatgcgttgcgctcaacggacatcgtagtcgccacacccgagaagcttgacttcgcactgcgcagtgattcaacactgctagacgacgtaggcctcgtggtgctcgacgaagggcacatgattggtctaggcgagcgggaagtacgctatgaggctcagattcagcgcttgctgcgacgttccgacgcggccgagcgacgcatcgtgtgcctatcggcaatactacctgatgggaaccagttggaagacttcgcggcttggttgacatgcgaccaagctgacggactaattaaggacgactggcgcccaacacggctacgcttcggcgaggttgaatggaagggccagcatgcccagctcagcgtgagtgtgggtgacgagaagcccttcatcccgaagttcatagtcgcgaagaagccaagtcgcggtcgtgccagaaagctgttcccatccgaccaagcggagttgtgcatcgcgacagcatggcgactagtggaggaaggccagactgtcctcgtgttctgtccgatgcgtcgatcagtgctgccgttggccgcgaccatcattgagatgcacaaacgtggacacattgattcggtgcttgagcaacctgtgtctgcgcttactacggcactggcggtcggcgcggagtggttcggccacgatcatgaccttcttgcatgcctgaggcttggcgttgcggtacatcatggcgcgctacccacaccgtaccgcaaagagatcgagcgattgctacgtgagggtgtactacgggtaacagtatcgtcaccgacgctggcccaagggctcaacctcgctgcgacttcactcatcttccgcggagtgaggcgaggccgggatctcctcgacatttcagagttccgtaacgtagtcggcagagctggccgagcctatattgacgtcgaaggacttgtgctatatccgatgttcgatagacacaggcaacggcgaaccgattggcaggatttgatcgcgaatcagggcggtcgagaaatggaaagcggcttactccggctgatagtggctttactttcccgcatggcgaagcaaataggcacgagcgatatgggaaaacttctcgaatacgtcgccggacaggccgtgtgggaattctcagcaattgcgtcggaaacggctgaagaggcgactgaagaacgacaacgatgggatcggcatttggcgagcctggataccgcgatctttagcttgcttggcgaatccgttgtgtcctatatggaggtgggagccaaacttgatgagatgctagtagcctcacttttccagcggcgccttgtccgctacagtgaagacgttcgcaagctgttacctgcgggtcttcattctcgggccaagtacatctggaacaacaccactactacgcagcgacgtggttacttcctggctggtgttggattcaccgcaggccaagctcttgatgagcatgcatcggagttggagcacctgcttctcgcggccaacgtgaacgtcgatctcaacgacgaagacgaggcaataacggcgatcacggctttcgccaaaatcgtattcgacatcgcacctttcaaaccagaaagattggtcgctaactggcagtccctgctcaggcgatggctccttggacagtcagtggttgatgcctcgtccaaggacaacgacgaggacatccagttcatcgaacaggcgttcgtctacaacctaccctgggcaatggaagcggtccgagttcgggccgaggcacatgaggatatatcctctgacgaggtgaaattatcggagtacccgcgagcgaacgcagttgccgcagttgagacgggtactctatcagttgcggctgctacgctgatcaaagctggctttggctcgcgtcttggtgcgattcaagctatcacgtccaccggggcgagttttgattcaatgcgcggtctgatggcttggcttgcgtcggaggatgtagtaaatctttctgctgctttggattggccgacaccggaatcgcacgcactatgggctgcgttcaacggccccgatggggtcgagaccacgcaaacctgggatgcgactgagtacaggagcaacattaagtggcacggcgttccaatgccgcctggtacccccttgcgtattggcggtgggcctgggcgggagtgcagcgtattcacagccgatttccaagagattggtatgctcagatggacacccagtagcaagggcttgattgttgcaacagcgactgcaaacgctgcgaagttcgatcttgaatacctcggccctggcaaagtgacaagaaaatga

SEQ ID NO: 82607 - DNA, 258 bp, Citrobacter koseri
ttggatgcctccataatccgagaaatggaagaagcctcgccgcaggggatcagcctttacaccagcaagaagcgcgagcagatcgaatcgctggaactggacaggtcgagcatccatattgccgagtacctaatcgccttgccaccgaggggtgtattgatggcgcggctgcaaccggcaatgccgcgggtgcagttgcagatcgcacagcgcaatccaggcaccgaaaattctatctccagttcccgaagttattga

SEQ ID NO: 82608 - DNA, 510 bp, Citrobacter koseri
atgtcgcaactgtctttttccttgttcgatgacgctttgctggtgcgtgacgcccaggggcgctactcgccggcatcggtggatcaaattcttgaagcggcacgccaggccatcgagcagaagatgcagcgtggtgctgagttcacttccccggcgctggtcaaggaatacctgcgcaacaagctggcaggctttgagcatgaagtctttgcggtgctgtttctggatacgcgccaccggctgatcgagtaccgggagatgttccacggcaccatcgacagtgcatcggtgtatccgcgcgaggtggtcaaggaggcgctgcggctcaatgcggcagcggtcatcctctcgcacaatcacccgagcgggaatcccgagccgagcagtgccgacaaggtgctcacgcagcgactcaaggaggcgctggggctgatggaggtgcgcacgctggatcatgtcatagtcgccggagtaagcacggtgtcgtttgctgaggatggcttgttatga

SEQ ID NO: 82609 - DNA, 1167 bp, Citrobacter koseri
atgaaaaggaagatgcctacagcggcggggaaaagcgccgccttaccggctggctatgccggcatccacggcggcatcgtggaactgctggatgcggcgcgccaggcagcggcgcgcagtgtcaatgcgctgatgacggccagctattgggagattggccgccggatcgtcgaagccgagcaaaaaggcagacggcgggccgtttacggcgagcagttgatggcgaggttgtccgccgatctgacggcgcgattcgggcgcgggttcagcccggacaacctggagaacatgcggcgcttcttcgccgcttacccccttgaggcaatttccgagacactgtctcggaaatctggtgaagggctgcccatcgagaattccgagacggtgtctcggaaattcgacctctccgaactggcccaggttttcaccttgccctggtcggcctatgtccggctgttgtcggtcaaggatggccatgcccgccagttctacgaggccgaggcgctgcgaggcggctggagcgtgcgtcagctcgaccgacagattggaagccagttctacgagcgcacggccttgtccaaagacaaggcggcgatgctggtcaaggggtcggtggccaaacccgaggatgccgtcacgcccaatgacgccattaaagacccgtatgtgctggagttcctcgacctcaaggacgaatattcggaatccgatctggaagcggccttgatccagcgtcttgaggacttcctgctggaactgggggaaggctttacctttgtcgggcggcagcggcgcttgcgtatcgaccagacctggtatcgggtcgatctgctgttctttcatcggaagctgcgctgcctggtcatcatcgacctgaagctgggcagcctgacgcatgccgatgtggggcagatgcatatgtactgcaactatgccaaggagcattgggcctacccggatgagaacccgccggtgggtctgatcctgtgtgccgacaagggccatgctttggcgcggtatgcgctggatggcttgccgaccaaggtgatggcggcgaactaccggacggtgttgccggatgccgaattgctgcaaaaagaacttgagaacacgcggcgtctgctcgaatctcgcggcgcgctgtcccccaaggacgacaagccatag

SEQ ID NO: 82610 - DNA, 1203 bp, Citrobacter koseri
atggctaagatcaagctcaccaagtccgcagtagatgcggcacaaccccaagcgcaagccatcgagctgcgcgatacccttgttcccggcttcctgtgcaagattacgccggccggtcgcaaggtgttcatgctccagtaccgaaccaacgccggcgagcgacgcaagccggccctgggcctgttcggcgagctgaccgttgaacaggcccgctcgctggcgcaggaatggctggcccaggtgcgccggggcggcgatccggcagcggacaaggccgaggcacgccaggcacccaccgttgaggaattgtgcaagaagttcatggaggactactccaagaagcgcaacaagcccagcacccgagtcggctatcaaggcgtcatcgaccgctgcatcatcccgctgctgggccgcaagaaggttcacgacgtgaagcggccggacgttgccgggctgatggagaaactttcatacaagcagaccgaggcgaacaaggcgttcagcatcctgcgcaagatgttcaacatggcggaggtgtggggctatcggccagacggcaccaatccttgccgccatgtcccgatgttccctgccggcaagtccacccatctcatcagcgacgacgacatgggcaagctgttccggcagctcgacaagatcgaggtcgaagggcttgagaactacgtcatccctctggcgattcgcctgcaattcgagttcgccgcccgccgctccgaaatcgtcacgctcgaatgggaatgggtcgatctggagaatcggcgcgtcgtctggcccgacagcaagaccggcggcatgtccaagcccatgagcgaggaagcctaccggctgctttcgacggcaccgagacaggaaggcaatccctatgtgctgccgtcgccacgccatccggcgcagcacctgaccacaggcgaatattacggcggctggtgccgcgtgctcaaggcggcgggtgcgacgcacgtggggacgcatggcatccgccatcgctctgcgaccgacattgccaattcaggtatcccggtcaaggtcggcatggcgctgacggcgcacaagaccgtcgtgatgttcatgcgctatgtccacaccgaggacgatccagtgcgcgaggcggccgaactggtggcgaaccggcgcaaggcgattaccggcgccaagcagcctcctgcggaggcgacagcatga

SEQ ID NO: 82611 - DNA, 420 bp, Citrobacter koseri
atgaccaggcgccggtcatctgtggcatcgcccgcagcgccgtcggcgctgctgggcgacattcgggcactgatcgaggcggcgcgtaagcacgccgcctcgacggtgaatagcgagctgacgatgctctactggcgcatcggccagcgcatccacacgcaggtcttggacgggcgccggggcgcttatggcaaggaagtcttgcctaccctggcggcgcagttggtgaaggagtacggcagcagctttgccgagcaaaacctgcgccgcatggtgcagttcgccaccaccttccccgacgagcagattctcgtatcactgatacgagaattgagctggacgcacttcattgccctgatcccgctgaaagacccgctccagcgggactactacgcgcagatggcgagcgccgagcgctga

SEQ ID NO: 82612 - DNA, 642 bp, Citrobacter koseri
gtgcgcacgctgcgcgagcgcatcgactcgatgctgtacgagcgcacggtactgtcccaaaagccgggcgagacgatcgcgcaggagctggcgacgatgcgcgatgcgcagcgcatgtcgcccgccctggtcatgcgtgacccgtacatcctcgacttcctgggactgcgggacacatggcaggaaggcgacttggaggcggcgatcatccgcgaaatggaatccttcctgttggagctgggcgcaggtttcagcttcgtggctcggcagaagcgcatccaaattgacggcgaagatttccaccttgacttgctgttctacaaccgcaaactgcggcggctggtggcagtggagttgaaggtcggcgagttcaaggcggctttcaagggacagatggagctttaccttcgctggctggacaagcacgaacgggagccggaggaagcctcgccgctgggaatcatcctttgcaccggcaaaaagcgcgagcagatcgaattgctggagctggacaagtcgggcatccacgtcgccgagtacctgaccgccttgccgccgaggggcgtgctggtggagcggctacaacaggcaacgcagcgggcgcagttgcagatcgagcagcgcaagaccgacaacgagtag

SEQ ID NO: 82613 - DNA, 510 bp, Citrobacter koseri
atgtcgcaagtgtctttttcctcgatcgactcctctctgctggtgcgtgacgcacagggacgttacctgccggcctctgttgaccagatccttgatgcagcgcgtcaggctattgaccaaaaaatgcagcgaggcatgtcttttactaatccggcagcagtcaaagagtacctgtgcaccaagctggcaggctttgagcacgaagtattcgcagtgttgtttctcgatacacagcatcgcctgattgaatacatcgagatgttccgcggcacgatcgatagtgcatcggtatatccacgtgaagtggtcaaggaggcattgcggctcaatgcggcggcagtggttttctcgcataaccaccccagcgggcacccagagccaagcagagctgatgaaactctaaccaaacggctcaaggatgcgctggctctggtggatgttcgcacgctggatcacatcatcgtggcaggtcaaagaaccacatcgtttgccgagcagggcttgctgtag

SEQ ID NO: 82614 - DNA, 303 bp, Citrobacter koseri
atgcgacttttgtttcaacgtgcggcggcacgatttcaagcacggcgcacatggtatctgtacgagttgagcgattgggcacttgccctcatcggcattatttcgtttctgattgcggggtattggggcatggccgttgccgacgtattgcaagacctggttaagatgacgaatagaggcgggttgtcctggattagaaccgcaggtttcgcattactcggcctcctgggtatagccatttggttctacggctgcatcgcggcgcgctgccatagcattctgtttgagcggcattttcgctga

SEQ ID NO: 82615 - DNA, 528 bp, Citrobacter koseri
atgagtaagatgattgcggcgccagaacgtaaagtatccgatgccaatggcattatcctgactccaatcgatctggctaaggaagatccggcactgtttggccatttccagctccacgagcaggccagggacgcagaagtccaagccgtgagtagttggtatcgtagcggttccgggccagccccaactcaggggggagtatgggtaggtgggagcattctcgtgcccctggctgggcaaaacccgccggccaacgccatcacgaacagcatcgattacacatgggataacaccaacctgcgcggctgggacagccaggttagtgtacgtctgatcatccaggctgggtcgaatgcctgggaggcgaatgtgactgcggccaacgtcggctcaatcagtgcagctggggccaatattcctgcaaacgcgcagctacagttccagatgagggttggtacgctgcaggtgagcctgttcaacccaccctatatttcaacgaactcggtgcgggtccattacacgtattga

SEQ ID NO: 82616 - DNA, 528 bp, Citrobacter koseri
atgcaaatcagtagtttttactcatccggcctgccctcgaactattcgacgccttcgagtagaacgacccaggcagttagcaatggcgactcagcgaacccgagtcccgcaagcagcggcagctacaccgtttccctgtctgctgaagcgctactagccgcacagaatgagcaggaacgatcaactgccagcagcacgaccagtgacgatggctggaactggacaacatcatcagcaggcattgcccatgcaaccggcccagatggtcatgaatggaaaagaattgacctcaaccaagtgctgacgcctgaggacaaaaatctggtggggtggcctgcgaccaataaccctgccgctcaacaggcagccctgttcatcgcattggatcgggctgatgggcatttgcaaggtgcggtgacacgagaatacttggagggcaacaaagagaagaacattgctggactggctgaacgcagtccggtgatttctcaatcagccgtaagtgattttctcaaacgactgggataa

SEQ ID NO: 82617 - DNA, 486 bp, Citrobacter koseri
atgcaaatcgacaactcctattctgggctttactccgccttgaacaagaatactcagacgactgataactcaagcgctgcggcacagggcacatcgccgaatcttgactcacagacttcgtctttcgccgcactgatggctgcccagatggggacagataacatcgccaccaaagccgttaatgcaacaggcgctgttacagcgaccagcggaaactcggctatcgcgcttgagaagattgatctggaaaatctactcactgatgaagataagcgcctgaccggatggccagatgcccagccaaactgggctgccatttacattgccctagatcgcaaagatggcagcctgcaggggccgatcaccagagactacttggtaggcaatcctgaactgaatatggtcggtttggctgaaagaagccaaggggaaggtggcatcacttccagggttgtcgatgagttactggaacgactcgccggatga

SEQ ID NO: 82618 - DNA, 825 bp, Citrobacter koseri
atgcttgcatcccgtttcgcttcccgttccccggtgcttcgcagcgacttcccgctgtccgatgaccagatcagagccgtggtgccgtccatctatgccgacacaccacaccagagccgttcagaacgctacagctatatccccacagctgccgtgctgacggaactgcggaaagagggatttcagcccttcatggtgacgcaaacccgcgtccgtaacgaggaccgccgcgacttcaccaagcacatgatccgcctgcgccatgccaatcaagtcaatgacagcatcgccaacgaaattattttgctgaactcgcacgatggcaccagcagctatcagatgctggcgggagcgttcaggtttgtctgcgctaatggtctggtatgcggcgacaccgtggccgatgtgcgcattccgcataaaggtgatgttaccgggcaggtcattgaaggcgcttacgaggtgttgagcggctttgaacgggcgcaggagtcccgcgaagccatgcaggccatcaccttggatgcaggcgaagcagaaatattcgcacgcgccgcgttggccttgaagtacgacgacccggacaagcccgcgcccatcacggaaagtcagattctgatgccgcgccggtatgacgatcgccgccccgatctgtggatggccttcaaccgcatacaggaaaacctgatcaaaggcggtttgcgtggccgcagcgccaacggtcgccgccaaagcacccgagcggtacaaggcattgactccgacattcgcctgaatcgcgccctgtggctgctggctgagggtatgcgccagttgaaagcttga

SEQ ID NO: 82619 - DNA, 2037 bp, Citrobacter koseri
atgcacgccattactcaaaccgaatccaaaaccatcaccacacacgaaactacagccccagcacaaagcctgattctggtgccgttgtcacagctgcgccgctcgcgccgtaacgtgcgcaaaaccgcaggccagtccatcgaggcgctggcgtcgagcattgagcgtgttggcttgctgcaaaatctgaccgtgattcttgctgtcgatggcaagcattacgaagtagtagccggtggccgcaggctcgccgcattgaagctgctggcaaaaaaacgtcgtttgcccaaggattgggaggtgccttgcctaatcgtggccgatggcagcgcccgcacggtcagcctcaccgagaacgtgcagcgcgaagccatgcatccggcagaccagtttgaagccttcgcggcgctggtggccgaaggccgccccgttgaggatatagcggcggacttttccgttacgccgcttgtggtgcagcgccgcttgaagctggcgaacgtctcgccgcgtctgatggcggactatcgggccgatgccgtcacgctcgatcagttgatggcgcttgccatcaccgacgatcacacggcacaggaagccgcgttctacgatgcaccaacgtggcagcgcagtccgcacagtctgcgcgaacgcctgaccgagcgcgaaatcgacgcttatcgccatccgctggtgcgcttcgtcgggctggacaactacgaagccgcaggcggcggcatccgccgcgacctgttcgcggaaggcgatgcgggcgtgtatctgaccggtgctgcgctgctggaaagtctggcgcaagacaaactgacaggtattgccgccgctgtccgtgccgagggttgggcgtgggtggatgccacgccgggtgtgacccatgccgacctgcacgctttccaacgcgccccgagggagcgccgcgaaccgaacaagcgcgaagtcgcgcgcatagagaagctgcaagccaagatgcacgaactggccgaggccgtggatggcgcgctggaggctgacgacgaggaaaaggccgatgccttgcaagaggaaggcgaagccgtgggcgagcagttgcaggcgctggaagatggcctgcagggctacagcccgaatgtgaaggccgcagccggtgccatcgtcaccatcgaccgcaatggcgaaaccgtgattcatcgcggcctgatgcgtgaggccgaagccaaggcgctgcgcacgctggaacgcttgcggcagggtttcggcggcgaaggcgaagccggaaacgacgacgaaggcgaggacgacgaacagcccaagatcgccgccatgtctgaccggctggcgcagcggttgagcgcccaccgcaccgccgcgctgcaaatcgaagtcgcccggcacccgcaagccgcgctggctgccgtggtgcatggcatggtgcagaccatcttgcagggcagccactacggccacgacctgccgctgggcgtgagcttgaaagtgcaagaccggctggaaggcatggccccggactggccggaatcgcccgccgccgtggcactgcgcgaactgcaacaggtggcgggcgaagccttgccggaggacagcgccgaactgttcgccgcgctgcaggcgaagccgcaagacgaactggtgcggctgctggccgtatgcgtggcttccacggtggacgtggtgacgccccgcgccacggtgcagcaacccggcgaggaattggcgcaggccgtgggcctcgacatggccgcatggtggcagccgaccgcagaaggctatttcaagcacgttccgaaggctgtgattctggatgccgtgggcgagtacgcgccgcagcacgtcacccggctggcgaagttgaagaaggccgacattgccagcgaggccgaacggctggccgatggcaccggctggatgcccgccatcttcaaggccgcaggcccgcaggatgccgcgcaggaggcaggcccggagcaggacgccccggaggatgccgaggcaatggcggatgaacccgccgaggcgctggccgcttga

SEQ ID NO: 82620 - DNA, 210 bp, Citrobacter koseri
atgacccgcaccaccatcagccgcccgcgcatggcggcgatctacgcccccggcacggtacgcgcccgccgctggcacggcgatggcgacgtgcgcggctaccgtccgcccttgggctggacggcctgcgccgacctcaccgacattcatcccatcacaggccgcgccttgccgcgtgctgtgtggtggctcattgagacgaaggaataa

SEQ ID NO: 82621 - DNA, 825 bp, Citrobacter koseri
atgcgcgtttatatgatcgacagaaatatcgtatccaaaatttcatcaggcttcaaaaattgcagcatcgaagataaaaatttcattaaatcactagatacaaaaggaagtgccataagccttcttttttcaaacatcgaaggccgacttgggattcctcaagacatgaatcaagcatcctccggcatgttcgctgaaggtgacatagctaaggggttcttcaagaaggctcgcgttgattcaggtttttttgaagccttcaacaatcttgcctcctggggtatcacaactcatcagagagactcttttctgaaaaattcagaaatcgtcgcatacctacaagatacgttgcatcagccgcgcagcccggcccaagccaaagaggttagagaggacattttaaatttcgcatctaagcgagatatggaaattggtcacccaatcatgctgtgtggcttgtcgactttatatggaaacaagaatgcgcatggagtgctaaaacccaaggaacccaaacagaatgatcctaagagaaatgcgaggatttataacgcattggccgacctgatggtgattgtcaatctttcagagttggcgggtataagcagaggaatgaaaatgcgaattcatttcgcaacaatcgacaaacctctccgtggatttgttcaggaattcggactgcttggtgttacaaagaaccgtttagccctagtcaatgacagcacaatcacccttggattcaatatgtcgcttttcccaaagctaaccggcaacgaggcagaagagttcaaggaatggttcaacaccaagaagcaaaaaacatga

SEQ ID NO: 82622 - DNA, 315 bp, Citrobacter koseri
atggccaacatcggcaccttcaccgcagacaaagacggcttcaccggcacgcttcgcaccctgacgctcaacatcaaggtcaagctggttcccaacgacaagggcagcagcgagaacgcccccgacttccgcctccaggccgccggccacgacatcggcgcggcgtggaacaagaccagcgaagccgggcgggaatacaagtccgtgaccctcgacgatccttcgttcccggcgccggtctatgcccgcctgatcgaaggcgagaacggcacgcacgatctgatctggtcacgcagcaggccgcaagcggcctga

SEQ ID NO: 82623 - DNA, 270 bp, Citrobacter koseri
atgcccgtggaggcaaatccaagatggcgtgtcggcgctgctagcaccgccgggctttcgggctacgccccgtgccggcaagccgtcacggccatgcggcttcaatccctcacgccttcgcgcctgcggcgctacgcgctccgcttgcggaatccagtcttacacgccgacgcgcgctacggcgtgctgcgctctttcaacaccgcctcaagctcctggcgtacccgcgccagcagctcatcggtcttatccgtgctgtcgccggcatag

SEQ ID NO: 82624 - DNA, 333 bp, Citrobacter koseri
atggactgtcatcttggtttttatggggaaaccaagttggtgacagcgaaacactcattggcgacggcgatacggacagtcaggaaggcgcggggcttgagccaggaagcgttttcggacgtgtctagtcgcacctacatgagttcgctggagcgcgacttgaaaagcccgaccctgcacaagctgaccgagctgtgcgaggtcatggaggtgcatccgctcacgctgctgacgctggcctatgccggcgacagcacggataagaccgatgagctgctggcgcgggtacgccaggagcttgaggcggtgttgaaagagcgcagcacgccgtag

SEQ ID NO: 82625 - DNA, 351 bp, Citrobacter koseri
atgacccaaccgctcatcactgccgaacagcacgcacaactgctcgccgttggcgaggcgcgtgccaccggccggagcatcgacccgatgcccgtggtgcggctattcactccggacgcgcacgcgacctggttgctggccgcgctcgatcctaccgatggcgatacggcctacggcctgatcgacctcgggatcgggatgcccgccttgggaacggtgaagctgtccgatctggctgccatcgtcgggccgtgcaagtggcccgtgatgcgcgacagttactttcaacctgcgcggcgactatcggaatacgtgcggctggcgcaggaaaacggctcgatcatggattga

SEQ ID NO: 82626 - DNA, 771 bp, Citrobacter koseri
atgactgatcgcagcgtcgaacactggtatccgacagcggcttatctctacgttctgcaccagggcggccccgcgctggcctgggagtacctgcgccgaaaccctgactaccggcgcgactggctgcaccgccgccgccgaccagatacggcgcatcgttggggcttgcgcctgctggaagatcccgccctggatgcacgcgacgcgcatccggcgtggttccccgatcacgatggcgtgatccagctctacccggacgacgacccgccgccggatgccgatgccttcgagttctggaacgtcccagggcgcaagcacctgatccatgatggcaagcgcctgatgctgacggcgcaatggcccggctgctgcgtgcggctcgcgctcacgccgagcatggccgacggaatggcctacctctacgccatccgaggctgcactacgccttgcgcacgctatcgcgcactggcggctgggctggatgcgctgtccgccgcgaccttggccgcacctgcggcggcggcccgctcccggcccacgccgaccgcggtgctggagctgcacaccttgcaggcgctcgacgcgaccctggcgggcgcgtccttgcgcgaggtggccaaaggactgttcggcgcggatgccgtcgcggccgattggcacaaagacggcgccttgcgtgcccgcgtgcggcgcttggtgcgccgtggcgaggcgttgatgcgcggcggctatcgcagcctggcgcagctcccgccagttgcatcgcagtaa

SEQ ID NO: 82627 - DNA, 846 bp, Citrobacter koseri
atgtccggccctccagggcaagccttgccgcaatgcgaacagctcgacctgttccgcgcgctgccgggcgacatggcgccacgcgacagccaggacttgatggcctttccattcttctcgctggcgaaatcgcggcgcatcgcgccgatcgacttccgcagcgggaacatcaccatccgcgtggaaggcacggccgagcacggcatcgccacgatatgggatgccgacgttttgatttgggcggcctcgcagatcgtggaggcacgcgacgcgggcattcgcccgtcgcgctggatacacgccacgccctacgagatcctgcgcttcatcgggcgcggcacatccctcaacgactacctgcgcctgaaagcggcgctcgaccggctgcaatcgaccagtgtggctacgtccatccgagaaaccacgggcaggcgcttgcatcgcttttcgtggatcaacgaatggcgcgaactggccgatgccagcggcacgccgctgggcatcgagctgatcctgccggactggttctatgccggcgtgctcgacgccgccctggtgctgaccatcgacccggcttatttccgcttgaagggcggcatcgaacgctggctgtaccgcttggtacgcaagcacggcgggcggcaggaacacggctggcaattcgacttccggcatctgcatcgcaaatccggcagcgcggctcgcttctcggacttcgcctacgacctgcgcgtgctggtggcacggcagtcgttacccggctacgtcctcggcatcgagcgcatgccggacgacaacaccgaactgctgaccttccggcccgtgctgcatacggcacggggataa

SEQ ID NO: 82628 - DNA, 558 bp, Citrobacter koseri
atgaacgtatctgccttgcctgccgctcacgcggcgacggctgcaccggctgctgcgccgccgccttcgctttcgacgctcgccggccaggctggcaacgtgccgctgacgcgcgtatcgctcgcctacatcgaaccgcgcttcaagctctacctgcgtttcggcgaaccggcacgcacgctgcggctcgaccgctggcggcgctgcgcggtgttcctgccgcgtgcaatattctgccgcgtgcgctgggaagcaaacgactacggcacgatccgctggcagctcatggtgatgcaagcttccacgccgctggacgacatgcagcgcatccctggcgtgcggccgggcgcacgcctgctgctgcacgccgaaggcgaaaacgcagtgcgtgccgcgctggaacgcatcgacaacatcgacgcgcagggtatcgccgccatcgacgtgtcgcccgcgtactggcgcacgctgggcaaccgtctggcggcccgcctggcgctgcccgaatacaccgccgaacggcacgccgcctggctcgctggaagggcgctgccatga

SEQ ID NO: 82629 - DNA, 600 bp, Citrobacter koseri
atgacgacccaatccaacaccccatgcacgcacgaagtcgcgccgcaacctcgctcgcgcctgcgcgttcgcatcgtgctggcgggcttcgccgccgtcggcctcgctgcgctggcctgggcggctttcgtgtcgccgctgccgcgtctgacctacaacccgtccgacagcgtggcggtcggctggtatcgcatcgaaccgttcgacccgcgcaccgcctcgctgccacgtccgttgtccgtggacagcatcgtgctggtgccgctgcccgacagggccgccatgctggctgcgcagcgcggctacctgccgacccgcgttccgctgctcaaacgtgtgggcgcggtcgcgccgcaacacgtttgcatcgtcgccgggcaggtacgcatcgacggcgtgcctgcggccgccgcgctgcctgccgaccggctgggccggccgctgccatccttgcagctttgccgccgcctcgaatcgggcgagctgttcctgttgagcgtgaccaatccagcgtcgttcgacagccgctatttcgggccggtcagcgcatccgccgtgatcggcgtcgcgtatccggtctggctggaaacacgcccatga

SEQ ID NO: 82630 - DNA, 924 bp, Citrobacter koseri
atggatgacctccgacgcattgatctcaacctgctgctgacgcttcatgccttgctggcggaaaaacacgtcacacgggcagcggtgcggctgcacaagagccagccggcggttagccatgcactggcgcagttgagggatatattcaaagacccattgctgacccggcgcggcgcaggtatggcgttgacaccacgcgcccaggatcttctgcaaccactggaattggcccttaatcagctcaacgcactactgaatgaaggcgccttcgaccctcgccaggctgtacgctgctttcgcgttgccatgtccgactacgcggcccatcttgttctgccaactctggtgaaacggctgcgcgaccaggcgccaggcatcgacgtcatcgtgtgccaagccagtcgtgaagccatgttggcccagcttgcggatggcgagatcgacctggctcttggcgtattcccggacaccgcaagcgacatcgtggttgagaccttgttcgaggagcacttcgtcagcgttgccgacaaacgctcgttacccctgcgcgggaagctgtcgctggacaagtggatggcgcgcccgcatgtgctggtggccaccaggccgaacaccgagaacgagatcgacgctgctctggccgctcaagggcggcgcaggcatatcgcgcttgttctgccgcattggcgtgcttcgaccgaagtgctggtggataccgatttgatcctgaccgttgccagtcgtacgctggatcatgtgcgggatgaccaaaggttgacgcggttcttgcctccatttccactgccccgcttcgcgttccagcaggcatggcatgtacgtcgagatgccgactctgcccatcattggttcagaagcgtggtcatggattgcagtcgggcgatccagcacgtcgtggaaaaatag

SEQ ID NO: 82631 - DNA, 516 bp, Citrobacter koseri
atgcagtggctatctcctttctccggtctgcttccaatggcgattgccgtagtggcgggcgctgccgttccttttcaggctgcaagcaacgccgcattgggtcgtgctctgggacatccgttgtgggccaccttgtcctcgttggcggtcagcgtattggtcgtcgtgcctttgatgatgctgatgcgcgtcccgggacccgcttttggggctgcggcccaagggcctgcctggtggtggctgggcggtgtggccggcgtggcatacatcactgctgcgctcatattgacgcccaaattgggcgcagccagcttcatcgtcagcgtcattgcgggccagatgctggcatcgctgctgatcgaccactatggcttgatggggctggcccctaaacctgccggtgggtggcgggtggtgggtatcgcgctgattctgctgggcatggtcgttgtgcagatgaacagttctccagcagttccggtatctggttctgcatcctcttctggacagtcataa

SEQ ID NO: 82632 - DNA, 618 bp, Citrobacter koseri
atgacgaatcccatccagcacgccatcgaaagcagaacgtccgtcaacttcttccaacccgaccgtccgctggatcagcgtgtcatccaagacctagttgcccaagcgacgaaggcgccgtctgcatataacctccagaactggcgattcatcgccgtgcgatctgccgatgccaaggcgagtctgcaatcggcttccttcggccagcagaagattatggatgcatcggtcgctttcattgtctgcggcacgctggccgcatatacgaaattggcgacggccctgtatccaagtgtggaggctcgcatcatggagcagcacatggtcgatgaatgggtggcacaagtgagtgcaacccacaaagccaatccggccttgcaacgcgatgaggccattcgctcggcctctctggccgcgatgacgttgatgctagcggcacaaggcatggggctggggtcgtgcgcgatgagcggattcgatgcacagcaggtcagccgggcgtttggtcttgacgcgaccgaactgccggtgatgatcgtgaccgtgggccatgccgccgatgacaactggccgcagaagccgcgccgggcattgacggaaattctttccatcgtgtga

SEQ ID NO: 82633 - DNA, 945 bp, Citrobacter koseri
atggagcttcgacacctgcgctgctttctggccgtagccgaagaactccacttcgcccgtgccgccgagcggctgcacatcgagcagtcgccgctgtcacgcgcaatcaaagaacttgaagaagacttgggcgtggtgttgttcgcccgcacgacacgcagcacgcggttgacccgtgccggagccttgttcttagagcatgtacgccgggtgttcgcggccttgcagcaggcacgcgatagcgttcaagcagcagcgaacggttttcatggacagttgcgcgtggcattgtcggatggcatcacgccatcgcgcttgcctacgcttttggccctttgtcggcaggaagaacccgaggttgaaatccgcttcttcgagattcctctgtcgcagcagatcaaagggctgcacgacgaccttttcgacgtgggtttcgcgcagtccgacgaagtgggcgacggcatcgtggccctgccggtctggagcgatgcgctgatggtggcagtgccagcgcggcatccgatcctaagccacaaacgcattccactggacgaggtgctgcgctatccgttggtgatgtgtgatccagtggtatgcgaaggtcatgctcgccagatcgcccgcgtgttgcgcgtcgtggataccgagccactggtagccgaacaggtcacgtctttggatctgatgatggcattggtgttggcaggtttcgccttagggctggcgggtgcctcgcaaattgccgccaaccgtgagccgggcatcgtgacgcggccgctggctgggcgttcgccgatgttgaccacctatatgttgcgcctggatgctgagttgtcggaaaccctctcgcgcttcattgagcgggtcggtgtcatcgactcatccgccgacagccagcacggcatatctaccagacctgataccccggaggaaatcgagccatga

SEQ ID NO: 82634 - DNA, 255 bp, Citrobacter koseri
atgaagaaaatcatgtcgcttttgttcgccgcaatgctgacagcctgcggccaatccgagccgactgccaccgagacagtggaatcgctcgccgccgatcctgtccgactcaaagagctgcgccagcagtgcaagctggatcgcgcgaagttgggcgatgagctatgcaaccgagtggccgaagcaacgcataagcggttttatggcgacggcaaggtgccgtataccccatcacaagaatcaccgaagttctga

SEQ ID NO: 82635 - DNA, 804 bp, Citrobacter koseri
atgcgaactttggaacgaacacgtagcgatttagccgccttcctgcgggcacgccgcgagcgtctgtcgcccgctgacgtgggcctacctagcggtgggcgtcgtcgtacgccaggacttcgccgggaggaagtagccgcgctcgctggcgttggcctgacctggtacacgtggcttgaacaggggcgtgacattggggtatcggccgcctttttggacagcctggcgcgggtgctgaaactggatgcctccgagcgacggcatttattcctgctagctcacgaaagaccgcccgccgagccgggcaagacatggtgcgtgttgccgccgttggtacgacgcctgatgcacgacctgccgcacccggcctttgtgctcaacctgcgctgggacgtgctgggcttcaatgcgcccgcagatcagctttggggtttcagttcgcattcgcccgagcggcgaaatctactctggttgctgttcaccgatcccgttctgcgtgagcgcgtggacgcttgggaggaacaggcgccgctgatgctgtcgagcttccgccgtgactttgctcgcgctactcaggaagcggacattcatgaactggtggacgaactggaacaggtttcgccagagttcaaagcgtggtggcgaaaacatgacgttcacgccgcctgcaatggcgtgcgcaagttgatgatcgacggtaaggcggagtcgttcgagcacacctcactgaccattgacgaggatcggcatctgcggttggtgatctatgcgcggcagcaagatggcgctgcatccgatcggtga

SEQ ID NO: 82636 - DNA, 1482 bp, Citrobacter koseri
atgatcgtgtcatttctcgggatacgcaatatgaactcaaattcctacccttcggcgttgcctacgcgcgccgctgatggcccgccatggctcggcctgtccgtgttgctgttggcgggtttcgtcacaatcttcgacctgttcgtggtcaatgtggccattcccagcatgcaggccgatctcggggctagcttcgcgcagatcggtttcatcgtggcgggttatgagttggcctttggggtattgctaattaccggcgggcggatgggtgacttgttcgggcgccgtcgtcttttcgtcatcggcatggccgggttcacactggcctcggcgctgtgtggactggctcccagcgctaattttttgatcggtgcgcgagtgttgcaggggctcgcggctgccttgctgttcccgcaggtctatgcctccattcgcgtcaatttcgacggcaacgacagccgccgtgccttcggactgctgggcatgacgctgggcttggccgcaatcgcgggccaggtgttgggcggctggctggtgtacgccaatctattcgatctgggctggcgcagcatctttcttatcaacgtgccgattggattgtttgccatcgctgctgctcgctatattcccgaatcgcgcgcgccacaacgctcggccttggactggcccggcgtggtgttggtcagcgctgggctgacgctcctgctggtgccgttgatcgaggggccaggacagggctggccggcttggagcctgtgggcgctggcagcggcggttgtgctactgacggccttttatcgccagcaggagcgaaggcgggtgtcaggtcttcttccgctggtagatatgcacctgctggggcaacgccgcttcgcgttgggcgcgctgttggtgctgctggtctattccacctccagttccttcttcctgtgcttcgcgctattggtgcagtccgggctggggcttgatccctttgtggcgggcagcatcttcgcaccttgcagcgtcggttttgttgtcgcctctctggtcgcgccgcgtttggttgcacggtggggaaccagcgccattgtcgcgggtgcgttggtctatgccatctctatagggctgctgattgcccaggtgcaagtggcaggctcgggactggagccgacgcggctgattcctgtgttgattgtggtcggcgctggccagggcctcatcatgacgccgttgttgaatctggtgttgggattcgtggaggaagcgcaggctggtatggcctcgggcgtgatctcgaccgtccaacaggtcggggccgcgctgggcgtggcagtggtgggcatcctgttcggcacggcattggccgctggtggtgcagtggcacaaaccggccaatatgcctcagcctttgtatccgggatgctctacaacctgggagcggcgctgttggtcagcgtgctgttgttgatgttgagccgagcgcagcgcgctgcgggttaa

SEQ ID NO: 82637 - DNA, 945 bp, Citrobacter koseri
atggagttacggcatcttcgttgtttccttgctgtggctgaagaactccacttcgcccgtgcagcggagaagttgcatatcgagcagtcgccactgtcgcgggcgatcaaggaactggaggaagagctgggcgtgtcgctgtttgcacgcacgacacgcagcacgcggctgacccgcgcgggcacgttgttccttgaacatgtacctcgggttttcactgcacttgaacaagctcgtgatagtgtcagggcagcagctaatggtttccacggtcagttacgcatagccttgtccgacggcatttcgccgtcgcgcttgcccgccttgttggcacagtgtcgcctggacgaaccggaggtcgatattcgtttgttcgaggtgcccctgtcgcagcagatcaaggggctgaatgatgatctgtacgacgtgggctttgcacagtctgacgaagtgggtgatggcatcctcgccgagccagtctggcgtgatccgctgatggtcgtggtgcctgcacggcatccgatcctaagtcacaaacgcattccactggacgaggtgctgcgctatccgttggtgatgtgtgatccgctggtatgcgaaggtcatgcgcgtcagatcgcccgcgtgttgcgcgccgtggatgcagagccactggtggccgaacaggtcacatcttttgacctgatgatggcgttggtgtcagcgggatttgctctgggtctggccggagcgtcacagattgccgccaaccgtgagccgggaatcgtggctcggccgttggccgggcgttcgccggtgctgaccacctatttgttgcgcctggatggcgacccttttgaaaccttgtcgcgcttcattgagcgggtcggcgtcatcgactcacccaaagatagcaagcacgccatatctgtccgacctgatgccccggaggaaatcgagtcatga

SEQ ID NO: 82638 - DNA, 249 bp, Citrobacter koseri
atgaagaaaatcatactgcttttgtttgtcgctgtgctgacgggttgtggcccatccgaaccgatagaaaccgtggagtcgctggcatccaatcccgagcggctgaaggaactacgtcagcagtgcaagctggaacgcgccaagatgggcgacgagctatgcaaccgggtggctgaagcaacgcgcaagcggttttatggtgacggcaacgtgccatacacaccaccggagaacccacccaagttctga

SEQ ID NO: 82639 - DNA, 1998 bp, Citrobacter koseri
atgcatgggacgaacgtgctgttcggacagatcgccgtggtattcggcattgtgatcgccggtgtgtggggtgccacacaatggacagccgccgccctgggctatcagctacgcctgggcccgccctggtttgatttcttcggcacaccgatttatcacccttggaagttgttcgagtggtggtttttcttcgatgcctatgcatcgcaggtgtttgacattggcggtgccatcgcgggcggcagcggtctggtggctgtcctggttgctatcggtatgtcgatctggcgttctcgccaatcccgattggtcaccacctatggttccgcccgctgggccgatacggcagagattcgcaaagccgggctgactgatccggcgggtgtcttcctgggcctgcatgacgatcagtacctgcgtcacgaaggcccagaacacatcctgaccttcgcgcccacgcgctcgggcaagggcgtcggactggtggtgcccacgctgttgtcatggcccgcgtccgccgtcatccatgacatcaagggcgaaaactggcagatcaccgctggctggcgctcgcgcttctcgcattgcctgctgttcaatcccaccgatccccagtccgctgcctacaacccactgctggaagtccgtcgcggcacgcatgaagtgcgcgacgtgcagaatatcgccgacatcctggtcgatcccgaaggcgcgctggagaagcgcaatcactgggagaaaacctcgcacgcgttgctggtcggcgccatcttgcatgtgctgtacgcgggtgaagacaagacactgcgcggggtcgccaacttcatgtccgatccggcgtgcccgtttgagctgacattgcaccggatgatgagcacgcgtcacctgggcgagacgccgcatcccgtcgtggcatccgccgcccgtgaagtgctgaacaagagcgacaacgagcgttcgggtgtgctgtccacggcgatgtcgtttcttggcctataccgcgaccccacggtggccgaagtcacgtcccgatgcgattggcgtattgccgatctcatatcggctgagcatcccgtgtcgttgtacctggtggtgccgccgtcggatatcaaccgcaccaagccgttgatccgactgatccttaatcagatcgggcggcggctcaccgaatcgctggatggcagcgatggcgtggagcgccgccacaagctgctgctgatgctcgacgagttccctgcgctcggacggctcgatttcttcgaatccgcgctcgccttcatggcgggctacggcctccgcgccttcctgatttcgcagtcgctcaaccagatcgacaaggcttacgggcagaaccattccatcctggacaactgccatgtgcgggtgacgttcgccaccaacgatgagcgcaccgccaagcgtatttccgagacgctgggcaccgccaccgaactgcgtgcgcagcgcaactacgctggccaccggctcgcgccgtggctgggccacctcatggtgtcgcgccaggaaacggcgcgcccgttgctgacgcctggcgaagtgatgcaactgcccgcggatgagtcggtggtgatggtgtcgggccatgcgccgatcaaggccaagaagctgcgctattacgacgatgccaatttcaaacagcgggtactgccgtcgccgatgctagctgacggtggctatgccgatgtgcctcctgcccgccccgacgactggagcggattggcgattcccactgtgcttgccgcagcggcgaccgcttccaccgatgacgtgggcagcgccgacgatggcggcccgcgccagcagcccgaactgtctgaagtcgccacctacggtcccgagccggaatacccggtcagcgacctgtcactgctcgatgacgacgacctgccgccccttttccccagccagctcgatccgaccctgcgacgcacggcccggctggcgtccctcgaccctgacgacggaatccagctatga

SEQ ID NO: 82640 - DNA, 465 bp, Citrobacter koseri
atgagccaataccgcttgaacctctttattcaacccgaacacgccaaacggctcgatgaactggccgccaagaaaggcgtatccaagtcgtccatcgtcgcggcggcgctcgcgtcctggctgtcaccggacgcaggcgaccagcgcgaggcggctattgccaagcggctggatcgcctgtcgcgccaggccgagcgcctggagcgtgaccagaacatccagattgaaaccctggcgctgttcattcgctactacctgaccgtcagcacgccggtgccagaagcccaccaggacgctgcccgtgctcacggcaaggcgcgcttcgagcagttcgtcgaacaacttggccgccacctgctgcgcggccgcagtctggtgcgcgacgtggtggaagagctacagcccgacccgatgcgcatggatgacgccgcactgtcggctgaagccagggagcgtagctcatga

SEQ ID NO: 82641 - DNA, 1062 bp, Citrobacter koseri
atgaacgccgtaccgcagttgccgcccgagccgcgctcatccgctgcgacgtcactggatcgccgcattcagatgctgcgcacggcgatggggccgctgatcgccgccgcgctggaagacccggacgtggtggaaatcatgctcaatcccgaccgcacgctttgggtggatcgcctgtcatcgggccgtgcgccgctggacgtggagctgtccgaggccgatggcgaacgcatcatccgactggtggcggcccacgtcggagcggaagtacatcgtggtcagccactgctcagcgccgagctacctgaaaccggcgaacgcttcgagggcatcctgccaccagcggcacccggcccggccttcgcgttgcgcaaacgcgccgtgggcgtgattccgctggagcgctacgtcaccgacgggatgatgaccaccgcgcacgcggactttctggtgcgcgccgtgcacgagcggcagaacatcctgattgccggcggtaccagcaccggcaagaccacgctggcgaatgctttgttagccgaaatcgccgccacgggtgaccgcgtgctggtactcgaagacaccatcgagctgcaatgcgccgcccgcgaccatgtaccgctgcgcacccgcgccggggtcgtgaccatgcaggaactggtgcgcgccacgatgcgcctgcgcccggatcgcgtcatcgtcggcgaggtgcgcggcggggaggcgctggatctcatcaaggtctggggcaccggccaccctggtgggattgccaccatccacgccagttccgcgctgggcgcgttgctgcgcatggagcaactgatccttgaagtggctgtgaatccgccgcgtgcgctaatcgccgaagcggtgaatgtcgtcgtttatatcgccggacgcggccgcaagcgccgcatcgaaaccattgctcgcgtcgttggcttcgacggcgcgggctatcgcctggcggatgcgctggaaacgtcgtttcccgagctgccgcgactttctgatcttccttcaaccttcaccactctggagaactgccatgacgcacgttga

SEQ ID NO: 82642 - DNA, 378 bp, Citrobacter koseri
atgacgcacgttgatgctttccgtctttccgtcaatccgattttcaaccctgcacgggtgcgccgcctggcccgccctgcgaagtacggtctgctgctggccgctttgatgttgctattggtcggcacggcgcacgccgccggttccagcatgccctgggaagggccgctgcaatccatcctcgattccatccaggggccggtagcgcgcatcgtcgcggtcatcatcattattgccacgggtttggcactggccttcggcgacaccagcggcggttttcgcaagctgatccagattgtcttcggcctgtccatcgccttcgccgcctcctcgttcttcctgtcgttcttcagcttctccggcggggccatcgtatga

SEQ ID NO: 82643 - DNA, 273 bp, Citrobacter koseri
atgaatacgcccgaggaatttgccgctggctttgaagtgccgctgcatcgctcgctgaccgagccgattttgatgggcggcgcgccgcgcactgtggcgatcgccaacggcacgctggccgccgccgtcgggctgggcctgcaactgtggattcccggactggtgctgtggatcgtcggccattcgctggcggtctggggcgcacggctcgatccacagttcatggccgtgttcgcccggcacatcaagcacaaaccgctgctggacgtgtga

SEQ ID NO: 82644 - DNA, 2448 bp, Citrobacter koseri
atgctgaatctcgccgaataccgccagcgtcccgcgctgctggccgactggctgccatgggtcgggctggtcgcgccgggcatcgtcttgaacaaagatggatcgttccaacgcacggcccgttttcgcgggccagacctggacagcgccacgcagggcgaactgattgccacgtcggcgcgactcaataacgcgctacgccgcctgggttctggctgggccttgttcgtggaagccgaacgacgcgctgccgctgactacccacactcggacttccctgagccactgtcctggctggtggacgaggaacgccgcgccaccttcgaggaatcaggtagccatttcgagagcggctaccacctgacatgggtatacctgccgcccgaggaatcccgcgcacgggcggccaagctgctgtacgagaacacgcccacaaggggcgtggactggcgcggccggctggacgccttcgtagcggaaacggatcgggtattcgatctgctcgacggtgtgatgccggaggttgactggctggatgacagccagacgctgacctatctgcacgcgaccgtctcgacacgacgctaccgcgttggcgtgccagaagtgccatttcatctcgatgcgctgctggctgactgcgcgctgatcggcggcctggcgcccatgctgggcgaccagcatttgcgcgtggtatccgtgcgcggatttccgacctcgacctggccaggactgctggacgacctgaaccgccttggtttcgcttaccgctggagcacgcggtttctgtgcatggacaaggccgaggccgagaaagagctgggacgcctgcgccgccagtggttcgccaagcgcaagaatgtcatcgccttgctgcgtgaaaccatctttcagcaggaaagcccgctggtcgataccgatgccaataacaaggcggctgatgccgatgccgccttgcaagagctgggcagcgatcaggtggcttttggttatgtcacggcgacggtgacggtgctcgacggcgatgcggcccgtgccgacgagaagctgcgcatgatcgagcgcgtgatccagggccggggcttcgtcactatccctgagacgctgaatgccgtcgatgcctggttgtcgtcaattcccggcaatgcctacgccaacgtgcgccagcccattatctcgacgttgaacttggcccacctgatgccggtgtcggcagtgtgggccggccccgagcgcaatgcccatctcgatgggccacccttgatcatcacccgcaccgacggtgcgacgccgttccggctggtcacgcacatcggcgatgtgggccatacgctggtggtcggcccgaccggcatgggtaagtcggtattgctggcgacgttggctttgcagttccgtcgctaccccggctcgcgcatcttcgccttcgacatgggccgctcgatgcgcgccaccattctgggactgggcggcgagcattacgacctaggcaatgacggtgaggtcgcctttcagccgctggctcgcatcgaccaggagggctatcgcacctgggccgctgaatgggtcgaaggtcggttgctgcatgaaggcgtggctgtcggcccggatgagaaagcggccatctggtcggcgttgggcagcctcgccggtgcgccggtggaacagcgcacgctcaccgggctgtcggtgctgctgcaatccaatgcgctgcgccaggcacttgcgccctatgtgctgggcggtgcccacggcaagctgctcgatgcggacgcggatcggctgggttccggttccgtgcagtgctttgagatggaagagctgatgcacagcaaggctgccgtgctggccgtgctcggctacctgttcgcacgcttcgatgagcgctttgacggtgcgcccacgctgctgatcttggacgaagcctggctgtttttggatgaccccgtgtttgccgcacgcatccgccagtggctcaagacattgcgcaagaaaaacgtcagtgtgatcttcgccacgcagagcctggccgacatccagaactccagcattgccccggccattgtggagagctgcgccagccgcattttcctgcctaacccgcaagccaccgaaccgcagatccgttcgatctaccagagcttcggtttgaacagtcgccagatccgcatcgtcgccgaagcggtgcccaagcgcgactactactaccagtcgcggctgggcaatcgcctgttcgacttggacctgggaccagccacgttggcctttaccggtgctgctaagccgcaagaccagcacgacatcgaccgcgtgctggcggaagccggcattcccggcttcgcgggtgcttggctacggcatcgcggcttggactgggcggctgacctgctgccatccgcgccatctgccgcttccgttctttccccaccactggagaacctgccatga

SEQ ID NO: 82645 - DNA, 744 bp, Citrobacter koseri
atgaagaccagcccccgtttgctgtccgtttcacttgccgccgtgctgtcggtgtcactgctggccgcaccaccggcatcagccattaccgtgtttgatccgtccaatttcgtgcagaacacgttgaccgctgtgcgcacgttggagcagatcaataaccagatcaaccagcttcagaacgaagcgcagatgctgatgaatcaggcgcgcaacctgaccactctggacttcaatatcgtcaaccgcctgcgctcgacgttggccaccaccgaacggctgattgccgaggcgcaagggctggcctatgacgtaacaaacatggatcgggagtttgcgcgactctatcccgagcagtatgccgccaccatcagcggcgaccagatggcccacgatgcccgcgagcgttggaagaacactctcgacggcctgcacaccgcgatgcggatgcaggcgcaggtgtcgcaaaaccttgctcaagacgaaagtgcgctggccgacctcgtgagccagagccagtcggccaccggcgctctgcaagccatgcaggcgacgaatcagcttctcgccttgcaggccaagcagtcgatccaggcgcagcagctccagatcacgcaagaccgggccgcttcgctggaactggcgcggcaggcggcggcgaccgaacgcgcccgcgaagtgcggcggcgcttcctcggcaccggcacgccgtacacgccgcagtccgtcaacttctacaacaactga

SEQ ID NO: 82646 - DNA, 318 bp, Citrobacter koseri
atgcgatgcgcttccgtcctgctggccgtgctgctgaccgcttgcggccagcagccggtcgagaacttggccgacgccctggccgccgaccccgtgcggctcaaggcgctacgcgggcaatgcgcggctgatcggcaagccgtaggcgaggacgcctgccgcgccgccgccgaagccttccggcgacgcttcttcgccggccacaccgggccggacgaatacgaatcgctgaccgaactgccgccgattccgccgagcttcgacacgcccaccgacgacatgccagcgccgctcacctcgccggagaacacgccatga

SEQ ID NO: 82647 - DNA, 1383 bp, Citrobacter koseri
atgaacgacgtgaccatcatcgaccgtttcctcgatacgttctcgcgctacatcgactcgggcttcgggctgctacaaggcgaagtggcgtttctcaccgccacgctcatcgtcatcgacatgacgatcgcgggcctgtactgggccatgagccacgccaccggccagggcgaagacgtgatcgccaagctgctgcgcaaggtgctctacgtcggcgccttcgcctacatcatcggcaacttcaactggctggcgagcatcgtgttccgctcgttcgccggcctgggaatcacggccaccggatcggccatcacgatggagaattttcttcagccggggcggctggcgaaaaccggcattgacgcaggagcaccgattctggaacagatcggggacatggccgggttccccgaggtgttcgtgaacatcgaccccatcgtggtgatgttcctcgcctggctggtggtgatcctctgcttcttcgtgctggcggtgcagcttttcatcacgctgatcgagttcaagctgaccacgctcgccggcttcgtgctggtgccgttcgcgctgtggaacaagacgagcttcctggcggaaaaggtgctcggcaacgtggtgtcttcgggcatcaaagtcttggtgctggccgtcatcgtcggcatcggttcgggtctgttcgccgagttccaagcgcatcccgatgaaccatccatcgaccatgcgctggtcgtgatgctggcctcgctcgcgctgctggcgctgggcatcttcggccccggcatcgccaccggcctggtgtccggtgcgcctcagcttggcgcgggcgcgatggccggtgctgctgtcggcgctgtcggcacgggcgtcgccatcggtgccgccgcgaccggcgtgggcgccgccgtagccgccggggcacgcatggcgccagccgccgcgaagctggccggtgccggggcgcgtgccgccacctcagcggctggcaacgcgcggtcggcgttccaggcgggttccaccgctgcgggcggcggggccaaaggcgcggcggctggccttggcaatgtcgccaagaccagcgcacaggccgccagccgccgcgtcgcttctggtgcttccgcagcagggcagaagatgaccagttcctttcgtgccggctggaacggatcttcggacgatgccggtgcagccgcggcgggccaatccgccgcaagcgaggccgcagacggcgctgccaactcgcagaagcaagagcaacccgcctgggccaagcggatgcaccgccgccagcagatcacccatgccgcgaccaccaccgcccacacgctgcgcggtggcgacggcggcggctcagggcaaggcccgagcctgcgcgattccgatacctga

SEQ ID NO: 82648 - DNA, 705 bp, Citrobacter koseri
atgcgattcaaacgaccgcaggtgcgctacgccgatacgccgcagcctgccaccccgtatcaagccgccgcccaggtgtgggacgagcgtatcggctcggcccgcgtgcaggccaagaactggcggctgatggccttcggctgcctggtgctcgcgctactgatggccggtggcctggtatggcgctcggcgcagtccatcgtgacgccttacgtcatcgaggtcgatcaggccggacaggttcgcgccgtgggcgaggccgccacgccgtaccggcccgccgatgcgcagatcgcgcaccacctggcacgcttcgtcagcctggtgcgctcgctgtccatcgaccccatcgtcgtgcggcaaaactggctcgatgcctacgactacaccaccgaccggggcgcggccgtgctcaacgactacgcccgcaccaatgatccattcgctcgcatcggcaaggaatcggtgacggtgcagatcaccagcgtggtgcgtgccagcgacacgtctttcaacgtgcgctggacggagcaacggttcgtcaatggcgcacccgctggcaccgaacgctggaacgccgtgctttccaccgtcctgcaaaccccgcgcaccgaacagcgcctgcgcaagaacccgttgggtatctacgtcaacggcctgtcgtggagccgcgaactggattcttccgaaggagccaagccatga

SEQ ID NO: 82649 - DNA, 993 bp, Citrobacter koseri
atgaacctgcctttccgctttcacgctttgccgttgatcctgcttgccctcgcgggctgcgcctcgcagggcaagccgccgccgaccatctcacttgatgagccagtgctggcccagccgctgcccgaaccgctcgcgccggtggaagtcgtcgccgtccccgagccgctggcgttgccggcgcagttgaagccactgccggaggtcgatgcggccccggctgcgccggagccagccgacgagaaggtacgtgtttcccgtgccaacgccgaggcacgcatcgcacccacacgcgagggctacgtcaatgctatccaggtgtggcctttcaccgatggtgcgctttatcaggtctatgcctcgccggggcgcgtgaccgtggtttcgctccagccgggcgaggaactggtgacggtcgccgccggcgataccgtgcgctggatcgtgggcgacacgtccagcggcagcagcgacgcgctgcgcgtcaatgtgctggtcaagcccatccgctcgggcctgaaaaccaatctggtcatcaccaccagccggcgcacctacctgctggagctgacctcgacggaaaaggcatggatggcctcggtatcctgggactatccacgcgaccggatgctggccttgcagcgccagtcgcaggcggccagcgccgccgcgccagtcgataccggcctggcgttggagaagatccgcttccgttacgcggtatcgggcagcaacccgccgtggaagccgctgcgtgccttcgatgacggcgagaaggtctatatccagtttccggcgggcattgcccagggcgagctgccgccgctgttcgtcatcggcgtgcagggcgacgggcaactggtgaattatcgtttccgctcgccgtactacatcgtggatcgcctgttcggcgcggccgaactgcggctgggcggcgatggcggcgacgtggtgcggatcgagcgcaccgatggcgtggcgcggaggaactga

SEQ ID NO: 82650 - DNA, 1281 bp, Citrobacter koseri
atgagccaggatgacactcccgacctcgccgctccgccggcgggcaaggtggcgcccgaggctgtggcgctgcgtgcccagccgcgtccggtcacgcgcctgaaccggcgcacgctggccatcctcgcgggcggcctgtcggtcgccgtgcttggggccacgatctggtcgctgcaaccgcatcggcgcggtacgggcgagcaaaccgagctttacaacgtcgatcgcgtctcgaagtccgaagggctggatgcgctaccgacggactactcgaagctgccgccagccttgccgcacgatgtacccgagctggggccgccgctgccgggcgacctcggcccggtcatcgtgaagtcgcagcagccggtgacagccgcctacgcggctcccggccacgacccgaacgatgcgctgcgcaaggaagccgaagctgccgcagcatcgtccgtgttcttccgctcgggtgcgcaggcggccgcgccggtcgcgcagtcgcaggccgccaccgcgccgggcttcgccgccaatgcggcgttcgacccgatggccgccgggccggcctcgacggcggcccagcctgccgatccgaccgccgtgcagaaccggcaagaccagaaggaggctttcctgaaaggcggctctacggaaacccgcaattccggcaacctgaccctgccggcttcgccgtatcaggtcatggccggaacggtggttgccggagcgctggtgacgggcatcaagtcggacttgcccggcgacgtgatcgccactgtgacagagccggtctatgacacggccaccgggcgtttcctgctgatcccgcagggttcgcgcatcctgggcaaatacaacagccaggtcagttacgggcagagccgcgttcaagtcgtctggaatcggatcattctgccggacacgtcttcgttgacgctcgacaatctggccggcgcagatccggccggctatgccggcctggaagacgatgtggactaccactggggccgcatctttgccggtgcggcgctgacgaccctgctgggcgtcggcgccgaactggccgcgccggagaatcgacaagatggcgatcgcgtcatcatcgccgggcgtgacagtttgcaggacacggtgaatcaaatcggccaggaagtgacccggcgcaacctcaacatccagcccaccttgacccaacggcccggcctgccggtgcggatcatcgtcaaccgcgacttggtgttgcggccgtaccagccgctgttcttcaatcgggggacttcacgatga

SEQ ID NO: 82651 - DNA, 246 bp, Citrobacter koseri
atgagcacaaccaagaagctgcggctggggccgctgcccaagaccgaaagcgtcaagctcacctttgcctgcccggccagtcttaaaaccgacctcgaccgctacgccgcgctgcacgcgcaggcgtatggcgaggcagtcgatgcggcgacgctgatcccgcacatgctggaagcgttcatggcgggggatcggggattcagaaaaggaggggcaggcaaggccgccccgccgaagccgagttga

SEQ ID NO: 82652 - DNA, 1041 bp, Citrobacter koseri
atgtctgagataaccgagccaaccagtcaggttttgctatgctcaaattgcttcactgatgaagggttacggatagacgctgcaaagcatggttttgaacaacaaggtgaatgtccaaattgtaaaagtccggatgggcaaaagctgacccgagaccagattttaagtctggcgtggcgcttcttcgtaagcggaaccactgtccgttgtgactacggcgcagcgccagtaattcagttcaacgagaaccattacggccaatgcgacatcgccccgtcaacgtggcttaagaatgacgtaaagattattgaggaggccgctaaaattgggtttttccattacggtcctcgattgtggatggtcggagaagtcgagccactaaagaggcttcaagatccatcgacacgcccacagatcattgaacgaatcctgagagaatatcctgaatcaacgctcagccaaggcaacaaattttaccgtcttcgcgtcaaccctgaacgaccagctgattcgtccgagtatgacagccctcctgtggatttggctggcagaggtcgtttggattctccgggcttatctgtaatgtatggatcgcaagaccttgatgtttgtattcatgaatgcagggcatcaacggaggatgagctttttgtcgcaactttaaagaatcagcaggatctgcggatactggacttgactcatgctttggaagaaacagagaccgagtttgaaagcctggatatggcaatccatatgctttttcttgctcggtctcactcatatgaaatcacccgcgacatagctcttgccgctaaagaggctggttttgacggagtaagccatccgttcgagacggcttatggcttgtcgcttcgacgtttccatccggaaagggagaaatatgttgaggcaaccaccattcgtaatcttgccttatttggtaggcctgtggaaaaaggcttggtcagtgtcgaatgtatcaatcgcctaatccttacccaagttggctatcgtgggcattttggagctgttgagtattga

SEQ ID NO: 82653 - DNA, 684 bp, Citrobacter koseri
gtggctacccgctttgcaactgaattcaaacctaggattcagaccaagctgtttgcagaagacccaagcacagaggggcgagagcctatatcgggaaaaacggcatgcagcctctctggaccaatcattggtagccattatggtaacgtgctgatgaaaatcgaccaaccccatttggctatagtcattcgaagcttgaggcgtcttgagcgtcagatcagaattccagtagccgtctggaagttagcctttgatgaccaacagcgatactttgtcgggggctactactcaaaggataccaacgagccgttaattgacttagaaaacggtcagaccacacaccgtagccgggatcccttcaggctaggcgtccactcagggacgtttgtgggtgtcgagctttcggtcttcgagcacttggtcaaggttgctcgaggtgatgcgcatatgttggatggcctaccggagatcgagcccactagggagctatacagcggaataagcatgttgcgtgacggctcagttatcggtccgttgtcaatgttcatacttttcagattagttactaagcgcggtatgcctatctcgatgagacttaaagcactaaagggccttgctcggacgactgctgatggccgattagagtcgatcccgataggtaacaagcggtcatcttgcgtctag

SEQ ID NO: 82654 - DNA, 390 bp, Citrobacter koseri
atgaagaaaaagctgcaattggcactcaacaagtacaagccgatccctcctaagcttcaaggggagaacgaaaagagtccgaaaacggttattgatctggaccttgccgctctctatcaccactattacttcgacacctacggtactcagcctccgaatccggatcctacccagtttgagcatatgagattcctagtgcctgatgatgagtttcgatttcaaggcgcaagtgtgggcgcttcaaccaatgctaggcgcgccaagtccagagagatggggctggcattctgtcgctggttcctacatgagcatgtggggattatgtacttcgctcattttgatcgcttgatcgatgacacaagcaagaatttccatggatttaccgtgtag

SEQ ID NO: 82655 - DNA, 1173 bp, Citrobacter koseri
gtgagaattcgttacattgtcccgttcaaacgcaaaatcatcattgacgatcattgggaaatcccaatgcaaggtgggaagctccgcatcattgaagagagtggttacgccaaagctattgaacttactttcgagaagcagcctctggaatacgcaccgagctttcagaaacgagccccttatgaggctatgacaacgataaccaggcacgatgaatgtatggcattcgtgaagcgtcaactcgataacgcggccacatttctcgaatgcttccatgatattgaactcataacagaggaaattgaggccaaatatgaaggagaaaccccagaagaagaaacgcgactatccataaaaagtatatcaatgggcaggcatgattctgcattgcctctcagtttcgatatgtttacgcgggcgcttatggctgctgaaaaatatgatgggccgagatttgaagttgcctttgtaaaaagcgctcgcaaaatgcttaaaaatcaggaattcataaattccttccgctactcattcctgttgatcgaatccctgtatgggaatggtcaatttaaaacaccaagcttgcaagctgcgctaaaatcaaaccaagaatttcgtaatattgttgagcttgccatcaaagatatgattccagcaaagaacgatcggaactcggatacggcaaagctcattttgacgaaaccaaaaacagatgacattattaatcatctagtcgaaaaacggggtttctattttcacgggaacgtcaaacggaaggacgcctggaaacccgatgaacaagacgcggcagaatctctggcgcttctcacaataggtattatcacaaaaattactatgaaggcggcggagccgatgttcgtcgcagaactagagaaacgccactttgaagacgcaatgcaggtaggagccaaaatcgtgtttgaaataaaattcagattccgtgaacccgaagaaaatttcgataggcaacatcaattcaacatcactatgccaggaaccaaagtcacccctcgtacagctttcgctgtcgctcagcattttctacatgtattccagcataatcagcctgtatcggctctatgtgaagctgaatgcaaaatacaggaaaccggggaaaaggtatttaacctcacatttcatgccaaagaagattga

SEQ ID NO: 82656 - DNA, 1161 bp, Citrobacter koseri
atgcgcattgaatactttggaaacatagctattttcttgtctgcttttttagtcatgtggattcttgcatcaaggaacaaacttcctcatttaacatcaagtgacggaaggcggtatctcttccttgatggtctaagggggatcgctgcgatatcagttatcaacacccatatatggcgtttagctcattatggctttgctttcgaaggttacaacccccaacttcaatataatcatttttttggttctattggcgttcagatatttttctgcataacaggattcctgttctttgaccaaattataaaaaagaaagctacattcgattgggaaaaattctttagagcaagaattaaaagacttgttccaatatacattgtggcaatttctctatgtgtcattatatttttatgcttcgatacgacccgcacgctaaaatctcttgattattacaaaatcataagactgtttttctttggcttttacggtgctggagctggtgaaaacattggcggcgcaaatccaggtatgtatacagttgtgatctggacactttcttttgagtgggctttttatttgttcatgcccattctttgtatcataatgaaaagtacatatctgtttatcgccgccttgattgtttctatagcgctggcatcaactggttacttctccggttctgaattgctttggcctttgttcgctacaggaggcgttgccgcatacatatttaataaagggatagtagctaaaggactggcatcccatgctttgctggttgttgccgccgcacttgttgctctgtacttttactcagggcagaaaagactatttgtcatgaatagctatttaatagtcagtgcaatttttgtattacttataatcgcaagaaacaaaatatttgaatgtaaggtttttgtatatctcggagaagtaagctacagcctgtacttgctacatgttctcgtcattaacatcatatcattagtatcattcaagctgttcggtaaggtcatgatttcagattggaatgtggttgctatttatgctttatcatcagcagtatgcgcgtacatctcatatttatcatttaaatatgttgaatatcagttcattaaacgtaaggaaacaacgcatactgaagtagaagcagcccgttaa

SEQ ID NO: 82657 - DNA, 1803 bp, Citrobacter koseri
atgagttacttcggccttaaccaggtaaaccagaaccagcaacttgacgaggcagcgtcaaaccctgctggctttaacagtgatgtcgggttcttcgataactcggtcggcgcggcggtgtctgggctgtattccggcctggtggcgaaacctgaccagttgctgtgggcagggatggataaaatcgtatccccgatcgctcagtttgttaacgaaaacacctcgatcaatgacacttcagcttcatacattactgagcagcgaaagctggcagagcagcaggttaagcggttgacgcctgacgcggcgaccaccggaacggccgggcaggttctttacggtctgtttgatatgggcggtcaggctgttgtcggtacaacactggctggccccgttggtggcgcagcggcggtaacttctctccaggggttctctgaatttgaacggctgacagcgcagggcgttgatttcagaacagcgcaggaagcagggctggtacaggggatcaccgctggctccggaacacttatcccgatgagcctggggttgcgtgccggtggtgcgctggcggaaggtgtcggcgcgcaactggcaagaaccggagaaagtgcagtacgtagcgcggcggccacagcagcacgcgcagcgcctgacattgcctatgccgccgggacgaatatcgcgttcggaatggctcagcgtgggctgaccgcaaagacactgcgtgatggcggctataacgagatggcgaatcagtacgatgtttttgatcggcaggcaatcgccattgatgctgttcttggcgtagcgttcggcggtgtcggcaggtttatcaactcccgcggtgaagccgccagtgtaccggaattttcacctgctgatgtcgatgcggcgctggcggcaaatgcagcccatcatgctgagattgatattgctcccggcgtgccggttaacgttctttcgcgtgatgcgcatattcaggcactgcaaaaagcaatgtctgatgtcagccagggtagaccggttgatgtgtccagtattgcagaaccggcttcattcactgaattacccgggcgtcgcaacctgatatctcaggcgatcgacgagtccctatcatcggcggatgaaggcacaacagcgcgcgctgtcgaaacgcggttgcttgaagagcaggctgcacaggttttaccgcgtggggatcgtcaggtgtaccagtctgaaatcgccaatagtcagcgcattattgaaaatctcaccgagcagcgtacacaaattcttgcagaagagccaactggtagcggtaaagctttgtcacgcgctcgcttagagaagcagacgaaacttcgtgacattgaccagcgaatcagcgaggcacaagggcgcctcgaattttcgaataatgcccttgcaccgcatgaaccgggcggacagtttttcgaagctcgtgcggaacttgctcgccgccagcaggcagaaagtgatctcaatgctcaggctgtatcattctacaaaacagcagaagtcagaacgcctgacgaggccgcaccttttgagccaggtgccgtattgcgtcaggcagagcaaaggccaacggcggagcaggccggagatatggatctgcgcatagccgaagactcactggttgagtcacctgacatgatgatcaccgttatcgatgatgaaggaaacccgcagtcgcgcagcgctcgggaagtgctggacgaagcaagcagagagaacgaacaggcgatacaggattcaggtctgtttgatgtggctgtagcgtgtttcttgagaggataa

SEQ ID NO: 82658 - DNA, 711 bp, Citrobacter koseri
atgaatctttttgaacgcttaatgtaccaccgactttgcaatgagcagcctgctgatggtggcgcagctccggcagcgtcagaacctgcaccagctactggtgataatccggctccggctggtgaacaagcaccgaaagaaggtgatacgtcacaaccaggcgatgaaggcggtaagccagtagaagataagcctgctgatgacaaaaagcaggaaggcgataaaccggctgaaaagaaagaagacgataagccagaaggagcgccggagaaatacgagtttcaggccgctgaaggcgtcgaactggataccgaagcactgaaggaattcgagccggtagcgcgtgagatgaacctgaccaacgagcaggcgcagaaactggttgatgtctatccgaagatcctggctggcgtacagcagcgacaggtagaagcctggcaacagaccaccgaacagtgggctgcagatgttaagtccgacaaagagatcggcggtgacaagctgccttcaaacctcagtgccgcacagcgtgctctggatcagttcggtacgcctgaactcaaaacatatctgaacgataccgggctgggtaatcaccctgatctggtgaaggcgtttgtgaaaatcggtaaggccatgtccgaagacggcatggtcaccggtggtaatgatggccagcgtagtgcggccgaagtgctctatggcaaataa

SEQ ID NO: 82659 - DNA, 378 bp, Citrobacter koseri
atgagcgacaaagatatcgagaagcaaattcaggccaaaggcttaaccgcgccgcgcgtaactccggaacagattgaaagtgtcattgtagctgaaaactatttcaccgctgcagacggggttctcggtgcatacaagtccaatggtgacgtttacattggcactcagtccggtgatgaaaccacagcggcgcacccgctgttaaccttctgcgttctggtactgcgcaacggtttcactgtcaccggcgaaagcgcctgtgctagcccggaaaacttcgacccggagatcgggcgcaagatcgcccgcgaaaacgcggtgaataaaatctggatgctggaaggttatctgctgaaacagaaactgagcgagcaataa

SEQ ID NO: 82660 - DNA, 603 bp, Citrobacter koseri
atggcggcagaaccaaagccacacaaacgcaaatcaacgcagtataagccactgacagctatgcaggaggcttactgccagtcttacatcaagacgccagaaaaccagactcaggcggcgattaacgccggattctcgcctaatacagcgcacgtcaaagccagcgtcatgatgcgcgatgaacgcatccagaaacgcattgccgagttgatggaggaacgcaacaaacgcatgcgcgtcagtgctgattacgtactgcttcgcctggtggaaatcgaccagatggatgtgatcgacatcctcgatgatgagggtggactgaagcctgtcagtcagtggcctaaagtgtggagaacgtccattagcgcagtggatataaaccgtattcgtatggctatgaaaggcgatgatgaggatgatattgaatcaactctccagaaaataaaatggccagacaaggtgaagaacctcgagcttatcggtaagcacgtcgacgtgaacgcattcaaagaacgtctggaggtttccggcaccgtcacgattgccgaccgcatggcgaaagcccgccgccgcgttaaagagcaggctggtggtgaagaatga

SEQ ID NO: 82661 - DNA, 540 bp, Citrobacter koseri
atgaccactattaccagagaacgcttggagcaaatagcaaatttccacaaccagatggcgttaccaccatcacacgcagaaatcgaagagctggcgcgtatcgcgctggcatcgcttaacgctggcagtgacagcaacagtcacccggctagcggcccgctctcaaatgatcgcctgcaccgcattcgtgaaatcttgggcaaagccgcagcgcaaagagacggcggcaacattggttacgcaatgtctgatgctgtgaaagcgattgatgaattgcttgaggtgcgaaaggcggagcctgtggcatggatggttagagatattgatacgggcgaaaaagttattcgtcctgataggtcgtatttcgaaggttcttgtcagccgttatacaccgccccgtcagcggcggtagtgccggatgaatggactattcaggatgccgtgaagttttgcagggaaactggcagacaagacgctggctcagctatggacgcctggaactcctgccgcgccgccatgcttcagggaggtaaatcgtga

SEQ ID NO: 82662 - DNA, 231 bp, Citrobacter koseri
atgagcaacatcgacaaacaaatgacaaaccgcgaactggttgatgccgctattgaactggctggtgagttctatgcgatgcagggctattcacatcgtaccgggtttaagtattgtgaatcgccgcacccgcatgagcaactggttttcgaaatggcctgtcgtgcattcgaaataattcgcggatctgatgtgatggatgctatcgctgacctggaggatgaagaatga

SEQ ID NO: 82663 - DNA, 507 bp, Citrobacter koseri
atggacagcaatatcattgagttagtgaagttaggtcatgagcgcgccaacgaactgaaagcgtcatgcggtgctgtcgatgtgcgcagcgtggcgcaactgattagcgatctggcatcgcagcttgaagtgcaactggtgcgtagcaatgcgctggcggcggagagagatatcgtcaacgacgataacgcctatttacgagatcaggttatttgttgggctcgagagtgcgaccgaatcacattcacccataccaacaaaataactgatgcgcatcagacggaagccgagcaggagttggctaacacaaccccagccacatccgctttcctggctgaagtgcgggcgcatgacatcaacgctttcatccagcatcacagcgcagaactggatgcgcatattaaaaacggcggtgaacagttcgacgaaaaatcagtacgcatcagaaacatcatcgtctcagcccgcttgttcagggagcagatccgcaaaggagtgcagcaatga

SEQ ID NO: 82664 - DNA, 345 bp, Citrobacter koseri
atgagaaagcagttacaggctcttggtcgactcaaaacaggccagatgaacaagacggaatcggcgtactgccagcatctcgagctgcgcaagcatgccggggaagtagcctggtaccggtttgaaggaatcaaacttcgcctggctgataacacgttctacacgcctgatttcgcagtgatgcttgccacctgtgagatggaactgcacgaggtgaaagggttctggaccgatgacgccagggtgaaaaccaaagtcgccgcagaccagtatccgttccggattatcggcgtgacggctaaggcgaaaaaagctggtggcgggtggagcatcgaagagttctga

SEQ ID NO: 82665 - DNA, 663 bp, Citrobacter koseri
atgaaagagcgcggaatgatttttaacgaataccaggtgcgcgccttgcttgatggcggcatgacgcaggttcgtcggccaataaaatggcgtcagactcgggctaccgaaattgcagaacgtgaagacggtagccggtggccgtggagtgaggatgcggaaaatgtttgcgattactggcatccatgcccattcggtgcagtaggcgatgttatttacgtcagagagtcattttcacggctcgactcatttaacttcttcgatcccgcagtgcctcatgaagtaccagatttctggtattgggccgatggtgatccggagtggggagactggacgcgcccacaatctggcgcagtcatgcctcgcgacgccagccgaatcagcctggagataaccgaaatccgcgtcgagagacttcaggatgccgatgaatcagccatgctgaatgaccttggtgacatgctcgaacactgcgaaaccgtagcgggtcgcgccttcaaccatgctgagcattatgccatcgctggcgttccggttggtctgtgtccagaaatgcacggctttaaagcgtggtgggataagacaaatggcgctggtagtttcgactccaacccatgggtctgggtaatcgaatttaaggtggcttcacctgggagggagtga

SEQ ID NO: 82666 - DNA, 1068 bp, Citrobacter koseri
gtgagcgaattagcaattatcgaaattgcgccagatatggcgccaagcatttacgttgaaaacggactggaaaagtttctcgagcagatccgtgaaggcgttaatgaagtgcctgaccttagcacagacaaaggcagaaagcgcattgcatcgctggcttcgcaggtatcccgcagcaaaacagcagtggaaaagcctggacgcgattacctgaagcggctgaaagagcaaccgaaagtagttgaagcagagttacgccgtttcgtaaccgagtgtgatcaacttcgtgatgaagttcgccgccctcttaccgagtgggaagatgctgaaaaagcgcgaactgaagcactgcaacagcgcctgacaaatttgcgcgcactggctgacgtgcttgacgctgccggtaactaccttccatccgctgatattcaggcgcgtattcaggaagccaaatccgttgtactggatgacagttggcaggagcgtgcagcagaagctggcgtagccaaggattcaaccatccagcaactcgaagcatcgctggcggtggcacaaaagcgcgagcaagaagccgcagaactagagcgtcttcgcaaagaagcggaagaaaaattacgcattgagcgtgaagagactatccgccgggaggctgctgaacaggccagacgtgaagcagaacaaaaagcaaaagccgaaattgaagcatcagcacgccgtgaggcggaagagaaaacgcgcgctgaagtggcagaacgtcagcggattgaagcagagcagcgtgcggcacgtgaaaagcaggaagcggaagcgcgtgcagagcgcgaaaaggctgctgcggtggaagctgagcgcctgaaggcaaaacaggcagaagaagctcgtctggctgaagaaaaacgcaaagcagacgaagacgcacggcgtgctgctgacatagagcatcgccgcacaattaaccgccgagtcatcgcagatcttatcgcaatcggtattccagaagaatttgcgcagaaagcactgctggctatcgctggcggtaaggttcctgacgctcatatcaaatactga

SEQ ID NO: 82667 - DNA, 300 bp, Citrobacter koseri
atgaatgttcaacagcaatcaaatctccaaaaagttatgggcgcattcgaaaaggactaccgactgtcagaacaactttacgaccgtcaggttgagttgatcgaaagtatcagactccaccaactggcatcaacattcgacgtcaccctggcaaaaggtgtgcgtaaggaagtactggaagctgcaaaagatagttctgagttcgaagaactgatggatgcctaccgccgtgaggcaatggcaatcatcgcaaagtgggatctggctgaccaactggacacggcgaggaatgcggcatga

SEQ ID NO: 82668 - DNA, 249 bp, Citrobacter koseri
atgaaaggtgcattaggcaagaaggaactcctggcggtggtgccactgtcatggagcacgattaaccgtctggaagccgcaggagaatttccaaagcgctggtatatcactgataaacgttgtgcctggaatcaggaagaagtcgagcgttggctggatgatagacagtctcaaagccctgctcaattccaggggaaaaaaccgccggttgatcagcgcgtttatcgcccggtgagtaacgcagcatga

SEQ ID NO: 82669 - DNA, 306 bp, Citrobacter koseri
atgaacaagccaaaattaacaaaattgcagaagtaccatcttgaccacgtgtcgaagagtgaggtttcaaaagtgatcgcggtgacaccggcggcgatggagatcgaaaaacgcgctatcgccagagagaaaaaaggtcactttcgcgttgctgctcgcctgtggcttctttgtatggatgcagcaaggggtgaagttgagcgagcgcgcatcgctgtacgccgtgatcagtgcattacgaaaagcaacggtctgcgttgcggtgattacagcggaatactcagtcgcggggtgatctatgactaa

SEQ ID NO: 82670 - DNA, 1032 bp, Citrobacter koseri
atgtctgacaaaaaccattatacgacatgggaagaattgcttgaggagtacttcttcgcccgaaacctgcgagctgcaacagaatggagctacgcaaaggttgtaaagggattcctgaaatttacgggggcagacataaccccatcaatggttacacatcatgaagtactcagatggcggcgacatgtactcagagaaaagcaacaatcggcgcagacctggaacaataaaattgcacatctcagggccctctataactatgctatggaaagtggtttattgcctgcgggcaaaaacccttttaacaattgcactgtacagcgggacagaaagaaaaagcggactttaaaccgctctcagctaacccgcctttatctgataatgcagcaggctgaaattgaatccaaccggaaaattttcgcacgtggcggtcggagtgcgctttacccggcctggttctggataaccgtcctggatacgctcagatatacgggaatgaggcaaaatcaactgctgcatattcagctcagggacgtcaatctgacagaaggttatatagatctgcgccttgaggggagtaaaacgcacagggaatggcgcgttcccgttgttaagcagctgcgtttgcggctacagcttcttcttacacgggcaacggaggctggagccgggccaaaagataacctcttcgatgtcagtttttacattgccgggaaaaaggcaaaatttgataggaatgatgtgacagtgatgcatcaaaagatccgctccttttttcgccgtctgtcaaaggaatgtggttttgccgtttcgccgcaccgtttcagacataccctggctacagaactgatgaaagcaccggaaaggaatcttcagttggttaaagatttactgggtcatcgtagcgtaagcacaacaatggaatatgtggaactcaatatggacattgtgggaaaaacactggaagaagaattgtcgctgcacacagatctctgtgtagaaagggaattacaactattgacacaaaactga

SEQ ID NO: 82671 - DNA, 1620 bp, Citrobacter koseri
atgcgcgacagaatcaggacccttaggtttctgttttcaaaaggtgaaccggaaccagcacatcatgtatccgctgtcacacctgccggctaccacactccgcgtacggtcgatacgctgtgctgtagtccgttgagaaaaacctgcctgcaacaaatatgggaaaacagctcacttccggcggatgtttatcaccggttttatataacgccactgcatggcttactggccagggtacagaatgtgccggcaacacagcagggaaggtggtcgcagtcagacggcttcggggaccttacgctgcagttcacaacctgtgcggtcagactggccaaaggatacatgtttccacccggagctgcgccagaagagcaggcagagcaaaacgtgatgtggaatgcagtcattttctggtctgcactgttctggcatttgccgctcctggcgtctctggagggtgagctgcttgatggtaaaagctggcttccgggaataaccgttccggactcaccttatcgatttcgcttccgggaagctgacaactcctcagcttttgcagcgctggcagcaggacaacttgtgccagcagaggcgacaggatggctggcagaaaatcccgaagctctgggcaatcttaccggggccttatggaaccagcatccggcgatgccacttattagaagcttaatgaagcaagctgctgaaaaggtggaatcgccttcgctggaggtatccggggcaaatgagaaagttaacaccctcatagagccggccctttcagttacgcaaacgccgtctgatcaagagattgaatcagaaccgtcagtagaagcaaaacttaaaactgcatcgccagaagttccagatttgcagggtattcaactcgcatcttctattgcaccggtgccgatggctgatgacagcaatctcgtcagcaatgaaaaggcaggcgagattacggaatgtgatccaaacgaaacagagaaggctgatacagagatgctgctaagtctgttcagtgcaattgcagagcctgatatgaccgggactgaagcatgtgatgaagagccttcaatcagtacgagagcagaaagtgtgccagaattttccccccttaatgaactaagtcccgaagctgataagcctgagataaatcagacagtagcagaagactctttccctgaacgcgctgtagaggataacatccctttacacagcattaacattgacgcacaaaaaacagtgataaaaaaacagactggcactgaatttgtcaggtggctttctgaaggacttaagagcaagcgaattgatattaatcagcctgattcgagggcgcatgcagttgcagggttcatctttctcagggttccggacatattttatctttacatcagagaaagcggagcagagctaagcagggattccatacaaattgaatttgagaagctgcatattcacagggtgcgcaggggagagcgttttattaaagcaaaactgtaccactcgcctggcaaagaaggcacgtttaaacctgtaagtggatatcttgtcaagactacacaccttttcagaggggcgtcttcccctgaagacagcgggcttctgtctttcctgtga

SEQ ID NO: 82672 - DNA, 1857 bp, Citrobacter koseri
atgaaaattaaggtttcaattttaggggggaagcgtcagggagatgcttttgaactgaagttaatcgatgaaaaaatcaactcatcattattcattcttgaagatgaagctatagaaatagcctttacgagtgaaaactattacgaaaagatttctttgttattatacgaaaatgaagtggaacctactttaatcgaacgtgtaggcgagctttggacttacagatggcttcccaaaaggctagggcgtttttcatatgaatgttttttccataattactatggaatagccgaattagtacttgaagctcaatacggtgaaaggactgaactttttagttttcaatcgatagaagttctggcaaaaaagttaaatgcagagcgagttgataagatgctgaactatatagcaaaaatcgatagtaatgctctttgtgcttttttcagagtaactcggcggaaagcaggtttcaaaaatggggatactcctgctgaaattttactagaacaaattgaaagcattgtcgaaataacgacaaccctgataagaaaaataatacaaagacctatttctaaattaacaagtcgggagaaatatgtttatccgagtgacaacacaaatattgatgatttgacgctgtcatggctatgtagcaacactgatgagctatttgaaacagattcatatgaaagtgcaattttggagtttaacgatgagctttatggggcgagaaagcttattgagcaccaggcagtagaagattctgacgtttatgaaaatcaagttttgcatggttttgttatgactttaattcaaaccacttcttctcttctttcaggcttcaaaaaccctgataagtatccaaatagaataaatggaagccctttagggtatgttagttttttctctcaaatacaaaaatttcagaagagtattaatgggcgaaaaattttaaaatgcaaatcaatattatcagatttacattctcttaaaaggataatggcagaggtgatgcctgcaaaaaaacatataatcggagtgcccacgtttacaatgaaagccaaaaaggatcctttatacctttctgttttcaaaaagatcgttgactggtaccgatttgggaaacctgattggagtgttcaagaagagttattatccatacaaagcattccaaaattgtttgaatactattctcttttctatataagagagatattaggacagcatataggctctaaatccgcgcccgaaccagttaatgaatcaatatcatttgtttttaatcttagaaaaggggctactctaaaattactatatgagccaaaatattggatggccacccatcccatggcagacctaagaggtttggttaacagtgaaggatggacaacttacaatggtatggtgactcatcgttcttcctcagggagattttctaatcgatctcccgactttgtaatacatattagcaatgggaatggtattgacaagtatctcattcttgatgcgaagtatacttctactgataaagcctttttacattatttacctgagttaacgcttaaatatcttcatggacttcattctatttcagatgcaaatagttccatcattggtttgattattttaaatcctgatgagaaactactcattagagatttccataattcatcatttgatatttattcggataggccagctatgccatttttattatgcgctaccatttctcctggggaagagtatataagtaataattgtttccaacattctcttttaaagatggtaactcttatggagcaacgtgttaacacagaaggtcaaggtcgctacttaatgaacgttttaagtgcttag

SEQ ID NO: 82673 - DNA, 939 bp, Citrobacter koseri
atgacaattttatcaggccctccgggaacaggaaaaacctccacggctattagattagctcaaaatatgggcttgactaatggtgagaatacatacaatactagtaactttattaatattccagtcggaagagcttgggtatcaagccgagacatcttaggattttataattccttaaaagacgtttaccagccagcccgtacaggtctttatgagtttttgaagagtgatcataatccagattatttgaaaataattctacttgatgaggccaacctgtctagcgtcgaacactattggtcagactttctaggtatgtgtgatcccgaaggaagaaatagaaaaattgattctggcattccatctgaagacgaaagatatattaccgtggctgatggtgtgcgttttatagcaactattaacaatgatgcgtcaactgaacgtttatcgccaaggttaatcgaccgggtacccgtaataggtttaaatcacaacgcagaatttaaatcgaacgttataagatctttagcatttgaaggcgctgtgaaaaacgaatggttggaaagttgttttgatgtgagcttatatgagtcttcttttacgacggaagaggagaacttacttgatgaaataatagaaatattaaaagctcctcttaccagaactacttctgttagagtcagtcaaagaaaatataatgcaatgaagaggtattgctatattgctaatgaaatcgaagggttacaagttcagcctctagattttgcaataaatcagcacgttttgccattgattgaggggtacggtgcaggtttcaaagaaagattgcacaatcttgagcaaaagcttgtggagtttgatcttcatatttctaaagcaacacttagaaatataataaataatggtgatatttatagcgaatcttactcttatttttag

SEQ ID NO: 82674 - DNA, 240 bp, Citrobacter koseri
atgaatgaaaatgaaatataccatcgtatccagcaagcgctatccggagcaccacgtaaccaatacaccgtcgagctgcatctacaaatgattaaatatgccgacgagctggagcacattacggcaaaagccttttgcgaaggcaccggcttgagtcaaagcctcggtaccgaattcagcaaaatgcgtaacttaacccgtcggctgaaagccgccggactgaacaccgatctgctgtaa

SEQ ID NO: 82675 - DNA, 2448 bp, Citrobacter koseri
atggctatcaaaaaaaccgaactctattcctccctgtgggcaagctgcgacgaactgcgcggcgggatggacgccagccagtataaagactatgtgctgaccctgttgtttatgaagtacgtgtccgacaaatataagggcgatcccgacggcattatccttatcccgaaaggggccagctttgacgatatgatcgcgctgaagaacgataaagaaatcggcgataaaattaacaaaattatccaggcgctggctgaagaaaacggtttgaaaggtgtaatcgacgccgattttaacgatgaggataaactcggtaaaggcaaagagatggttgatcgcctgacgaagctagtcggcatcttcgaggggctggatctttccggcaaccgggccgaaggcgacgatctgctgggcgatgcctatgagtacctgatgcgccacttcgccaccgaatccggcaaaagcaaggggcagttttacacgccagcagaggtgtcgcgcgttctggcgaaggtgatcggcattacgcccgatacgccgcaggatgccacggtgtacgaccccacctgcggctccggctctctgctgctgaaagtcagcgatgaagcccggcgcgggctgtcgatctatgggcaggagatggacaacgccaccagcgcgctggcgaggatgaacatgatcctgcataacaatcccactgccgcaaccactatctggcagggcaatacccttagcgatccgcagtggaaagaggccaacggcaaactgaaaaccttcgatttcgccgtggctaacccgccattttccaataaaaactggaccagcggactggatccgaagaaagatccatttgagcgcttcgtctggggcgtcccgccggagaagaacggcgattacgcctttctgctacatattatcaagagcctaaaaagcaccggcaaaggggcggtgatcctgccacacggtgtgctgttccgcggtaacgccgaggcgaatattcgcgaaaacctgataaagcagggctatatcaagggcattatcggcttaccggccaacctgttttacggcaccggcatcccggcgtgcattatcgtgattgacaaggaacacgcccacagccgcaaaggcatttttatgatcgacgccagccgaggctttatcaaggacggcaacaagaaccgcctgcgcagccgggatattcaccgcatcgtggacgtgtttaaccaccagcgcacggtgcccggctacagccggatggtgccgttaagtgaaattgccagcgaacaaaataattacaacctgaatatcccccgctatatcgacggcggcgaaccggaagatctgcacgatctgaccgcccacttacagggcggtattccagcgcgcgatgttgatgccttacaggactactggcgagtcttccctgccctgcgcgacgtgctgtttaccgacgctcgccccggctactgtcgggcgcaggtagaggcacagctggtgaagccgaccattctggcacatcaggaatttaaggattttgccacccgtagcctgctgccgtttaaagcgtgggtgaaagaggcagcgctgaatgagatcggcaagggcgataaacccaaggcgctgattcacgatatcagcgagatgctgctggcgcagtacgccaacagcgagctgttgaacaaatacagcgtgtaccagatcctgatggactactgggccgacgccatgcaggacgatgtctacgtgatcacgcaggacggctggcaagccgccgcgcaaattcgcgaactccagccggtgaaaggcaaggacggcaaaaatgtctggaaagaagcgcacgattttgaatttgacaagcggcgctacaaggctgacgtgctgccccgttctctggtagaaattcgctgtttcccgcaactgctggacgcgctgaaccaagcacaagagcgcagtgaagaagcctgccgtcagttagcagagtttatcgaagagcaggccggagaagacgatctgctggccgaggcgaaaaacgataaggataaggtgacgcaaaagctggtcaatgcccgcctgacaaaattgaataaaaccaccgccgacccggatgagctggcggcgctgacccgctgcctggcgctgattaaagcagaggcgaatgcgaaaaaagcgctgaaagccgcgcaagaagcgctggatcgcgcggtgtttaaacattatcccacgctggatgaagcggcgatcaaagcattggtggtgcaggacaaatggctggcgacgttacaggccgggattaaggcggagattgagcgcatcacccagcaactgacggagcgcgtgaaggagctggaagagcgttatgctgagccgttaccggcgcttgaagcttccgttgaggcgttgagcgagaaggtggccgggcatttgcgggcaatggggctagtgtggtga

SEQ ID NO: 82676 - DNA, 1377 bp, Citrobacter koseri
atgatgtatacgatgactctggtactagaggaaacgctggcggccacggcgaaaaagggcgtgcctgcggggtttaagctgactgaggtgggagttatacccgaagattggattgttgaaccattagaaaattatacttcattcatttcatatggttttacgaatcctatgcccactactgttagtggcccttatatgattacggcaaaagatatttcaaatggtcaaattcaatataaaaatgcgcgaaaaacaggcattgaagcatttaataaactgttaacagcaaaaagtaggccgaaagaaaatgatttactactaaccaaagatgggacattaggacaacttgcgttagttgatcatagagttatctgcattaaccaatccatagcaatattacgccccaataatagagttaatcctcaattgttgaagtttattttggagagttcgttataccaaaaaatgatgcttgatgatgctggcggctcaacgataaaacacatttatattactatcgttaataagatgctggtaggtatacctcctaatattcaagagcagaatgccattgctgaagcattatctgatgttgataactatattctagagtcagaacaactgctggctaaaaaaaaggctatcaaaacagccactatgcagcaactactgacaggtaaaacccgtttgccgcagtttgcattgcgggatgatggggctgaaaagggatataaaaagagtgcgctaggagatattcctgaggattgggatatttcgacctacggtcaggttttttcatttttacccacatcgacaaatgcaagaagcgatctttctgatactggagagtacggatatattcattatggtgacatccacacgaagtggagcaaccatttgaatctagataatagctcttttcccagaatatcaagcgatttagtatcttcttcgtttatcaaagatggtgatcttattatggctgatgcctccgaagactatgctggcataggaaaaagcattgaaattcaaggtgtaagggataatataatcgttgcgggattacatacctatttgttacgtgatgtgaacaatatatttgtaaacggtttccggggctacctacattgtattcgtgccgttaaagctaacattgaccgattggcaacgggtatgaaagtctttggggtatcgaagaataacctgaaaacaatccctatccctgttcctccaaaagaagaacaaatcgccatcgctgccatcctctccgatatggacaaggacattcaaaccctgcaacagcgtctggacaaaacccgccagcttaaacaggggatgatgcaggaactgttaaccgggaaaacccgcttaatatag

SEQ ID NO: 82677 - DNA, 657 bp, Citrobacter koseri
atggcttatgattacagcgctaatctcaacccggaaaaagccctgatctggcgcattgtccatcgggacaatatcccgtggatactggacaacggactgcactgcggcaacagccaagtgcaggctgcaaactgggtcaatatcggcaacccggagcttatcgacaaacgcgccgggcatccggtgcctgccgggacgggcgggacgctgcatgactatgtgccgttttactttacccccttctcaccgatgctgatgaatatccacagcgggcgtggcggcattacgcagcgtcccaacgaagaaatcgtcattctggtcagcagcctgcggcacgtagcggcgcaaaacgtccccttcgtgtttaccgacagccacgcctactataatctggcgaattactataccgatctagacaatctgcaccggatcgactggcccatcctacaggcgagggatttccgtcgcgatcaggacgatcttgccaagtttgaacgctatcaggccgaggcgttaatctggcagcactgcccaatcacactgctggtcgggatgatttgttacaacgatggcgtcaggttacaattagagcagtggctgtcgcaacgcaatctatcaatgcccgttcacgcacgggccgggtggtacttctcatga

SEQ ID NO: 82678 - DNA, 1068 bp, Citrobacter koseri
atgatcgcatatacacaaggcaatttactggacgcgcccgtggaagcactggtgaatacggtgaataccgtcggtgtcatgggtaaaggcatcgcgctgatgttcaaagagcgcttccccgacaatatgaaagcctatgccctcgcctgcaaacaaaagcaggtcatgaccggcaagatgtttattaccgaaactggcgaactaatggggccgcgctggatcgtcaacttccccaccaagcaacactggcgcgccgactcccgcatggagtggattgaagacggcttgcaggacttacgtcgctttttgatcgaagagaacgtgcggtccatcgctattcccccgctgggtgcgggcaacggcggcctgaactggccggacgtccggacgcgaattgaatctgcgctgggcgaccttcaggacacagaaatcctgatttatgagcccaccgaaaaatatcagaatgtcgccaagagcaccggtgtaaaaaagctcacccccgccagagcgatgatcgctgaactggtgcgtcgctactgggtgctgggcatggagtgcagcctgctggaaattcagaagctggcatggctgttacaacgcgccattgaacagcatcagcaggaagacgtgctaaaactacggtttgaggcgcacttttacggcccgtatgcccccaacctgaaccatctgcttaacgcgctggatggcacttatctgaaagccgagaaacgcatcccggacagccaaccgctggacgtgatctggtttaacgatcgggaaaaagaacacatcaacctctggctgaataacgaagccaaagagtggttaccggcgcttgagcaggtcagccagttaattgacggctttgaatcgccgtttggtctggagctgctggcgacagttgactggctgctgactcggggagaatgccagcccacgctggattccgtgaaagaggggctgcaccagtggcctgccggggaacgctgggccaaccgcaagatgaagctctttgacgataaaaatctgcaattcgccattaaccgcgtaatggagttccattgctga

SEQ ID NO: 82679 - DNA, 3096 bp, Citrobacter koseri
ttgagcactatcggccagcgcgaacgcgccacacagcagcgtttgattcagttttttgttaaggatttaggataccgctatctgggacgaagtgccgggtataccggggatagcaatatcgacacggacatactgagcgcgtggctgaagaggcgcggcgtcagcgataccctgatcacccgtgtgcttcgacaactggattccgccgccgcgctgggcgaaggcaagaagctgtattacgccaataaagaggtctatcgcctgctgcgttacggcgtaaaggaaaaggaagacgcgggcgagcagaatcagaccgtgtggctgattgactgggcaaatcctgaagccaatgatttcgccatcgccgacgaggtgacggtcaaaggtgaatacagcaagcgcccggatcttgtgctgtacgttaacggcatcgcgctgggcgtgattgagcttaaacgctcgtctgtccacgttagcgaaggcatccggcagaatctcgataatcaaaagaaaacctttatccgcaatttctttaccaccatgcaactggtgatggcaggtaacgatacgcagggactgcgctacggcaccatcgaaacgccggaaaaatattatctggagtggaaagaagagaataccggcgtatacacgcataagctcgactttcatttaagccgcctttgcagcaaatcaaggctgctggatatcgtccatcactacatggcctttgacgctggagtgaaaaaactctgtcgccataatcagttctttggcgtcgaggcagctaaacagcatattgcccgtcgtgaaggcgggattatctggcacacgcagggatcgggtaaaagcctgacgatggtctggctggcgaagtggatccgtgaaaacgtacccaattcacgcgtgctgattgtgaccgaccgcaccgagctggatgaacagatcgaaagcgtgtttatgggtgtggatgaagagatttatcgcacctcaagcggcaacgatcttatcgcgacgctcaaccatcctaacccgtggctcatctgctcgctggtgcataagtttggccgtcgtagcgaagcggaagacactgcggcaaccgatgacttcatcaccgagttgcagcaatccctgacaaaaacgttccgcgccaaaggcgatctgttcgtcttcgtcgatgagtgccaccgtacgcagtccggcaagttgcataacgcgatgaccgccattcttccggaagctttgttcatcggttttactggtacaccactgatgaagaaagataaaaagaaatcagtggaggtgttcggcccttatatccacacctacaagtttgatgaggctgtggccgacggggtggtgctggatctgcgctatgaggcacgcgatattgaccagtatctgacgtctgagaaaaaggtcgatgactggtttgaagctaaaacgcgtggcttgtcgaacttagccaaaacccagcttaaacaaaagtggggctcaatgcagaaactgctttccagcaagtcacggctggagcagatcgttaatgatattctgttggatatggatacccgcccgcggctgatggacgggcgcggcaacgccatgctggtatgcagtagtgtgtatcaggcttgtaaggtttacgagatgtttagccagaccgatctggctggaaaagtggctattgtaaccagcttccgtcccgatgctgccagtatcaaaggtgaagaaaccggcgcaggcctgaccgagaaactttacaaattctcgacctatcgcaaaatgctggctgactattttgaacaaagcgaagagaagattgctggtcgtatagccgaattcgagcgagacgttaagcaacgctttataaatgaaccggggcaaatgcgtttgcttatcgtggtggataagctgctaaccggctttgatgcaccgtctgcgacctatctttatattgataaaaccatgacagaccatacgctgtttcaggcgatttgtcgggtaaaccggctggacggggaagataaagagtacggctatattatcgattataaagatctgttccgctctctggataaagcgataaccgattacaccacgggcgcgtttgacgattacgatcgcgatgatgttgatgggctgttaaaaaatcgtctggagcaggcaaagctggatctcgacagcgcgctagaggtagttcgcagcctatgtgaacctgtcaaggctccgcgcgaattgcaggactatcagcactatttctgtggtcagtcggggaaaaaccagacgatattaggcgaaaaagaggcgctgcgcctttcgttctatcagaatgtcgcccgcctgctgcgcgcttacgccagcctggcgaatgaaatgcaggaagcgggctataccgatgaggaagtggaaagcattcgcgccgaagtcgctaaattcgagagactgcgctacgacattaaactgaccagcggcgatctactggacatgaagcgctttgagcccgccatgcgccacctgctggatatgtacgttcgcgccgacggtagcgaagtgcttatggatttcgaagagttaagcctgattgagctgattgttgaaaaaggagcagcagcaaccgctgctctgccggacgagatccgcaacaatcaggatgcgatggcggaaaccatcgaaaacaacgtgcgtaaaaccatcgtggatgaaaacccggtgaacccaaaatactacggacgcatgtcgcttttgctggatgaactgattacccttcgccgccagaatgcgcttgattatcagcagtatctggaacgtatccgggatttgagcaagcaggtcatacgcccagaacaaaccaacgtagcatcctatcctgaaacaatggatacgcaggcaaagcgcgcgttttatgataacttcggtcatgacgaggtgctggcaacccgtattgatacgacaatccgctataccaaaaaagcggggtggattggcgatcgttttaaggaacgagagcttgcccgtgcactgcgcgaagaaaccgccagttataacgtaaatattgatgacgttcttgagctagcccgcaagcaaaaggaataccactga

SEQ ID NO: 82680 - DNA, 717 bp, Citrobacter koseri
atgccggtcatgcagataggcacgctacgcttacagatcaatcgtaaagcgattaagaacttgcatatcagcgtcctgccgcctgacggcaaagtccgcgtttctgccccggaacacatgacggaaacggcgatacggatggctgtagcttcccgctttcgctggatccgaaagcagcagcaggattttgccagacagccccgccaatccgagcgggagatggtcagtggagagtgccactatctttggggccgtaagtatcgcttgtttgtgatcgagcgccagggacgccatgaagtgaaggtcgcgggaaacaataaactccagctttatattcagccgggaaccagtaatgaaaataaggagctggtattaaccgacttttatcggcatgaactgaagaggcaggttgccaaattgctgcccgaatggcaggccagaaccggtgtccccccaacgttctggggcatcaaaaagatgaaaaccttttggggtacctgtaataccaccacaaagcgaatctggctcaatctggagctggttaagaagccaccggagtgtctggagtatattctggtgcatgaactggttcacctgctggagcgtcatcataacgagcgcttccggctgcatatggaccgcttgatccctaactggcgcgagcgccgggatttgctcaataagatgccgctggcgtttgaggcatgggactattag

SEQ ID NO: 82681 - DNA, 831 bp, Citrobacter koseri
atgatgaactcacaaaactccaccagtacgaatgtcgtcagagataagaaccttcttaagcgccgggtaaagtattatatcaaatctggtcgtggcggcagaaaaagtgagacggcgttgatcaaggcgctgtcccaacaggcacatctatatgtttttggtggacttatccgtgatattggtcttttcacggctcatcagttccgttctgatatagacttggtttttgctggttctaggaagcatcttcataaggctctgtctgattatggcttgcagcagataagtgaaaataaatttggtggcttccgggttaaagacttcaatgttgacattgatatatggagtttagaagatacttgggcatttaaacatcactttattattcaaagggatattgaaagtctgctgagcacaacactaatgtcttgggattcagttctttacgatattcaaaacgacagaattattacaactgactcatggctttctgacctacatgcaggtcaccttgatttagtactagaacatactcccgatgtaaacagcgctctaatcagaatcttacgcactatttatggtaaagaagttctcatgctgggcgagcgcctttgtcagtttttagcctcatcgatggatgcttatccagatcacagattagttagtgaagagctagaacgttatagaacaagttacattacaagcacaaggctgtctaaactccggcaagatcttgccaagtggtcaggaaaaggtggtttacaagtaaactctcatctgtactgtaagcagttgaacctggagttcatttcaccaactgaaaaagaatga

SEQ ID NO: 82682 - DNA, 1416 bp, Citrobacter koseri
atgcactggaataatcttttaaacagtaatcgtcgaaagcctaaaaaagaaaaaaaggaacagtcccaagacacttctaaaggaaggcagcaaatagaacgcgactttgatcgtatcctttttgctgcaccgacccgcaggctcgcagataaaacacaagtgtttccccttgacaaaaatgacagtgtaaggacacgtcttacccattcacatgaggtggcaaatttgtcacgaggcatcggaatgcggttagcttttgaacttcaagatgaagtattcaaagatattgatatcgatatctgtttgcaacgtgatgttccggctctactcgcaaccataggtttagtacatgatttaggcaacccaccttttggtcatcaaggtgagaaagcgatgagtgaatggtttacagaaaatcttcgttccgattcagaggagtatatagataggatttatgacgattttcgtcgttttgatggtaactctcagactttccgtctggtcactaaactccagattttaaacgataactatgggttgaatctaacttatgccactttggcatcaatgattaaatacccacgagcctcagattctgattcatccatatggagtaaacatggtttctttatctcagagcaggatgtagtgaatgatgtctgggaaaaaaccggtttatctgaaggcattcgtcatccatttacatacattatggaagcttgcgatgatattgcttactctgtgctagacgctgaagatattgtgaaaaaaggccttgcatcatttcatgatcttatggatttcattcagtgttacgaactttgtaaagatgacattgttgcaaaacaggttgttgaaaactgtaaaaacgcgcataccacctatgcttcacaaaatctttctcctgcagagctcaatgacatgagtatgcaaatgttccgagtttttgctattgcggaactagttgatgctgttgttatggccttcagagataatattgaagaattcatggataaaaaatgcaaaatcaaagacttgatatctaaaagcactgggaagaatttatgtaaggcactgaaagagtttgacagttcgaggggctaccaacacagtagtgtcctcaagcttgagctaaaaggttctaactatatcaagggcctaatggatatgctctggctcggaatcaaaggccgtgcaacaggtggctctcagtgggatacaccatttggtcgttacgtttatggtcgcatttcagaaaactaccgacgtatttttgaacaggaaaatgatttacccactcactacaaggaagcccagttactcgctgatgcgatttcgggcatgactgacagttatctgatagcattacatgatgaactcacaaaactccaccagtacgaatgtcgtcagagataa

SEQ ID NO: 82683 - DNA, 144 bp, Citrobacter koseri
atgcatagctacctacaaaaagtctctaacgagtcagaggtgttgtctgatttattacaagacattgttactggggataatcatgaatccagaaatatcatattgttatatttgattttttgtgcgattagtcatgaagtttaa

SEQ ID NO: 82684 - DNA, 423 bp, Citrobacter koseri
atgacaacatcccctctgcactctctggatatccgcctgctacgctactttgccgtggtggcggaagagaacaatatgagccgcgcggcacagcgactgtttatgtcgcaaccgccgctgagccgccatattcgccagcttgaagaacgtctgggggtgacgctttttgtccgtcatactcgtggacttacgctgacggatgagggtctgcgcgcgctggaaatcgtccgcccgctgctggcgcagcaggacaaaacgtatgctgcgctgaatcaactggcgcaaaccggcgcgcaatcgctgcgtttagggctgagcaccgcgtttgagcaggggatttttgcccccctggaggcgcagctgaacacgcgtgtggagaggctgcatattgtgcgtcatggttcgcctgaactggtacgctag

SEQ ID NO: 82685 - DNA, 225 bp, Citrobacter koseri
atggcctcggtctactcagatgaataccaacgtgttattaacgcattgaagaaagcccgaaaagagcgcgggatcactcaggcgcaactcgcagaagccttaggcaaaccgcaatcattcatcgctaaagttgaaagcggtgagcgtcggctggatgttgtggagtttgtgcatttggcgagattggttggggtagagccagtacgtatactggaggttatttaa

SEQ ID NO: 82686 - DNA, 471 bp, Citrobacter koseri
gtgactcttgatcccaatactgatttaaaactggaacgcctggtggatgcgccacgcgacctgctgtggctctgctggactacgccggagcacattaaaaagtttttcatccctgttccgcataaagtgatcgaatgcgatctcgatctgcgcgtgggcgggcggttcaacaccgtttttgaggtggacggccaacggatggacaacaagggcgtctttctggagatcgaacccggcaaaaagctggtttttaccgacggttatacggaaggctggaaacctgccgaaaacccgtttatgacggtaattctattgctggaagatgcgggagaagggaaaacccgctacaccgcgatagcccgtcacccaacagctgaaatccgcgagcagcacgagaaaatgggcttccatgaaggctgggggattgtgctggaccagctggttgagtatgtgaaagggctgaaacggtga

SEQ ID NO: 82687 - DNA, 951 bp, Citrobacter koseri
ttgccaaaaaccactaactatacaccaatcttagatttggtctcgcttccaagaataaacagttatcagataacctttcacacttctaatgattatgaactctatggggcttatctatggtgccaacaagttggtggaaacttataccctttgattcaaaatttagaaattacagttagaaatgctatagacaatgcagcaaagaaaagatttggtgattattggtggaaacagatctattgcaataagaacattaactcgactaattttatgaaaaaaattgattctgctatcgataagctggacagagaatgggtcgattttgagaaaaaaagattgggtttaaaaccgtgggatagtttaccagctacaagtgttatacccatatggcctcacgataaaatcatagcagcaacagatttttcagcatggcattatattttgaataaagaatttatctcaaacaacccagggctgaatcataaatatctttggcctaagtccttaagcactgcattcaaaaattatgcttctattaatcctgatcaatcacaaataaataaagaattaagtgatttgatatttgatttaagacagtatagaaatcgattgtttcatcatgagccgctttgggtcaaagcaccaacagtaacgagcccttccaccgcaatagatactataagagcaaaaatcaataatattgaaaaagtcatttgtgcaattgacacaagaatactcgacattttgcataaagtaggtttatttagaaaaatcagaagagtttgcacaattgaagagcttgaaatatatacttatattaaaaaacctgaaaaattgactaaaaaacaaagcagattacttaggggagtatattctaagtcatcaaagaacaacgaatcgatactccttgcacactcaaattcaagttatgtgctgaataagtttaggtga

SEQ ID NO: 82688 - DNA, 1224 bp, Citrobacter koseri
atgatcagtagaggctcagaatggaacaaatgggatcttcatgtccatactcctgcatcagttttgagaagcgaatatggagacgactgggataaatatattattgatttattcactaaagctatcgaagaagatgtaaaagtaatagggattactgattattttttcatagatggatataaaaagataaaaaatgactacttagctaaccctgaaagaatggagcaattattaggtactgaaaaatatgagttagttaaagaaataaaggtattaccaaacatcgagtttagaattgataaattagttatcggaaaagaatcagatttaaagtggaatagaaaagtaaattatcatctcttattatgtgattctgttcctccagaaatcatagaaaaagaaattataaactgtctgaaatttgatttttattcagaaccaggtgccaggacagacagaagaaacttcacaaaagagaatataatcgagtttggcgaaaaactatgccaacatcaagataattttgctggacagaatcccctatttgtagggatgataaattcatgcttcaatcttgatgaactcaaagacatattaaacacgaacggaaaatttaaaggaaaatatatattagctttaccagcagatgaagatctaagtaaagtcagttggaagagtcaaggccatggcgttcggaagcatctcataatgcaatcacacatgctcttcacttcaaatagtggcacaattgatttttgcaaaggtgaaaaacacgagacgataagagactatctgaaagagtttggaaatctaaaaccttgcgtttggggttcagatgcacactcctcagataaaatgtttaaacctgacgataataggcatacttggataaaagctaatctcagcttcaatgggctaaaacaaataatatatgagcctgagtcgagagttaaaattcaagaatctcacccgcagacaaaagccggatatcaaacgatattaagagtaagattcatatgtgaagataaaaaattccccaaagattggatatatttaaataaagatttgaatacaataataggtggaaagtcttctggaaaatcacttctactttacttcattgcagcggctataaataaaagtgctgttttagaaaatataaacttagctgacaccgacaactatgatacaaaaggtattgactttgaggtagagtgggattga

SEQ ID NO: 82689 - DNA, 2163 bp, Citrobacter koseri
atggcaattgtaaagaaagcatttaggccgaaagctaggatcatggaactcttaggcgaacagcttataaaaaatcataccctagctctttttgaactaataaaaaactcatatgacgctgatgcgtcatatgttaaattaactcttaacaatattaatgaagaaaatgcaagtatagaagtggtagatgatggattagggatggatcttgatactgttgtgaatatttggatggaacctgcacacggacataaatctgtgtttagagaaagtggaaaacgaaccaataaaggccgcttgcctgttggtgagaaaggagttggacgatttgctgtgcacagactgggaagaaaaatctctatgtccacgcgtgcatatgatcaggatgttgtcgctgtggatattgattgggataacttttcaaaatctgaatatttggatgaagcctatatttctatagaaacacgtccaagtaaagcacgaaatcccggcaagacaggtacgaaaatagtcataacggatttaaaacaagaatggaaacgtggagatatacggcgactatatagagcagtgtcatctatgacgtcagccaatttacttgacagagaaaataatagcgatgcctttgttgtcgaatttaatatttatcctgagtcaaaatggttagatgacctttttgatccggagttagtgatctctcaagctctttttgagtttgattttcaactaaatgatgacggtctaacttataaatacgtttatcaaccttatcctgcactaatatctgattacaaaggtataattgaacccagaactactgaagttaaattagagtcgcccgattttttcaaatttactcctacaaataatgagcgctctaagaagaaaaaaacaaggaatgaaagattctctcttgttaaaagtggaattggaccaatttctgggaaaatactaggttttgacctcgataggattttatatgatagatatcttaaagatgaatcaggcggcttaagtgaatatttaaaagcccaaggaggtttaaaggtctatcgtgacaatcttcgagtatataactatggtgagccaggagatgattggcttggattagatcatcgtagaattcaaagtcctaccaaaaggatgggaaaccagcagttacttggagaaattcatcttgagttagataaaagctcagccttaaaggaaaagacgaaccgtgaaggtttcgtagaaaatgaggcctatggtgagtttgttcatgcaatgttatcggtgatggcacagttcgaagccgagagaaataaagataaaagaatactaaaagcagcgattgagacgaaacctggtggtgattttcacggttcagaaaaacaaaaaagtactgaagaacttcttgatgagctcaagcaggaagttatagctgaaaagaacatttctccaaaagttggtaatcttgtagataaggttattaaatcgttcaaagaaaccagagacgcgatgctttcatctgccggagcaggtttaggattaactaccgtatttcatgagttggagcgtggaattcgaaatttgcatatggcaataagagatggcgtagataatgggcgtttagaaattatttctgaagaattagtatccttacttcaaggtgctatgtatatggtaagtaaaaaagataaggaagtaatttctgtttcaaaattgataagccagtgcgtcaatactcaacagcgtcgttttaagcgtcataaaataaaatttcttcccggttttgaaaagaacacattacttgattttaatgttaccggcgtgagaagaatgttcactagtgcaattgtaaatatcatcgataatgcaatttactggatggatggtgagccagatgataaccgatatttatggattgggttaagttctgaatttgaaggcccagcaataattattgctgataatggtcctgggtttattgatggtggcgatgaattgattcaaccatttttcactagaaaacctgcaggtatgggaattggtctttattatgccgatatggttatgaaagcacattcaggaagattagtcttccccaatcacaatacaatagatattcctatggttactaaaggtgcatgcatagcacttgtttttgaaaaggacaaataa

SEQ ID NO: 82690 - DNA, 1206 bp, Citrobacter koseri
gtggccaagatcaagctcaccaagaccgccgtagaggcggcgcaaccccaggcgcaggcggtcgaactgcgggataccgtggtgcccggcttcctgtgcaagatcactccggcgggtcgccgggtgttcatgctccagtaccgcacaaacgcaggcgagcgtcgcaagcccgccctgggcctgttcggggagctgaccgtcgaacaggcccgcgtcatggcgcaggactggctggccgaggttcgccggggcggcgatcccggcggcgccaaggccgaggcgcgcaaggcgcccaccgtcgcggagctgtgcaagaagttcatggaggactactccaagaagcgtaacaagcccagcacgcaggaaggctatcagggcgtcatcgaccgctgcatcattccattgctgggtcgcaagaaggtgcttgaagtgaagcgccccgacattgccggtctgatggaaaagctctcgtacaagccgaccgaggcaaacaaggcattcggcgtactacgcaagatgttcaatctggccgaagtgtggggctaccgcccggacggcacgaacccgtgccggcatgtcccgatgttcccgccgggcaaggaaacccggctcatcgtggatggcgaattggcgctgatctaccgccacctggataagctggaggccgaagggctggagaactacgtcatcccgctggcgatccggctgcaattcgagtttgccgcccggcgctccgaaatctgcccacttgaatgggcttggctggacttcgagaaccgccgtgtggtctggcccgacagcaagactggcggcatgtccaagcccatgagcgcggaagcctatcggctgctttcgacggcgccgcgccgggaaggctgcccgtatgtcctgccgtcgcccaacgacccggacaagcacctgacctttggcgagcactacggcggctggtgccgggcgctcaaggccgccggcgtgccgcacgtcggcacgcatggcattcgccaccgctcgaccaccgacattgccaattcgggcgtgccgaccaaggtagggatgaggctgacaggacacaagaccgtagcgatgttcatgcactacgtccacaccgaagacaagccagtacgcgaggcggccgaactggtggccagccggcgtcaggccatcaccggcgcagggcagcgccagtcgcaggaggccgcagcatga

SEQ ID NO: 82691 - DNA, 147 bp, Citrobacter koseri
atgaacagcgaaatgcttctgtatatggacgacaagccaatccgccagacattgtctggcgaatcctctccaacgccgagaaagccgaaagttgaactggcaaaccatgcccgtttcgggtatagttttcgggagtgccaaatatga

SEQ ID NO: 82692 - DNA, 384 bp, Citrobacter koseri
atgaccgtcttcaaacgcagggactttgcacggtggcaggctggcgaaaggctacctgacgccgctttgtgcaaagcagtccaggagatggaggccggtctggttgatgctgacctaggcggctttctctacaagaagcgggtagcgcgccctggtggcggcaaaagcggcggctatcggacgctgctgtcggcacggatcggcagcagctatgtgttcctgcatgggttccccaagagcaacaaggcgaatatcactcaggacgaaaggaaggcgttgcagttcgctggcaaggtgtttctggaactgtcggcagagaacttggcgaaagcgctggagtccggcgttctactggaggtgtgttgtgacgagcaagctcattga

SEQ ID NO: 82693 - DNA, 306 bp, Citrobacter koseri
gtgacgagcaagctcattgaatccctgcgcggcgacttggctgcgctgcatgacgctggcgcaatcggcaaggtaacgatgcgcgagttcgatgccatctgcccgccgccagtgcgggagttcagtgctgccgacatcaaacacctgcgcgaagaactgaagttcagccagccggtgttcgcgctgcatctgcacacgactgcttcgacggtgcgcaagtgggagcaaggcgatacccacccggccggcccggcgctcaaactgctgaacatcatcgccaacaagggcttgcaggccatcatctga

SEQ ID NO: 82694 - DNA, 1284 bp, Citrobacter koseri
atggatgaagccgtagtcgttttttcccgcaagggcctgtttcagacccggattgtggcgcgcgatgttcgtagccgggagcatgcgcgcaagttatggccgctggtgtctcccgatgctttgcggcaaatggtgacgtgggtcagccctatctttgaagatggaaagctgcgtcggcgctcccatttccggcaattgcccgttgatcgcatctacgacctcagggcgcactttgatgacgaagaagccaaccggcagcgggccgtacaggaaagccaagagcatcggcgcgcaaaagagttgatcgcggcagagcttggtcggcgtctggatgcccggcttgccatgccgtggtggttcaaggatgcggatgcatcggactacccgctggaaggcaacctattgctcggcgctgatcgtgtagcgaccgagcatccattggatacacccttcggcagccgattccggctcgatgttgcggtgcttgggccgcctgtccaagcggagccaatggttttgggtggcgtggaaatcgagcttggccatgccttcgacggacgtaaggcactgatcggtaagtcgctggggttcccgctcatctccatcgacatcacggaaatgtcgatcgacgagttgacgccagaatgggcgcagcaggcattgaccgccaccacgcgcagccacgaacaagggcgccggcaaacgtacatctatctccatgacctgctgtaccccctctacgcccagttgccagcattcctcgatgatgagcagcgtcaccagttcctggtgttcgcagatgatgcaaccttgcaaaagctggcgcactggatgaacttgctggcggaaaggctggaatacccgaagggagctgttgcggtcgcgttggtcaacggaaaaagtgaacaatcacgcaagatgctggagcgcgcaggggaagttgccgggcctgattggaaggacttcaatagccagcggtgcctgcgtttgactcttcctcgccctcgaaacactgcggatcttcaggcccatcgttttcatatgacgatggcgcgactgctgctttcccatgccgatgcacttgtcggctacaagtattgcaacggcgtgaacaacaacgatccagaggaggatgtctggatcgcccatcactggattgccgagcagggtatccatacccaacaccgcgtactgcccaagcgattggccgagccgatcaaccgactgatcgcagtggtgtccgatttacgccgcgatcatgaaacgtccgccgcagaggcgtaa

SEQ ID NO: 82695 - DNA, 711 bp, Citrobacter koseri
atgccaaaaatcatcttgcagtcgaatactccggttgggctgaaggcccaacttgctgcgctggatattgccgtccctcctcgctcagagggccgcagaaatcaccacacagagggctattgcatcgcgcatctgctggcgacactgccgatcaatcggctttcttttccgctgacattgacccataccgataggccggacttcgtgctggacatgcccggtggcaacgtcggcattgagcatacggaagcggtgccggagaacatagctcacgccgattgtctgcgtgaaagggaaggcttggggccggatgtttatttcacgccgcatgccatgcctggagagtcgcgcaaaacggcagtgcaactccgaagcgaaatcatggccgatgcgcctggttgcggctgggagggggattctccagagcgcgagtgggcttcagcaatggcccactacgtcagagaaaaaattccaaaggcaacggctgacggcttcgttcgatactcgctcaactggctgatcgtttacgacaactggccattaccagccgtggactacaccaaagcagcggcctatttgatgccattgctgggtgagatgggagcgttttctgtgttcgatgcggttttcgttcacgatgattcccggctgtgcgagttcagagatgaccccatcattcatgccctggtgaagccgagttcgatgcgatag

SEQ ID NO: 82696 - DNA, 510 bp, Citrobacter koseri
atgtcgcaattttccttttcctcgttcgatgcctcgctgatggttcgcgatgcggagggtcactaccagccggcgacggccgaccagattctggatgctgcgcgccaggccatcgagcacaagatgcagcgcggtgcatcgttcaattcgccggcggcggtcaaggagtacctgtgcaccaagctgggcggcttcgagcatgaagtgttcgctgtgctgttcctcgatacacggcatcgcctgattgagtatgccgagatgttccagggcaccatcgactcggctgaagtgcatccgcgcgaggtggtcaaggcagccctgcggcacaacgcggccgcggtcatcgtttcgcacaatcatccgagcggcaatcccgagccgagcgcagccgatcgggcactgacccagcggctcaggggggcgctggggtttgtggacgtgcgcgtactcgatcacgtcatcgtcgccggcaacgcaacggcatcgttcgccgagcgtgggctgatctag

SEQ ID NO: 82697 - DNA, 2304 bp, Citrobacter koseri
atgatcgtctgcattaaccgtctcaagcagttcggtatcttcagcgacttcaatggaacgaagatccagaagttcggccggtacaaccttgtctatggctggaacggaacaggcaaatcaaccctatcgaatctattctcttgctttgagcttcgctcgatggttcctcgcttcagtgcgggccagttttcagtcgttttggaggacggctcaacgatcacggaaaccacactcccttcatcccaattaaatatccatgtcttcaatcaacgctttgtgcatgagaacattgattgggacaaatccgtaaaaagcatccttctcattgcgaaagagaagattgatgacttgcagaaactggagaagctaaaaggcgagcttcaatcgaaaaagaaagctcacgacgaaaagcaaagcgacatcaagaagcagcgtgaagcattggataaattcctgaccaatgctgccaagaaaatgaagctaggacttcaggcgattgatacgagcgatagctactacttgaattacgatcgccgaaagctctctaatttcattcagagtaatggcgatgccattattaagcctgactcggttcttccagatgaaaaggtcatcgaccttacgaatgccgccaagccagatcagcttccaagcattactttcgcctcaacggccattgagccggactactttaagaaggcggcaggtcgcatcagagatttgattggaactacagcagtcaatcaagctatccagcggctgactgataacccggacattcgtgactgggttcaaacaggcttggaaattcataaaaaccatgattcgcaatcctgcgagttctgcggttccccattcacccagcttcgtgccgaggcacttgccgctcacttcagcaaagagttcacggattttcaaaatcggcttcagagcgccgcgacttggattgaatctcaaggtgctccagccaatcagttgcccgcagcgacagagttttataaagagctatcggctgacgcagataagctccagaaggaatacacatctgctgctgagaagatcaaccagcaaataaacggatggcggcaagctctgaaagacaaaatcacagaccccgcaaagacagacattcagatttctgatgtggttgaagaggatgtcacgaatttcaatgagatcctaaagtcaatcgttgcgctcgtcggaaagcacaacaataagacttcaaacttcaaatctgagacatccaaaagcaaggtagcactggaacttcactttgctgcggctgaggtgcaagagtttgactatgctggaagtgagaagaaatgtaatgaccttgaggcggaagcaaagaatgactacaaggaaattgaaaaacttggtcaagaggtcggagcaatagaggcactgctctcaaatgagacggttggggcgaaggagttcaatgacatcttgcatcgtttcatcggtcgctctgagctttgcctgagatttaatcaaaagaaaaaaggctatgagatcatcagaaacggagtgggtgagcatgatgggaatttgagcgaaggtgagaagactgcgattgcatttgtctacttcatcacgaagctcaaagaaaacggaaacaacatcaaggacacgattgtagttgttgatgatcccgtctcaagctttgactcaaatcacttgtttcatgcctattcgttcctgagaactcaatgcactgaagccaagcaactttttgtgctgactcataacttcacctacttcaagctagtgagagactggttcactggaacgaacaggaacaggattgccaaaggaaaagctgagaattgcttcttctatcgactggatgcgcctcctggttcaccccgccattcgctgcttgttgacgccgatgattctctgaaaaattacggctctgagtatcactacatcttcaaaaagctctatgaatacagggcacatacgatccttaatagagatgaagcctttttgactgcgaacctcgctcgcaagctcattgaatcgttctttaccttcaaatatcccaggcggagaagcgacatcagtcaactgatggatgttggtctgaaagactgcgctatcacaacgccggaactcaaggaaaaaatatatcgctttatcaacaaatactcgcatagcgatgtaattgaaataaccgaggaatcggcagaaaacttagctggtgaaagccatagcgtcatcggacacatctttcagtggtttgaagaagtggacaagaagcattacgacgaaatgattcaggttgtgactgcttga

SEQ ID NO: 82698 - DNA, 2070 bp, Citrobacter koseri
atgaacgccgttacccaagccgaagcccgcgccatccacgtccctgtgctggaagccgccgacccgagcaagaacctgattctggttccgctgtcgcggctggtgctgcgccccacgggccgcaacgtgcgcaagatcccgcgcatgtccatccctgaactggccgcgagcatccagcgcgtgggcctgttgcaaaacctgatcgtcattgcatccgccgatggcgagcattacgaggtggttgccggtggtcgtcgccttgcggccctcaagctgctggcgaagaagcaccgcatcagcaaggaatgggaggtgccttgcctgctggtggccgatggcactgcccgcacggccagcctcaccgagaacgtgcagcgcgaggccatgcacccggcagaccagtttgaagctttcgccgcgctggtggccgaaggccgtcccatcgaggacattgcggcggatttcagcgtcacgccgctggtggtgcagcgccgcttgaagctggcgaacgtgtcgccccggctggtggcggactatcgggccgacgccgtgagccttgaccagttgatggcccttgccatcaccgacgaccacgccgcgcaagaagccgcgttctacgatgcgccacagtggcagcgccatccctcccacttgcgcgaacgcctcaccgagcgcgaaatcgacgcctaccggcatccgctggtgcgctttgtggggctggatgcctacgagcaggcgggcggcggggttcgccgtgacctgttcgcggaggatgatgcgggcgtatacctgaccgatgccgcgctgctggaacggctggcgcaagacaagctggcaggcatcgccgccacggtttgcgccgaggattgggcatgggtggatgccacgccgggcgtgacccatgccgacctgcacgctttccagcgtgcgccgagggaacggcgcgagccgaacaagcgcgaggcgcaacgcatcgagaagctgcaaaccaagatgcacgaactggccgaagccgtggatgccgcgctggacgccgacgaccaggaaaaggccgacgcgctgcaagaagaaggcgaccggctgggcgagcagttgcaagcgctggaagatggcttgcaggactacggcgcgaacgtgaaggccgcagccggtgccatcgtcaccatcgaccgcaacggcgaagccgtgattcatcgcggcttgatgcgcgaggccgaggccaaggcgctgcgcacgctggaacggctgcgccaagggttcaatggcgcggatgccgcgaacgatgaggaaggcgaggacgacgaagcgcccaaggccgccgccatgtctgaccggctggcgcagcggttgagcggccatcgcacggcggcgctgcaaatcgaagtcgcccggcatccgcacgtcgcgctggccgcgctggtgcatgggatggtgcaggccgtcttgcaggaaagccgctacggcctcaaccgtgattctctgccgctgggcgtgggcctgaaagtgcaagaccggctggaaggcatggccccggactggccggaatcgcctgccgccgtggcgctgcgcgaactgcaacaggtggcgggcgaagccttgccggaggacagcgccgaactgttcgccgcgctgctggcgaagtcgcaagacgaactggtgcgactgctcgccgtgtgtgtggcttccacggtggacgtggtgacgtctcgcgccacgccgcaccagcccggcgcagaactggcgcaggccgtgggcctcgacatgaccgcatggtggcagccgaccgccgagggctatttcaagcacgttccaaaggccgtgattctggatgccgtgggcgcgtttgcaccggaatccgtcacccggctggcgaagctcaagaaggccgacattgccagcgaagccgagcggctggccgatggtacgggctggatgcccgccatcttcaaggccgcaggcccgcaggaggcagtgcaggaggcagtgcaggaggcaggcccggagcaggacgccccggaggacgatgctgaggcaatggcggatgaacccgccgaggcgctggccgcttga

SEQ ID NO: 82699 - DNA, 276 bp, Citrobacter koseri
ttgacccacaccgaaggcatgcgccccggcctcgaccggggctcttcgctggaaggagaagcccccatgaaccgcatcacctccggccgcccgcgcatgacggcgatctacgcacccggcacggtacgcgcccgccgctggagcggcgatggcgacgtgcgcggctaccgcccgccctcgggctggacggcccgcgccgacctcaccgacattcatcccatcacgggccgtgccttggcgcatatcgtgtggtggatcatcgagacgaaggaataa

SEQ ID NO: 82700 - DNA, 819 bp, Citrobacter koseri
atgagcaaagaacatcgtccacatggcaaggctcctaccgcatgggaagccgacattctcaaaatccgagcctttgagatggtgctgatccttttctacatggaggatttgcggcgcttcatcatgggctccatcgaggcgaccgacaaactgcatgggcttgatcggctgagtaatggcaaacccaagaccaaggaaggcaagaagctggagctggcccgcgccgtgctggtttccgaaggggtcattgaccaggccgagagcgatgaactcaaggaattggtggactaccgcaacatcattgggcatacgatccatgagctgaccgtggatgtcggagcctattctgatttgatcaggcagcgagaccccaagaccttcacgccgatgcctttgtatgactacacggccgccaagcgggccaaggcgctgcggcagaaggtgagcaaaggcatgatgaagaagttcatgatgatggcgtcgctcgacttcctggcctttgaagcggcggagaagacctacgttacggagatcgagcggctgaagaagcgggtcaaccaaggcatcgtgaaggccaacaaggtgattgcggaaacgaaccacattatccaggcgatcccgaaatcagttgtggaatcggcccatcccggccacccgaggaacatcaaggaaaacggaaccttgagtaagcgcggcgtggagtgcgttttccagctttttgaagcccaagcaaccccgttggcggtggcttacctgatgaggatttcgcatcgctcggccacgcattggtttgccaagtggaaggccagcaaggcatag

SEQ ID NO: 82701 - DNA, 315 bp, Citrobacter koseri
atggccaacatcggcaccttcacctcagacaaagacggcttcacaggcacgcttcgcaccctgacgctcaacgtcaaggtcaagctggttcccaacgacaagggggacaacgagaaggcccctgacttccgtctgcaggccgccagccacgacatcggagcggcgtggaagaagaccagtgaggccgggcgggagtacatctccgtgaccctcgacgatccttcgttcccggccacggtctacgcccgcctgatcgaaggcgaggacggcacgcacgacctgatctggtcgcgcagcaagccccaggcggcgtga

SEQ ID NO: 82702 - DNA, 1782 bp, Citrobacter koseri
atgacattgctccagaacgatcccatcacccaacttgcattttccgtatacgagaacaaaggcgtcttcgctgttctacttgggtcgggcctgtctcgctctgccgaaattcctaccggctgggaaatcactctggacctcgtgcgccgtgtagctgaggcccaaggtgtcccagcgcaatctgattgggcgaagtggtatcgggaaaagacaggccaggagccgaactattccgtactgttggaagagatcgccagttcgccggacgaacgcagagcgatcctgcatcgctacatcgagccggatcagcaggatcgcgaggaaggtcgaaagacgccaaccaaagcacaccacgccattgcacagttggttcgagccggttatgtgcgagtcatcgtcaccaccaatttcgaccgactcatggagaacgccctgcgggaacaggggattgagccaacggtcgttgcctctgcggatgctctcgcgggcgccgaacctttgacccacagccgctgctatgtacttaaactgcacggcgactacaaggacgcccgaatcctgaacacagatcaggaactgagcgcctatcctgacgcctacaaccggctgctggatcgcatctttgacgagcatggcctgatcctctgcggctggtcgggtgagtgggatcacgcattgcgtgcagccttccttcgcgcacccaacaggcgttatccggtctattggaccgcgcgcggagcactgggatcgggcgcgcaagaattggcggcacacagggccgcaagggccattccgatcactggtgccgatgagttctttcaaacccttcagcagcgggtcgaaacccttgagcaaagccagcgtcaaaacccggcgagtgtcgatctactcgtcaatagtgcaaagcgatacctttcaaaaccagagcatcgcattcaattggacgaactgctttcgcaagaaactgaacggctgatggggcagcttgatggtccgcagttttcaccccacgggcagtggagccaggaggagtttcaatctcgcgtccagcgatacaaagcggtggccgagcctttgacacgcatggctggcgtgttgggccggtggggtgatggcaatgaactgaacacagtgctggacatcgtcagaggtttgtatgtccatgccgagaaggttggcaatggtttgactgtgtggcttagcttgcgctcctatcccgcagttttggtgttcacggcctacggggttggactgacacgttcgcaccgctggcgcacgctgcacgagttccttgttgccccttggccacgagagtaccgagatgccaagagaacagtgtccatgctgttgctcggggcatggaagggggaacgaaacgatctatggagtcagttggagggcttgaacaatcacaagacggccttaagcgatcacttgtttgaagtgatgagcgaatggcgttccagtttcgctggcgtatcggcggagttcgagttggtgtatgaaagatttgagaccctggccgctttggcgtacttggaagaagatagcgaggccactttagaacaggcgcttgccaatacccctcatgggctgtttgcccgaatgcccgttggacgtgtcggctggcatgaagcatcggcagcgacgctgctgcaggagcttcagtcagagacgatgatcactgctctgctgaacgcgggatttgcatataagagccgccgcttcctggaactatttgtcgagagtcttaagcgctacgccagcaagatgtcctggtaa

SEQ ID NO: 82703 - DNA, 294 bp, Citrobacter koseri
atgcagaagcgaaccgtccagcgcggccgaccggccggctccaccacccacgacgccgagctggctcacgccttcggcgcggcggtgcgtgcgctgcggatcgagcgcggcatcgcgcaggaatcgctggcgcaccaggccggcatcgagcgctcccacatgggcaagatcgagcgcggcgagcacatgcccacgttggcgatcatcttcaagatcgccggcgcgctcgaatgcagcacggccgtgctgatgagcgaggctgaaagccagctcgcagcagcggcccagccgtag

SEQ ID NO: 82704 - DNA, 348 bp, Citrobacter koseri
atgaaccgactcatcaccgaggacgagcgcaggcaattgctggcccacggtcaggcccgcgtcggtggcgaggccatcgacccgctgcccgtggcgcggctgttcacgccggacgcgcacctcatctggctgctggccgcgctcgatcctgccgatggcgatacggcctggggactgatcgacctcgggctggggatgcccgagctgggcaccgtgaagctgtccgatctggcctccatcgttgggccgcgcaagcagcccgtgatgcgggatcggtatttccaggcagcgcgcccgctgtcggaatatctgcggctggcccaggagaacggttccatcctcgattga

SEQ ID NO: 82705 - DNA, 792 bp, Citrobacter koseri
atggtcaaccctcatcacgttgcccactggtatcccaccgccgcctatctgtacatcctgggattggacatgctggcgctggcctgggagtatctgcgcaggcatcccgattaccggctcgactggatgcgccaccgtcgccggtcacaggccgcacaacatgcggcgctgcgctggggcttgcgcctgctggaagaccctgccctggatgcgcgcgacgcgcacccggcctggctgcccggcaatgccgccgtggtgcagctccatcccgatcccgatccgccgccggatgcggccgtgttcgcgttctggcgcatccctggccacaagcaactgctgcacgacggcaagggactggcgctgatcgtgcgcagtcccggccattattcgcgcttcgcgctcgctcccggtctggaggacggcatggcggtcgtccatgctcatcgcggaagtggtgacggcggcgctgccgcgcctgcccgctgccatgcgctcgtgccggacgccgcgctggcccatgccatgcccaggccacctcctgccgcactgttggagctgcacaccttgcaggcgctcgacgcgaccctggcgggtgcgtccttgcgcgaagtgggcgaagggctgttcggtgccgacgccgtggccgactggtacagcgacggcggcctgcgctccaaggtacgccgccttgtgcggcgcggcgatgcgctaatgcgcggcggctatcgccgcctagcacaattgccgccgcttgagaagggtcgttttgataaggacgcaaaacgaccctga

SEQ ID NO: 82706 - DNA, 282 bp, Citrobacter koseri
atgcgtcccgctcccttgcggcctgccgccgctcctgccactaccactgcgcaaccgcagcgttacctcaccaacgacgaagccgctgactatctgcgcctgtcgccgcgcacgctggaaaagcagcgcgtgctgggtggcggccccaagttccgcaagttcggccggcgcgtcatgtacgccgtggccgacctcgatgcctgggccgccgagcgcagcttcgagagcacatccgatcccgaatacgccgagcagcattcggcggacagccgtgcgcgctga

SEQ ID NO: 82707 - DNA, 639 bp, Citrobacter koseri
atgatcgtcgcgctgctcaaccagaaaggcggtgtgggcaagaccacgctcgctacgcacatcgccggcgagctggcgatgcgcggccagcacgtcgttctgctggacgccgacccgcagggttcatcgctggactggacacagcgcagaagccagcaaggcttgccacggctgttcagcgccgtgggcctagcacgcgaaacgctgcaccaagaggcgccagaactcgccaggcgggccgatcacgtcatcatcgacgggccacctcgcatcgcggcactggcgcgctccacgctgctggcagctgagcgcgtgctgatccccgtgcagcccagcccctacgacctgtgggccagcgccgagatggtggcgctgatccgcgaagcacaggtgtttcggcctgcgctgcgcgcggccttcgtcatcaaccggcgcgtcagtaccaccgtaatcgggcgcgaagcgcgccaggcgctcgccgaccagcctcttcctgcgctgcgcgcggaagtgcatcagcgcatcgtgttcgccgacagcgtggccgctggccggctggcacgcgagacggcgccggacagcgccgccgcccgcgaaatcaccgcgctggtggacgaactgctgcggtggccgacatga

SEQ ID NO: 82708 - DNA, 273 bp, Citrobacter koseri
atgacagcgaagccgcaacctcgcgcaaagcgcgtcggcatcggcgcgcgtccaccggcgaatccgcacgccgaagcgtggattcgcgagggcgatgccgatgcgctgggcaagggcgacctctacacggctcgcctgaccctcgacatcacgcccaccatgcgggcgcgcatcaaggtgtcagccttcacgcagggcgtgaccgtggccgacctgctgcgcagcctgctggagcgggagtttccagaacaccgcagggagaacacaccatga

SEQ ID NO: 82709 - DNA, 546 bp, Citrobacter koseri
atgaccgtatccgctttgcctgccgctgacgccgccacggctgcaacgtcgccgtcactctcagcacacgcggcgctgcctctctcaacgccgctgacgcgcgtttcgctggccttcctggagcagcgcttcaagctctatctgcgctttggcgaaccggcgtgcacgcagcggctcgaccgctggcgcagtcttgccgtgttcaggcccaatgccgtgttctgccgcatccgctggcaggccaacgactacggcaccgtgagttggcagctcatggtgatgcaggcttgcacgccgctggacgcggcgcagcgcattcccggcgtgcagccaggcgcgcgcttgctgttgcacgccgaaggtgagcaatcggtgcacgccgtgctggaacgcatcgacgccatcgaggccctgggcatcgcgcccgctaccgcctcgcccgcgtactggcgcacgctgggcaaccggctcgcggcgcgcttgccgctgcccgaatacaacgccgagcggcacgccgcctggctgaccgggagggcgctgccatga

SEQ ID NO: 82710 - DNA, 600 bp, Citrobacter koseri
atgacgcttccatccactgtcattggcgcaacctgcatcccgccgcgttctcgttcgcgcttgcgcgctcgcctcgtgctggcaggcctgtccgcctgcggcctcgctgcgctggcctgggcgtccttcgtgcagccgctgccgcgcctggtctacaacccgtccgacagcgtggcggtcggctggtatcgcgtggagccgctccaccagcacaccgactcgctaccccggcttttgtccgttggcagcatcgtcctgaccacgttgccgccagatgccgccgcgctggccgcgcagcgcggctacctgccggcgcgcgtgccgctgctcaagcgtgtgggcgccgtctcgccgcaaacggtgtgcgtgttcgatgcgctggtctggatcgacggcgtgccggtggccgccgtcctgcccgccgaccggctgggccgtccgctgccttcctggcggcagtgccgccagcttcggcctggcgaactgttcctcttgagcgtgaccaacccggcgtcattcgacagccggtatttcgggccggtcagcacgtccgccgtgatcggcgtcgcgcatccggtctggctggaatcccgcccatga

SEQ ID NO: 82711 - DNA, 1980 bp, Citrobacter koseri
atgagcgaccgccgcgacgacgatttccgcgtgcgccccagtgccccgaagaaccggggccagggcttcgtttccaaggtgctcaagcaggcgggcaaggccagcggcggcaagtcctctatgcgcaattccgcagccggtggcagcggcgcacgcgccggccagcgccccggttcgcgcttggggcgcggccatacggcggcgcgcttcgcgggcgcgaagctcacgcccttgtcgcggcgtgtaaccatcaagacgctgctggtcaatcagcgcaatgccagcccgcaatcgctcgccaagcacctgcgctacatcgagcgcgatggcgcgggccgcgatggcgagccgggccgagcctacgggccgcaaaccgacgaagccgacctcgacgccttcaaggagcgggccgccgacgaccggcaccatttccgcttcatcgtttccccggaggacggcgccgagctggacgacctgcgcacctacacccggcacctgatgaatcgcatggaagccgacctgggcacgcggctggattgggcggcggtagatcactggaacaccgacaacccgcacactcacctgatcgtgcgcgggcgtgacgacactggcaaagacctcatcatctcgggcgactacatcgcgcaaggctttcgccatcgcgccgccgaactggcgaccgaatggctggggccgcgcaccgaactggagatccagcagaccttgcagcgcgaggtggagcaggagcggtggacgagcctggatcgcaccctgcaacgcgaggtcggcgaggacggccgagtgcagatcgaacgcttcaacgaaccgcggctgcaacgccagcgcctgctgctaatcggccgcctgcaacgcttgcagcgcctgggcctggccgacgaaatacagcccggcacctgggccgtctatgccgacgcggaagagaccctgcgcgccctgggcgagcgtggcgacatcatccgcaccatgcagcgggccatgcgcggcgagccgcgcgagctggcggtgttcgagcctggggacgatggccgaaccattctcggccgggtggccgcgaaggggctggccgacgagctgcgcgaccggggctatctggtcatcgacggcgtggacggcaaggcccactacgtcgcgctcaacgcccgcgacgagttggcgaactacccggccggcgccgtggtggaggtgaagggatctgccgacgtgcgggcagccgaccgcaacatcgccgcgctggcgagcggtggcctgtaccgcaccgaccatcaccttgccgtggcgcggggtcaggctgtgcccggccgcgatccgcaggaagtcgtcgcggcccacgtccgccgactggaagccctgcgccgggccggcatcgtggagcgcgtggccgaagggctatggaaggtgccgggcgacctgcccgagcagggccgccgctacgacgcgcagcgcctgggcggcgtggccgtggaactgaaatcgcacctgcccatcgagcggcaggcccgcgtgatcggggctacttggctcgaccagcagttgattggcggctcgggcctgggcgacctgggctttggcggcgaggccaagcaggccatgcagcagcgcgccgacttcctgaccgaacaagggctggccgagcggcgcgggcagcgcgtgatcctcgcccggaacctgctgggcacgttgcgcaatcgggaactggcgcaggccgccaaggacattgccgccgaatccggcttggagcaccgtccggtggccgacggccagcgcgtggccggtatctaccggcgcagcatcatgctcgccagcgggcgctacgcgatgctcgatgacggcatggggttcagcttggtgccgtggaagccagtgatcgaacagcggctgggccagcagctcgcggccacagtgcgcggtggcggggtgtcttgggagattgggcgcgcacgcgggcctgctatcagttga

SEQ ID NO: 82712 - DNA, 1161 bp, Citrobacter koseri
atgaatcgcttgactacctatgcgctcgacctccatagacccgtgccgtcggtccgggagactggcactttgagcacgggcaggagcgtgcaggcgtgcacggtggccgtgctgtccatgtgtgtacttctgctcgctgcctgcactgatggctcaatctcgtctagatccgtggccacgccggtggctgcagaagtcgctgtggtacggcaggcacgattacctgttaccaacgatgtgactggcagcgtcgtctctgacggacgcatcgacgtagcttcgcgcgtgaccggattcattcgccagctcgatgttcgcgagggccaggcggtcaggcgcggcgacctgctgttgcgcatcgacgcctctgacatcgacgcggctatcgcgcaggcacgcgccggcgtgcaggccgcccaggaggcttggcgggatgcgcagtacgacgtgaaccagaatgcgcaactggtgccggctggcgcgatctcggccgacgcgctgcgcaagtccagggtgcgggaggaaaccacccgcgcgacgctggagcaagcgcaatcggcgctggcggcggcacaagcgcagcgcaactacgtggccatcaccagtccggtggatggcgtggtcgtctcggtggcccggcgcagcggtgagatggccactcccggcgcgccgctgatgacggtggagtcgcgtgaggtcttgctgttcaaggcgttcgtacctgagcgcagcctggcggcaatcaagtccggtgacttgattcccgtgcgcatcgacgcgctgggcgatgagcgcttcaagggacgggtccggggcgtggtgccatcgggcgatggcgtgacccgccgctacgaggtggacatcgtgctgccgcgggacgcgcgcctgctgccgggaatgttcggccgtctcgaaatcctgctggacgagaagcgggccgtcacggtgccgcgtacggccctcgtgcggcgcggcggtttggacggcgtgttcgtgctgcaggaaggtgtggcgcgttttcgctggctgcgcacaggccagcgcctgggcgatgtggtggaggtgaccgcgggcctgtcggacggagaaaccatcctcgccagcgtcgccgacaccgtccatgacggcatgccgatccaggccgtcgggggcgcgcgatga

SEQ ID NO: 82713 - DNA, 3309 bp, Citrobacter koseri
atgacgtcgcggcgcctgaacttcgcgggttttctcgcgaagcacttcatcacctccaagctcacgctggtcttcatcatcgccgtggcgttgatgggtgtcgtggcggtgctgcagaccccgcgcgaggagaacccgcagatcatcgtgcccgccgccgccgttatggtcggcttgccgggcgcctctgccagtgaggtcgaatcgctggtggtcacgcccctcgaaggcatcctgagcgaactgcccggcgttgatcacatcgagagcacttcccgcaactcacagggaatcgttcaggtgcaattcaaggtcggtgaatccaaggagcagtcgctggtcaagctctatgaccgcgtgatggccagccgtgcctggctgcctgccgatgccacgacgccattggtgcaaagcgtcgacgcggacgacgtgccgatcgtcaccttcacgctggcttcgtcgaaatacgatgactacgcgctcaaccgcatggccgaacgcatggccgagcgcctgcgcagtaccgaaaacgtctcggtggtttccttgcgcggcgggcagcaccgcgaaatcaccatcgaactggaccccgatcgcctacaggcttacggcgtgaccctcggccaagccagagcggccttcccaaccagcaatctgacgttgccactgcagcccaccgtacgtgacggtcaggtacaagccatcaagctggatgcggcctatacctcggccgaggatgtgcgtaaccagctcatcaccgtgcgcgacaagcggccggtttacgtgcgcgacgtggccaccgtcaccgacggcccgccgtcggagccggccacggccagccgcctctccttcggtcccggcgatccacgctttggcacggccgatgccacagacctgcccgccgtcaccatcgctgtggccaaaaagaagggcaccaatgccgtggtggtcgccaatgcagtgatcgaccgcatgcagcgcatgcaggccaccttcgtgccccaggacatccaggtcgtggtgacgcgcaacgacggccagaaggccgatgacgcggtcaacctgctactggaacacctggcgatcgccctggtcaccgtgggcctggtgctgatccttttcctgggctggcgcgaggcattgatcgtgatgatcacggtgccgttgatcatgggcatcacgctgatggccaacctgctgggtggcgtcaccatcaaccgcgtcacgcttttcgccctgatcctggcgctggggctactggtggacgccgccatcgtggtcattgagaacatccaccgccactacgccagccgcaaaccgaaggcagacaaggaagcggaaaccgtgctggccaccaacgagatcggcaacgccaccaacctggccaccttcgcggtgatgctggtcttcatcaccttgctgctggccttgaccggcatgccacgccagtattttttcccggtggcggtcaccgtgccagttgccatggccgcctccatcgtggtggcctacatcgtcgtaccgtgggcatccaatcgctggcttcatcgccacgacatccagcaggaagaatcagcgcacgagcaacagtcccatggccatgacacaccggggcggatcgagcgcctctacctgcgcctgttcagccccctacagcaataccgaaacgtgcgcatcggcttcggtctggcggtgctgctgctgatgacggtctcgctgatgcaaggcgcctggcagttcgtccgtccggcgggcgtgggcggggccgtgtccgcgctgggcgtgccgatcggttttctgcccaaggacgaccagaacaccttcaacgtggtggtttcgatgccggaagccacgccggtggaagacaccgatcgcctggtgcgccaagttaccacggtgctggcgcgggaaccgcacgtgctcaactaccagacttgggtcggccaggcaggtgtggccgacttcaacggtctgttcaaggggaccgccgcgcgtgccggcaaccacgttgcggaaatccgcgtcaaccttatcgacaagcgtcaccgcaaggaaagctccattgacatcgtgcgcgaactacgtcccaaggtggagaccattcgcgctgcctggcccggtgccgaggtggcgctggtcgagcagccgccgggtccgccgctgcgctcgaccgtgctggcggaactctacggcccggacgccgagggtctgcgcgcactgtcggcgcaggtgcgcgaggcctttgcgcagacctacgacatcgtcgatatcaccgataccgagccggaaaacgtgccggagcaccgcatcctgcctgacaaggacaaggccgcgctctccggcgtctcgactgcgcagatcgccgaggcgctggcgctggtctacggcggcaccaccctcggccgcgcccacctgccggacgagaaactgccggtatcagtcagggccttcgtgccgcgccgcttcgaggtcgatcccgcccggctcgaccgggtattcgtggacaacgctgccggccagcccgtgccgctggcggagttggtcaaagtggtccccgcatcggtcgatcgccccatcctgcaccgcgacaacgagaaggtcaccttcgtcggtgcggaactgtcggactcggcgccgctgtacgccgtgctcgacctgcaacggcgcctgcatggcatcaccgcgccggacggacgtccgctgcgcaccggcaacctgcgcttcaaggaggacgtacccgacaccatcgacggctaccagttactgtggggcggcgagatgcgcatgacgatggacgtataccgggatctcacgatctcgctcagcggcgcgctgctcatcatttatttcgcgctggtcgcttattaccgctcgttcatcattccgctggtggccatgtcagccgtgccgctgggcatcatcggcatttttccggggcactggctggtcggcgtggatttctccgcgacatccatggtcggcatcatcgccctggcgggcgtggtgatccgcaactcgctgctgatcatcgacttcatccaggacaacatcaggcacggcatgccgctggaggatgccgtacgcgaggccggcgcggtgcgtctgcggccgatcctgctgacggtgctggcgatcatcttcggctcggccatcatggtgaccgacccagtcttcggggggctggccatttcgctgatcttcggcacgctggtctcgactgcgctgactgtgttcgtcgtgccgctgctctatgagttgcatgcaaaacgtcatgcggcccctacgtccccaggagcagatcatgcatga

SEQ ID NO: 82714 - DNA, 1491 bp, Citrobacter koseri
atgcatgagaaggaccacggcacatcatcggctagccatcgccaagcccgcgcaggccatgaaaccggcccgtcggttcaccatcggctcgtcggcacgctggccgtggcagtgctggcgatgctgagcggttgcgcctcgctggcacccgcgctcgatcccatcgcactccccgtcgcatcgaactggcggacgcagcctgacgcgccaagtggtgcggccgcgactgaattggcctggcgcgagtacttcaccgacccggccttgcaggcgctgatcgagaccgcgctggaaaacaaccgcgatctgcgcgtggcggtgctgcgcaccgaggaagcgcgtgccgcctttcgcatccagcgtgcgcagcaggcgccaatggtcggcgtgggggcgcagcaaatccgcgccggcctgcccgatgggctacagccgctggcgggccgctcggtcctggaggtcaacgtagcctccgtgggcatcagcagttgggagctggacctgtggggccgcgtacgcagcatgaagaccgccgcattggagcaatggctggccaccgagcagggccagcgcgccgtggaattggcgctggtcgcccaggtcgctgatgcctacctgggcctgcgcgaactcgacgagcgcatttcgctggcaaggcgcacggttgaaaaccagcaagagctggcgcaaatcttccagaagcgcttggagctgggccatggctcgcggctggaactgacccaagtgcgcaccctgctcagccagggcaaagccctgcaggtgcaactggagcttgcgcgcgaacagcagcgcaatgccctggcgctactgctcggcagcgaaccccaattgccgccgtcatcagccccgatggatgaagccctggtcatgcccgaactgaggcccgggctgccatcggacctcttggtcaaccgcccggacatcctggccgccgagcatgcgctgcgggcacgccaagccaacatcggtgcggcgcgcgccgcattcttcccgcgcatcgcactgaccggtggtgccggctcggtcagcaccagcctgagcgacctgttttcgtcgggcacccgggcgtggttgttccagccgacgatcgaactaccgatcttcgatgccggcatgcgacaggccaatctcgacgttagcgtcgtgcggcgtgacatcgccattgccgaatacgaaggcgcgatccaagcagcgtttcgcgacgtttccgacgccctggccgcaaggcagaagctcaccgagcagcttatcgtggcacgccaggcccacgccgagcagagtgagcgtttgaaactggcgcgaacgctgttcgatgccggctcggcggcgcacctggaggtgctggacgccgagcgcgacctgcttgccgtcgagcagcaactggtgcaggtacgcagggcggcattgtcaagccaaatcgggctgtacgcagcgctgggcggtggcatcaaccagcccccgaaaagatga

SEQ ID NO: 82715 - DNA, 1746 bp, Citrobacter koseri
atgctctggcaggcactgaccgcgatgcgtgatctacggcgtttgcacgaaatcgcctcgatcctgatccgctacgggtttggcgacatggtgcgccggatggggctgtccaacgccttggagcgggcggggacggcactgcactggaacgaagcgacagacttcgcccacatgacgccccctgaacgagtgcggcgggcgctggaggagatggggccgactttcgtcaaactcggccaggtgctcgctacccgggtcgatctactcgaacccgagtggaccgccgaattcgggaaattacaggacagcgcgccgcccgctccctgggcagccgtacatcagcagctcaccgaagacctcggcgcgccgcccgaggaaatcttcgcggccttcgatcccgagcccttggcggccgcttccattgcgcaggtgcatcgggcgcgtctcgacgatggcgccgaagtcgtggtcaaggtgcgcaggcccggcattcggcccattctggaagccgatctgcgctggcttgcgcgcctggccgaactcgccgagacggagagcgcggaatggcgcgtcctgcatccgcgcgagatggtgcgccagttcggccagtcgctgcgcaatgaactcgatttcgccggcgaatgccgcaatgccgaacgcatcgccgagaacttcaccggctataccgatcaggactctcctcctgtcgtcccgggcgaggagaagccggacgcggatggcgcacatcccatcatcgtcattccccgcgtgtattggcagtggaccggcgagcgggtctgcgtacaggaattcattggtggtatttccgggcgcaggcttcaggccgtagatcaggctggcctggaccgcaagatgctcgcacggcgtggcgccaatgccgtactgaagatgatcgtcgaggacggggtgtttcacgctgacccccatccgggcaacgtgttctatttgccgggcaatcgaatcgccttcatcgactttggcatggttggcaggctggaggaggaacgccgcgaccagttgatccgcctgctgctggggctggtgaggaacgacgcccgcagcgtcgtcgacgtcatgctcgaatggacgagcgacggtgtggcaaatgagcaggatctattgttggaagtccagtctttcatagatcgctaccacggcgtgccactgaagcaactgcggttgagcgtaatgttgtccgacctcgtggcgatcccgcgccagcatcacctcgccctgcccaacgatctgtccctgctggtcaaagccttcgtcacactggaaggcttgggccgtgaactcgatcccggtttcgacatggccaaccaggcactgccgctgctggagcgtgccatgcacgcgcgctactccccggcagcgctgctcagacgggggcggcgggcggccggtgacatcttctcgttgttggctggcttgccccaggacatctcccggttgctgcgagccgcccgccgcggtcgcctggaagtacacatcgacgtcacccatctgagacgggtcggcgatcagctcgacaatgccgccaaccgtctggtgatcgggatcgtcgtcgccgcgctcatcgtcggttcgtccatcgtcatgaccgtgtcgggagggccgacgctcctggggttgccggtctttggctttctcggattccttggcgcgacagtcggcagcctatggcttctgctttccattctgcgcagcgggagaggacgatga

SEQ ID NO: 82716 - DNA, 2628 bp, Citrobacter koseri
atgagcaccaccgggaaggtcgtcatcttctattcttccatcggatacggacacatcagtgccgcgcaatccattcaggacgagatacggcggcaatctccggcgacccgggtgctgatgcaggacatccgcacgttcatgcatccggtgtggcgacgggttgacgagcgcctgtactggttcgtcgccaaccatctgccggagtgcttcgagagtctgttccgtacgatgcaggcgcgcggcagccgtgtggcctcgctgtcgatgctgcccaacgattatccggaagagagcgtatcggcctacctgaccgcgcagcggccggatgccgttatcgccacccattacggggcggcccaggtgctgggaaccctgcgggaaaaagggctgctgtccgacacgagaatcggctggctgcacacggatttcttcgagggctatttcccgcgcatctccaagcggatcgaccgtacctttcttgcccacccggaactggaaacgcgctggctggtcgcaggcgttccggccgaaaaggtcgttactagcggcatgccggtgcggattcccgcgacatccgccgacgcccgccgtgccacgctccagggccttgggctgtcggtggacgtgccgaccctgctgctgaccggcggcaaggaaggggcgggcgactatctgggggtcgtcgaaagcatcgttcgccgctgcccgggccgcctgcagatcatcgcggtgtgcggcacgaatacgcggcaatacgacgcgcttgccgatctgcgcgaaaggctgccggacacggtgacgttgaagccgctggggctgctgccgcgcagcgagatggcgtcgtgcatggcagccaccgacatcttggtcaccaaggccggcgggatgacgccagcagaggcttttgccctcggggtgccgaccgtgctgctcgacgtgatcagcgggcatgaacgcgaaaacgccgcgctgttcctgcgccagggcctggcccggttcgcggccagcgccgacgatgcgggcagatccgtgatggaactgctgggcgaccctgccgagcgcgaggccatgctgcgagcccagcaggagttccggcagggcatcgacatcgcgagcatcgtgcggtttgcgctggacgatggcttccggccaggccgcccgctgcccggctatggcgtcgagaacggcgcgcccgtccagggcatcgatcaggcgctggcgcaactggattccgaagcaccggcagaggtcgagctgctgttgtcctacgccacgtccaaaacgccgcaacgggtcgttctcgaaaacccgttcgggcatcttgccgtgcgcatcggcgacaccgtctacagcgcgaactacatcgcggacccgtccgtcgacccgaacttcctgcagcacgtgagcctggcggactacctgtacggcatccatcgtccgtcccgttcgcaagttcacaccaacacctacggcatggcctatggccgtgagacgctcgggctgcgggtccagggcattcccgccgagcgccgtgcggcgatggtggccgaggcccaccgcatcgaaaacggattccgggacgcaagcctgcgctggagcaggagcgatctcaattgcgccgacgtggttgcgcgaattctcgccgccggtggctacgacgaccgctccttgtacgaccgggcgggtctgccgagcatgccgctggatttgttcgagcggatgcgggcgcacttcgaggccgatacttccttgcgggaagaactggtggcctaccgattgctgcctggaacgcaggcaagctaccgcttctcccgttttccgctgtcggtcgggcagccattgcgctcgatggcgcgcgtcctgagcgatgcaccgcgggatgcgcttgagcaggcagcgacccggcaggtcaccggttacttcggcgaccggcggctctacgtggagaacctgcgggcatgctggccagcttcggaatctgcgcactcctccttgaccagccgtcctcatttggcgctggcgcaggccatccgcgccgatttgcggcgtctgctcgcggtatacgtgaaactgccgctcaagcggatcgaacgcctgggcagcttccccgccgcacaggagttccaccgtctcgccgaccgcgggctccagctcgcccgactcgccaccgagcacgtcgaagatgacttgcatccccgcaccgatcgcctgcgcgcgctgttcacccggctcgtggaggactacgggcggattaacccgcagcgtttggagtcgcgccacgtgcggtcataccttgcgcggcttcgggcgttcgagtcgacgctgggacgtgaactcgtacctaccggtactgcgtgggcgctcctgcccgcctggtggcacaggatagcggcgctcgctcgcaccagtgcgcggtcgcaccctcgcagcggggggacgagtgggttcagcggcatgcgggttgatccgggcgaagtcgagcttaacggcgatgcgaaagagcacggtgcgcatcctctcgaagctgatccggccgcgcgtttgacgcttggtgacctggaagagcccaccatgaccgttgccactgaccatgaggcacccgatttttcgcagttccattaccattga

SEQ ID NO: 82717 - DNA, 702 bp, Citrobacter koseri
atgccaaatcatgccgaaacaaccagcggccacgaggcgcgcagtgccaagacccgatcgcagttgatcgaagcaacgattgacgttgtcgctgccgttggctacgagggggcaaccacacgcgccttggcccaggcggccaaaaccacgctgtcggccattccctaccatttcggcagcaagaaggaactctatctggccgcagcggagatgatcgccgaatatgcggccaatcgcttcgcggaagccgcagccttgctcgacgatacgtcggacgtcgagctttccgttcgcttcgaacgcgcactgatccaagtgctccacaccatgctggacgaggccgagccgcatgcctggacggcattcgtggcccgctgcgcttacgacaacgacgacgccttcgccctgattcatgaacgcgcgatcgctccgctgctgaagcgtctagtacatgccgccagccagttcagcggccgatcttccgatgacgaggcgctacggatgcgcgtcatcgcaattctgacggcaattttcagtttcaggtttctgcgcggcgtgatgctccggggcatggactggaaaagcattcggaacgaagcctccaagcaaatcacggacatggtccacgatctctgccaaagcggctttcttactgtttggtcggctgatgacggcgcggacaaaaaaacaggccccttttga

SEQ ID NO: 82718 - DNA, 609 bp, Citrobacter koseri
atgattttccaatcctacgcacaccagaccatcgcctgggtgaagcagcgcctcgatgaggccgatgccattctttccgaggtcgaaaaatcggccgccgatatcaaggaggatgcccgcaagcaagccgatgcagctcgcgcacgcctcgcggcatcccgcgcgaagctgcagcagtactacgatgatctgcgcgcccaagcggacactacgaagcaagaagcgggcgaaattcaggacaagctggaagctgaatggatcgaggtcgagtccgccctccagcagtttgtcgccacgaccggcgatcaggtgaaaaccgtgcacagcatcgtcgtcgtccgtgcgcgtgcacagcgggaagcgtggcaaaactcactgaaggagttgcgtgaccaggcggccgatgccgtcgagaaggcccgcggcgaactcgatgccgcgttcgatcacctttccactgaggccgagaaatttcaagcgcgtatcggtgaggtcaaggacgccggcgatgaatcctggcgtgccgtcaagcagggcttcgccgatgccaaggccgctcacgccgtcacggtcgagaaaatcaaggatgccttttccaaggttctctga

SEQ ID NO: 82719 - DNA, 708 bp, Citrobacter koseri
atgaaacttcgcttttccacgatcgcctcggcgttgctcgttcaagcagcgttgctgtcggttcctcccacctttgcacaaaatgcaaaagcacaggccgattcagccgccacacagaaggagccctcaagggttcaccaagcactggcgtggtcgcaggatcggctggcccagcttgatgccaacattactgttctggaaaaagacgccagccggctccggggcgaggcgcgcaccaaggccgatgtggcgttggcggacctgcgcaagcagcgggatgcctatcgccgccgggctcaagatgctgctgccaacgcaaataagtggagcgatgcccagatcaccgaagcacgccaggcactcgacaacgattgggtcaccttccaggccgcccgagacaagtatcttgaagaaagcaagaccagcatcgctacgcagcgtgccgtactggaggcggaactgaatgcgcagcagaaagcgcttgctggattgcgtgccgacgcgaccaagctcgcggcagatcagcgcgcagccattgaagcgcgtattgctgcactgaatgcagatgtggaggagaccaaggcccgagtctcgaaagcctcagccgaggtatggcagacaacgaaaaagagctatggggaagcccagcggcttttctctgagacctatgcgtctatccgccagtccatcgacgaggctaaaaagtaa

SEQ ID NO: 82720 - DNA, 282 bp, Citrobacter koseri
atgaatctggcaaatgaaatcaaagcccttggcgtacagatcgccgagcaagctcgccaacggccaaagccggatgatgaagccccgcctcccatcgaagaagcgacctgcgtcggcgaagcacgttctcaattgcacgatgctgacgctttcttgaaagctgtaaacgaaacccttgatgagtttgcggacgatctgaataggcacccgcgcttgacggcgctggccgcgcttggcatcggcctggctgcgggcgtcgtcatcggttaccaggctcgataa

SEQ ID NO: 82721 - DNA, 450 bp, Citrobacter koseri
atgtcgactctcaactctgcaaaactctacggccgcatagcattgctgcgccgccaagtcctgcttcgacagctcattcggcgcagtatcaccgccgcactggctatcgcggcgttcatcgccacctccgggctggcgacttatgcgctgttcctggccatcaaagctcctctcggtgatctcggggcaacactggcaatcgctaccctttacttggtggcggcgctcattttgctgggttacaccttgcatgagccacattcccctgaactggaggcacttgccgaaatggaggccgccgcgcttgaaacagtcacggccgatacgcaaggcatcgtgcaactggccaccgcagccggccaccgcatcgagaatcttggcagcagcttgactcttggcgttggcatgctgggcgcgcttcgcaagctcctggcttctcgaaagccttaa

SEQ ID NO: 82722 - DNA, 945 bp, Citrobacter koseri
atggaacttcgtcacttgcgctgctttctggccgtggccgaagaactccacttcgcccgtgcggccgagcggctgcacatcgagcagtcgccgctatcgcgcaccatcaaggaactggaagaagacctgggcgagcagttgttcgtccgtactagccgcagcacacgtctgacgcgggccggcagactgtttctggagcacgtgccgcgtgtgttctccgccttgcagcaggcccgcgacagcgtgaaggcggcagccagtggcttccacggccaattgcgcattgcgctgtccgatggcatcacgccctcacgcttgccgaccttgctggcgatgtgtcggcaggaggaacccgaggttgagattcgattgttccaagtgccgctgtcacagcagatcaaggggttgcaagacgatctgtatgacgtgggctttgcacagtccgatgaagtgggcgatggcatcgcggctgacgcagtgtggagcgacccgctgatggtggcggtgccggcgcggcaccatctactgaagcacaagcgaattccactggatgaagtgctgcactttcctctcgtgctatgcgacccgcaggcgtgcgagggcctcgcgcgacaagtcgagcgtgttctgcgccgctctgaccgggaaccgctgatcgtcgagcgcgtcgcctcgttcgagctgatgatggtggtggtttcagccggcttcgccttgggactggcaggcggcccgcacatcgcggcaagccgggagcccggcgtagtagctcgacccttggcgggacgttcgcccatgctgctgacctacctgctgcggcgcgaaggcgagatttcggaagtgctgtcccgattcatcgagcgggtgcaagccatcgatttgtccgaaggcatgaggtccgctctaccacctgaacctgatctccaggaggaaaccgacctatga

SEQ ID NO: 82723 - DNA, 264 bp, Citrobacter koseri
atgaagaaatccatcctgttcctgctggtcgtgctgctaaccgcttgtggcccgtctgaggcccccaagcaggccaacgtgccgaccgtggatgagttggccgccgatccgtcgcggctgaaggagttgcgccagcaatgcaagaccgaccgcgtaatgcttggcgacgtgttgtgcaatcgcgttgccgaggccacgcgcaagcggttctacggcgacggaaagacgccctacacaccatcggaaacgccaccgaagttctga

SEQ ID NO: 82724 - DNA, 393 bp, Citrobacter koseri
atgacgcagatgcacgctcacgctttccgcttttccgtaaatccgcttccccgcctgtccagccttgcgcggctgcgcagcctagcccacccggcggggcaaggtctgctgctggccgcgctgctgctgttgctggctggcacggcacaggccgccggttcctcgatgccctgggaagggccgctgcaatccattctggagtcgattcaggggccggtggcgcgcatcgtcgcggtcatcatcatcatcgccacgggcctcgcgctcgccttcggcgatacgtcgggcggcttccgcaagctgatccagattgtgttcggcctgtccatcgccttcgctgcgtcctcgttcttcttgagcttcttcagcttctccggcggggctgtcgtatga

SEQ ID NO: 82725 - DNA, 744 bp, Citrobacter koseri
atgaataccaagcaccgtttgctgtctgcctcgctcgccaccgtgctgtcggtgtcgctgttggcctcacagcctgcatccgcactgacggtgttcgacccgtccaacttcgtgcagaacacgctgaccgccgtgcgcacactggagcagatcaacaaccagattaatcagctccagaacgaagcgcagatgttgatgaaccaagcgcgcaacttagcgaatctcgacttcaacatcgtcaatcgcctgcgctcgacactggcgactaccgagcgcctgatcaccgaggcacgcggcctggcctacgacgtgcagagcatggatgccaccttcgcccggctgtacccggagcagtacgcagcgacggtgagcggcgaccagatgctacgcgacgcgcaagagcgttggaagaacaccttgaacggcctgcacaccgcgatgcggatgcaggcgcaggtgtcgcagaacctggcccaagacgaaagcgcactggccgacctcgtgagccagagccagtcggccaccggcgcgctgcaagccatgcaggcgacgaaccagcttctcgccttgcaggccaagcagtccatccaggcccagcagctccagatcacgcaagaccgggcggcctcgctggaactggcgcggcaggcggcggccaccgagcgcgcccgcgaagtgcggcggcgcttcctcggcaccggcacgccgtacacgccgcagtccgtcaacttctacaacaactga

SEQ ID NO: 82726 - DNA, 333 bp, Citrobacter koseri
atgcgatgcgttcacgtcctgccggtttcgttgctggccgtgctgctgaccgcgtgcggccagcaaccggccgaacacctggccgcgaccttggccgccgatgccgtgcggctcaaggcgctacgcgcgcaatgcgcggccgaccggcaggccgtgggcgaagacgcttgccgcgccgccgccgacgccttccggcggcgcttcttcgccggccacaccgggccggacgaatacggctcgctggccgacctgccaccgatcccggcgagcttcgacacgcccaccgatgacgctggtgatgcgccgctcgccgctacggaggacacgccatga

SEQ ID NO: 82727 - DNA, 993 bp, Citrobacter koseri
atgaacctgcctttccgcttttacgctttgccgtcgatcctgcttgcccttgcgggctgcgcctcgcagggcaagccgcctccggtcatttcgctcgatgggccggtgcaggcgcaaccgctgcccgagccgcccaagccggtcgaagtcgtggccgtccccgagccgctggcgctgcccgcgcagttgaagccgctgccggaggtcgatatggccccggctgcgccggagccagccgacgagaaggtgcgcgtttcgcgcgccaacgccgaggcgcgcatcgcgccgacccgcgagggctacgtcaatgcgattcaggtgtggcccttcacggacggcgcgctctatcaggtctatgccgcgccggggcgcgtgaccgtggtttccttgcagcccggcgaggaactgatgacggtcgccgctggcgataccgtgcgctggatcgtgggcgatacgtccagcggcagcggcgaagcgctgcgcgtcaatgtgctggtcaagcccatccgctcgggcctgaaaaccaatctggtcatcaccaccagccgacgcacctacctgctggaactgacctcgacggaaaaggcgtggatggcctcggtgtcctgggactatccgaaagaccggatgctggccttgcagcgccagtcgcaggcggccagcgccgccgcgccggtcgatactggcttgtcgctggagaagatccgtttccgctacgcggtcagcggtagcaatccgccgtggaagccgctgcgcgccttcgacgacggcgagaaggtctatatccagttcccgcccggcatcgcgcaaggcgaattgccgcccttattcgtcattggtgcgcagggcgacgggcaactggtgaactaccgcttccgctcgccgtactacatcgtggatcggctgttcggcgcggctgaactgcgcctgggcggcgatggcggcgacgtggtacgcatcgagcgcaccgatggcgtggcgcggaggaactga

SEQ ID NO: 82728 - DNA, 1272 bp, Citrobacter koseri
atgagccaggacgacactcccgacctcgccacgccgcaggcggcggacaagatcgcgcccgaggcggtggcgctgcgcgcgcagccgcgcccggtcacgcgcctgaaccggcgcaccctggccatccttgccggcggcctcgcggtcgccgtgctcggcgcgctgatgtggtcgctgcaaccgcagaggcgcggagccagcgagcaggccgagctttacaacgtcgatcgcgtctcgaagtcggaagggctggatgcgctgccggcggattactcgaagctgccgcccgccgttcccgaattggggccgccgctgccgggcgatctcggcccggccatcgtgaagtcgcagcagccggtgacggccgcctatgcggcccccggccacgatccgaacgacgcgctgcgcaaggaagccgaagcggccgcggcttcgtccgtgttcttccgttcgggtgcgcaggcggctgcgccggtcgcgcagtcgcaggtcgccgccgcgccgggcttcgccgccaatgcggccttcgacccgatggccgcagggccggcttcgacggcggccctgcctgccgacccgaccgccgtgcagaaccggcaagaccagaaagaggcttttctgaaaggtggttctacggaaacccgcaattccggcaacctgaccctgccggcttcgccgtaccaggtcatggccggaacggtgatcgcaggtgccttggtaaccggcatcaagtcggacttgccgggcgacgtgatcgccacggtgacggagccggtctatgacacggcgaccgggcgcttcctgctgatcccgcagggttcgcgcattttgggccgctacaacagccaggtcagctacgggcagagccgggtgcaggtggtgtggaaccggatcatcctgccggacacgtcatcgctcacgctcgacaacctggccggcaccgacccggccggctatgccggcctggaagacgatgtggattggcattgggatcgcatctttgccggcgcggcgctgaccacgctgctaggcatcggcgccgagctggccgcgccggagaaccggcaggacggcgatcgcatcatcatcgccgggcgcgacagcgcgcaggacagcatcaatcaggtcggccaggagatgacccggcgcaacctcaacatccagccgaccttgaccagccggcccggcttgccggtgcggatcatcgtggcgcgcgatctggtgttgcgtgcctatcagccgctctttttcaacaagggaacttcacgatga

SEQ ID NO: 82729 - DNA, 246 bp, Citrobacter koseri
atgagcacgaccaggaaattgcggcttggccctctgcctcgccatgaagtcatgaagctgaccttctcctgcccggccagcctgaaagccgacctcgatgcctacgccgcgctgcacgcgcaggcgtatggcgaagcggttgatgcggccacgctgatcccgcacatgctcgaagcctttatggcgggggatcgaggattcaggaagggaagtgtgggcaaggccgcagcccctaagcctggttga

SEQ ID NO: 82730 - DNA, 333 bp, Citrobacter koseri
atgggacctattaccacagcaatagtttcaagggctatctatgatttattgctggctggaatatctttcacaaaagataatattaaaaagaaactaactgaatttattacaagtgataaaaatgctgaacttttagcagaaaaaatagaaaaattgaatgttaatgatgatatgagtgaaaaagctattgagaaacatttaaaagccaaccctgaagtgatgaatgtacttgaaaatatccctaatgcatcaatagtctcagtaaaacaaacacactatgggacaggcgataatgttggaagagataaaatcattaatgggaataatgagtaa

SEQ ID NO: 82731 - DNA, 1506 bp, Citrobacter koseri
atgcgtgatagattggttttactctttctctgggctacaaatggtggtgatactttgaaaacaactctcagtcagtcctttattatcaacaagttaagtatcaatgttaaacctgcacttagtagctcaggaaaagttgttttcgaagctaactccgaccaaaaaccttacatagtgtttgatgatcacagggaagccccagtgggattcggagttaaggtaagtttgacgaaaaaaacgtatgtaatccagagaagagtgtcttctggtgaccgtagtttgagtgagggtaagaaacccagttctgtattaaaagtgaaagtaggcaatgtgtctgattttccgaacattgatcaagctcgtgaagctgccaggcaattggttcagaccatgatcgccaccaaaagaaatcccaataggattaaacgagaaacagaggcttctgaactcactatcagtgaagtgtttgctcaatatcgtcaacaccttcttggcaggtctaaaccagccaaaccaaacacactgtcagtgttagacaaggcagaaaatcgtttaaaggaatgggctggtctccgggtgaaggacttaacaggcaatgtaatcctacgtaagtttgacgagattgcttcaagagccaggacagcagccgagcaaacttttagatgggctaatgttgctgtcagacatgctatcgagattgaagcaagtaatgcacagactcaacaaagacaaccatcactgtcatacaatccgttttcaatactaaaagtgcagaaaaaattcaggactcgttctgaacttgaagatagttataaagccaaaggagtccgaaatcctctatcaccaaaggacacactcggtcggttcttaactgcattgcataacaagagaagttttaaccgtttgggttgtgattacctgctgttgacagttcttcttggtactcgaaaagaagaaaccgcagccttgtgttggagagaagctttaacaaatgaagaggctaaaacgacaagttatgtagatcttgaaaatcgtatcattcgcttctatgacactaagaatcgaaacgaccatgagttaccaatttgtgatgcggtgaaggtgatactggaagacagaagggacattgttcaggaagccgaaactcgtaaagaaagactaaaatgggtttttcccgctcgatcgaaccggagcaaagttggtcattactctgacagcaaaagtttgagagaatacctttgtgcagaagcaggtattgttaaacttggtatgcatgatcttcgtagaacttttggtcgtgtagcagaagagcttgtttcttatgctgttgttaagagactacttaaccatcgtaatacaactgaccctacggaaaggtatgctgttcccgataatgatagaatcttcgaggcattacaaaagattgagttgcatatcttgaaaagtagccctaagttgtataatgatattcttgcatcagctaaatacccacccctaaacgagtaa

SEQ ID NO: 82732 - DNA, 594 bp, Citrobacter koseri
atggacgaaaaatcgctctatgcccacatccttaacctgactgctccatggcaggttaaatcccttaccctcgatgaaaatgcaggttccgttactgttacagtcggaatcgctgaaaacattcagttaacctgcccgacctgcggtaaatcctgccctgttcacgatcaccgacatcgtaaatggcgtcaccttgatacctgccagttcgccaccctggttgaagccgatgtcccccgaatcatgtgcccggaccatggttgtcagaccctgcctgttccatgggcgggaccgggaagccgctacacgctgttgttcgagtcgttcgtcatctcatggctgaaaatcagcaccgtcgatgccgtcaggaaacagctgaggctgagctggaatgccatcgataacattatgcagcgggcggttaagcgtggactcgcccgccgtaaagccccgcagtcagcacgtcacctctgtgttgatgaggtcgccttcaaaaagggtcatcagtacgtcacggttatctctgatacacagggacaggccctggagctcagggatgatcgcggggttgaaagcctggcgggttacctctag

SEQ ID NO: 82733 - DNA, 273 bp, Citrobacter koseri
atggacatgaatcaggcttatatcagcgcagcccgtatccacctgcctaacgcggtagaaaaaatcgccttcgatcacttccatgtcgcgaaaatgctctgtgccgtcgtggataaaacacgacagtccgagatgagaatcatcccgttacaggcccgaaaaagtgcacatcgctcccgttatctgtggttgtacggccgccataaacgtcatggtcgaatagcagaaagactggaggcggcgcagatggtcctgccttgtcagcgccagtga

SEQ ID NO: 82734 - DNA, 1173 bp, Citrobacter koseri
atgctgagcagagaggactttttcatgataaagcaaatgcgccaacagggtgcttacattgtcgatatcgcaacacaggtcggatgttccgaaagaaccgtcaggcgatatctcaaataccctgagcccccggcccgtaaaacacgccataaaatggcaaaactcaagccgttcatggattacatcgacatgcggctggcggaaaacgtctggaacagcgaggtcattctcgccgaaattaggacgatggggtacaccggcgggcgctctatgctgcgctattacatccagcccaaacgtaaaatgcggccctcaaagaaaaccgtgcgcttcgaaacccagcccggttaccagctgcagcacgactggggagaagtggaagtcgacgtggccgggcagcgatgcagggtgaacttcgccgtcaatacgctggggttctcccgccgcttccacgtctttgccgcgccaaaacaggacgctgagcacacatacgagtcgctggtgcgcgccttccgctactttggcggcagcgtgaaaaccgtgcttgtcgataaccagaaagccgccgtgctgaaaaacagtaacggcaacgtggtgttcaacgccggcttcctgctactggccgaccactatggcttcctgccgcgggcgtgccgccctcgccgggcccggactaaaggtaaggttgagcggatggtgaaatatctcaaggagaacttcttcgtccgctaccggaggttcgacagctttccccatgtcaatcaactcctggagcagtggatagcagatgtggctgacaggcgtgaacttcgccagttccgggagacgcctgcagagcgcttcgttgttgaacaaacacatctgcagccactgccagcaaccgacttcgataccagctacttcgatatccggcacgtgtcctgggatggctacatcgaggttggcggcaaccgctacagcgtgcccgagtcgctgtgtggtcatccggtctcgatccggatctcgctggatgacgagctgcggatctacagcaacgaaaatctggccgcgacccaccggctcagcggggcttcatcgggctggcagacagtgccggagcaccatgctccgctgtggcaacaggtcagtcaggttgagcaccggcccctgagcgcgtatgaggagctgctgtga

SEQ ID NO: 82735 - DNA, 795 bp, Citrobacter koseri
atgtacgaactggaaacactgctgaaccgcctgaaaatggaacacctgagctatcacgttgaaaatctgcttgagcaggcagcaaagcaggaactgaactaccgggagttcctgtgtatggcgctgcagcaggagtggagcgggcggcaccagcggggaatggaggcccggctgaagcaggcgcgcttgccgtgggtgaaaacgctggagcagttcgacttcagcttccagccgggcatagaccggaaggtcgtccgtgagcttgcaagtctggcgttcgtggagcgcagtgaaaacgtgatcctgctgggcccgccgggcgtggggaaaacgcatctggcggtcgctctgggagtcaaagccgcggatgcgggccaccgggtgctgttcatgccgctggacaggctggttgccacgctgataaaggcgaagcaggaaaatcgtcttgaacgtcagctgcagcaactgagttatgcgcgggtgcttatcctggatgaaataggttatctgccaatgaaccgtgaggaggcgagcctgttcttccggctgctgaaccgccggtatgaaaaagcgagcatcatcctgacgtcaaacaaagggttcgccgactggggcgaaatgttcggagataacgtgctggcgacggcgatcctggaccgtctgctgcaccactcaacgacgctgaacataaaaggagaaagctaccggttgaaagagaaacgcaaggccggggtgctggcaaaaagcgcaacgccaatcagtgatgttgaaatggtggaaagcggacagcgttaa

SEQ ID NO: 82736 - DNA, 306 bp, Citrobacter koseri
atgaaagagatggcccgggagctctggaaccgtcggtatgacgggcacagcagacgtctgtggctggaatggatcgcgatggccaaagatgtgggagtcccgcagctgagcagtgcagcccggacgttacgtaaacggctgtacgggatcctgaatgccatgaagcacagggtatcaaacggcaacgcagaatcactgaacagtaaaatacggttgctgagaatcaagtcgagaggataccggaacaaagagcgcttcaaaatcgcagtgatgttccattacggcaggttaaacatggggttatga

SEQ ID NO: 82737 - DNA, 744 bp, Citrobacter koseri
atggcacctacactgatagaatcctacactaaagatttaagagagtggcctcatactgggggcactctctttgttcgttctggctacctccttgcctccacctcccttttcaaagtttcagagcatgaaatacttgctcctgaagatgacattattcgatatattcttattgagcgtgtgggcgcacgcatcggggatgtagagttgagcaacctcattttagatcatgaagatgatggtttggatgaacaaagcaccattcaggagctttttcgcgccgggattattgatcagacacagaatgtcaccgctggtcgggtagggcttcgaaactacagctttgtagaggacggtcagcgcatagactgttttcaagtcgcaggggcatacattcagcccaaaagccatcgcaagggcatcatgagcaggacttaccttttcttgcttaactggtatgagcatttggtttgtgatgatatgcagaccatagctggcgcgcaaatttgggctggcccgatggttcgtgctggcgaggtgcggatctacaacgagaagggtgaatcgtttgaagatgttcttggtgagaaggggattggcagacataccggtttcttaccatggaataaagggcgtatgtttgacacatctccttgggacccgaataaacttcagactacggtacaaaaattcattgtactgatcatatcccgcgactcctgccagagaattggtttcatgccctga

SEQ ID NO: 82738 - DNA, 396 bp, Citrobacter koseri
atgcacgacgtactgaacgaaaagcgttcaattcagacaattcgtgatcataccagtatcattgccacgcacgccttcaagcagcatttgctccaggtgcgcactcttgacaatgtaggcatggctgcgcctgaagactttcacttcatcgtcactttcaaggatgatgtggacaacgctgatgccacagttaagccgctagcagaagccgttctgctcggtgatcgcgtccgtttcatcgttaaacctgcaaaacagtacccagagctgtctaaagtaatggccggctttgttgaggttattgaacattctattcgtcgtttctttgatactaatggtagaatcataagcaacagaaaagttaatggttctgctgagaaatggcacctacactga

SEQ ID NO: 82739 - DNA, 387 bp, Citrobacter koseri
atgcaccattctgagtctgttgttgcccgcctgcgccgtcttggcagccgtgcgctgacccgcgccggtacgcttgtcattctgggctggctcacctgcaaaccggcctttgcggatttgccaagcgttgaagcgccggagtccggaggcggaagcgggctgatgggtcagatcaagggctacctgcaggacggtgtggtcattggtggtctggttgtggcagccatcgccttcatcaacgtcgcgattgctgctgtccataccttcactgaagtacgcaatgagcgggcaacctggaccaaatttggcgccatcatcgtggtgggtgtggttctgctggttgcggttatctggctgctgggcaagtccgcagaaatcattctgtag

SEQ ID NO: 82740 - DNA, 969 bp, Citrobacter koseri
atgaccaattacattactttgtcttcaattatcaaagctgccgaaaggattgaaaattcagttatcaggacccccacagttggttctcctggattgtcggatctgctgggaagaaaggtgtttctcaaactggagaatttgcaggctggcggctcttttaaagccaggggagtcctgaatctgctttccgctttttccggtaatctgaaagattaccgtttcgttgccgtcagtggcggtaactttggtatcgcagtggcagaagcagccaaagcgctggatctaaacgtgaccgtgattatgccaaaaaatgccccggcctcatccattgagaaaatacgccattccggtagcacagttattcttgaaaaagatgtcagttccgcgtttgaacgggcaaacacgcttgctgagcagggataccacataattgatgactgtagcgatacacttgtcgccgaaggatatggaaccctggcactggaacttattgaagattgcccttcattgactgatgtatttgttgccgtgggcggcggtgcaatgctggcaggcatcgcgacagtactaaaatcccgtaacccacatattcgtatatggggggtggaaaccgagggggctaattctatgtaccaggcattgaaggcaggaaaacccgtgaatgtggacataacctcaaccatttcaacccttggcgtacctgtgattgaccgcctcatgctggcacacgcgcagcgctacactgaaaaggtcatcaccgtgtcggatagcgacgccatacaaggcatgctttcttttggcgagaaagcatgcctgtgggtcgaaccggccgccgggacacttattcctgcagtgatctcagttatacccggaatgcctgataatgcagtcattggactcatcatttgtggcggtaacattacgcaacgagagatgaatgagtgggcgaaaaatacagatgttatttag

SEQ ID NO: 82741 - DNA, 189 bp, Citrobacter koseri
atgaaacttatgccagtcggtgtcgatattgccaaaaacgtgatgcaggtgcacttcgttaatacagatacaggcgaaatttttaacaaggcaatcaagcgcgcgaagtttattgagtttttcaccaatcgttcaccctgcctaattggcatggaagcctgtggcggcgcacatcactgggcccggtag

SEQ ID NO: 82742 - DNA, 651 bp, Citrobacter koseri
atgccgggcgaattcgtcaaagccttcaatatccgtaacaagaatgataaggcagatgctcaggcaatctggcgagccgtccagcaatcgggcaaagccgttgcggtgaagacggaggatcaacaggccatgcttgccctgcaccgtatacgttcgcagttactgaaatttcggctgatgcagaccaacgctttacacggtttacttgctgaatatggcgaggtgatgcgtacagggcatgccagcctcattaaaaatgttcccgatattcttgcccgcctgtccggacgcttaccggcagtactcatagacagcccgcctgaacaactgagtgaagttgaaagaacggacggccggattgctgatattgaacggcggatacgcgagctgagcagagatgaccccggagtaaaaaccatcagtgccattcccggcgtgggcttcctgactgccactgctgcggttgcctcaatgggtaatgcggacgccttccgttcagggcggaagtttgcttcctgggtggggctcgttccgagacagaccggaacgggtgggaagatccagttgctgggggatcagcaagcgaggcgacaagtacctgcgaaaactgctggtcaacggtgcgcacagcgtcatacagaatgcccgtga

SEQ ID NO: 82743 - DNA, 489 bp, Citrobacter koseri
atgcacatcatcctgaacagcctgcgttacgctttgtggcttgtgttctgtttattccgtcatgccgttttcgtgcctgcggctttcggcggtgtctgcctgctcgcctggcttgttttcggccatccggtcagtgaccttaacgaccagttgcagaaggaggcaacggcatggcgcaccgcgccgcccgggcactacatgtgggaggaatacccggtgcctgataatgcgacttcacctgaggcaaagccggtagcctgcaccgtcactgccgtctccacagaaaccgcggcggacaattacctgctgtcattgcgggccgtatggttcatttttttcattctgtcgaatgtcgtgtgtgtgctctggcgcttactggcgaatgccctgtattaccactgtctgctccgcagggaagacggtgccggaaaggccgcgtatatccgcatggccgacggtaaaatcataaaggaggcagccgatgagtaa

SEQ ID NO: 82744 - DNA, 573 bp, Citrobacter koseri
atggtagcgataccgcttaacggtctgctgacagggcaccccgtggggattgccatgctggccatcctgttcctggtggtgatggcctttctgaacctgcgccgtcggaagaacgccagcacccgccgtcaccggcgataccgggcaacggcggaccgggtactgaataagctgaccctcctgccgggagacgggcagcgtctgacttatctgcgcaaagtcagtccgtatgtctttgaagagctgttgctgtctgcctttgaacgccaggggctgaccgtggtgcgcaatgcctcttacagcggtgacggcggccttgatggtcaggtcatcatcgacggtgagcactggcttatccaggccaaacggtacagccgtgctgtttcccccgcacatgttgaggactttgaccggcttctcctgcagtccggccgccgggggctgtttgtccacacgggccgcaccggaaagatgagccgcagccttcgtacggcgtcaccgcgcctgcgcatcatcagcgggcaacgcctgctggccattctcgccgggcaggacgtccggcagtatctctaa

SEQ ID NO: 82745 - DNA, 714 bp, Citrobacter koseri
atgaccactgaaaatgaaacgcgaagcgataaaccgggcggactcacatcttccctgaaaatcgagatccactcaaactatgctatccgtctctgggaaggccgcccacaggctcaggcgaaggagggtgtacagaaagttaagcatgccatcatgagtatgccccaggctattaagcgctcaggaattatttatcaggattccctggcggataatccatgggcagatgaggcgatgttcagggttgaaacgcttttgaatgaagctggagaacatatcaagagccgggtagaagaacttgaggtcatattgaaatcagttccccctgctgtttcattttctgacattgcctcctcgtctccacttaatataggcgtatacagtcgttctcctctgggttacagatgtgtatgggtgcttgtcggatatgaccagatggcccttaaagcattccaggcggctcattacggtctcatatcccgcaaccgtcgcgatgaactactgagccattgcgctcacttaatcagaaaagtatatggtgtgctacgcctttatcgaaccgtcagggttaaccgtgctgacatagcaatccagactaaagaagcacaacaggcaacagaaaaactgggcatgcccgatactgacattctttctggtaagaaacgctcttccttttctccacctctgagaaaagccgttcaggaggagaaataa

SEQ ID NO: 82746 - DNA, 162 bp, Citrobacter koseri
atgatgctacgtcagtgctgtgagtgggcggcaagttcgtgcccatttgtggagtggacgctggcatggcttctggtctggaaaaagagatggctcagagaacaggaaattttgccgccacaaattattggcggcaggcgaagtgaaggtgttaattactga

SEQ ID NO: 82747 - DNA, 723 bp, Citrobacter koseri
atgaaatttaaccaacttatccctctatggaaagaagcaaaagtttttggtctcagtacaggttcttggggaagaactattcttgccgcaggtgataatggtgcgctcgaaataatgaatgatggcgtagagcagttacaaaagattggctttcataagaataaagagaaagttatcgatagtaatatttgcttagactgcgaatggagttccaactccaccctggcaattctagacgggttaaacagtaaagcaatgtatatgttcgactcaatagatagtgactctagatttaaaagaaataacaacagcaatcagaatagaataacagaagatgatataaaaaaaatagcaagcattctaaataaagagacagcaaaagatatatcaaaaaatgaaatacagcactcatggttcgaaggcagtaggctatatgctgtagattcaaataataaaaaattttatttcaaagctggtggttgggtagaggttaaaggctgggagttaaaagaaagtgatgcagtgttaaaactaaaaaatatcactgctgggaaatttattgagactgaaaacgatgaattgtttagagtcgcaaatggaaagaaagaacttttgtcagaagattttacatcttggcgagtttttcctagatcaaaaagttatcaagatagaattcatgtagtaaacgatgaatatcttcaaataaagatatttaatatttaa

SEQ ID NO: 82748 - DNA, 300 bp, Citrobacter koseri
atgacaaagcctgtatcgactaccaaaaagccacgcaagcagcacacggctgaatttcgttacgaagcactgaaactggctgaaagtattggttttgccgcacctgcccgcgaacttagcctgtatgaatcacagctctacaactggcgaagtaaacagcaaaatcagcactcttcttctgaacgcgaacaggagatgtccgctgagattgcccgtctgaagcgtcaactggcagaacgggatgaggaactgaccattctccaaaaggccgcgacatacttcgtgaagtgcctgaaatga

SEQ ID NO: 82749 - DNA, 390 bp, Citrobacter koseri
atgaagtatgtcttcgacgaaaaacatcaggctgagttcagtatcaaagccatgtgccgtgtacttcaggttgcccgtagcggctgcttcgtctggcatcagcgtcgtcatcagataaaccggcgccagcagttccgccttgtctgtgataacgtcgtccggaaggcattcagtgacgcaaaacagcgctatggtgcgccaagcctgacggacgagcttcgtgctcagggactggtgtataacataaaaaccgtggcagccagcctgcgccggcagggactgcgggcgaaagcctcgcgccggttcagcccggtcagttaccgcgagcattgtctgccagtatcagagaatctgttgaagcaggactccgaatcagaagtgggtgggtga

SEQ ID NO: 82750 - DNA, 141 bp, Citrobacter koseri
atgactggcagtaaagacaataagttcaattttttcattgcattagccttacatttaattatggagaccatctctaatcagtttgtccggattgcccccgactttctgatggagaaaatgaattcagcgactgctgaataa

SEQ ID NO: 82751 - DNA, 474 bp, Citrobacter koseri
atgcgattgccttacgtaatatttacagcagctatactggcttctgcatcaacagcacatgctattcccaatatgtggtcgagtggttttggaatgggtgtgacggaatacattatcagtagtcctgagaaggtgatttttaacctcaactgcactggtaatccggatgaacagaacattctgcagcatggcgtgttagtgaccctgcccaatggtacgatgctggattctcacgacggcgggacagaaatcacggtggtcattgataacagccagtatccgttaccttcatccctcggctggcgaaacggtgacaatgcttgggtgtcatttattgacgcgctgggtcagtcgtctaatttcgatgtttacgtcaacaataacaaagtcggcaccttcagtccggggctgaagaatacgcaaaaagaattgtctgacctcagtgagtgccggaccacacactacaacgattaa

SEQ ID NO: 82752 - DNA, 762 bp, Citrobacter koseri
atgctggatgtttttcactcagagtttgaagagaaaagaaacacattaaagacctatcttgaacgctcgggctttctttacagacattctatcatcaagaatctgtcacttctggatggtaccaatgaaagccaagagtttgagttgctgctggcgaaaaaatacaatcgtgatgatatacaatgctgggaatctcttcgcgctaagtggactgccgttcctattatgttgggttcgcaaagccttaaacattttttcacattgaattttaaggccgcgggtatattccaacgctatggagaggatatgtggaatatcaacgagataattgcagttaagtctttcctgttggctagttcaatcttggggagatgccttgggattgcaagctatggcccgttgctaccttcggagcttgcatcagaaaaggataagatggctaagaaaaaacagtcagcaagaaagggcggaatatctaaagcagaatcatatctcccgataaaagaagagacgataagattactccatcaaaatgttcccatggatggtaggtggaaaaataaaacagttgcagtaaaggcaatagagtctgctttagtcctctttatacagaacttaaaatctcaggacaaaagtctggatcttaatgaagaaaatataatcacagtggtcaagcgctgggaacgcagtgatgaaagagttaaggctgcatttgaggatacggtgaaacagaaggcaccaaggaaggccgattcggcttaa

SEQ ID NO: 82753 - DNA, 216 bp, Citrobacter koseri
atgagcgaatctaatgttaaaatacttcgtctttctacagtaatcgacaaaacaggcatgtcacgttcagcaatctatgactggatcaacccaaaatcaccacgctatgacccaacattcccgaagcaacgccgtctgggactgcaatcggtcggctggatagagactgaaatagacgaatggattttacaacgaaccatgacagacaaagtataa

SEQ ID NO: 82754 - DNA, 678 bp, Citrobacter koseri
atgcccctatcctcagtaatatctgaatctgtgggagttgcagcacctctcattgaaaaatgcatccattatcaatgttcaataaacgaaatcaaaaatgatctattaaaattcactacaaaagaaataattaaccggaggagaggagatcctgaaataactcatgaagaacattgcttacttatctggaacacaaatattaggagcccgttaaaaatacccgtattagattactttcaactaaatgctaacgataaattcatggggaaagatgaaaaggaagtgataagtgaaaggctttcttcgttaagggacacctataatatggaaaaggcaatttatatttacaatcaaagggtgtttgatgcaaaaaaacaaactgtctcaggggattcaaacattctccttatccataaaaccatctttgaggattattactttgatgctggacatgttcaactattgcctgcatccgagttaattatatttgggataaacgaagttctgagacgaagggggattgtactaccttgcccggttatttgctggatagatatttatcatgtcaatgagatggtgcttatgctgccagtgatccgtaaatcagatgctttctgccttgtcaggtcacgcaatgacataattattaacccatattcacaggatctcaggaattga

SEQ ID NO: 82755 - DNA, 4059 bp, Citrobacter koseri
atgcctgaagtcaattggaaagtattcaacgaactgcccggtgcagcagatgtgaacttcgaaaacctttgccgcgctctggtacgccgacactatggtcgtttcggtcgctttaagcaactcgcaaatcagccaggggtggagtttcacctcgagctgacggagccttgtgatctcggtgcgccaccaggctggattggctggcaatgcaagtggtatgagctggtgaatggacaagatttgggagcttcccgccgcaacaagatcatcgaaggtatcgaaaagacgcgtaagcatgtcccaggagtgaccaattggaagctttggactcatcacacgttaacaaaaggtgatcaagagtggtttttcgcgctagagcaagaccgcttccccgaattaaagttagaactgctcactgctacggatatcgaagatcttttggtcggaccgggagcgcttttacgagaaacctactttggtgaattggttctaaccccagagctaattgctgagcagtataagattgccgtggctccatttaagaaccgctaccagccagacgttcatgtagctgtgggggctgaggagaatatattcaggcatctgtgcagccaaaacgcatgggaatctctggaagaactctcaaacgctttaaaaaagaatcatacgagcatcgcttcggttactgagcaactcaaaactgagctcaggactgaagttgaattactcctgtcccgggttattgggttgactgagtttattgatggtttacacacggcgctcggcaaaggtgactttaactctgtacatcaagcgttggtttcaaatccgcgtcagccggtacgttatgaaaggctactttcgaaattgcgtggagcgcgctttgacggggctccgttaaccgctaatttggttgcagatatccacgcggtttcgtctgttctccgcagtctggagcaatcgattggtgcccgggcggttgctgtacttgcggcggcaggtgaaggtaaatctgaacttgcagtcaaggtaacacagccagaaggggaattcccaggggggatcctcctattgggtaagaatcttcattcaggccaggggcttgatgatctcgtatctgctttcaagatctctgggaagccagcagaaagtttcgaccgcttgattgaggccgtagatgcggcaggccagcgtgcaggcaaacgcatacctattgttattgacggtctgaatgaggcggaagatccgagaaattggaaggatgaactatcccgagcggatgagcttctaaagaatttcccttatgtcttgttagttgtcactcttcgcaatgaatttgccccaatgtgtctgcccgaggagtttccccaagttgaacataacgggtttcaggaagatccgaagacagcatttgacaagtactttgagtactacaagatcgatgctaccgatgcggacctaccagtcgaactcttgcagcaccccttaacactgagaattttttgcgaagtagcaaattctcctcgtcagcatattgtcggagtggaagcattgccccgttcgcttgcaagccttttcgaagcacactttaacaaggttgccgcacgagtcgctgagctttcaccgacgattcatcgcatttatcaagatgacgttcaggatgcactactaacgatcgcgggtcttctttgggataacaatgcgagaagtgtggattttcaagccacacggacggcagttcgggatatggggtgggatgacagtattattcgtgcacttgagtctgaaggcattctcgttcggactatttctccagaaggtaggcaaggagttgggtttgcatacgacctaatggccggacatatgatggcgcgcaacctgcttatgaagcctgaactggtgcaatggctacaaagcaatgaagggaacgcaaaatttaaatctcatggacctgattcgcataccttcgcttatgacgtattacgggctctggttgatctgtatccgcaacactctggtaggcggcagctttggcaagacttgtcggatgatatactcgttatgaacgctctgttattgacgacgcaatcggacccaagatatatcgggcgggctactgttgaacgatttgctcaagctatgcaggagtcgaagcggtttgcacaacttgccttcgagagactacggagcactagggctgcgctggcacatccgtttgatatgagctttttgcatgatgtgctaatggctatgtccaacactcagcgcgatcttttttggtcagagtggattcgtcagaaatctgaacaagtcaaagatgacttaaaattcttgtcgacgagatggaaatcgggtcatctggatgagcgtgaacttcggagagttcgctgggtgatgtggacactgacgacgacatccagagctttgcgggatatggctaccaaagccctgtatgaatttgccatcaggcagccagaagagtttttccggttggcgatggagacaattgtagtttcagacccatacgtccccgagcgagtgttcgccgcagcctacggtgcagtcctgaccacttggtcggatatagatgcagtagagttacatgatgcgctgccacggttcgctcgcgagatttaccaaaccatgtttgcacctggtgctacagctcctacctggcatgcgttatatcagcagtactgcttgggaatcattgctattgcaaggatggtagatccaaattgtttttcagaggatgaagctgcttatcttcttccgccatttagccatctgcctaacgtatttgaaagcattcatcagtacgatccagaaaagattgagcgagcggagcgcgcagcgattcaaatggacttcggtaactatacgattggtagacttattccagacagagcgaattacgatgacagcaatccggagtaccaacaggtattgcgggccattgtttctcgaatactgatgcttggttatgaccctgagcagtttgaagctgttgatcggcaaatgtactccggtcctcgtatgggagatgacaagcataaaatcgatcgatatggcaaaaagtacggctggatagcttacttcgagatgtggggactgcgatacgcgcagggcctcctttccgaagaccgcagcgctcgtccatcggacgcagatatcgacccgacgttcccgctagacgctgtgagcattgatttgccacttccagccttgttcagcgaacagtcgtcagatgatggtgattggatcatgagaggtccgcaacctgactaccgtagcatccttgagattacggagattgatggtctgacggggccatggatcctacttgacggttttgttgagcaaaatgctacctcggatgaccggcagattttcactttcctgcgaggagtattcgtagatagccaagaagttgacaatctatgtaggttgttcactgatcttgaataccctggcaacagcgccatccctgatgctcctggccactattacacctatgcgggtgagatgcctttctcgtcgattccggggctgctagtcgcaaatgaactagaggataatagcgatgaaaatttggtgtccgcagatagatggtcaggcaatggcgttgcggtagatatcactgtgcaggactacaactgggagagttaccatagcgtggagaaccaaagcagcggtgcgagcctgccctcaaagcaactttgtgaggctttgaatctcaggtaccgtgcaaacaaatgggatttgcatgatgctgcaggggtagcgtcattttaccgcaaaattggcgaatatgattcggacgtcagtggctctgtcagctatctacgtcgtgatctacttgaccgctacttgatacaatccggtaaggtattggtatggcttatgtggggagagcgtggttttcattatcggtccaacaagacgcgcaatttgcaccagtattacgtgaatcaccaagagattcacaagcgtattcatatccatcagatagcttcgagtgctagtaacccaaatattacggacggagtcgctgtatga

SEQ ID NO: 82756 - DNA, 408 bp, Citrobacter koseri
atgaaaatttggaacggatacggatctgagcattcgatgaacttagttctcatcggaaaattcaagcaagagcaagatgcagtgaaggtcgagaaggatattaaaacgctcagtactcaggctgagaaagatgaatgttactcgctcccttttgatgagccagagaatcaacggttttcagatgaaatgctctcattactatgcagcttaaaactccacactttaggaccaaccgatcttggtcaattggtgtcagatcatcatctagatcgtgaaggcgatagaataacaataactactgatgaggcagaggtatccgcgttcgtaaagctgtttgtcgaggctggagcaaaggtcgagattttctcagcgcatgactatccgtccgattccagcgatgccagttga

SEQ ID NO: 82757 - DNA, 972 bp, Citrobacter koseri
atgatgttaatactattacttttgtggattttaatcagcggggaacttggtgttatgaagttcagaatcgggccaaatggagtacatttcttcgatcgaaatacaggtctgaatgttcttttagacgagttttgccctcatcagacagtctggtcgaagtctcctcgccaagtatccgttgcgcttaccaatctttgtgacctccactgcgcacattgttttgcgcctaagcacaaggcattgctacatgctgaccaagtgcttacttggttaaaagaactggatactgaagggtgcctcggtatcggatttggtggtggagaaccaacactacatcctgatttcgtcgatatatgcaaacgggctgctggggaaactcatcttgcagtcacatttacgactcatggtcaccgtctgacccaaccattggttaaaaacctcaaaggttcgatccactttgcgcgcattagcgttgacgggataggtcatacctacgaagaacagcgtggaaggcagttttcaagtttactcagaggcattgagtcgatcgcgaaattgtcgccctttgggatcaatatcgtgataaacgagcgtacgatttttgagcttgacgcagtggctgaactggcgcaacagtttggagctagtgaattgctgttgttacctcagcaagcaactaatgcagtcgcaagtatggacgaattggtcggccgagagcttcaaaactgggtctctaactatagaggaaaggttcgacttgcagtaagtgaggtgggagcgtcagggctccccatatgcgaccctcttcctaatgagacaggccttcaagcctacgcgcatatagacgcttcagggatattacgcacgagttcttattcaaccacaggtatggatattgaagaaactggtgttatgtccgcgcttaaacggcttagaaataccttagagattaaacaagggacacaaacatga

SEQ ID NO: 82758 - DNA, 1737 bp, Citrobacter koseri
gtgacgagaatttgtaaagtcgagatccaaaatttccgaactatccgtttattgaactggcaaccgtcaccaggcctcaactgcctgattggaccaggggacagtggcaagaccacgattctcgatgcgattgacctttgccttggtgcccgccgcaatatcagtttcaccgatactgatttttatgggctggatgtcacccagcccatcagcatcacgctgacgcttggttcgttgcccgatgccctgatgcgcctggattcgtacggaaattatttacaggccttcaaccgtgcaaatgggctggtcaccgaggaacctgaacagggtctggaaacggttctttgtttacgtttgatggtggatagcgagctggagcctgtttggtcgctggtatcacagcgcgctcaggcacaagggcaggaacgcagcatcgcctggaaggatcggttactgttagctccagcccggcttgggacttatgccagttctaacctgtcatggacacgcggttcggtactcaatcgcctgaccgaggaacgtccaaaccttggcgctgaattggccaatgcagcgcgccaggcccgaaccagtttcggcggtcaggccggagcacagctggctgcaacattgcaaatcgtgactcagaaagccaatgaacttggcgtgtctgttggtggccgcactcaggcattactggacgcgcatgcggtatccatcggagacggtgccattgtgctgcacgatgcgacaggtgtgcccttgcgctcactgggtacaggttcatctcgtttactcgtcgcaggtatgcagcgtgcagcagcacaacaggcatctgtcgctttagtcgacgaagtagagtacggactggagccgcatcgccttacccgattgttgaattcccttggtgcgaaggaaagtcctccaccccttcaggtatttctaaccacccattccccggtcgcagtccgcgagcttaacggcaatcagctcttcgtggtacgcaagtctccggatggtgcacatcaggttctccaggtaggtgtcgctgatgatattcaaagcaccgtcagggctgatccggaagcttttctcgcccgaagtatcattgtctgcgaaggcgccagtgaagttggcctaatccgtggtctggaccacttctggacgaacgcaaacggagcgtcaatgctagccgctgggactgcgtatgtgaatgtcggcggcggagagcctgaccggtgctttgtacgcgggctcgcattgcgccagcttggctatagggtattggtcatggtcgatgcggataagccgcccactgcggcgaccgtacaggcatacgtggatgctggtggggagtacatcatttggcgagaaggacgtgctttggaggacgaactgtttctgagtctgccggatgcgggtgtggatgctctgcttcagcgagccatagaccttgtggaagaagacctagtggcagcgcatatccagactcagtcaaatggacaactgacactcgcccaaatccgccagcagcgtcaacagctaggtgtgccatatcctcttgcaacgcggcagatactgggactggcagcacgtaatcgtcgaaacggttggtttaaatcggtcaccaagttcgaggatgtggcacgagatattctcggtccctatagccaaatatcagaaccagaatttgtcaccctgatcaatcgcctctactggtggccccatgccgactga

SEQ ID NO: 82759 - DNA, 1419 bp, Citrobacter koseri
atgccgactgagtataatttatttgcttttcgtcgaggcgcgatcacagcccctgcaggttgtggtaagacgcaactcatcgctgatacattgtcccaacataccggggcaaagccagtactcatcctcactcataccaacgcgggtgtaacaacgctgcgtctgcgcatgcaaaaagccggagttgctgattcggcttaccacattgccacaattgatggtttttccatgcggttggtggcgatgtttccgcaacgaagtgctattgccgctgcagtcctcctgctccggaatcccggagccgactacccagtaatacgtatggctgctaggcatttactcaaaagcgggcacctcaatgaggtccttgcagcaagctatgcccacctgattgtcgatgagtatcaggactgcaatttagtgcaacatgatctggttacagcactttccgaggtacttcctacctgcgttcttggcgacccgatgcaagctatcttcggttttcgcggtaatcagttggtggactggaacacccacgtgctttcccattttcctgctatcggcgagctaaatcagccctggcgttggatgaacgcaggcaagcccgaatttggtcagtggcttctggagtgtcggcgaatactcatggcaggaggtggcattgatttacgccaggccccgccggaagtcgtctgggtcgagttgcagccggctactgccattcagcagcgactcaccgctgcgttaactcaggctgttacacgggagggtgacgtgttggtgattggtgacagccgcaatcctcgtggccgccggcaaatggccagtcagacaccaggggcgactgcagtggagcccgtcgaccttgctgatctcacgctgtttggaacgacattcaacctgcaagctgccgacgcactgacccgtctagtggagtttgccgcggaggttatgacgcaggtcggcgttgctgccttgcaacgccgactggtgagcttacgaagggggactgcacaaaatccagctactgaggcagaagccgcactactcgcttttattaatgcaccaagctttcccttggccattgaagctctacgcgcgttgaccaggcaaaacaatgcccgagtctatcgtccggatgtgttgtattgctgtctacgcgcgatgcaaatagctgcgggaggcagttgcagctttaccgaggctacggtacgggagcgcgaacgaaaccggcaggggagcaggcccctcgcgcgacgtgccattggtagtactctgttgctgaagggactagaggcggaagtggccgttataaccgcccctgaggaaatggatgcccgacatctctacgtagccttcactcgtggagcgaagaagctggttgtctgctcgtttactcccgtattgatgacccgctag

SEQ ID NO: 82760 - DNA, 1092 bp, Citrobacter koseri
gtgctgaccttctctaaggaactgaacttgctaaacaaaaaagtactttctcagatacagaatgtggctggtagcggcaatatgtctcccgcagagatggctgagttgttagatacgcattctgaagacatagagcatttggttgcgttgaaaatgttcgagtatttggatgaggctaaaggggaggtattaaaggaccattacgaaaatttagatgcatttagaggaagactatttacaacatgggagtcccctttaaagcggctggatgcattaatttatggctgtactgaaatcagtaatgaggtaaacagtgagtatcgcaccggttctggagaaaggtccgcaaaactgaacataaccacccgactgcacgcacgtgctgtccaggtttcctgcgagatatctcatcttctaaagggtggctttgcagacggtgcaatggcccgttggagaacgctccatgaaaccacggccatattgatatttattgcagaaggcgacgaagacctggcgaaaagattcacggattttcagagcatacagaggcgaaaagctgctaatcgctataataaatatagtgaagagttgggttttacttctttctccccagaagatttaagtcgggttgatctcgaaagaaatgacatcgttggtaagtatgaagcgggtttcggcaatgaattaggttgggccgcaaaagctttaggaaaagaacccagtgccagaactaaggttcgctttagtgatattgaggaatttgtcgagctggactttttgcgaccgcactacggctttgccaaccagtatattcatgcaggaattgacagcattggcttcaagctcggcacatcgctttcaaataaagatctcttgctatgcggaccatctaatgaagggctgttagagccgattcagtgcaccagcttgtccttaatacaggccactcaggcgataatctcagtttcaccaaacgatcaacgtttgctatatagctccgtgctctggttgtggcatgagaagttgaaagaagaagttgttgccgcatctgatgccctaatgaagaaaggcgaagctgataattttgaataa

SEQ ID NO: 82761 - DNA, 3852 bp, Citrobacter koseri
gtggcaatctttgacattgaaaaggacgaattacttcggctctccgatatccagctggaagagctgatagctcggctagcagaagctgaagtggcaatgcatggctatagcccagcatgtgtaaattggtctggttcaattacagcccctgacggagggattgatatccatgttcaagttccagttgatcaactgaaaccaggctttcttgtaaggcctaatacggtctttcaggcaaagaaacataaaatgccaaaggctacaattgagaaggaaatgggcaccggccaaacgctttcacccatcatatctgaacaagccagaaaacaaggcagctacatcattgtcagcctgggtgatgattgctctccgtctggaaagagagatcgtcttaatgcgatgagggatgcagtaaaagatgatcgtaacaaaagcaatcttcatctcgatttctacgaccgttccaaactcattcaatggctgcgccaacatccatcagtcatgctgtgggtaaaagggaagcttgggcaagggtattccggctggcaaccctacggagcttggagcaatccgccacaaggtgttacagacactttaatctcagcccctggtgtaaccattactttaccgtcgggaaaggggcaaaaactcaaaattgatgaagcaattagcccaatgcgagaacttatccgttcgacgaataaggcggttcgtattacaggattatctggtgtcgggaagactcggatcgttcaggcgctctttgatgaaactgttggaacagatgcgcttgaccggacagtagctatttatgttgatactggctctgagccagtaccgtcggctacagcaatgcttgataagctgatcgctgaggaccgacgagcaattatgatccttgataattgtccatcagaactccatgcttcgcttgccagcaaggtatcagccgcaggaaaagaagtaagcctcatcacaatcgagtacgacattagggatgacaaaccacagacaactgaggtcatccatattgagacagatggtccagaggtggcagagcaacttcttatccgtcgcttcccttctattggtcagaataatgcccgtcgtatagctgagtttgcagatgggaatgcaagagttgctttggctatagctgagagaggggaggaaggcgagagtttggctctactttctgatgcgcagttgtttaatcgcttgtttgaacagcgtaatcatcctgatggtaatttacgggagcaagctgaaatattgtcaatggtgtattcattctcggtatctagtccagatgctgctaccgacgaactggaaatattaggggcgctctttgggtattccagaacccagttatttaaagccgttacgaagctgatggaacgtcatatcgttcagaaaagatctcactggagagctatcttacctcatgccattgctaacagattggcagcatccgcactcgacagtattcccgtcgatcaacttagggcgacttttgaagctccgggttgtgagcgtttattaatgtctttttcgcatcgcttggggttgttacatgaccatcctgttgcgaaagaaattgtagaagcctggcttcagcctgaagggatgttaggaagaatagccgagttgaatgatatttcgttacgaatacttgggtatatcggaccggttgcacctgaagcattgctcaacagaattgaggccgtactctcgtcatctgatttcaaaggtatggaaccgggctacaatccgcagcgacgtagtattctgcgtcttttacaaatgatggcatacgaaccgaacgcctttgaacgatgcgtcaggcttcttattcaaatggcagaggacgaagccgataataataacttggattctgctcgaaacatggttccaaggtttttccaggcgtatctgtctggtactcatgcatccctaagccagcgtattgctttaatgaacgaatgcattgcatcaagtattattacgcgtaaatctttgggcttaaagatgctgtcaactgccctggatggcccaccgtggtcagggtttggggttggtgagtttggagctcgaccaagagactatggatacgaacccaactatgatgaacttgtcgaatggcgcagcgcctttattgacgtcattatccaattagcggcatccgtagatcctgagcttgaaaggcctgcaagatcaatcctggctgacaaattcaggggaatttggtttcaagaagcaatgcgagacaaactcgtcgatgctgcccgtacattaaatgctttaagtccttggggggaaggttggaaagccgttcgttcaacgatctattttgactataccaagcatggcgatggagatgatgttgagccgttgccggataatcttgctgccttagagaaggagttggagcccattgcgttaattccaacaataaagacatacgtgttgagtacaaatcatgattattgggcactggatgcggattttgatcatgaggactccgataaatataccgcagccggaaaacgacttgaagctaaagcacttcaattgggacaggactttgccttatcaaatcatgtacttgaggagttaggagcagatctgttctccatcggtggaatgccttatcgtgctgtctttggtcgaggacttgctcgaggggcgcatgatctacgtattggctggcagcgacttgttgaacaaattgaaaaacagccagatgctaacaaagactttggagttattggggggttcatcgaagaagttgactctgtcgatccatcattagcacagaagtttctcgaccaatgtgcgcaacatcctgaacttcgacaggtattggttggcttgcatccttgggggacatttacggtaactgatttggatcgctgcataaagcatttggatgatccagacattagccctttcatgtatgagcctattctatggcgagaacaatatgccagtttgccgagaattcgtcttctcgagcttgctgagcaactcctgagtaaagcaagcggagacaatgtcattttgcatgcgctctccatgagactgcatggtaaagacaaatcggcagatacgcttggcgcagactttcggttgattggtcttgctgctgcaatccagcgggttaaaaacagcgacaaaggccaaagagggacaattgatttttacatggagcgagttatcgatgctgcattgcgtttcgatggtaatgaggcaaaaaaaattgagtggttggacgcaattttcaatgtcattgatgaacactatggatattttttgggattcgagaagactatagcaacaactgttgcgttaatgcctgaatcatttctcaattgcatttttgaatgcaccgagagacagcagcagggaagacggttctttattcgacgtggcggtttacgccgttctcctcttgctgatgtaagtactagcgtcttgattgaatggtgccgtgccagaaatgatcccagtgtttgggctgccattgcggctggtgtaactctctggtcaaagaatgatgaacagaatctactaaccctacacgaagctgctatagaactattagaggcctctcctgagccattagctgtgctggagtcttttgctgagcgaatcactccatcctcctggactggtagcctggcgaacataatgcaagctagatcaagcgccatcggtgcgctgagtaaacacgagcgtccagatatcgccgaggctgccaaaacagtttgtgaaaaaatgagtcagtgggtcgaacaccaaaaagaacgtgaacaaagggaagatagcgaaagggaacagcggtttgaataa

SEQ ID NO: 82762 - DNA, 627 bp, Citrobacter koseri
atgaaaacttatataggctcacatggggatcacgttctggagtatcaggtcaagattattagattgcttagttgcttgactgaccgttactccagactaacagcggtacgtgtggatatccattatcccaagatagtcgataacggtgacaatatctgctgcttccctaacctggaaccaggggtgatatcccggatacgtgaatccctcaaggctaagctggaggctgatcgtattcgtaagaagcgggaaggcaagcgcatttatcgttgccctttatttattatgtgggctaaagagtattccgaatcgggtaaatgccattaccacatttgtctgctgttcaacaaagacgcttactaccacctcggaaattacaatcaggacgataatctgagagggatgatcaccggagcctggtatagcgctctgggactgaaacaggatgatcacctaggtctggtccattttcctgataactgtaagtacgcgctggacacaaatagtgctgacttccagcaaaactaccaggcgctgttaacccgactggactacctcaccaaagtcgaaagcaaagtttttggtgagggggaccgtaacttcggctgcagccaaatcgatctgtaa

SEQ ID NO: 82763 - DNA, 258 bp, Citrobacter koseri
atggggcttaaattacgtttgacatggtttgataagaaaactgaagagtttaaaggggaagagtattctaaagactttggtgacgatggttctgtcattgaaagcttgggaatgcctttaaaggataatattaataatggtgagtttgatttgaagaaagaatgggttcctttactacagccattttttaaaaatcaaataaaacctgatgtggataattgttatatagcttttgattatcgggacggtaactggtaa

SEQ ID NO: 82764 - DNA, 246 bp, Citrobacter koseri
atgacacacctgaaactgactcccgctgaagaaaagcgcctggcggacgcctttgtcgctcaggcactggccatgggcctgaaagggaacagaacgctgccaaaggaggtaaaacagcaggtgcgggaaagggtgcttcgcgccattcaggacgaacgtgaagccaggcgggcgcaggaaatgcgtcgggagaaatacgaggcggcggaaaccaccttcacctggcagccgctgcgccgccggtga

SEQ ID NO: 82765 - DNA, 372 bp, Citrobacter koseri
atgcgtttaataccctttatcctgctggcattgtgcagccccttactcctgacggcctgtaagcattccaccacccagccgccgaaaatttatactctggataagtcatctaaaatcagtagctacgctgcggccatcaagaccgctgttgaaatgcagatgtttgaaccagaggcctatgcgggaaaaatgtgcaccgtgcggatatccatacaacgtgatggcactctgaacagcgccattgctgaaggaggagatccgaaactctgtaaagcagcaatatcagccgttacccacgccaaaattccgccggcaccggatgaaaatacctggcaaatattcaaaaacgcccctctggatttcagaccatga

SEQ ID NO: 82766 - DNA, 219 bp, Citrobacter koseri
atgaaagcttttactctgacagtgctggcggccatgttcctcactccggtacatgcgataccactaaaacccgtaaccacactgcagccaacctacccggtacaggccgcagcaaaacgcatcgaaggtcaggtgaccgccacgtttgatattctggacgatggacgagtggacaacgtgtcgcttaccggctgtcacttttttttcgggaaacgctga

SEQ ID NO: 82767 - DNA, 279 bp, Citrobacter koseri
atgtcatcagcaacatccatcaggctcgatgaagaacttaaggaccggctgaaaacgctggccgatgaccggcaccgctcagcgcacgcgctaatgctggaggcaatcaccgaatacatcgaccgggaagagaagcgcagccagtacctgcgggacggacaagccgcatggcagcactatcaggaaacgggtctgcaccttactgcggaagaagcagaagcctggataagtacctggggaactgagaacgagcaggatgctccgccatgccacaggtaa

SEQ ID NO: 82768 - DNA, 315 bp, Citrobacter koseri
atgccacaggtaacgatttccgcgctggcacagcgagatttacaacgcctccaggactttctcaaaaccaaaaatcggctggcagccagaaaagccggtgaggtgatcgtccgggctatccagcaactgaaaacattgccagacattggccgcccggtgccatttctgccgctggaatatcaggaactggtgatcgggtttggcgacagtggctatgtgatgctctaccgccacgaccgggaaatggaccggattgtgatcgtcaccgtcaggcatcagaaagaatccgggtatccgggggcagacagcctctaa

SEQ ID NO: 82769 - DNA, 429 bp, Citrobacter koseri
gtggcgaaaacattgctcaacctttcacaggcagcacaagccgcgggcattaccagaagaacgctatacaatcatgtaaaacagggaaaggttaccgtgtcacgtgacgggaaaaacaaccctgtcgtggatgtgtcagaactgatccgtgtatacggaaatgtgaatatccctgagaaacaaattcccggcatttcacaccgtgaaaatacacaaaaaaatttcccacaggaacagcttctggcaatgcaaaaggaactggccgatctccggcaggctgtcaccctgatgctggaagataaaacatcccgagaagaagaacgccgccagcacgatgatgagcgccggaaactccaggccgaagtggacagattgacaacagaactgacacagaagaaaaaacgcttctggtccggctggtttagctga

SEQ ID NO: 82770 - DNA, 531 bp, Citrobacter koseri
atggcgctgtacatggtatttattgaggacgtggaagacaaagacggcgagcgctgcattatgccaaccagcgagcatctggaagacatggcggtcatggcctggcagaccggtgcatatgtattcaggtttgaagatcaggcccagcatctggcaatgatgaagtttatcggcatgtatcacgaacggctgaacagcgatgacaaagccacgtattacttcaccggcaaaaatccggcgtgggaacgtgagaaaccggccggaatgaagctgtgtgattatctttatcgcaaggttgagcagttcgccatcgagaacggcgtgcaggtactggacgccgggaaatacaccccggagcagatcggggcgatgattgacgtcgtgagtgagcggtacggggaaagcgcggtgaacgagaagctgaaagcggagctgatgcgggaatataacagccgctattttaacgttccggtgccagaactgccggaggataaacccgcccgccggaggtggccgttcggcaaaaaataa

SEQ ID NO: 82771 - DNA, 207 bp, Citrobacter koseri
atgaaaaatatcatgacgttattcctctctataattctgcctttttcagtctgtgctcaaaccgtgacggcaacaggcgatacactggagcagacggaagaaaaaattcgccagcaggctgacaagcagggtgacaggtattataatattaccgaagcccgcatgggaaataaagtacatatcacagcagaaatcctgccgaaataa

SEQ ID NO: 82772 - DNA, 1149 bp, Citrobacter koseri
atggcgcaaaacatttcgtggtatggcatgatagcacccgaagagagtcaattcagggtggtaaatgtgaaaccagtaacgctatacgatgtcgcagagtatgccggtgtctcttatcagaccgtttcccgcgtgatgaaccaggccagccacgtctctgcgaaaacgcgggaaaaggtggaagcggcgatggcgcagctgaactacattcccaaccgcgtggcacaacaactggcggggaaacagtcgttgctgattggcgttgccacctccagtctggccctgcacgcgccgtcgcaaattgtcgcggcgattaaatctcgcgccgatcaactgggtgccagcgtggtggtgtcgatggtagaacgaagcggcgtcgaagcctgtaaagcggcggtgcacaatcttctcgcgcaacgcgtcagtgggctgatcattaactatccgctggatgaccaggatgccattgctgtggaagctgcctgcgctaatgttccggcgttatttcttgatgtctctgaccagactcccatcaacagtattattttctcccatgaagacggtacgcgactgggcgtggagcatctggtcgcattgggtcaccagcaaatcgcgctgttagcgggcccattaagttctgtctcggcgcgtctgcgtctggcgggctggcataaatatctcactcgcaatcaaattcatccgatagcggaacgggaaggcgactggagtgccatgtccggttttcaacaaaccatgcaaatgctgaatgagggcatcgttcccactgcgatgctggttgccaacgatcagatggcgctgggcgtaatgcgcgccattaccgagtccgggctgcgcgttggtgcggatatctcggtagtgggatacgacgataccgaagacagctcgtgttatatcccgccgttaaccaccatcaaacaggattttcgcctgctggggaaaaccagcgtggaccgcttgctgaaactctctcagggccaggcggtgaagagcaatcagctgttgcccgtctcactggtgaaaagaaaaaccaccctggcgcccaatacgcaaaccacctctccccgcacgttggcagattccttaatgcagctggcacgacaagtttcccgacttgaaagcgggcagtga

SEQ ID NO: 82773 - DNA, 3072 bp, Citrobacter koseri
atgacaatgattacggattcactggccgtcgtattacaacgtcgtgactgggaaaaccctggcgttacccaacttaatcgccttgcggcacatccccctttcgccagctggcgtaatagcgaagaggcccgcaccgatcgcccttcccaacagttgcgcagcctgaatggtgagtggcaatttgtctggtttccggcaccagaagcggttccggaaagctggctggagtgcgatcttcctgtcgccgatactgtcgtcgtcccctcaaactggcagatgcacggttacgacgcgcccatctacaccaacgtgacctatcccattacggtcaatccgccatttgttcccacggagaatccgactggttgttactcgctcacatttaatgttgatgaaagctggctacaggaaggccagacgcgaattatttttgatggcgttaactcggcgtttcatctgtggtgcaacgggcgctgggtcggttacggccaggacagccgtttgccgtctgaatttgacctgagcacatttttacgcgccggagaaaaccgcctcgcggtgatggtgctgcgctggagtgacggcagttatctggaagatcaggatatgtggcggatgagcggcattttccgtgacgtctcgttgctgcataaaccgagcacgcaaatcagcgatttccatgtagccactcactttaatgatgatttcagccgcgctgtactggaggcagacgttcagatgtacggcgagctgcgcgatgagctgcgggtgacggtttctttgtggcagggtgaaacgcaggtcgccagcggcaccgcgcctttcggcggtgaaattatcgatgagcgtggtggttatgccgatcacgtcaccctacgtctgaacgtcgaaaacccgaaactgtggagcgccgaaatcccgaatctctatcgtgcggtggttgaactgcacaccgccgacggcacgctgattgaagcagaagcctgcgatgtcggtttccgcgaggtgcggattgaaaatggtctgctgctgctgaacggcaagccgttgctgattcgcggcgttaaccgtcacgagcatcatcctctgcatggtcaggtcatggatgagcagacgatggtgcaggatatcctgctgatgaagcagaacaactttaacgccgtgcgctgttcgcattatccgaaccatccgctgtggtacacgctgtgcgaccactacggcctgtatgtggtggatgaagccaacattgaaacccacggcatggtgccaatgaatcgtctgaccgatgatccgcgctggctacccgcgatgagcgaacgcgtaacgcgaatggtgcagcgcgatcgtaatcacccgagtgtgatcatctggtcgctggggaatgaatcaggccacggcgctaatcacgacgcactctatcgctggatcaaatctgtcgatccttcccgcccggtacagtatgaaggcggcggagccgacaccttcgcaaccgatattatttgcccgatgtacgcgcgcgtggatgaagaccagcccttcccggctgtgccgaaatggtccatcaaaaaatggctttcgttgcctggagagacgcgcccgctgatcctttgcgaatacgcccacgcgatgggtaacagtcttggcggcttcgctaaatactggcaggcgtttcgtcagtacccccgtttacagggcggcttcgtctgggactgggtggatcagtcgctgattaaatatgatgaaaatggcaatccgtggtcggcttacggcggtgattttggcgatacgccgaatgatcgccagttctgcatgaacggtctggtctttgccgaccgcacgccgcatccggcgctgacggaagcaaaacaccagcagcagtttttccagttcagtttatccgggcgaaccatcgaagtgaccagcgaatacctgttccgtcatagcgataacgagctcctgcactggatggtggcgctggatggcaagccgctggcaagcggtgaagtgcctctggatgtcgctccacaaggtaaacagttgattgaactgcctggactaccgcagccgaagagcgccggacaactctggctaacggttcacgtagtgcaaccgaacgcgaccacatggtcagcagccggacacatcagcgcctggcagcagtggcgtctggcggaaaacctcagcgtgacactcccctccgcgccccacgccatcccgcaactgaccaccagcgaaacggatttttgcatcgagctggataataagcgttggcaatttaaccgccagtcaggctttctttcacagatgtggattggcgataaaaaacaactgctgacgccgctgcgcgatcagttcacccgcgcaccgctggataacgacggcgtaagtgaagcgacccgcattgaccctaacgcctgggtcgaacgctggaaggcggcgggccattaccaggccgaagcagcgttgttgcagtgcacggcagatacgcttgccgacgcggtgctgattaccacggtccacgcgtggcagcatcaggggaaaaccttatttatcagccggaaaacctaccggattgatggaagtggtcaaatggcgattaccgttgatgttgaagtggcgagcaatacgccacatccggcgcggattggcctgacctgccagctggcgcaggtagcagagcgggtaaactggctcggattagggccgcaagaaaactatcccgaccgccttactgcggcctgttttgaccgctgggatctgccattgtcagacatgtataccccgtacgtcttcccgagcgaaaacggtctgcgctgcgggacgcgcgaattgaattatggcccacaccagtggcgcggcgacttccagttcaacatcagccgctacagtcaacagcaactgatggaaaccagccatcgccatctgctgcacgcggaagaaggcacatggctgaatatcgacggtttccatatggggattggtggcgacgactcctggagcccgtcagtgtcggcggaattccagcttagcgccggtagctaccattaccagttgctctggtgtcaaaaataa

SEQ ID NO: 82774 - DNA, 1254 bp, Citrobacter koseri
atgtactatttaaaaaacacaaacttttggatgttcggtttattctttttcttttacttttttatcatgggagcctacttcccgtttttcccgatttggctacatgacatcaaccatatcagcaaaagtgatacgggtattatttttgccgctatttctctgttctcgctattattccaaccgctgtttggtctgctttctgacaaactcgggctgcgcaaatacctgctgtggattattaccggcatgttagtgatgtttgcgccgttctttatttttatcttcgggccactgttacaatacaacattttagtaggatcgattgttggtggtatttatctaggcttttgttttaacgccggtgcgccagcagtagaggcatttatcgagaaagtcagccgtcgcagtaatttcgaatttggtcgcgcgcggatgtttggctgtgttggctgggcgctgtgtgcctcgattgtcggcatcatgttcaccatcaataatcagtttgttttctggctgggttctggctgtgcactcctcctcgccgttttactctttttcgccaaaacggatgcgccctcttctgccacggttgccaatgcggtaggtgccaaccattcggcatttagccttaagctggcgctggaactgttcagacagccaaaactgtggtttttgtcactgtatgttattggcgtttcctgcacctacgatgtttttgaccaacagtttgctaatttctttacttcgttctttgctaccggtgaacagggtacgcgggtatttggctacgtaacgacaatgggcgaattacttaacgcctcgattatgttttttgcgccactgatcattaatcgcatcggtgggaaaaacgccctgctgctggctggcactattatgtcagtacgtattattggctcatcgttcgctacctcagcactggaagtggttattctgaaaacgctgcatatgtttgaagtaccgttcctgctggtgggcagctttaaatatattaccagccagtttgaagtgcgtttttcagcgacgatttatctggtctgtttctgcttctttaagcaactggcgatgatttttatgtctattctggcgggcaatatgtatgaaagcatcggtttccagggcgcttacctggtgctgggtctggtggcgctgggcttcaccttaatttccgtgttcacgcttagcggccccggcccactttccctgctgcgtcgccaggtgaatgaagtcgcttaa

SEQ ID NO: 82775 - DNA, 1113 bp, Citrobacter koseri
atggctacttttgaagaattaagtgtcaaagcaatactgcccgaaacgataaaaaagcagattgatgacggatcgctaaaaatcgaggggctgcagttacgcgatttacgtgggaaatataccacaccgctggatacgctcatggtcaaagaggaccgcacctattcaccggcgctgatgattccattccagaatgagtttttggttacgttgtcgctcatcaatcgtaacattctcacaaaatttcgtgagcaaagtgaaatattattccgcattgagcgcaaactggatcagttgctcacaaatgaaatggacaggctcaattcagaggtgaacttttttttctcagaggtcacagatcttgataaacatgatcatcaacgctcagagcgactgctattcgagggcagtaaaacagccgccttgcttgcccaaaagttgggccagttcattgaaggatatatcgatgacatggcgcttcagaacccctctaaccctagttatgccctgacctatggtgaattaaaagcagggacgaaagataaaccctattggtcttctcatggcattgtggtatacccatgttttaaaggctccctagctgaagtttatacttgtgcatttctagagatgctcaatagtctaaacattctgagcttgatccatcggggacgaaatacacctgactatctagttaatctggacagtttaaaagaccaattggtggcgttgcttaaaaaacttgcagtggacgatctgcaaaaatattttggcaaagagcgaccggggttccgcgatatgtgttaccaactctatatagattatcaggataaaaatcggagtctcagatatcgcggtaatccggaggcgaagcgtttgtctgtcttttttgacgagttctcattcgatgagctggcggtacgagagcgcaaagaagcagatttcagtgtatatcaggatgaacaccttcattgtgcaataacggagatccttaatatgctggaaaatatcgataaccttaaactgcgcgcctctacgttgccagatacttctgaagaacagagcctagccatttcggcgttgtccgataaattcttcctaacgcatgattag

SEQ ID NO: 82776 - DNA, 1503 bp, Citrobacter koseri
atgaaaggtcagacttttagtgagttacaagttgaacacatacttacacaacagaaacttccgtttgacgaaaacggtttaaaagttctcctgctggataaaaattatctgcgccaacgaagcgtacttggcgggcgcgtcattggtggtggtgtcgcattacaggtgcaggaatttacctaccaccattatctcaccgatgaacaaaagcagaagatctatagcagctgttatgagatcggcagcccgctacctattactgatactagcgagaaagtctatcatgactatctagcgcaaacttatggtggggttgatgtcgcagatctggtgaaacagattaaaaagaacatcacagaactgacgggcatcccctttaaggtttttcttcagaaagaccgcaatctggcattgaaagtggtgacgctcttctatcgtatatgccggatttatcgtcctcagctttttcgactgctgagagaggaaagcaccgacaaagctaattttgaattccgctcagcgttcccgcaacttcatggtcaaagtgaagaaaattccgctgtactcgcagaaattctgtctcatttaaccttttccatgccgaaatcatacgctgaacaagcatggtgcatcttgactgacctagcgctcaccggtgaagcaatggccgtatatgtcaaaagtgaaattgagggtgaacaattccagccagggcgttattcgcgtcataatatcagtgcagctcttaaagaatgtctgaaaagacagacagtagagcccgtcgtagaccccgaacgcctcgactttttgctctacgcatccctggtattacgtgagtattcagagcgtaaaaaatcgaatcgactagtgatgcaggcagtttataaataccctttgcagttgagaacgctgcgctgcgcaaagctaccttcattctcggataaagatgtcatttctttcctgaccggtaaggaaatgacccgcattaaaccctctctggaaaagcaggccgggtttgtcgaattgatcgttcgccattatagccgcgacataacggaaccgttgccctcaatgaacaagcagattatcaaagctctgatactgcatgacgaaaagttaggtgttcatattccttcagcaattactggaacgggcaatgttcagacctctgtcacctcgatcctgaaagatgctgagcggtatactcgactcgatttagaaggaaactaccctgacctgaggcgttatcctgaagcgctgttgctctattgggacatgcgctatcacatggcggtaaaagcgctgatgtcgaaacaggtggaggatggttttaagactatgctggccataactgagtgggaactgcaagtcgataccaatctgattgagtatgtgcaattcagtgacttgaagacttttcagacgctaccgggcctagcggaaaaatttatgcacctgcttggctatcagccaggtaaaattaccaattttactcttgagtaa

SEQ ID NO: 82777 - DNA, 348 bp, Citrobacter koseri
gtgtacatcttttttactgccctgtctgaaaccaagcttgatcccgcggacggccttgaaaataagcccggctgcccgttgttatttttacaaggagaaaagataaaaacgctgattgttatcgatgttcagaacgattatttccctcggggtgcatttccactggagaatgccgccgccgactgcattaacgtcctgaccgccatcgaataccccagactgcataactggctcatcgtggtatcagcccctgacgcgccgttttttagcccggaaagcgaggacgtacgtcttcattcgcatgccgcggaggacttgggagatgcgccggtgatccataagggatag

SEQ ID NO: 82778 - DNA, 840 bp, Citrobacter koseri
atgaatgtacttgatagagatggtgtagagctaaattcagagtgccaaataggtgaagaagatggggtttttggtctaattctagagtcttggggaccagcgcaaagaaataaagattataactctgccttagagtttattattgaacgattgattaaatcaggtcaagaaaaaatcgtagtatatttggcttcattacctttaagaaggaacatgcccactatagcagaaagaagaatacatcctaatgagtatttcaatcttactgatggaaccccttcagaaattcgtcaggaattatgcagataccagactcattttagtaatcagcgaaaaaaagatgctccatcagcttcaggtaatagaagcaaacgaataattattaatattcctggcgtaagtgattatgaattctggaaaaaaataatacatgggaactcatctgttcttcttcagcctactgatgacgaatacactctaaacacacgggtaaaaaacttactaaaaagtcccctggacaaacccagaggctatgaatcacctattacagcagaaagagttcagaaagtatatttccgagacccagctgttaaagcttgggtattacaacaaagtaaagggatttgcgaattttgtgagagtaatgcaccgttctcaataattggtggagccccataccttgaagtgcatcatgttgtccccctttcagagtctggtgctgacaccataaataattgtgtggctctgtgccccaattgccatagagctttccattacagtgaaaatgcaaaagaactgctagaaaatatttataaaaagattgaaagattgaaagattga

SEQ ID NO: 82779 - DNA, 1410 bp, Citrobacter koseri
atgtataatatcaataagttagatagtgatccagtcatgacatgtgaagacacctatcaaaaaacactgttagatcagatagatttagttaattctttgctcgaaatttacaaccagaaagatgtagcattagtattgcgtgctaattccaaaaaggactggtcacgtgagtctttaaatagatggcttaatggaaagtctcgtcagaaattgatgtgtgcaagtgagataaactcgctgaaatcaatgcttccaaagccacccacctgtcatggtaattatgaatttaagttcatagatttatttgctggtataggtggcattcgtagcggatttgaagacattggtggaaaatgtgttttcacaagtgaatggaatatgcatgcagttagaacttacagagcaaattggtattgtgacccaaatgaacacatcttcaatcatgatataagggagattacgttaagtaatcgcgaggacgtgagtgaagaacaagcttatgttcatattgaaaaatctataccagagcatgatgttctccttgctggtttcccatgtcaaccgtttagcttagccggtgtaagtaaaaaaaattcacttggaaaaaagcacggttttgaatgtgatactcagggtactcttttttttgatattgccagaattttatatgttaaaaaaccatcaatttttgtcctcgaaaacgttaaaaatttgaaaagtcatgacaacggtaaaactttttctataatattaaaaacactgaaagatttaggttatgtgataagtgatgaatatttcgataattacagggatccaaaaattattgatggcaagaattttcttccccaacatcgtgaacgaattgtaatcgttggttttcgaaaagatttggacattggatctagctttaccttagctgatatacacaaatttttccctactaataagattcagtttaaaagcttattagatcctgagcctagtgaaaaatatattctatccaaaactttatggaagtatctatatagttatgctgagaaacatcgtgcaaaaggtaatggtttcggatatggcttagtagatcccaataatccatatagttttgctcgagccctctctgcacgatattataaagatggttcagaaattttaattgaccgaggatgggataaagaattaggtgataaggatttcgataatgctgagaatatggcaaaaagaccacggcgcctctcgccaagggagtgtgctcgcattatgggatttgaaaaaccactagaagaaaaattcaaaattccagtgtcagacacacaagcatatagacaatttggtaattctgttattgtcccaatgttttcagctgtggcaaaaatgcttcgaccatatatattaaaatcagctagaaggtaa

SEQ ID NO: 82780 - DNA, 1602 bp, Citrobacter koseri
atgaacaggttattggttataaaggaagaaaatcatacagttaaccctgatatggggcttgtgattcctgttgcttatcttgatgaaaatggaaattatgaaaaaattgatcctagcgattttcctaatggaggaatatttatttccaaaggatttttgaatataagccagcagtttggatatgatgaattatttattcttaatgaatattacgaaagcaatgatgatgactggaaaattaatacaagacatcaaaagcattttggacttggaagtaaagtagaaaggctcgataaaagctactttattccaattataaaatctgctctccccgatataaaaacaggtttccttggtcatgatattgacgcccctagcgctcaattctttattgagaatgagggctatgtatatggaccgtttaaagcctccaaacaagataacaattggcaattatctcctttatctacaccgtcacccttacagcttaaacaagaccatatagcaaggtttgatttaaaggaaattatagctaatgatttttcttatgagttaattattaaaggtgaagttagaaaatatattaaaaatttgaaagacctctccagtttattgtttgagcaaaaagattacatttcagatacaaggcttgtttcttacttcaccaaaaatggatttggaaatggattttcgaaaaataaatctcctttaggaaaaagtgaagcgcaaaagttgtcgcaagggattgatgagtatgttaagaagaataaagtattagagaatagcgagcgtcttaaaagacttaaggagctacttggagaatttttagattcaagtccattcggccaagagattgttcaagagtttttagcagaaagtagggatggcaggctttatttagatgattatttcagcaaaaataaagacctgctggttaagcaaaagtctaaagaactagaggaagttactcgagtacagaagagtaaattaaataaagagataagtgatttagaaaggctaataacaaataaaaaagcagaattagattctgaattaaaaaatgttgaatatgaaaaggtcagggctagagaagaacttgagagaataaaaaaacagtctgctgaagatgctcatgaccttctccttcaaaaacagcaggctttgacggaaaaaaatgctgagttagaagaaaacattaaaaatgcaagcattaagcttgaacaattctactcaatggagtctagggtaaatgattataattctctgaatgaagaaataaattatctgaaaaggcttaaagaggatattgaaaaagacaaagaatcagctgagaaagcacttaaacttaaaaaagcaactttgaactctccacagcttctggaaaaaactgtagagatacaaacaatacaaaacctcaaaactctcttgaatggtggcagggcaagagaaagcacgccgaaaatatataaaacaaagataaatccatcaactatcgaactgaataaagaaaacagaaaagaatacattaattacttagttgattcatttagcaacgataatggaagtgacctgcccccagagttagatacaaccttcagttag

SEQ ID NO: 82781 - DNA, 303 bp, Citrobacter koseri
atggaactcattacccgccttgtttatatcgatacatctgcctatgaacgaaagcattttcagtttggcttatacattcttgaaaaactggagaattttgcatcacatgataaagtgcgtatccttgttactgacatcacacgcagagaaattgaattacatattcgtaaaaacgctgaggaagccttaaaagaacttaataaatttcagaaaacgtatgccccgatactgagaactactccggcgcatgtaccaacagagatattcgtaaaaccaggtaatgctgccaacttactgatttag

SEQ ID NO: 82782 - DNA, 1206 bp, Citrobacter koseri
atggcagttgctgttgcaatcacagcaagcacatcggtagcggtggctaaggaagatggcagcggaaaaacatctacggcgcagatcccagcaggtccgcaggtaccggtcgctgaggttatttcgcgcaatattataccttcggccgagtttactggttccctggcagcgatcaaaacggtagagctacgacccagagtcggcgggacaatcgaatctgtaagtgttccggaaggaagcttggtacataaaggacaacttctatttcaaattgatccgcgaccatttcaggtagctcttgatagcgctaaggcgcaacttcgccaagctgaggctcaggcgtttcaggcaaatcgcaattttgaacgtgtcagccgactggtcaataatggggctgtttcccgtaaagattatgacgatgcagcttctgataaaaatgcccgtattgcccaagtcaatgtagcgcaggctgcagtagaggcggcaaagcttgatctctcatatacacgagtaactgcgccaatagatggccgcgttgatcggattttgattactgaaggaaatctgattagtaatagtgaagggggggctgcaactttattaaccacgatcgtttcctcaaatccactatatgcatattttgatattgatgaagcaacgtttctcaataccgtcagtaaagcgcgtcctgatgcaatggagggtagtaaagaaaaattaccagtacatgtaggtctggctactgaaaagggatacccacattccggtactcttgattttgttggtaatcaaatcgatcgtaataccggtactgttcgagtaagggccattatcccaaatacggatggtttgcttactcccggagcatttgccagagttcaattaggcacgggaaaagctcaacaggttattttgatcaatgaccaagcagtgggaactaatcagggtaataaatatgtcctggttattggtgacgatagtaaggcgcagtatcgccccatcgaattgggacccgttgttgatggcttacgaattgttgctaagggcctacaagccggtgaaaaaatcatcataaaagggttagtgcgaccgggtatggcggtaacaccaagtatggtttcgatgcagtctctagagagttcattggatgcaaaaccagcaactcaaggaaaggcttctgatagtaataataaggggggtaattaa

SEQ ID NO: 82783 - DNA, 3168 bp, Citrobacter koseri
atgaaattccctcatttctttatacagcgacccatttttgcaatcgtcctttcactatttatgctgatagcgggtgccttagccttctttcaattgccactcagcgaatatccttctgtaactcccccaacagtgcaggtgactgcaagttatcctggggcgaatcctaatgttatagctgataccgtagctgctcctcttgagcaggctatcaacggggtagaagggatgctatacatgagctctcagacttcgtctgatggccgtatggtgttaactatctcattcaggcaaggtaccgatccagatattgcgcaaattcaggttcagaatcgtgtatccagggctttacctcgactgccatctgaagttcagcaaatcggcgttgtaacggaaaaaacctcgccggatatactcatggtagttcatctgttctcaccagataatcgatacaatccgctttatgtatctaactatgcgatgttgaacgtgcgtgatgagctttctcgcttacctggtatcgctagtattgcgctttggggggagggtgaatatgcaatgcgagtttggcttgatcctaataaaattgcttccagaggtttgaccgcaagcgatgtcacttcagcaattaaagaacaaaacgttcaggtagcggcagggtcagttggacaacagcctaatacttcatcctccttccaggtcacagtaaatgcgttagggcgtctgacaaccgaggagcaattcggcgatattattattaagtcaggaactgatggccaggttactcgcctacgtgatgtagccaggattgagctcggttcagataactattcgttacgaagtctgctggataataaagatgctgtaggtatgcagattgtaatgacacctggagccaatgcgctggacgtatcagcatctgtacggtcaacgatggaacgcctgaaagaaaaatttcccgaaggtattcagtatagtatcgcgtatgacccaacattttttgttagcgcatcgttgaaatctgttgcaacgactttactggaagcaacaatcctcgtggtgcttgtcgttatgttatttctacaaacatggcgaacatcgattattccattagttgccgtgccgatttcactagtaggcacctttgcgttaatggatgtattcggattttctctcaatacgttatcgttgtttggccttgttctttcaattggcatcgttgtggatgatgcgatcgtcgttgttgagaacgtagagcgacatattgcaaggggactatcacctaaagatgcagccagaaaggcaatggatgaagtaacgggtcctatattagctattacttctgtactggctgcagtatttattccttcagcgtttctttcgggattacagggagaattttatcgtcaattcgcgttgacgattgccatctcgaccatcctgtcggcgatcaactctttaacgttatctccagcactggcttctgtactgcttaaaccacatcaaggtacagataaaaaagacatgctgactcgggtgttggagcgccttttaggttcgttcttcggccgtttcaacacatttttcgacaggttatcggaaaagtacgtagatactgtaagacgtatagttcgcgggagtactatagtcctgattttgtatgctggttttctggcaatgactttcctgggattcaagcaagttccgggtggctttgttccggcgcaggataagtattatctcgttggtatagcgcagttgccgacaggagcctcgctggacagaacagaagcagtcgttaaggaaatgaccagacttgcattagctcagcctggagtggaaagcgtggttgcatttccaggtttatctgtaaacgggccaaacatgccgaactcagctttgatgtttacgatgctgaagccttttaaggatcgtcaggacccttccttatctgcatatgccatagctggtagccttatggggaaatttagcaaaatacctgatggttttgttgggatattcccaccaccacctgttccaggtttgggaagtatgggcgggttcaaactccaaattgaggacagagcaggattaggttttgaagaactggcccgagtgcaaggaacgatcatggctaaagccatgcaaactccagaattagctgggatgatggctagttttgaaactaattcacctcagatccaggttgacatcgatcgcgtaaaagcaaaatctcaaggagtggctttaactgacatctttgatacattgcaggtcaatttgggatcactatatgttaatgattttaataggtttggccgtacatatcgtgtaattactcaagctgatgctccattccgcatgcaggctgaagatatcggattacttaaagtgcgaaatgcggctggagaaatgatcccgttatcggctttgattaatatcaaactaacttcaggccctgatcgtgtgatgcgctataacggttatccatcagcagatattacaggtggaacagcccccggttattcttctggccaggcaaccgatgctattgaaaaaatagtgaaggaaagcttacctgaggggatggcatatgaatggacggatctcacttatcaggaaaaattagcgggtaattctgcgctatatattttcccattagcagttttctttgcattcttgatcctggctgcacagtacaatagctggtcgctcccattcgctgtactactgattgcgccaatggcgttgctttcggcaattggtggggtctggatttctaatggtgataacaatatcttcacacaaattggttttgtcgttttagtcgggctggccgctaaaaatgccattttaattgttgaatttgcccgaactcaagagaatgaaggactctctcctttggaggccgtacttgaggctgcacacttacgcttacgtccaatcctcatgacgtctcttgcatttattgctggcgttattccattggtactggcgagtggcgcgggtgctgaaatgagacatgctatggggattgccgtttttgcaggaatgctaggtgtaacgttctttggattactgcttaccccagtattttatgttgtggtgcgtagtttttcgataagacgaaaagtgaactcccatcaattgttgagtgagaaaagatag

SEQ ID NO: 82784 - DNA, 192 bp, Citrobacter koseri
atgcaatttcatcttgacaacatgacatgcggtggttgtgcccgtactgtgactaaagtaattcagaaccttgatccggaggctagcatcgtaactgatcctccaactcgtaaagttgagatacaaacgttgttatcggttgatctgatttctgatgctttgcgtgaagcaggtttccctccgagggagtag

SEQ ID NO: 82785 - DNA, 1011 bp, Citrobacter koseri
atgtcacaatcacatgaccacgaacatgagcatgagcatactccagcagtgaccagcgcaaacgagcgtaaggtccttatttccttcctcatgatattcacattcatggtggtcgaagctgttggagggatactttctggctctttagcattgctggcagatgcaggacacatgcttactgatgctgtagctttagcgctggcttatgcagcattccgttttgggcgccgggaagctgacagcaaacgaacctttggatatttgcgatttgaagtcatcgctggattctttaacgccctgacactcttcgctattgtggcgtggattgcatatgaagcatgggagaggttacaagctccaccagcgatactggcaggcccaatgctgatcgttgccattgtaggattgttggtcaacgtattggtattatggatcatgacccgtggtgagactgatcatgtaaacgtcaaaggcgctattttacatgtgatgggggatctactgggttctgttggcgctattgtcgccgctattgtcatttactatacgggctggacaccaattgatccaatactctccgttctcgtcgcagcactggttttacgtagtgcctggaagttattagcaaaatctctgcacatcctgttagaaggtgctcccgaaaatgcttccccagacaaggtagagcagagactaatcaattctgttcaaggcttagctgccgtaagtcatattcatgtctggcaaataacctcaggccgaataatggcaacactggaagtaagagcaaaggaagatgtggacgtgaaagacgtagtaaagcttgtaaaacaagaactttatgagcatttcaaaatagaacacgcaactgtgggcatcgactggaattacgatgaaaacgataatacatgtagtctttctccgacaaaaccgcgtaacgaacacgaacacgaacacgaacacgaacacgaacacgaaaaaaagcatgaccactctacaccaggccactaa

SEQ ID NO: 82786 - DNA, 2499 bp, Citrobacter koseri
atgagcattcaaaaaaaacagcattctaatgatgctgaaactcaggttagcctgcctattgaggggatgacctgtgcaagctgtgttggacgagtcgaagccgccttaacgaaagttgagggtgtggaaagcgtaagtgtaaatcttgcaactgagcgtgcagacattctcttgaatacacctgttgaacgtatggcgctaatcaaagcaattgaaaatgtgggttatgaggttcccctaacttctgttgaattgtcagtccagggcatgacgtgtgcatcgtgcgtagggcgtgtcgaaaaggcgcttagagctgttgaaggtgtaaaggatgcaacagttaatttagcgactgagagggccactatacgtggagtagccggaactgatgacctgattgcggctatcgagaaagttggctacgaagccagcctggttgatacccgtggccagaataatgttgaggccgctgaaaaaaaagatgctgaaaaggctgcattgaagaaagatttagttctggcgaccatacttgcactaccagtctttattatggaaatgggatcgcatctgataccgggaatgcaccaatggataatggataccattgggctccaggaaagctggtatctccagtttgtgttaactctgctggtgttagttattccgggacggcgcttctacctgaaaggtattccggcgttaataaggcttggcccagacatgaactctctcgtctccgttgggacacttgctgcattcggttactcaatggttgcgacctttgcacctggccttctgcctcaggggaccgtcaatgtgtattacgaagctgcagcggtaattgtcgcccttattcttttaggacgatttatggaggctcgggctaaagggagaacgtccgaggctatcaaacgtttggttggattacaggccaaagaggcgcatgtgttgcgtaatggcgttgttgtcgatattccaattaatgatgtagtccttgatgacattatcgaagttcgaccaggtgagcgagtgcctgttgatggtgaggtaagtgaaggaacaagttttgtagatgaatcgatgataacgggggagcctatcccagtggagaaagtgcctggtagcttaatggttggcgggacggttaaccagaaaggtgcattgaggttgcgtgcaacagccgttggtggtcagacgatgctgtcgcaaataatccgaatggtagagcaggctcagggttctaaactaccaatacaagcagtggtcgataaagtaacgctgtggtttgttccagtagtgatgctggcggctttgttaacattccttgcctggttaacatttgggccatcaccagctctgtctttcgcactggttaatgccgtggcagtgctgatcattgcctgcccatgtgcaatgggattagctacacctacttctatcatggtaggaactggccgtggcgctgaaatggggatcttgttccgtaagggggaagctctgcaattgctcaaagatgctaaggttgtagctgtagacaaaactggcaccttaactgaggggcgccccgtaatgacagacctggagttagccgaagggtttgagcttaacgaagttttagcaaaagttgcggctgttgaatcacgttcggaacatcctattgcccgcgctatcgttgaatccgcactggaaaaaggaatatcgctgccaatattgactgagtttgattcaattactgggatgggagttcgggctatcgttgacggggagcgtatagaggttggtgccgatcgctttatgcgtgagttaggattggatgtagagcatttttcgcagacttcagtacgtcttgggaacgaagggaaatcgccactttatgttgctatcggtggccgcttggcagccatcatcgcagtggctgatcctattaaatcaagtacaccaattgccataaatgcattgcaccaactggggctcaaagtcgcaatgattaccggtgacaatgccaatacggctcatgctattgcaagacaactaggctttgatgaagtggttgctgaagtgttgcctgaaggaaaagttgaagcggttcgtcggctgaaggaatcctacggcaaggtagcttatgttggtgatggtattaatgatgctccagcgctagcagtggcagatattgggcttgcaattggaacggggaccgatatcgcggtggaatctgctgatgttgtcttaatgtccggaaatctgcagggcgtccctaatgccattggattgtcgaaggcaacgatcggtaacatcaggcaaaatcttttttgggcatttggttacaatgcagcattgatccctgtagccgcaggactgctgtatcctgcctacggattgctgctttcgccaatttttgctgcaggtgcgatggcgctatccagtgtatttgttctgggcaatgcacttcgtctgcgtcgtttccagcccccgctgatggaagatgctgggaatcattaa

SEQ ID NO: 82787 - DNA, 465 bp, Citrobacter koseri
atgaacattggtaaagcatcaagcgaatcaggaatctccgccaagatgattcgttattacgagcaaattggcttgatccctgctactggtcgtactgaagctggttatcgtgactatgctcccaatgatatccatcgcctgatttttattcgaagcgctcgcgacctcgggttttctctggaagagatagagggtttgcttaagctatggaatgataaatctcgtcagagctctgatgttaaacggttggcgcaggaacatattaatgatttagatcggcgtatagaaagtatgcgtcaaatggcagacacactcagagtgttaatccaaagttgcgcgggagatgaacgagctgaatgtcctattcttcatagattaacgattgctgatgatataagtcattcgggtaaacgagaaggtgcggtgcaacgtcgttctcgtggaaacagagtgtcaaaagattag

SEQ ID NO: 82788 - DNA, 453 bp, Citrobacter koseri
atgaaaattggtgaattagctcgtaaggccggttgcccagtagaaactattcgttactacgaaaaggaaggtttacttcaggcccctttacgagatattgaaaataattatcgccattatgataataaccatctggaaaaattgttatttatccgacgctgtcgctctctcgatatgacgcatgaggaaatccgcgcattactactggcaatcaataataacggtaaagaatgtggacctattgacgcgataatcagtgcccacctcgctcatgtccagcatcgtattaatgaattaatagcgctagaaaaacaacttcaagaacttaatgatgtttgcaatgcagaccgtagcgtagacgaatgtgggatagtccaaaaactgacagctgaagatgaagatagagaccttcctctaactgtacccaccgaccatctgggaggcgtacattag

SEQ ID NO: 82789 - DNA, 195 bp, Citrobacter koseri
atgttgcattacgatatgatccgcagcgagataatgtacctaaaagcgctggatagttttttcaatacagatcactcgttactgtgcagtacttatgatacgccggatgattttcgacgcttgatctctcagatacttgaacgaacattttcttggcgatcaggacagaatcaaagctgcgcggaaaacacttaa

SEQ ID NO: 82790 - DNA, 783 bp, Citrobacter koseri
ttgaacgaacattttcttggcgatcaggacagaatcaaagctgcgcggaaaacacttaaagaatgggccgacctgcaactgattgataaagattattttgattgtttcaaaggttcaacaagagcatcgtggtttgctcaccattatatttttgaatacccagtaaaatctgcagggttgacacttggtggattggggaatgacgtcggttgtgcaggtggttttaattctcttttaatagacgataatatcttcacaaatcttgatttctctaattttaatattgatttggacgatattgattgggatctgataactaatccacaggctactgcttcgaaaaaaccgaaacgtgttttctcccgattttatctgaacgcgggagcaagtacctatctgtacaaccccactccggtaactgagcgtgaactgatcaacggtataatgaggtacattgatgaagctccatgctcccttggagataagatctcttatttcaaaaagctgcatgatcggtggcttgagcaatacgatttttttctgacagactttgactggatgtcccgcgatgatgaaactcagttagtatatctctgggactatctgaaaggaaaaggacgaatagcgggctatcttcgcccttataatacgtctatgcgttatgacatgattattgcggctatagatgtgtggaacgttcaacctgaagagaagctcgagtttattgagaagatgaaacatgcctggcagtcatcaaaatcttatcggcgatccgctaaatag

SEQ ID NO: 82791 - DNA, 1326 bp, Citrobacter koseri
atgaaattcaatgaacatactggtgtcatggacgatgagttcgtttccgtagggcttgaatggctatgccaagtgcaaggcgatagagatgcattcctatcacgccttgaaaaggcacaatgtaattatatttcttcgacaaatgaccctaccaattttggcaaggattttgacatcaaactttatgggcatgatattgtcgcgagcttctttgctcaggcgaaatcattactcgacaaccggagggtttacgacatcagtatagcttctaatattattccctgggtcaagcaacttggaagaaactgccaccttattgaggccataccaggtgccaaggagcgtgccaagagaatgttagaagacgaaacggtctaccccgacacggccttgtttgagctggttgtagctggtaattatgctgacaggggatttcaagtagaatttatacccgagcagaaaggaatcgctaaaactccggatctcaaatataaaaaccaagacggccaggatttttatattgagtgtaaaaggctacaaaaaggaaagtatgagactattgaaaaacaacatcatcggaaaataataaatcatcaaaaaacaatgagaatccttgagagattcaatttatggatggacattatttataaatccgaggtgaaagatatcccccatgattatatatatgagcacctcaagcactataaaggaaacttctacacttggaatgatatttatggtcagggtgtagtgagacccataagcctgatccctctgcttacagacattctgattaatggatccatcatgtttaatacgaaatttgctcgtctgattaagggagatgttctgcgcgatgaatattataatatctatgcacgggtaaaaccagatgaccgtgacaatcgattcgttgagtttgttcaccaagctgcgcttgtgacttggcggtgcgtaaatgaagcatcttttgagggacgttcgaaacatgtaacttcacttctgaaaacaatcgatgatcagcttttaaattttggacccggcattgcccacattgccattgatgtggatgtgcaaggtgacgttgccgacaagcgtcgccagaaaaatatagaagccatctctcgctttaagcctgattccagactatgccgaacaatggtgcattacatggttcccagaattgatgaagattcagcctggatggtcgatgaaacatcagatgaattactgagttacccgcctgaacttggtatcacacctcgagttgctatttttacggactccgaaacccttgataatgatcggcctggatggcgccaataa

SEQ ID NO: 82792 - DNA, 399 bp, Citrobacter koseri
atgtgcttacctaattatgagtgtaaaagtgatcacagaattcctggctggaataaaattgaaaagagtagatgggtgatcacttctcaagaagagaaacaagtattcatggatggttttaatgctcattggtttcaggataaaataatctggtctttaaaagctgtaggtaatactttggaaaccttaggtgaagatcatcgccctcgctatgtgcctaaaggtaaacaatatacagagcttgtcatagctaaattcgttgaacatagagaaaatcattggcacggataccctgtgaatgttcttactgactttccatgtagtgaagtttttaaagtttggagccaaacacccggcatccctaaaaaatcaatcatgaaactgaataaacctagatag

SEQ ID NO: 82793 - DNA, 426 bp, Citrobacter koseri
atgaacaaaaacaattttaattcagtcatgacacttgaagaacagcttgttgtcatcgtagataaatacatatcaaaacgatatcagccacacgataaaagtttcacataccagctttacttaatttttgtgggataccatttgaagtatttctaccctgaaaggatttattctaaatccaatcgtaatattgataacataatgactatgtttagctcggtatacaaaaatctgacaagcaatcttctacaacgattaaataacaaagaaggagtgattagggagctaaactcgcttgttaattacatagataacaatcaagaaaaagcagaggaaatctatgctactgtcagagcacaatatgaaatgaaagtaattgagggagagttaacccatgaagttcgcgtaagagccgtcaggttatag

SEQ ID NO: 82794 - DNA, 159 bp, Citrobacter koseri
atgtataacaatcagttcaatgcctcgacttttatccctgttgtcggtttgctaactggcggttctcagactcctgtctcttatacacatctgacgctgcccagcaaatggacattctctactgagaataactatacaaaatcaggcattctcaattaa

SEQ ID NO: 82795 - DNA, 1182 bp, Citrobacter koseri
atgaagggaatgcagaagatcaaaagggggaaaagcttctcaggtgtggttctctatgtgttaaagccaggctcacaccatagaaccgttccagaagtaattggtggcaacatgacaggtgattgctcacaagagttaatcgacgaatttaaccttacgaaagagcttcgttcagatgtggcaaaacctgtttggcacaattcacttcgattaccccaaggagaatctcttaccaacgaacaatggaaacgaattgctgacgattacatgaagcgaatggggttcggtgatacacacctccgttgctatgttcttcatgatgatcaggctggtcagcacatacacattattgcaagtcgcatagatctcaatggtgggaagctctacttgggtaggaacgaaaacctcatcagcacccgcataatcagtgaactcgaattcgctcatggtctgacagtgaccaggacagcctcttcaattgcaccaaagcaaccgaagcggaagagaatctctcgcaacgaaaagatgctatcagaacgaactggtgttccctgccccaagaagtcccttcaacagatcatagataaaagtttggcagattcaccggaccttttaacttttatccagaggctggaagaagcagaagtcggctggactgctaacattgcctctaccggtaagatgaacggcttctcattcaaataccgcgatatagctttcaaagcttcgcaattgggcaagagctacagttgggcaaatcttagtaacaggctcaactacaacccagaccatctagaagctctgcgaaccggcataccaccagaagccccccctgctcctgctcctgctcctgctcctgctcctgctcctgctcctgctcctgctcctgcaaaagatgttgcaacaacggatattccaagggaaagcataagtgaaaaaattgccgaactggaattacggctcagagaagacaaacggaacgaaatcgtagaaaagattcttctaaagaatacagtcaaacagcaaaagcatctcaggctcagtagctggtttccctttttacaacggctcatagagcttctccgaagctacggtaagagcattcttcacaaaacccatatgaccttctcaaatatctccgcaatgaaacctttaaacaaggcgagaaaaatccttttatag

SEQ ID NO: 82796 - DNA, 252 bp, Citrobacter koseri
atgattctggagaaaattcttggctatattaacgtagagaaagcgacgttaatgacgagcccggctgaatttgataacacgattgagcgtgaataccgtggtctgctttcagaaatgacggaacttgctcatgttgagcgaaatgcgttttacgcgctggcgaaatcatcggatacgctgctggtgatcgcgtcgggcgaaacccgccgttttgccaatattctcctcaccgtcggcccgacattactctga

SEQ ID NO: 82797 - DNA, 1053 bp, Citrobacter koseri
atggcaaacattcgagatgtcgcaaagcatgcgggcgtttccgtcagcacggtgtccaatgtgcttaacggccgcgccgatcaaatgcgcccggaaacgctggcgcgcattcagcaaagcatgcaaacgctcaactatttccccaaccgggtcgcccagcaactcaaaacggggcaggcaaaaatgatcgggttgctggtgccatccatcgtgaaccccagctttgcggcactggcgcgtgaagtggatctggccgccaaaaaacacctctaccgcgtgctgatcggcaacacctatcgccaaatcgaagaagaagaagcgtttctggaagatatgtttgctcatggcgttcgcgggattattgtggccgcctgtgatatcaaaaagccgcatttcgcccgcgcggcggcgcagggcatgataatggtgaactacgatggccgtatgcccgcaagcgttgactctggcggtttcgcgctggacagcgtgtcgatggataacgttgaggcgggccgaatggcggcagagcatcttatcgcgcgcgggtgtcgccgcctcgcgtttgcgaccgtcgcaggaatgacccccagccgcgcgcataaaatagaaggctttctcagcgcggtacgccagcacggcatgtatcgtgaagggatgatcatcgaaggaaaagcgatggccgcctacggagataccgaaatgaccgaactgggccgttctctggcgcaaaccctctgccagcaatcccttcgtcctgacggcatcgtcgccattaacgatgcgcttggcattggtttgatgagtggtttgcacgaagcccgtatccgcgtgccggaagagatctctctcgtcggtatcgacaatatttcactctctggcctggtttaccccggcctgacctctattatgccgccgctcacggagatggcggacgtgatggttgagcgcctgatcgcccgaatagagactccggcaatccctcccgacgagtttttgtttcccccttccctggtatgccgacaatcggtgcggaaagcagaaaatatacgatga

SEQ ID NO: 82798 - DNA, 2208 bp, Citrobacter koseri
atgaaaagcagcgcaaaaaataattattctctgcaaagatccttgctggcattcgcgattggtgccgccgctcacggtgtttacgcagcagaagacactaccgggaaagaagatacgatggtcgttgaggccaaatccgcaaacagtggttttaaagccggtggcgacgcgcaggtgcccgcgttcctggaggggcaggttgcccacggaggacgactgggggttctgggcgaacaaaaagcgatggatgtgccgtttaacgttatcggttacacctcaaaactggtggaagaccagcaggcgaagaccatcggcgaggtgctgaaaaacgacgccgcagtacagcccgtacagggatacgggaacttctcagaaaactatcgtattcgcggctttgagctggcgggggatgacgtgacctggggcggtctggctggcgtgctgccgcgtcaggttgtggatgcttcgctgtttgagcgcgtggaagtgtttaaaggcgccagctctttcgtgaacggcgcagcaagttccggcgtgggcggtatggtcaacatggagccgaaacatgctgatgacctgccgctgacgcgcctgggagtggattacacctcttcaactcaggtaggcaccacgctggatgccggtcgtcgttttggcgataacaatcagtttggcgcgcgagtaaacattctgcatcgtgaaggcgaaaccgccgttgataacgagaaaaaacgcacgacgctggccgccctcgggctggattatcgcggcgataaactgcgctcctcgctggatgtcgccgcccagaaaaagacgttccacggcgggacgatgggaattaacttaagcggcgtcgatttcgtgccggatgtaccgaacaacacggataactacagccagaagtggggctacagtgatatcactaaccagttcggtatggcgcgcgctgaatacgacatcctgaataactggacggtctacggcggcgccggggcgcaacatgcgcatgaaaccgggatttataccgcgccaaaattactggacagatcgggtgatgctgtcgtcaatgtgctgtataccaaccgtattattgacgcgttcagcagtatggcgggtattcgcggcgaatttgatacctggtcggtcagccataaggtgaacctgggctattcggcggtgatcaaacgcgataaaacggcatggcgtatgaactgggccaaccctggctccatgaccaatatctatgacaaccatgacgtgccgatgccgcagtgggatctcgccggcggcaactatcacgatccgctgacaacctcccgaaaccgtactcagggttatctcctcagcgatacgctgggattctttgatgaccaggtgctgctgaccgtcgccgcgcgtaatcagaaagtggtggtgcgtaactacagcaatgcgaccggtgaagaagacactgactctcgctatacggaaagtcgatggatgccgacctacggtatcgtatataagccgtgggacacggtgtcactgtatgccaaccacaccgaggcattacagccgggtgaaaacattaccgatcaggagtcgccggattacggtaaaagcatcggtattctgcactctaagcaaaatgaagtgggtgtgaaaattgatttcggcaccgtcggcggtagcctggcgctgtttgagattaagaaaccgtccgtgattaagaacgagacgacgcaggaatattcgaccgatggcgagcagcgtaaccggggtgtggaagttaacctgtttggtgagccggtctacggtctgcgtctgaacagcagtgcgacctggttacagccgaaactgaccaaaacgcaggatggcgtcaatcaggggaatgatgcttccggtactccacgtttcaccgccgttctcggtgctgaatatgatatccggcaggttgatgggctgaccgctaccgcgcgactgaatcacaccggctcgcagtatgacggcgccgctaatgagaagaagctggacagttacaccacgcttaacctcggcgttcgttaccggatgcgcgtaaaccaggagcagaatgagatggtatggcgtttaggggtggataacgtcaccaacgagcaatactggtctggcgtatccgactacgatggcgtgtatgtgttccgtggcgaaccgcgtaccctgaagctgtctgttaattacgacttctga

SEQ ID NO: 82799 - DNA, 1017 bp, Citrobacter koseri
atgatggccgcatttattgtggctatcaggggaacggtcacacaagcagtattgttaggtcttgcggcgacaatttctcatacctctattgtctggctcattgcactgggcgggatgtatatccgtcagaaatttacggcagaatcagccgaaccctggttccagctgatttcagccatcattattcttgccactgcggcatggatgttctggcgtacatggcgcggagaaaagctttggaggatggagcaggaagatgagcatggccacgttaatcaccctcatgatgaaacccgcgtcattgataccggtcatggcagcgttgaactctcaattttcgaagaaggtcagccaccccactggcgtttacgctcgctcagtggcaggaaatgggaggccagcgatattactctggtcactaaccggggtacagggacattttcacaggtgtttgatttcgtagaaaaagacgggtttatggaatctgcccagccgatccctgagccgcacaactttgaggtttgtctatctctaggccatcgtggtcatgtacacgactatgatgtggagttccgcgagcatgatcataaccacgatcactccgcacttgagggacttgatgttagttcactcgagtatcaggacgcgcacgaaaaagcacatgctaacgacatcaaaaaacgctttgctaatagcagcgtaacaaccggacaaattatccttttcggcctgacggggggtctcattccttgcccggcagccattacagttcttttactttgcattcaggtgaaagaatttacgttgggagctgtgctggttctttgctttagtatcggattggcaatcacactggtagctatcggtgctgttgcagctgtaagcgtacgacaggcatcaaagcgttgggacgggttggatgttttagcccgaagagcaccatacttctcaagtgctttgattgcgttagtgggaatttatatgggttatcacggatggttgggcataacaaattga

SEQ ID NO: 82800 - DNA, 153 bp, Citrobacter koseri
atgatacaccttttttccagttcagtggcaattataataacgcacatggtgttgaaaataattaacataaaaggacaaaagaaacacaaaaacagacatgattattggttattgttaaaaagtaaagggattgaagttgttataagtggttaa

SEQ ID NO: 82801 - DNA, 624 bp, Citrobacter koseri
  misc_feature (597)..(606): n is a, c, g, or t
atggactggacagacctaggtaatccctctccgcgtgagcaatcccgaacataccaacctattgaatggccggtagagaaggttacattcctaccttccccatctgaaaataacgaactaccgtctattcgttcaataataaattcgcgtagaacgaggcgtgaatttggaccattggatccgtatattttttcagaatggctctggttagttgcgagagaattagccactggccattcacaatttggttttcctctaactcaacggccagtaccatctgctggtgcaattcatcctattcatctcgttctttcactaccaggaagtgacagatggcagctttacttaccggaaaagcatgcattagcgcagctctcagcccccaaccaaacgcggaatttggtgcgtagtgaattattgcctgtacttgacatccaatcaggcattgttgttaggctcattgctgaaccaggaaagaccagtgctaaatacgagcatgcggacagccttgtttggcgtgatgctggtgttttaacaggtcatatggcactcgttgccgaagcacttgcttgtaatttttgcccgctaggaattacnnnnnnnnnnaggaattactggtcatga

SEQ ID NO: 82802 - DNA, 603 bp, Citrobacter koseri
  misc_feature (210)..(219): n is a, c, g, or t
atgaagacggctcttttactctctggcggtatggattctatagccattgcttggtggaaacgaccagatatagcaattactctagattatggacaacgtgctgcgaaagctgaaattaaagcagctagtgtgacctgtagtaccctgaaaattgttcatcatgtaattaaagtcgattgtagttctctgggatctggcgatatggcgggnnnnnnnnnntctaaagcaccttctagtgactggtggccttatcgcaatcaaatgctaatttcacttgctgccatgaaagctatcgcgcttggtgtcacacacctttggataggaacagtgaagtctgatggtactcatttagatggcactctagcatttgtggaaaaaataagtgatttgatggcttttcaggaaggcagaatggttgtagaagctccagcaatagaactttccactgctgagttggttaggatttcagctgttactcctggtggtcttgcatgggcgcatagttgccacaaggctaatgttccatgtggtaattgtcgtgggtgcaataaatattttcaagttttggacgaagtaggatatggactggacagacctaggtaa

SEQ ID NO: 82803 - DNA, 933 bp, Citrobacter koseri
atgccagatatcagattaaaagcaactaatgtactacgttatggaatgcttgaaggaactgctgtagtcgatgcagaatacgccgtttatgaccctcaaaatgtttcaacacctgaattatttgaaaaaaatggttctacagcaaagaatctggcactagtcctcaatcggtatgaagctacaacattaagtggtcgacctgatttgtctgtttcagagcaagcaatctatttatctaatcaaggtcacgcacaagtaatcattattaagcaaggacctgctggagcattggtctgcgataatggaaagatatcaattgtccccgcttatgaaactaaccatgttttcaaaataggctcaggagatgtatttgttgcttattttgcctatcattggatgataaataaaaagtctgcccatgatgcggccaatgctgcttctcgtgcaacagcgtattattgcgagaacaacttattcccctctacgcaagggctcgtggatttcaacccaaaggcaatttcaccaacctctaaatatttccatggtaacacctactcggtatatctcgctggtcctttctttaccttggcacagatgtggttaattgaacaagttcgtcgtaatttaagcgatctcggtttggatgttttttcaccatatcatgatgttggacatggtcaagcagaagatgttgtcgaaaaagaccttgagggaataaagaatgccgacattatttttgctattggtgatgggttggatgctggaacaatctatgagatagggtatgctcgagcacgcaatatacccgtagtcttctatgcagaaaatgaagctgacgaagatcaaaaaatgatgtctggttcaggatgcatcttatgcaaagactatgttaccgcaatctataaaacactttggacagtggtgcagaaatga

SEQ ID NO: 82804 - DNA, 570 bp, Citrobacter koseri
atgcagcagatcacggtagcgacggacgctcaacggcgtattcgccagcgcgagctggccatgctggacgagaaagaggctcaggagcgcgaggaagcgcggaagaacaaggggttcacacaggtgtattcgaggggttggaggcgcgtacgggagcttgctacgggcaattcaggcgctgccggtctgtacgccctctttgccgagcacatcgacccgacttgtggcgcggtgatctgcgatcagcagtttttggccgatcacatgaaggtgactaccaggactatccggtcttggctcgcctacctggaagaaaaccgggcgcttgtccgcatccctgtcgctggccgagtttgcgcctacgcgctggaccctcacgaggtctggaagggctacgacaacgccaaggaatacgcggccttcgtgaccaaaaccttggtcaacaaggacggcgatatccgccgccggatcatgtcgatgttcagcccggaagagcggccaaacgacgaccgcgacccgaacacgctggaaatttttgaaggcactccccacaatgagcaacgaaactaa

SEQ ID NO: 82805 - DNA, 321 bp, Citrobacter koseri
atgaaaaaaacgttcgctcttgctgccatgatggcggcaatcgctccgaatcttgcttcagcggcggataagatgatccagaccaagtacgcttgcgaaggcggaaagacgttggatgtcgtgtacgtcggagactatgccgtgatgctgcaaatggatgagcttgtcccgctgaaacgcgccaagagtgcatcaggagtacgctacatctctaccagcaaaaactactcctacgaactctgggggaagaacaacgacatgaacctttcaacccacgatggcggaaaaaagcaagtcgttctcagtaactgcaagccataa

SEQ ID NO: 82806 - DNA, 975 bp, Citrobacter koseri
atggcggcctacgcgatcatgcgatgcaagaagctgtcggggatgggcagcgtggcggcggcgttgcagcactgctaccgggagcgcgagacgcccaacgctgacgccgaacgcacgccggacaacgagcaccgggcggccacctcgaccgatgcggcgatggggcggctgcgcgagttgctgccggaaaagcggcgcaaggacgcggtgctggcggtcgaatacgtgatgacggccagcccggaatggtgggccaaggccacgccccagcagcaggccgcgttcttcgaccaggcgcagggctggctggcggccaaatacggcgcggatcgcatcgtgacggccagcatccaccgcgacgaggccaccccgcacctgtcggccttcgtcgtgccgctgacgcaggacgggcggctgtcggccaaggagttcatcggtggccgcgacaagatgcgggccgaccagaccagctttgccgaggtggtgagggatctcgggctggaacgcggcatcgagggcagccgggccacccatcagcgcgtccagagctactacggcgccatcgagcgccagcccgggcacgccaccatcacgccgcaggccatcgagccgcgggtgctgcgtaaggggattttctcaaaggacgtggagacgccggaggccgtggccgcccgcgtgaccgctgccgtcagggaagggtatggcccgaccgtcgcagcggccgcaggagcgcgtcaggagcgcgagaaggcccggcaggcacaggagacagcccggagcctgcgtgaccgcctgaagcccgttctggacgctctggggccgcttaatcgcgatatgcaggccaaggcggcccagatcatcaaggccgtgggcgagaagctgctcgccgaacagcgcgaggcgacacgccagcggcaggcccaacggcttcgcagtcgcggccgggatcgcgacgacggcgggctgtctcgttga

SEQ ID NO: 82807 - DNA, 1563 bp, Citrobacter koseri
  misc_feature (1531)..(1540): n is a, c, g, or t
atgagaattttctctctaatattttctgtttttataattgagctcgtatcattttactttaacatatcagggggccctacggctgtaatgagtgctatcgttgtatcacaaagttttgtcggcgctcaatatttaaaagctcgtaataggataatcggcactatcctgggaataatggcatcatttatatcagcttacctttatgtcggtaatgaactatatttcatcgttttttccatgctatggatatcattcatgagcgtgatgataagtttggttccaacagataactcgcatttatttcagttaggtgcaaacacatatgcatttgttgcactgccattaattttatcccctgaagaaacatactttaaccttattacaagaagtactggtgtatttatgggagtggtaatcttagttgtaacatcagtgctgatgcttctaaagagaagtgattatgatttcaaaaaaaatatgcgtggcatattcaggaaaacaatcagaataaacaagaaagttgcggaagcaaataatattgaaaggaaagaaattaaaaatttgttcactgatatttccacattaatctcaaataagagaaatattgtatatgaacacggtttgggttttaaatctaaaggcgcccttaaaaccttctccattttatccatgatgcttttcttatattcaaacacactccgtcattatctaaaaaatgaaggagagaagcttgctgatataaaaagtgattttttaaacattatcaaaaaatcacttatgtgcagggctgatataaataaattcgaccacagcaagataaaaatatcgaatatattccttgaacacaaatcagcccttgaagcagtaatacgtggcatccgagcattcactataacaggtattcttttaattacatggtatattaccggttggtctggtggtcatgtgatggtatcactgggagttgtgtatatgatcttacttacaacttatcctgcaccggtagctggcggcaagcatatggtttatggaacaatcttaggcatgattgtaggatggatttatattcaaacaatctacagttctcaatatacgttcatatcaccctcaattttctttatagctcaactcccagtgctaataatcggtagtagatttctatttgttggtaaaacatttcttctcggagtaacatttctgacaacattttactttgggcttcagccgagcaatacctctgttgtgtcctatgaaacatttatggataatagccttggagcaactgtaggtttaatcattactggacttgggatctctataatttttcctgagaaaaaacgcattaaaaatgaaaagttaattaaggccacaatcaaagagttagtctatgctctgaaaaagaaaaacttaaacatgtcaaatgtagtaaggcatacacatgacagattacgtctctcagattccctggaaaagtgtacttctgacgactttttagttttaacaaatctttcatctttatttattatattcnnnnnnnnnnattatattccattatatttttga

SEQ ID NO: 82808 - DNA, 789 bp, Citrobacter koseri
atgaaaaataatgataccaaccatcagatagtttctacggtaagcatttctcaagaacacataacaatcctcaacgatgttctaacggcgcatactgaggtaggcttgcataaccatgcgtggggacagcttaacgttataaattcaggtatgattgaaacagatattgagggtgatatcaccttgctggccccttggcaatatgctatttggatccctgcggggttgaatcactctagccataatctcaaaaccactgaatattgttcaatctgtatacctctgaagctttgcaacaacctacctgaaaaagcctgtattataaatcttactgaaataggtagagccataataaatacgattttgacaaaaaatatttcttatctttccgggagaaagggtgagagtttagccacagtttttattgatcaacttgaggatgcctcaaaggcgatgaattaccttccaaactcaaaagacaagtatttacagccaatcttgagttatctcaaggttaaccccggaagtaatcgcacgctaaacgaatgggcaaacattgttttcacctcagaaaaaaccctcaccaggaaattcaagagcgaacttaatatgtctttccgtgaatggagagcaagagtgcgttttttaaattcgctaccattattgaggacagaaaaaaccatccaagagatatcttatttgctaggttatagtaacacatcatccttcattattatgtttgaaaaactctcgggtacaacccccgaaaagtaccgcaaaaacatataa

SEQ ID NO: 82809 - DNA, 1440 bp, Citrobacter koseri
atgcaaactatctccaatcctgaacacttcgaagtgctaactagcacctatgacctggttaccataggatccggctctgccgctagggcagccgcaaatgaggctcgtaggcttggtaagtctgtagcaatgatcgagcatggaacagccgggggtacctgtcttaatgttgggtgcgttccatcaaaaacacttttggctgcggctgctactcgttttgctgcattgcatcaaaatttccctggcattaaaacgtatgcagagcctgcaaatctggcattgttggttaacgataaagaccaaatgattactcagttccgtgatacatttcatgtgaagggacccgttgaagctgggatcaatgttttacttggtactgcagtattcactccttctgaaaaccgcgattgtgttagtttggttgtcgaaggctctgaagactcgatacaagttcaagcgaagcatgtaattatagccagtggtgcgagcccatttattccagagatacccggtttgctcgatgtggattttttaacctcttcttccgcaatgtcccttaaaagtgtgccggaatctttgctggtagttggtggaaacgctattggtttggagcaagcacagttattttcccgtttgggttcaaaagtcaaagtaatcgaggttgcaccgagaatcgctccctttgaagatcatgctatctctgccactttaaaagagtcgcttactaaacagggtgttgagtttttgaccggggcagacttaaaacaagttaaggtgggtggtgatttagttatttgtacggttatcgtcggtgaggatactcacgtaattacggcagagaaaattcttatcgcaacagggcgccgccctgtgactgaaaaactgaatctggacgctgtcaatgtgtcggtcggtgcgcgtggacaggtcattgtcgataagcatctaatgacatcgaatccacggatctgggctgcaggtgatgttacaggtgaagcacaatttgtttacgtcgctgttgaacaaggaagattagcggcaagcaatgcacttgggggcgagctctcctctctggattacaatgccctccctcgggttaccttcacctcccctgagttggcttctgtaggtttgactccattgcaagctgaagaaagaggaatcccatatgagatccgagaactccctgtagcttttgttttacgtgctattgtcagccgccatagcgatggtttaatcagactggtttctgatagtcaaaccggaacgattttaggcgttcacatggtcagtgaatccgcaggtgatgtgatagcagctgcgacctatattatttccgccaatatgactgtgcatcagttagcaaacatttggtcgcctgagtttaccatgacggagtcactgaagaatgttgcaaaaacttcccctataactaactga

SEQ ID NO: 82810 - DNA, 576 bp, Citrobacter koseri
atggacaaaaaagaaaaaataatatctactgcttttaatcttttttatcagtacggcgtgcatgctgtcggtatcaatcgtgtgatatcggaatctggggttgcaaagaaaaccctctacacctactttccaagtaaagaagaacttattgcagccacagtggaatattgtgacctgcgatacttctccaggttacaatcacgcatcaaaaaaatagaagatggacgactaacaattctagagttgtttaatgatcttgatgactccataaatagaagaattattgcatctccccctttctatggctgctattttatcaatgtcagtgccgaatttagcaaccctgaaaatctaattcataaaatttgcgctaaaaataaaaatgaaatgtacgaattaattaagcatcatgtatctaaaatacttccctctgaaaaagacgttattgaggtttcggaaaccatcaatatgctatttgaaggtgcaattgttagagctcatatccttcaggatttgcaatctgcgataaaagctcgcacagcggttgagaaaatcattctttccgaactgaaataa

SEQ ID NO: 82811 - DNA, 1656 bp, Citrobacter koseri
atgagtattgccgttaccggggctttggttcttgggcagtggccagaagcagcgatggttatggttctatttaccatcgctgaactgattgaagcaaaatcactcgatagagctcgaaatgccattggttcactgatgagcctgacccctgaaaccgcaatggtccaacaaactgatggatcatggcaggaagttgatgccagcagcgtacaaccaggaagtattgtaagggtaaaaccaggcgaacgaattggtcttgacggtgagattgttaaaggtcaaacaacgattaatcaggctccaattactggtgaaagtttgcctgtcgataaaatggcgggtgactccgtgtttgccgggacaataaaccagtcaggttcttttgaatataaagtcactgcagctgccaataacaccacccttgctcgcatcattcatgctgttgagcaggcgcaaggcgccaaagcagctacacaacgttttgttgaccgcttttcccagatttacacgccagtcgttatggggatttcggttgctgttgctgtattgccaccattgtttggcgcaggtacatggcaagagtggatctataaagctctagtcatgcttgtcatcgcgtgtccatgtgcgctggttatttctacaccagtaacaattgtcagtggacttactgctgctgctcgtaaaggaattctcattaaaggcggtgtttaccttgagcagggacgtaaattaaaagctttggcgcttgataaaactgggacgattactcatgggaagccagtacaaactgatgtcatggttttcaatggggaaagtgagcttgaggttcgtacagttgcagcaagtcttgctagctactctgatcatcctgtctcacaggccgttgtgaatgcttctgttgatttgaaaaaacagagtgttgaaaactttgaggctattgtaggtcgaggtgtgcatggtgtgattgccggcaaagacttttatcttggtaatttgcgattggcagaagacctcctgagttgtccgttagaggttaaagctacagtacaaagtctggaaagcctaggtaaaacagttattttgctcaatgatggaaagcaagtgcttgggttatttgctgttgcagatactgtcaagaacacgagtcgcgaagcgattcaacaactccatcaccttggtgtcaagacagttatgttgactggggataacccgcatacagccaaagcaatagcatctcaggtcggtattgatgaagctcgtggtagtcagttacctgaggacaaacatcaagtagttcaagagtattcacgtattggtgttactggaatggttggtgatggcatcaatgatgcgccggcactggctgcggcagatataggttttgctatgggggcaatgggtactgatacggcaattgaaactgcagatgtggccttaatggatgatgacctgcgtaaaatccctgcctttgtaaaattgtcccgacagacgtatagcttactcgtgcaaaatatcagtctcgcattaggtattaaagctattttccttgtattaacgctcatgggaatggggactatgtggatggcggtatttgctgatgttggtgctagccttctggttgtagcaaatggtctgagattgttacgtaaatag

SEQ ID NO: 82812 - DNA, 336 bp, Citrobacter koseri
atgtccggttcaggcggtgggagctttggtggtcagtttggtcaagatacttttgaactttcatgcgagaaactcacgataactacacagctcagctctccagatccagctgtagtgtcattacttagtgttggagacatccttttcatccggcaacgcaatcataatgggctctctctaacggaggccgtctttagggataaccaagttgctggcggtattgcatctcctcagattcaacgtatgcgtgaatgcattgcgcttggtactgcttatgttgctcaagtaatctcaatcaatggtgggcaggtcatggttaaggtatatgcacaatga

SEQ ID NO: 82813 - DNA, 210 bp, Citrobacter koseri
atgactgaacaaatttctttgcttgatgaccaactggtggatatgcggttcatcacgaagctaacggggctgacagataagtggttctataagctgattaaagatggcctattcccgaagccgatcaagctgggccgcagctcccgctggaagaaaagcgaagtcgaattatggttacagcaacgcattaccgattcacgcgaccattga

SEQ ID NO: 82814 - DNA, 981 bp, Citrobacter koseri
atgagccagcaattaacctttgccgacagtgagttttccagtaaacgtcgcctgacgaggaaagaaattttcttatcccggatggatactctgctgccgtggcctcaactgctgggcaacattgaacctgtctatccaaaagcaggtaatggccgccgaccttattcgctggaaacaatgttccgtattcactgcctgcaactgtggtacagcctcggtgatgaagcgatggaagacgcattgtatgagattgcttcgatgcgccaatttgccttgctgtcattggataaagctattcctgaccgtactaccatcatgaactttcggcacttgctggaaaaatacaaactgactcgcaaaatatttcaaaccgtcaatcagtggctgttggattgcggcgtgatgatgactcagggtaccctggttgatgccacaattatcgaagcaccaagctcaaccaagaataaaaacaaacagcgtgaccccgatatgcatcagaccaaaaaaggaaatcagtggcactttggcatgaaggctcatattggagtcgatgctgaaagcggccttactcatacgctggtgaccaccgccgctaatgaacatgacctgaaccaattgaataatcttctgcacggtgacgaagaatttgtctccgccgatgcgggttatcgtggcgcagagaaacgggatgagctgaaggaccgtgatgtggactggttcatcgctgaacgtccagggaaagtcaggatattgaaaaagcacccccgcaaaaacaaagccgccatcaaactcgaatacctgaaagccagcatcagggcaaaggtggagcacccgtttagggttattaaacgtcagtttggttttatcaaagcacgctacaaggggctgatgaaaaatgactcacagttagcgatgctattcacgctagcgaacctgtttaaagtggatcagatgatacgacgacagactaaatccgcctaa

SEQ ID NO: 82815 - DNA, 198 bp, Citrobacter koseri
atgtacctcattcaggggcctatcttcgctcaatgcagacctggcagcgatacaggaggttcgctccgtattagtagcggacaagttatggcgcaggtctactcctctaagatatcctctttggcaatcttcagtgacggtctggttaatgccattattgccatgcaagccatacaaagttataaggaattacgataa

SEQ ID NO: 82816 - DNA, 264 bp, Citrobacter koseri
atgttaattaatgacactatactggtttccatgagcgaagaagttgccaataaatatatcaagatgcaggatgttttactggatgatgaaccttgcgtcgacatcgtacgggtgatttatgatttagagcatgcagtcaaagaatttaaaaaaagaataatacttcagcatataaattattgccactctggggaatgtgaagatcctgatttacatattgcattaattgacgatgtgaaaactattcttgattacttagaatga

SEQ ID NO: 82817 - DNA, 285 bp, Citrobacter koseri
atgctctcgcaaaatgaaattgggctactttccgagattttccatctactgggggaccagtcaagactacgaatcctgctttactgtatgcgtggttcggtctctgtaggtgacattgctgagtcgctccagttatcacaatctctggtcagtcatcatctgaggttgttgcggggtgcaagactcgttcgaggagagagaaagggcaagtacatcttttatagcattatggatcagcatgtaagccatgttcttcaggatatggcatttcacatagcagaataa

SEQ ID NO: 82818 - DNA, 432 bp, Citrobacter koseri
atgcgtaaaaatagtgtctgtcagaaagagctttgcctgcctggcagggacataaatgcccagcaaggcaagaaaatgcagttgccctatcatgcgggcaaaggtggttttcccgccctggttggggcccgatatgacgaaaatacgttcatgcttctggaagctgaaatcattgcagacaaccttctcctttttctcaaggatgacctctgcaagcgcgagatcgaaagccgcaacagccgaaatagccttttcatctcgttgtacctccgggatacaaaatggcagccctttctgccgaaatttttaaatgtattccacaacagccagataaaactgcacttcacgttcaaaaagatccagcgtgttatctctgtagcgcctgttggcatctataaacacatcaagttgatgaaactcggcgggaaatag

SEQ ID NO: 82819 - DNA, 747 bp, Citrobacter koseri
atgattggcctgagactggatggctacgagcctgaccttcaccatgatgcggctgtggccttttgcattcgcgctcgcgaagatgaacttttcagtccgctgcatcaccatcgaaaagggcaactgatcctggcgctgcatggcgctattacctgcgaagtagaaagcgccatgtggatggtgccgccacagtatgcggtatgggttcccggcgaaattccccacagtaaccacgtcacggcgggggcggaattatgttttctgtttattgagccggatgcggtcgtgatgccggatcgctgctgtacgctaaaaataacgccattgtgccgggagctgattctggcgcttgccgcgagaacggatattcagcgtaccgagccaatgacgcagcgcctgacacaggtcttgtttgatgagcttccgcaacaaccacaggagcagatgcagcttccggtttccgggcatcccaaaatacgtcaaatggtggagacgatggcgcgtgaaccagcccgctggcaaacgctggggcagtgggcgagcctgttcgccatgagcgaacgcaatcttgcccgactggtggtaaaggaaaccggcctgagctttcgtcgctggcgtcaccagttgcagcttattctggcgttgcaggcgctgattgacggacacagcgtgcagcatgtcgcccaaacgctgggttatgattcaacgaccgcgtttatcaccatgtttaaaaaggggctggggtaa

SEQ ID NO: 82820 - DNA, 2283 bp, Citrobacter koseri
atgcaatcaatccagttcgatctttacaaacttggatggaaggctttcgaagatctcgtttcatgcatcctgaaagagactcttgggcagacgttccaagtattctctgatggcgttgacggcggtcgtgatggcgctttctatggcacttggtcgcaaactgattccgacgctagtatgaaaggtagttttactactcaatgtaaacatacaagcaagcagtatatgaagctatcaaagggagtcattagtgatgaacttcctaagatagagcggctcgcgagaaatgggctcgctgatgtatacctccttttcactaattgttcagtttctgcagaaactgcagccgtgctggaagcagatattcggaacgccggtgtgaaacatgccaagatttatggtgctgagtggatcaaccagaacatatctttaaatccaagtctcaggcgcatggtgcctcgaatatatggtcttggcgatctttctcaaattattacacatcaagcgtaccgccaagctaaaggtgtactcgattcaatcgctcccgacttagcgtgcttcgttccgactgatgcatatcgtcgctgtgcgcaagccatcaaggaccacggattcgttatgcttattggcgagcctgctagcggtaagacgatgattgctaatttactggctctttcagcagcagatgaatggaaattgcaaacgttgatcttaagttcgcctgatgatctagataggcaatggaacccagacgatcccggtcagttcttttgggttgacgacgcttttggctcaaatcattgtgactttaatcgagtccatgaatggaaccaaaggctccctaagcttaaagcagctatacacaagggcgcacgagcgatattcacttcacgcagttacatctttcgcgctgcccaaaatagcctaaattcgaacaagtttgagctattcaacgatactcgtgtcacaattgaagttgaaaagctatccgaagctgaaaaagcaatgattctctacaaccatttgaagctaggtaaacagacaaagatatttttaggagcagttaaaaattacctgccagcagcggtatctgtgccaaaattcctcccggaaatcgcccgcagattcgcaaatccacaattcacgaaaaaacttgagatcagagaagtaagtatcgtcgattttttctctaatcctgtagggatcatggaggatattataaggggacttgcaccagccgaaagggctgccttggccctcgtatttgcaaatgggggcgagctacctattccacttcatgtcgaagcacctcaaatagccaacatcatcacgtccatgcaatctaactttggtgatgtaaaagcggcacttacagcattagatgattctcttcttagggcaagcaagacacaagaggaatcttattggaaattccgccatccaactattcgtgatgctttcgctacctacgtttcagaaaacccagagctcgttgaaatctacctttctggagtcacaaaggaaaaattaatcaaggaaatcagttgtggagacatggacattgagggggttaaacttattgtacgtcgcagtatgtataacaaagttctgaatattatcgcacctgatgaccgtattaaagctattagtagccagatactctcatttctggctaacagatgctcacctgaattcttggagctttttttcaatagcgacactttaaaatcacgattgcttgacctaattagctcggcgaggaagtacgataatagtctggcaatacttggcaaactaaatacaaacggtcttctaagtgatgagttcagaaaaaaagtactggacaggctgagctaccttgccaaaattaattattcagtttgttttattgatgctgattttgttggagtcttgctgtcgcaagaagagaacgcgaggcgacttgcagctcaaaaggatgtattttactcttccatgcacgattctatccaagaaatcgaagagtcatggcatgtagacgatgatgtagatgaatcattctacgatattacaaatctactgaaccgatttcgtgatgaaaacaacgatttttacgatgatgatggttatgatgaagacgaatgggaaaagtccgaagcgtttattcaggaaatcgaaaccaagataaaagagctgaagcgtaagcaatctgaggctgttaattacgatgaacttgaaaccgaagatgccccacaagttatcttaccctcaggccgaagtatttttgatgatatcgatgagtag

SEQ ID NO: 82821 - DNA, 225 bp, Citrobacter koseri
ttgtcctacaaaaaagacagtgtattgccagatacctttgggcgtgatgcgccttatgatgatgaccgcacctatcccttggtaaaagaagagcaggtggcccacattcatcttgccgatgcagatgcccctttccctaagttcttacgtcagttcaacgaaccagcgatcaggcccatttggtatactgccaaggtgcgatggatcccaatgcctacctgctga

SEQ ID NO: 82822 - DNA, 153 bp, Citrobacter koseri
atgaactgcattgcttaccaaattaccatcacgtcttttttttcctggcgcctgcaactaacccgaacagtcaggctcacaggacgttggcagaacgtattgaaacgctttgtcagcaactcaccgctgaaaatcatgacctatctcgcctga

SEQ ID NO: 82823 - DNA, 2250 bp, Citrobacter koseri
  misc_feature (23)..(32): n is a, c, g, or t
gtggttttagccacaccaaaaannnnnnnnnncaaaaacggtaacttcaatcgtcacttcctggagcgctatagccgtgaccttggctatcgagtcattgaacgtaaaaaaacagatatcgatacgcttagagcactacgcgcgttgagagccagtatccgcaacgtcgacttcagggtgttcgatgataagcagttaaaattgaccgatatctaccaaaattgtgagatctatcgcaggacgtatgacaactttttcgacgcgctgaagaaaccgctggagtacgacctgaaaaatacctataaacggcgtcagtaccagcgggaacttgaagcgttattgcttgccgcctacgagggtaaaaacagcctgattttgtccctttcagggacatttaagcgggcctttatcagcgcctggcgcactcatcaatcagcctggcgtcagcagtacggtatgcactcccggtgcgatgaaaaaacggataacgataagaaacatgaccagatcctgacctttaccccattcaaagggcgtcacaccgtccatttggtcttttttgattcaccactggctaatgtcgaagatattaggcaagaaacctatctccagaacagcaataccgtactggtatttatgagcagctacaaaagtgcaggcaccggcctcaactactttgttaaataccatgacggcgatattaatgatatcaatgcaccgcgtctggatgtcgattttgagcgcttagtgctcatcaactcctcgttttacagcgaagtaaaggacaacagcggcaaccttaatacattacctaactacgttaccgtgcttaaacactacgctgatgacgatattaccgtccacaagctggccgatttcaacgttaatttcgcccacggcgaaaactatcgcctgttaatggccgaacatgatatgagcttattcaaagtcgtcgtgcaggccgtagggcgagtcgagcgtcgcgacactctattgaaaacagaaatctttttaccccgcgatgtgttccgtaatgttgcattccagttcgccgctctcagtgaagatcgcggtaacgaggtagtatcagaaagcatgtccttgcttaaccaccgcctaatggaggagtgcgaaaagctgagtcagaaccagtcatttagtgatgcagaacagcggtatgcgtttgaacaggctatcgtagaaaatggtcgccgcatcgatgctgttcataagcgagtcctgaaaaccgactggataaatcaggtacgcgccggcaaccttgaatatctcgaattgtgtaatttattccgcgcttctgactcctttaccgatcccatgcgttggctggaaaaacttcaggctaattccttgtatgccgccaatcggcaaatgcaatcaatccaccacgccctgtttatcgaccgccatcagggcaaccaaactattttactttgccacaaacgcggcccggatggacttgtccacagagattattccgccctgtcggatttcgctggcggcgcaagagagtaccggcctgagctcaccctctttccgcagtatagaaacgatgtcgattttacccccggcaacctggtcggcgagttgattcgtgaatgtgacaacatccaggaaacggcattcaaaaaatgggtacccaaccccaggctagttccgttgctcaaaggcaatgtcggtgaatatctcttcgataaagtgctaaaaagctatggcgttaccccactttctgatcaacaggtgtttgaacgccttgaaccgctagtatatgagttttttgaccgctttattgaagtgggtaacgacctgctctgcatcgacgttaaacgctgggcgacgcagttggatgatttaacgcgggcagaagaaacgcttgacaaaagcaacaacaagattcgccagatccgtaatatcaccagccaaaaggcggatacagaggggcagaaacagcttcaggctgtgctgtcaggccgttacgaacgcattcgatttgtctatctgaacgtcgcctacagccagaaccccaataatctgatgtggcaagataacgtggatcacacgatccactaccttaacctgttgcaaaccgactaccagtactatcagcccaaaaatcgagagagcggacgagctcaggaaaactcgaaactgagcatgacattggacattaacccaatgttactaaccttgctgggtgtagaaaagttgccgactaaaggaaaagtctcatga

SEQ ID NO: 82824 - DNA, 6342 bp, Citrobacter koseri
atgctgccttccgttgttagtcggcaggttgccgacagcgttgcttcctttttacgggctgcctttccgcttaacagcccgctgtttaacggtgaagaaaacaataacgtctcgatgctggagcaatttctggcccagccggaaacgctgctgaaagggccatatctttccgctcagttgccgtttcgtaaaagtgacttatcgctgaacttctttcccaacctgacgctgccgttcccgccgcacgcgcatcaggcgcaggcgtttcaacgcctgggtatcgagacgcctcagccgacgctggtggcgaccgggacgggttctggtaaaacggaatgttttatgttcccgctgcttaaccattgtgctggggcatcagaggccggtgttaaagcgatcatcatttatccaatgaacgccctggcaaccgatcaggccagccgtttcgccaaaaccatcgccagcgatccgcaactgtatggcaaggtgaccgtcggcctgtttgttggcgacagtgaaatcgaacctagcaaaaagatgtctgcggataaagtcatcacctgcaaacataccctgcgtgagaacccgccggatatcctgctgaccaactataagatgctggattacctgctgatgcgccccggcgatcagaaactctggcgttataaccagccagggtcactgcgttatctggtggtggatgaactgcatacgtttgatggtgcgcaggggtcggatctggcctgtctggtgcgccgcttaaagcatcatattggtgtcgatgacaagcgttttgcctgcgtggggacgtcggctaccgtaggtgacgaactgggacaactacacgattacgcaaaaacgatctttgatcagccatttggtgatgacgcggttatccgagaagatcgttacacggcggcagagtatctgcagggttataccattgagtacagtcagtatccgggccaggagaccagcgttgtgctggatccgcaagcgtacgccagcccggtagactatctgaacggacaaattccgctgtggttcccggatagttcactgcaattacctgccgatctggacagcgatctcggacgtgaaaagcgtattgagttgggctcattgttacgtcgccacagcatcctgcacgtactccttgaggatttgcaggggggaattttgtcggaacagcagtgcctggaaaatctccaggtgatgctggcagaaagcgccgggcatgcaacccgcgtgctgcaaagcattctggcactaattgcccaggcacgcctggaggttccagaaaaacaggacgatcgggaaaagcgcctacaggcgaataaagcacgtcccgttctgccttttgtgcaactacgttctcagctgtggttgcgcgagatgcgccgcctggttgccagcgtgtcaaaaacacctgagcttgtttttgctgatgatgtcgcggtggaagatcgcgaacattatcttcccgttattcactgtcgtgactgccatgctaccgggtgggcgagcctgcgccatggtcagagcgttcaactcgaaactgatctggacggtatttatcgtcagttcttcgaaaaaggccgttctattgtactggccttcccggataacaacgataaacctgtcagcggtgttcaccagaagctgtgcccttcctgtttaaagctcaataagcaatctaacgtgcagtgcgggcattgtggccatactggtctgctacaagtacttatcccggatatgctcaaagagcgtaaggatgagctggaatttgccaacgaatgcccgtactgcaacagcaaacagggtatttcgattcttgggtcacaggcagccagcctgtcggcggtgatgatccatcagctttatggcagccagttcaacgaacataaaaagctgattacgttttctgactcggtacaggatgccgcacaccgcgccagtttctttaccgcccgaacctggccgttgatggtacgcggacaaatcgccagcgtgttgggtgaaaaagaaacgttaccgttggatgcctttgcggcacgcgtctgccagcagacgcgtgaacgttcaccggatgatgctcattttaccgcgagcttcatcgcgcccaacatgcagtggatgaacgattaccagacgctgaagaacgaaggccagctggcagagagttccgatttaccggagctggtttctcttcgtctcgactgggaggtatacagcgaatttaccctacgcgcacgaattggacgtacgcttgaggccacgggttacgcagctgcaggaattgatattgcacgtttcaattcagcgataacggcgcttcaccaacagcttgtcgaagagctgggtgatgaaatggtgggggtcagcgttgagcaggtggcacacctggtgattggcgttctttggcatcagaggcaggcgggagctgttctgcatccggcgttcgaaagctatcggcgtgagggtaagacctttatgatgacgcagaaggagcgaacttcacgctatatgccgtctattggcccgaaaacgcgtaaacctgcctatgcatcatttgaaaaaataaatggtttccatcgcctgattggcgcgaaatccaaccccagctggtatcagcattggatcaaccgaacgctcagcaacggcaataatctgtttatcagcagcctggccgagacggttttacgacgtctgtttgcggcactgaaaatggccgggttggtaaaagattttgatacaaaaggcaaagaagcatgggggctagtaccttcggcgctggtggtgagccgcgatgttgttcagctaaactgctcttgctgtcgtgaggttgttcgggcaccggccgatcaggggtggcactggcgaaacgcaccatgcctttctctgcgctgcgagggacgctaccaggaagttgaaaatgcggtgacctggcactgggataatatggacatcgctcgtgttcagggggcagagcataccggattactgagccgtgaagatcgtgaggctacggaacaatcgttctaccgcggtaatcagccatggaatatcaacctgctttcggcaacaccgacgctggagatgggtatcgatgtgggtgacctttctacggtattactctgttctgttccacccgcgcaggctaattacttacagcgtattggtcgtgccgggcgtaaagacggcaatgcgcttaacattacggtggctgaggggaacccgcacgatcagttcttctttgaagaacctctggagatgatgcaagggcaggtacaggctccaggtgtgttcctgaatgcaacggctattttggagcgtcagctggccgcattctgcatggacaactgggtgaaaacaggtgttccggcatctgctatcagcaaaaacgtgaaacagatgctggacgagctggagtttggacacaagtctgggttcccttataacttcctgcgttatgttgatcagcatcatgcggatattgctcagcagttctcgtctatcttccctgaccttacggaagacacacgtctacagctcctgtcatatttgcaaggagcaccagggcaacgttctctggtgcaacgtattgaagaagcattaaaactgctggtggaggatcgcaaatcgttgcgcgcccggattgataagctcaagcgcagtatcgacaagctggagagcgatccgcacgatcaaaactttgacagcgatatgcgcgagttgacttcggaacgtcaggcgctgatggcgctggtgaaccagatcaataataagcaaacgcttaattttctcaccgatgaaggattacttcccaactatgccttcccggaggccggtattacgctgcgttctgtgctgtggcggcgcaaggacggtggggaaacgcgtgagtatcagaacacgacctacgaatacgaacgtccggcttcaacggcgctggctgagcttgccccgttgaataatttctatgcgggcgggcataaagttgaaatcgaacagattgatctgaaagtgtctgagcctgaaaactggcgtatttgcagccactgtaactacagcgagaatatcgatcagaccggcgatcagcataaatactgtccaaaatgcggcacaccaggttgggctgatgccgggcaaaaaacgacgttactgaagcttcgccaggtttatgcccgctcaagcgcccgtgacagccagatcagtgatgagagcgatagccgagaaccggcattcttccagcgacagctgctggtcagcttcgaaaaagaggatgtatcggccgcttatgccattgatgaaggcgaaatcccgtttggctttgagtttttgagcaaggtaaccctgcgggatatcaactttggcaaaatggcggatgacgccaatgagctgttgattgcaggagaggcaaagaaacgcaccgggtttaaagtttgcctcggttgcggcatggtgcagcggcctcgcgatcatgaacctcgtcatgacctgagctgtaaatatcgcgctgaacccgaaaaagcgaagtttgaagattatctctacctttatcgccaactggaatctgaggcattgcgtatcctgctaccagtgaccagctacagcaacgatcgcgtggtggaagcctccctgggtgcagccattcagcttgggcttaaacattacttcaaaggtaacgtggatcatctgaaaggcgtggtgtatcgcgagccggaaaatgagggcgaatcctggcgtcagtatctggtgatttacgacaccgtaccaggggggactggctcactcaaagaattgatgcgtacacctgacaaccttctgaaattacttgagctggcctacaaggcgctagtggaatgcagctgcaaccatgatacgcataaagacggctgctatcgctgtgtttacgcttaccgtgaccgcgggcgtatgaagtatgtatcaagagatcaggcgcgtctcttactggcgaaaatcctgaaggccagtgcttctatacgcgttattgattccatcaaaaacatttcgcttgatgccatgatggggagtgaactggaaaaacggttcattcactgcctgcaggataacaaaaatcttctcgtgagccggagttatgcccatcagaatgcaggctggattattaatacccgtacagaaccggcgatgagctggcatctcaaagcacaggttgatttaggggttaaagaaggagtaggcatccttagccgaccagattatgtgctctatcctctgatgcagtcagaaaagataaaaccggtagcaattttcctggatggttttgcttttcataaagatagcgtgtcggatgatgtccaaaaacggcaggcgattaaagacagcggtaatttttgggtatggacactgacctgggctgaccttcaagaacaaggcattaaacatgtacagaatgttatggggcttggccataatccggatatgaaacagcctaagttttataacctgttccatgatacaaactttgctacgcttgaaggttcattccgggagagaaacagttttgcactgctactcgattatctctctgatcccggtaataaaactatgctatggcagaaaatggccgctgcctttgcctgggtgtggctggatcctaaaaagtcgcaggataccggagccaaacaaaagtacgcctatgaaatgcaggagaacgctcccgcttatcggttgaatgcacttttgcctgatgaaccttttgtatttggtggtttactggatagctgtagttcatcacaactgttcattgagctggcagctgttgtaccgcaacaagccattaaatcaacgacaagcattgaacaaatgcgaaattggttgaggctgcatatttgctttgacgatcgttattcccaggataatggctatgaagccggatttaacggtttctggtggatggtgaatttactgcagttcctgccagatatgacatttaccagccgtaaagcggttcatttaccgcaggaggctgaaacggtaaaaatgcagacttcggtggtagtggatattcagcctgacgagagctgggcagaaatacttgagtttggcttattgggcgcagaagaaatcgctttgcttcagtcgttatcactatcggcaccgacggttggatatgaattgcaggatgacgatggcgaaattattgcagaagccgatctcgcctggccattacaaaagcaagccttgattattgataatcaggagtttactgctttattcgcaagtaagggttggcacgttgcattcgggccaattgacgaaaatacattgcagcatctgtccggaggtgacaaatga

SEQ ID NO: 82825 - DNA, 495 bp, Citrobacter koseri
atgcctgaaatgaatgaaagtgacctcagggcgttacagcatatcagtcaggcggagccatttttatccctgatcgacctgatgttttcaggcttacgccgacagagtagtcagactttggcagaatttcgtcaattctggcagtcgcgcggtcttacggaacttgatctgccacaaaaggcggctcagcttctggaaaatgatgtgctcctttcctcgctttccggtacgcccgccagacgttttcagcaactattagcactagcctgtatgccgtcgctggaagatcaggttcgaggcttgctggattatcatcacaagataatggagtcgagggggcagttcccgtggctcctgcttgaaggtgatgatattttgctgcaggtaccaccatgttcgctacgcgaagatcgtcagaatagcgcctgggtaaaccgttattatctaccacagttcagacatttgctgaacggtttatgggggcattctgcatga

SEQ ID NO: 82826 - DNA, 216 bp, Citrobacter koseri
gtggtggtcttctgtccattcgataacccagaagaaaccgaccaccgcttcgagttgcatcatacggttcatcagctttcggatatctcattcgagttgccggtgatcccgcaggaaaaacttagcggtatgatcctggtaaaacagatctgttcggagtgccagcaggcagggatagcgctctatcagtttgtcgatatggttgttcagaagtga

SEQ ID NO: 82827 - DNA, 207 bp, Citrobacter koseri
atgacagaacaaatttctttgcttgatgaccaactggtggatatgcggttcctcacgaagctaacgggacttacggataaatggttctataagctgattaaagatggtgacttccccaaaccagtcaaactggggcgcagttctcgctggttaaagagcgaagtagaaaactggcttcaggaacgcattaaccagtcccataaataa

SEQ ID NO: 82828 - DNA, 1128 bp, Citrobacter koseri
atgaaaaaagatatcacagtaactattgattcttcttcgtttcccaaaagtcaagtacagtactataacccgttacttactgttaacaaaattgatgtgaactgcatgctaattcacacagctctatggactcgcccccccaaacttactggctttcatttgtctgatttctgggcatggctaagatacttccctgccttttcgaaaacctcatctgacttgcgacttcgtaaagaatggaaagacatagatccccatcaaaaaaccattttaagtgatgaaataggggtcggttcaaccacgtatacattaatcaatacattaagttttcaggggttcattgatgcaatttacgtgttggaaacattaaaccttactcaccttcttttaaagaaatctaaaaacggtaaaggtaaaacacctgattatattggtttggataattttggaagggttattgctcttgaatgcaaaggaacacaaaataagataaaggatttgtacaaggctataacaaagggcatagagcagaaggaaaatttgacaaaaaaccctactggtccaataaagactgggttggttggtgggatatttattcctcagtttgacaatcctgaaagtgcattaatacatttccgagatccagactggaatgaatttaacgagattatttctgaggttgcccccgaggaactggctaaagccatcattcgtggggcggtgattaaacaattgtatctcgcaggtgcaaataattctgcgaacgagttgtcaaattatattaaaggtaacgattttgaattatctgcacaggcaactcaagaactaaaatcctttgagcgagaaataattgtgtttagtcataatttcaggaacccagttgaaggaggggtttcgaatataaagttcagcgcccaaatagataataaaatccttccccttattgaagggttaacctcaaatagtgccaaggcatctgtattaattaatgagctaagtgttacaaagaaaaattttgaccgacggcataatgatcgctcatggatttcatttgaaaatgattatagtggaatgattgtttctccacacggttttaagtttaaattaaattataaaatgaatgattag

SEQ ID NO: 82829 - DNA, 426 bp, Citrobacter koseri
atgttcggattctttaaaaagaaaaaacctgaagctgaaacccggcaagtttcccgactgacggcaaaacagtttatcgcgctgacgctgagtgatgaaaagctgtctatgcccgtatacctgccggggatccgcaatgaggcagaatgcgacgagctgggtttatggccgctcatctacatctggaatgtggatcatgccactggcactttcagcctttctgttaatggtaaggccattgcccacctcctggagccttttgtgacccgtgaagaccctgcgtatgtcgaaattcgtgatgaagcgatgcaggtcatctccgaggcttcaatgcagtccgtactggcaaccatagagaaaaccggcctcatgcccgatgttttgttcgtgtaccatgctgaggatgtacagcgggagaagggctaa

SEQ ID NO: 82830 - DNA, 243 bp, Citrobacter koseri
atgttcgtggaactcgtttatgacaaaaggaattttgatggtctgcccggtgcaaaagatatcattctgggcgaattgaccaagagggttcaccggattttccccgacgctgatgtccgggttaaaccgatgatgacattgccggcgatcaacactgacgccagcaagcacgagaaggaacagataagccgtactgtccaggaaatgtttgaagaggctgatatgtggctggtttcggattaa

SEQ ID NO: 82831 - DNA, 510 bp, Citrobacter koseri
atggagtgggtaaacgcgttgatgagccatttcgcgcttcatcctttcagcctgtggggcctgctttttggaatcgcattcgtaaaatctacgttcctcatttcagctgtattaccgccagcatctgttatgttggttgctgtaatttccgtcggcaaggcgactattacgccatgggaagcgggaattgctgtaatgattggcgcatggtgcgggacaattgttaattatcaccttggaatgatgatgggacatctaccctggctggcacgcatcatgtcgcgtcatgccgatacagtagtacgggttcgacgccggttgcaaaacagttctgtaccgatactttttacttcgcgctttattgccgtgctgcgttacattgtgccattagttgctggaatgttgcatcttcatccagtgaaagtgtatgcagtcagtctgatctctgcggcgacctggtcagcgctttatgtcggaggctttagtctcgttttgcctttttttagctaa

SEQ ID NO: 82832 - DNA, 153 bp, Citrobacter koseri
atgggttggaccgaagcggctgacttaattgttaaaggtatggaaggcgcgatcaacgccaagaccgtaacttacgatttcgaacgtctgatggatggcgctaacctgctgaaatgttcagagtttggtgacgcgatcatcgaaaacatgtaa

SEQ ID NO: 82833 - DNA, 1035 bp, Citrobacter koseri
atgagtttgttaaacaagcaggaacttgagatcattcaggccttttcgtccgcagatttgccggaacgtctctttcgtgacagcaacattaaagaattaatcagcggcatgacggaggagcagcaaacggttcagaagagcgcaaaggatcttgatcgcctgcgcagggaacagagggacggaaactttataactaactggtggaacgatcgcgacgatctgttacaggatacacagattgatctcaataaagctattggccgcctgacgcaaaaatcttctcagttattgattgtcaacacggcactatccaaactactgaaccagcaacaacagattttattgaaccagcaaaatattctggaaggtcagacacactcccttgctgaacaaaatgaacagatcctgaaacaacaggtgctgctggaagagcagcaaaaagagattaataaggccaaccaggggttgatggatgcaacaggagtaacgcaagatcaggctaagcaactagttggctgcgtaaaacgggtgacagaggcggaaaacaaaattggcgaggcaaacgcgaccttgctggccgaacttgaacagcgtgtcgcgaaattttcctcagattttgcacagcaattgcaaagtggcctagaggagcagggaaggcggcacaacattctcgaacaggcaatggaggataatcatgctgttcaacagggttgtgttgagacgatgctgcagtcgttatctcaggaacaacagttatctcatcagcaactgcttgccgaacttgagcgaagccgtcaggctttgcttgatgcggtaaaatcaaccgtaaaccagtgtgatgcgctccagcaagagttatccttcgtcgtgacgcagcacgtcgataggcaagtaagcattgagaatgctgttgctgcgttacaggtgaaatttctcaaatcccgatttcgtcaccgctttgcactgacgtcgatggcctgtgttcttgggctttctgttggctggcaaattgcgcagcactttttgatattctga

SEQ ID NO: 82834 - DNA, 1539 bp, Citrobacter koseri
atggatttaacatatgaagaattaaaacagcagcgtctgcaaaaactctttaacgattgccagcagcaagtgttgtcacaaattatcgggcctttcgggctttctacggccatgtttgaagatcgcaacggcggcaatgtgacaacgctgcataatttcgagcgcgaagagtcggatttcattgctgataaagacatgtccagtcatgcgaaatcgcgtcaggattaccagcgtaaagagtatgaaagtaaagattttacaaaaaaaagcgagaaactacgggccggcggtgttgatggttatacggggaaaacgaccaatgccgcggatatggatctcgaccatgtcacttcattaaatacattgtccaaaaataagaaagtgcatcttgctctggaaactggggaaagtgttgaaaaagtagtgaaaatggctaatgccgacgaaaatttggtgaccacacataagtcgattaaccgttctaaaggtgcaggtgagctggatacatttgcagaaaataatggtgaaagatttgagctggatccagagcgagtcgcaacagttaagaaacaatcggatgaccatatttcgacaacgcttaactcggcgctgatgaaaaaacagggcaaagagttgttgcagacaggcggccaacaggcgttacagatggggctgcgacaagcacttggtttgttgctcactgaactggtgaatggcctgtttaatgaattcaaagttctcattcaacacggcgttgaggtaagtaaaacgttgtttgaggagatccgccagcgcttaatgcggataattgcttccgtggtcaaaaaaatccccgatgcgttgggacaaatgttccagggcggtgtgagtggatttatgagtaatttgctcaccttcttgctgaataattttctctcaaccgcaaagcgttttgtgaccatgattcgggaaggactgttgggacttttccgggcgtttaaaatgattttcttcccgccggaacatatgacggcacagcaagcgttacaggaagggttgaaaatcctgactactgtcatcgtgacttcagtcggtatgttgttgaacgaaagcatcgcgacgtttatggcgacagtaccgtttctgaaaccatttgcagatatgttaacgccagtgcttattggtattgccaccgggttgctttctgcctttctcgcatatcagatagacacgttttttgatcgctcccgtttttcgccgagcgaaaaaatgatggatgagatgctagcagatagcaaacgtcgggaagcgtttgccagtgaactggtgactctttcagagagttcgctgggtaatattgaaaattacgcgaacgcagtaacccagtatcaagctattggggcaaacctagctaatgccacaatttctactacagcaacgctgacaagtcttgagaggacaactaatgagacggctgtgcaggtggcacggagtaccgctgcaattgcctttattaatgaaagccaggctgaaattgatgattttctgaaaaatatttga

SEQ ID NO: 82835 - DNA, 504 bp, Citrobacter koseri
atgaagcaactatgggataaactggaagccattctgcaagacaccgaccctgatttattagcggatcttgcccccccggccacggatgaggacatcgtcacgttagagcaggctctgggtgtgagtttacctgcagattttgttgccttcatgaaaattcacaatggtcagcacggtattagccacggactgtttgatgaatgtgagttcttatccacttcgcgcattttacaggagtggcacatctggaaagggttactcgatggtggtgattttgagggcgctgagtcgagtccgcaaagcggtattcgttcggaatggtggagtcccgcctggatcccgtttacctataatggggcgggcgatcatctttgccttgacctcgcgccgacagacgtcgggattcgcgggcagataatcacgctctggcatgatgatggcgcgcgtgaaaaacaagcggacagcttcattcagtggtttacgcagtatgtagagcaaatgtag

SEQ ID NO: 82836 - DNA, 1218 bp, Citrobacter koseri
atggaaaaattcattgcaattaaggttggtaaaggagacgcattttatttagaaaacatggggaataaaatcctcgttgatggtggagcgagtaggcgtaagttcccgcagcaattctcggacgcaaccgactgcatgaatgttgatataatcatatgtacacatggcgacgaagaccatgtaaatggattaatcggctattttgaaaaaaaatataaatgccgggaggtgtggttaccgggaagctggttatctcgtttagatgacatgagaaaaagaccggccgaattcattgatgaattgataaataatattaatgatttggatgatgaatttataatgaaaaatgcaaattcccttgaggccataggggatattatcgcgcaagaacaaggaaagtataaagggggtgagaacgactgcgatgatttcctctccttggcattaccttataaaaataaatacccaaatgacaaaaccgaacccttaaaaaaattaagcaatcgaaattttattgctcgcgcaattttatcactcaacgattctcccgaaaataataaattatcacctgtactacacatgaggaggaaaatatttgatgaaaaaagagaaaagatattcaatagtacgataaatgcggcagggaaaatattaaagttagcgtcacttgcatatgattcaggagccactataagatggtttgaatattctaaaagcaccgcatgtggtggagttaaatatctacaacctgtaaattccattgaaatattccaggcaaaaagaagagctgcattcgaatatctttgtttaaccaaagcgaatgtcgagagtttggttttttactcgtgtaatgaggatggtactgccggggtattactatgcgctgactcaaacttcttatttcaacaatcacttgcctttctcaaatgctgtaaaaatctgattgtaactgcacctcatcatggggctgaggcaaattcaggtgtgtatcaaaaacttaaactatttattaacgataatactatttttgtgagaagtgacacggctcaatccagtacaaaagcaaaccctcgcccttgtaaagcatataaaaatctacaacactctagattctgcaccatttgtttcgctaaaactttaaaacaggatgtagtattacactacaatgccaatagtggatggttgccgtatgaaacgaattcatgtgtatgttcctaa

SEQ ID NO: 82837 - DNA, 465 bp, Citrobacter koseri
atgaccaataacaaactaacaggcctcggcgtgggtcatccggccaacggcccgcttacgaccgagcggctgggccacgttagtgacgtgttacagcgtaatcttcaatactcaaatggcggaggtatggattacatcatcgctgatgctgtgaaagcgattgatgaattgctggaagtgcggaaggtggagccagtggcatggactgacgaagaggagttacgtgacgtgcgcagggtaggttttggtgaaatgttctcagttgaacctatttccccgaatgctgatatgtgtcgtgtgataccgctctacaccgccccgccagcgccggtggctgtgccgccagagcagcactgggaggaattgtgccgtcagcacccggacatgagcattggcgatgcaattatacgtgccgcctggtggaatcactgccgcgccgccatgcttcagggggataaatcgtga

SEQ ID NO: 82838 - DNA, 489 bp, Citrobacter koseri
atgaccactattaccagagagcaggcacaaaaaattattgaagcagccgacgaggtgattaccgcgctggccggaacaaatgaggatgtacaccatgaaagcgacaacatgctccgtctgtgggatgacctgaatgaccgttacgcaccaccagaagttgtacgagagctggcgcgtatcgcgctggcatcgctcgaagcggagcctgattacatcagttacgactgcggttgttgtggatgggaaacgatcgaagagtggcgagataacgatgtctgcccgaaatgcaatcataagccgatgggtaaaacggagttattttcagccccgccagcgccagacaacaaacagacggacgaacttgttatgttgataaagcgtttagcccactcactgaggaaagctaaccctgacggtaagttgcagaatgacgcaatggactatctgagtcgtaaaggattaatcagcgtgggggatgtattgcgatga

SEQ ID NO: 82839 - DNA, 327 bp, Citrobacter koseri
atgagcaacatcgacaaacgcgcattacgtgaagagttatcaaacccagcaatcgggggcaacgctcaccttcggaagttagcgctggcgctgctggatgagctggaatccgcagaggaacgctatgaggatatgctccgtcaggcccgctctttccgcgaggctcacgattctgcttcagaattaattcgcaaactggagcgcaataagccggttgtgaaactgccaacaactaaattgtgggctggcaaggtagcgtgttacgaagcatcagagattatcgcgctactttccgccgcaggcatccgcatcgacggggaggactaa

SEQ ID NO: 82840 - DNA, 495 bp, Citrobacter koseri
atgagcactggtatcgaactcatgctgcacgcgctgggtatcaacgagcgcaacaggacgccgtaccgcaactatttccttgctggagatggtcatacggacaactcgaagtggcaagcgcttgtcgctgatgggtttgccacttccaggcctgcgcctgatttcgcgggtggcggaacgctctatcacgtcaccgataaaggcgaagagttagcgattgctgcgttgccggagccgaagaaacgcactcgctacgatgaatatcttcactctgaagtgtgtgaatcattcggtgaatggcttggtattgagttgccggtctatgaagagcgtgagattgggcgttacaagtgggagtaccgcatggttcgtcgttcacgagcatattgggattcgtactgtgatgttcgtggtgagtggtgcacgacgaagaaagcagctaaagccagctacaaagaggcactgcgcaaatcaaaacaggaggccgcccaatga

SEQ ID NO: 82841 - DNA, 525 bp, Citrobacter koseri
atgccgactacacataacgtcactgggttacaaccaagaatgaccagagagcaactgatcgatgcagctcgtaccgctgccaagtatctgccggttgcctccgctcaactgatgaatgaaatagctacacgtctcgactacaccagcgtcgcgctttgtgaagcgatggaacagcgtaaatcactggcaattgaaaataccgttctccgtgaagacgtaacaagctgggctaaagaatgcgatcgcatcgtcgagcgctacacaaaaacacgtagcaacatgcacctactggaagcacagagagaactgcgcgacctgaccccagcgacctccgctttcctggatgaagtgcgcaacgaggctggtgctcgcgctgtggagctttttgctaaaacactcggtagtccatatagctttcgggatgaaatatgttacgaggatggattcgcaagagccatcgaagtagtccgcgacattcaggctccacgattcgcagcccagcttcgcaagggagcagcccaatga

SEQ ID NO: 82842 - DNA, 1020 bp, Citrobacter koseri
atgaaaaaatatgcgatatggaacaacaagggtggaacaggtaaaaccagcctttcttttcaagctatatgccgttatgcagaaacccggccactagaacgagtgcttgttattgatgtatgtccacaagcaaacctttctgagttatttttaggcggcttgataggaaatggaagtataaatttattaaccaggcatgatgttgcgaataggtgtacacttggcgggtacttccaaatgagattaccgaccccctatcaaaaacctgcttttgattcgcatgactatcttactcaccccaaggactttaacgagcacattcctagcaatatttcattagtttgtggtgatccattacttgaacttcaggctaatgcaatcaacacgttagcaaaccaacaaatacccggtacaaattcttgggtaagcattattgattggatcaacgatctattgcgcggacttgatggcgaatacgacgtacttttcgttgactgcaacccaagtttttcaatttatacgcagatagccttagcagcagtagagaaaattatactccctgtaatggcggatgattcctcacgaagagcaatacaaaacgcattctcgttgatttacggacttaagttgccatcggagatctacgcctcctatgcctttgctaacaaactcgtcagtgtgaatagaccgctgccgaaagtgcatatgatagcaaaaaaccgtcttactcaatatatgggtccagcgtcggcttatgctgccgttcttaattccattgatgatgatgttaaacagttgttaatcagcaatcctgagatttttgacttctcaagagttgatgatggtgtcgtgaatattaaggattttcaaacaacgggtgttgtagctttcgccaaaggatgccctttctcaatacttcctactggaagtgtcagagtaatgagccgcagggttaaggttaacggactgtacaaacaatcttgcctagaggcgatagacagaatggtggataagctttaa

SEQ ID NO: 82843 - DNA, 264 bp, Citrobacter koseri
atgtgtgacagcctggtatgcactctgcgagctttggtgtggtttgccattgaagtaaggggggggaaattgagagaagttctgtttttcatagtagtcactgttatctcaatcaccgccatcttcatttggattatattttttggcccaatgaggggccaggagaagacatacattcaggattcaacgacatttgccattgtagtcatggctatgctttttgctgcgtttgtagttgtgaccgtagtggtgctttttctttag

SEQ ID NO: 82844 - DNA, 276 bp, Citrobacter koseri
atgggaattgaaatgattatcggcctggccgcagtggtgattgccgctatcgttggtgcttttggtttcggtcatgcgcgcggcaccagtaaagcggaagccagagcagacaagcagcgcaccgaagagaatgccgcagcagctgtggcagcggcagaacgccgcgttgaaacgacaaaagaggccagcgatgtgcaagaagctgttaagcgtatgcctgatgacgacgttgatcgtgagctgcgcgacaactggacccgccccggtggtcgttga

SEQ ID NO: 82845 - DNA, 201 bp, Citrobacter koseri
atgttaacagtaaaagtgatgtcgcccggtggcggcgaagaaatccattgtgggttaagtgtcggctttaaccctaaccagcaaagtattgcagtcttgggaatggatcagaacgtgttcctgaaacagggtgaagttgcctatgtgatgaacgctaacggtaagaccatttcccgttacgaacacacagtgaatcagtag

SEQ ID NO: 82846 - DNA, 2325 bp, Citrobacter koseri
atgtctgataatgaaaagacggttcccactgaaggggtggattacggggactcgatggtggtgtggccatcaaaaggaaaactgcccggaggcaatccggctgacggatcaccgtttcctccttcatctcttggccccgggtggtctgactacggcatgggaggtgtcgcctctgtacagggacagaccgtgtggatgatcccacagaggctgacaattgatcagactgttgaggacggggactggcccggatggagcatgatgatttatcaggggacgtgggaacagcatcctgtttcagccgccctcaatgctctggacaaagggcttaaatctggactccccgacccgtccagacctgccgtgatcccgttcgcccgtcttgaccccggttcggtgaaagagaaaggtatatcccgggcggtgactttccttccactgaatgccgtgaccgacgttccggcaggtaagctgcctgcaaaaggagggaaagtgaacgtcagacgccgagtgacggatatggtgaaaggggggaaacagtatctggttctcatggggggaaagatcatgacggttccggtggtggatgctaaaccagtaaaggacagggcacctggcactaaccgtttcctgaaaggggtctatcaggcttctgttgcccccggtctgcctgatatgtcttttgtcaaaaaccgtcataaagataaaaaactccagggtctcccgtataactataagccaaatacggatggagtgttcctagagcagggagcctatggtgcatccggttttaccgccgccagccataaccgggatgtgatagtccgttttccggcagaaagtggtgtgagtccactgtatgtttcgacggtggagttcatgggcagtgatgaactgaaacagcgccagaatgcagaaaacaaagcgaaggctgatattgctgcaaaggccaaggctgccgcagatgccaaggcaaaagctgatgctgccgcaaaagccaaagcagccgcagaagccaaagcaaaagctgatgccgcagcaaaggccaaggcagccgcagaagccaaagcgaaagctgatgccgcagcaaaggccagggcagaactgtttgcaaaagccggagtgaaaccggcaccaacatacacagcgcaaatggtgacaggtgcgaataatgccatgaaagcacccggtgcaatggtgctgaaccagagtccgggtactgtgcagatggcgctggcaggcgcagggagcctgacgctttccggtgcagcagaaaaaagcattctgaacaccatactgaacagcgtgaagaccctggggaaagcggtccccggcgggtatgtgatttctgccatatttcacagcccgaaagctggtgaaggcagtgataaagtgccgggacgtgacctggaagccatgtttgcgcttaacgcacagcatatcgcgggtcagggtgtgaaaattgagcctggtgcgaaaagcgtaaacctgccggtgcgcggacaactggttatcagtaacgggcaactggcgatgcagttgctgaaaacaggaaacagcagcatcccggcggcagtaccagtgctgaatgcggtgcgtgatgcagccaccgggctggataaaatcacggtaccggcagtagcgggggcgcctgcacgaaccattctggttaatccggcaccagctccgtctaaaccatcaaataccggtaatcagaaacctgtaccagtgacgccagttcataccggaacagagataaaaccagtggaaacgctggtgacaacgaccactccggctgtggatgctggcggactgcgggactttatctactggcgaccggatgcagcaggtactggcgtggaaccggtgtacgtaatgttgagtggcccttatggtgaaacaaacgctaagggcaaatacagcggacgtgagtataatacggacaaagctggtggtcctattcagaaccttgactggaaaacagcaaccattgaccgtgcgggcgtggacaaagtgaaactgcacactagtcggtttggtgaatctcctgaaaacaaggtgatgattgaccgtcttgagaagatccttaaaggagagttgcaagccactgatacagataaacgcttttacacccatgaaatcagagagcttgagcgttatcgaaatctggggattaaggatggtattatacctgaaaattatgatgaggtttggaataacacccacacagcaactctagaagattataaaattaatgaaaaaactcaacctttgtatacgcctgaagcagaagaagcgtatcgcaaagcagaggagggaaaataa

SEQ ID NO: 82847 - DNA, 1182 bp, Citrobacter koseri
atgaagggtatgcagaagatcaaaaggggtaagagcttcgctggtgtcgttcaatatgcattgaagccgggagcacatcataaaagcgatccagccgtaatcgggggcaatatgctgggtggctccgctcttgaactgatcgctgaatttgatggcactaaacagcttcggccagatatccagaaaccggtatggcacaactcgcttcgcctgcctagtggagaatcactaacggctgaacaatggtccagcatcgcagatgactatatgaaacgaatgggattcagtgatacccatctccgttgctatgtcttacatgacgacgaaggccagcatatacacattatcgccagcagaatcgacatagccggtgggaagctctacttaggtaggaacgaaaatcttataagcacacggatcatcagtgaacttgaaatcactcataacctgacagtgaccatgacagcaccaaagcaaccgaagcgaagaaaggtttcccgcaatgaacagatgctttcagaacggactggccttccttcccccaaagaagctctccaacagatacttgataaaagtttggcagatacacctgaccttttaaccttcacaaaacgactggaagaagccgaagtatcttggacggctaacattgcttctaccgggaaaatgaacgggttctcattctcctaccgcgatatagctttcaaagcttcgcagttaggcaagggttactcctgggcaaatcttcaaaagcaacttaactacaaccctgatcacttagaagctatacgagcgaccaaggaggctatccctgctcctgctcctgctcctgctcctgctcctgctcctgctcctgctcctgctcctgctcctgctcctgctcctgctcctgcaacagttttgaaaaccgctgagagaaaggaaagtatcggtaaaaaaattgcagaactcgaactacgactcaaagaagacagaagaaacgaaatcgtagaaaagattcttcaaaaaaactcagtacaacagcaaaaacatctcaggcttatcggctggattccatttctcagaaggctcgcagagcttctcagaagctatgggaagtccattcttcacaaaacccacacacacttctcaaaaattcatgtaatccaacctttaaacaaggcgagaaaaattcgtttatag

SEQ ID NO: 82848 - DNA, 1539 bp, Citrobacter koseri
atgtgtataagagacagatatataacaaacgaagggagaatcgttgttagaaaaactgcttacttagaaggaagttttgagtatcgtggttatattgaaaacccaagagaagaatggctacaggagtcaaatgctagcgcatacacaaatagagagttggcaagtagtctccctctctactcttatcttcctcaaaatggtcgaattacaaaacaaaatataatcgatgcacaggttgcgtatattgaacaaaatagagatgatgtagtttttatcttcgaattagaatccacaaattttttaggtttaaaatccgttgcgacggggatttttggggaggtttattttataccagcggtaaaagaggcatctgacgattttgtttcaaaagactcaagtgttttcggtaaaatgtatgctgatgttgtctctttaatgtcccaaaataatgataaatggaaggcaacaaaagaaaacctttgtgaccttttcgccacattaaacaagaaaggtaaagatggtaaagataatcaagatcggccaaaacaactttcagatttcgaagatgaattagcattagagctggtagcatggggggctagaattgatattgaagtgagccctccagatatagaaaatgtatttaagtctaacacccaagtttgggttgatgatggagtaagaacagatataaagagaaaaggtcatggattacagagagcactaacagttgctttgatacaagtgatttcaaaaagagcaattgcagttgcagcaaaagatactggcgaaaacgaaagtacgaggaaggtatcaaattcgagatattttatttttgaagaacctgagttatatcttcaccctcaagcccaaagagccttattcgactcatttgtaaatctatcagagtctgggaatcaagtaatattatgtacacactcaagcggcctcattgatgttgagcgctataagtctatatacatagcaaaaaaaagaatcggttcagatgaaacaactgtctggcagtgtactgatgagctctttgaaggtgatgcaaaaaaagatttcaatctatcatattggattaacccagatcgtggtgagcttttcttcgctagtaaagttattcttcttgaaggagcaaccgagaaaatcatttttccattgttagcaaaaaaacttgatgtcttcaaatatgattacactcttatcgattgtggatctaaagacaatattcccctatacattaaactattgaataagtttaaaataccatatgtggcagtttatgataaagatcatcaaaacggaaaaagtgcagacgctatagcatccgcagatacatcaaccaaaaaaattgacgaggcaattaatacagaaataggttcatccattatattagtaaatgatattgaggaagaattaggtttacccaaaggcggtagcaataagccttatgtcgcattgagtcatattacttcggttgacttttcaatgaataatggaattgaaagtaaaattcgaaccgtgtatagataa

SEQ ID NO: 82849 - DNA, 285 bp, Citrobacter koseri
atgacaaaaaaatcgatcaaacaacaaattgctgcagcacaggaacgtctatacttcttggaagccaaaaagaaacaacaaacaaaaaaagagaatactcgtcagaaaattattttcggtgcagaggttgctaaagtcttaggatgtgatattggttatgtagataaggaattggtctttgggtatttacttaacatacacaatcttcatgagaatgatgttcaggtttatagagcacagggtcaaacctatatcgaaagtgttataaataaatccaagtcctaa

SEQ ID NO: 82850 - DNA, 783 bp, Citrobacter koseri
atgattaaagaaatggaagttgacttggatttgggcttaaacccattttgctttgagacagaactaaagattgagacaagaaagaaaaatctgactgtttcaaggggaactgaacttatcgaaagaaaagatgctagtcgaagctactttgctaatattgtgcatacacaagaggttgataaagaagagttcatcaaactctatacatcacaaataaaagcctactttgatctcacgaaaacagcatacaaagtattttttatctttttacgtatttatcaggatgcgataggtaaagatcatttttacctgagctgtaaaaaggcaatgtctcttgcggaaaagatagatcattttgtcttatctgaatctatcttttaccgggggataaaggaactaatcgagaaacgtattattgctaaaactaatgaaaaaaactggtatttcataaaccctgcaattgttttcaacggtgatagggctcgctttgtttctgagattagaaaaaagaaagaaacgatagagattgaacgagatgaaagcgttactcatagcggaggagactatactaaaaatgaagataagcgtaggtctattgagtcagccattcaagatgtaaatagtcaagaagacatcgatgtgttaatcgccagattacaggctaaaaagtctcaaggggcaatgaatcgcaaaggtataaaaaagcagaaccttgtggatagtgtaacccttgctgcaccagaagaaccattagattgggatgaaattgatggtgatgaataa

SEQ ID NO: 82851 - DNA, 615 bp, Citrobacter koseri
ttgcatgttttgaccaatggacgaaagtttgcagatgtcagttttactcaacagatgaaagagcgaagcgaaaagctcaaaataactttcggtattccgctttattcttcaaggtcgtcagttcatgactatctggttggaagcgaaggggcatttgatgagacagttatggggcttatcaatgccggtaactcagggatcaacattgagttaagaatcattccgacactggctaactatatggaactggacaaaatcatagagttcgctggtcgcgtgttttccaatatcaaccagatttctcttatgggcttagaatctatcggctgggcacgtaaaaactggtcatcaatcttcattgagcatgatagctatagtgagaaaattctctctgccataggaacagcacaaaggtcaggcatcaccctaacaatcttcaattacccattgtgccatcttcctgaaagagcttggggatttgctactcagtcaatttctgactggaaaaattactaccccaaagaatgtgatgaatgtactcagaagtcttcctgtgctggttatttcagttcatcaaaaggccgttttcatcaaccaccgagaccaattttatga

SEQ ID NO: 82852 - DNA, 1074 bp, Citrobacter koseri
atgaaactcatgccttttaacttcgacaggatgcctgacggccgggtattcatcagtaacctcgctggctttcatcattttttaggagcgcaggaatttctcgatctggtaaacggtcacatcagtcaagaacagtcctcatcgcttgaaagcaaacttttcatttgcggagatgaatcttcctccgttaccccttatgcactaagttcggcttttgccaaacgactcatgaatgaactggcgatcaggccaatcttcatgattgtacctactcttcggtgtgatcatacttgcaaatattgccaggtcagtagggcatcggtcaccgctgatggttatgacctcaatcctgaactgataccgcaaattgtcagcaccattaagaaactaggtacacctccctacaagatagaagtacagggcggtgaaccacttctcaggttcgatcttgttcagtcaatctatcacgagtgtgagatttcattgggtagtgatgcttttgaaatggtgattgctacaagtctgtcattactcgatgaaagcattctctcatgggttaaagagcggaatatcaccttctcggtctcgctcgatgggattgaagctgtccataacaagaatcgcatccttactgactttcaagctcataacaaagcagtaactggtattcggaaaatcacagaagaacttggcgcaaaccgggtagctacggttaccacagttactaaggagctgactaaagagccagcttccatagtagatgctcatttgtctctgggtcttacagacatgtttatcaggcctgttagtccttatgggtttgctcagaagcagagcttcactttttcaatgccagagtattttgctttttataaagagttgatgcaggaagtgttgattcagaatgaaaagggaatacctgtcattgagcactcggctgctattcatctcaagcgaattttcaatccaggcttcagtggttatgcagatctaaaatcgccaagcggagttgtgctgaactgcatcctgttcaattatgacggtaaagtctacggtagtattcgttgctactga

SEQ ID NO: 82853 - DNA, 723 bp, Citrobacter koseri
atgcaacgtgttcatcgcgccaagtggaacagtaaacacgttcaggaaaaacgcgctgctgaacaggccgtacgtgatgagatgaaacaggaagctcagactacttacaacaccttcaaagagttggatctgcagatcgttgttgatctcagaagcttcaccgtttcagaaatgcctgagcctgttgaaatcgtattgcctgaaacaagttcgcaatcggcatcatcggaaggccaaaaacctgctttggttgcccctacgcctcacactctcactaaattgaaaacctcatcctcttcaaccgccagagcaatcaaacgcgctactgttaaaagtaagagaaagcaggttaaacctcgtcagcgtggcgtattcaagcgtttcacgctattggtaataggatatataaaagagaaattcgtctgggccaagaaggagcctgtcgctcctgatgttgagcacgataagcgtgttgctgaaaactacgtgtttgatgaggtgcaggggatctatattccacgtgctgagcatgaaaggcgtgcaaggtttaacagcgatgattacaaggcaacaccagacgaaatcacccgctttccaagccgtccacagcgcgaacaatctatagctgattgtagttttgatctgaaaccacctataccaatagatcaaatgagtaagcgtagttcgctgaagctgagacctccgggttatagagataaataa

SEQ ID NO: 82854 - DNA, 276 bp, Citrobacter koseri
atgaagcaaaataaaatccagtgtcctttctgcttaaaggaaagccagcatggtgttcaggtatgcacaagctgtatggcgactgttctgtatggagcctatccgcagtggtatgcatttgttgttatccttctttcctttggcctatcagttctgattggtatgtctacaggcatggctggggctactatcagtttgccgattattggcattgtcgggtttgtctctgggaaggtgattttctctgataatgttgtatttaggcgcaggatgtaa

SEQ ID NO: 82855 - DNA, 213 bp, Citrobacter koseri
atggttaatagaatgagatctattgtgagaacggcgacagacgaatctggtaagttcaggactggtgtcttagaagcggcccttgcccactcgaagaaagatgaaataattgcagcttacaatcgcccggaatatctggcagaacgagtgattctcatgcagtggtggagtgattatgtcattgctcaaaaatttaaagctattgcggcataa

SEQ ID NO: 82856 - DNA, 168 bp, Citrobacter koseri
atgttgaaattcgtgataatccagtcatatattaataaattactgggtaactctaaagttcttcattggttcttggaaaacgaggttgattatcttaatgagttaaaaagaatttcgaaaattaattctttagatgagaagactcttgctgaaaacagccagtcatag

SEQ ID NO: 82857 - DNA, 759 bp, Citrobacter koseri
atgaaaaccttaagtgggaaagagtttagacaattatttaatcgttataatataggattctatctaagtgagtttgaatacttaaaggactttgatcctttgtttcctgtatgcgtagggaaagaattaaagttgggttataaacgaaaagttgatgtatggtgcgaagaggatgctgcgctatatgcagaatttatagctaaaaaagaaaggctgaaaagagaccggttaatcctgaaagtaaaccaagtgtggtcgcgtgtatatcctgcttatatttatgcaattgaagaaagaataaatgtcagggcaaagggtagagagttatttaagaatgaaactgtgcaagaaaaacaatgtaaactttccataatgttagatagtctgaaagaccttgaatgtgaagttgctacgatttcaagtgaatttgatattgaaaaaacctctatgcactatttttatatgatttctgatgttgaacgctatataaatgactgcagttactttgtttattctgctgctgaagttgttaaaggtgtgattcaatgcattggttacattgacaaaaataacaaagcaagttgcgatgaattttattcaggcagctatgaatgcttggatgatgatcaggaaactctgaactatttaaatgaatcatgcgcagagggtatagacgctgataaaaatctcatcagggagaatgagttattagccttatccctgaaggaattgtatcaacttctcgtttcaaaaaaataa

SEQ ID NO: 82858 - DNA, 324 bp, Citrobacter koseri
atgaaaactctaccagcaacaacttcacaggcggtaaagtcctgctcgtcatccgtggttgtctggcaaatgctactgacacgcctgctggaacaacactatggcctgaccctaaaggacacgccgttcagtgatgaaactgtgattaaggaacatattgatgccgggattatcctggccgatgcagtcaacttcctggtggaaaagtacgaactggttcgtatcgatcgcagagggtttagctggcaagaacaaacgccatatctcacgattattgatatcatgagggcccgccgcgatctgggtttattaaatcgtaattag

SEQ ID NO: 82859 - DNA, 654 bp, Citrobacter koseri
gtgaaaaagcacgaaggcatatcaaaatacaagctgaataaaatagctgtagagtctttgagaaatagtatccgtctgcattttgactcaatgttgctctatgagaacggttcgtatccaagtgcatttcagctttcagtcttggcgcttgaagagttctcaaaagccatttgggtagatcactacatttggtcatctgaaactaatgagggctatccagatgttcagtttgagcaggcatggttaaaacttttatacctacatcccaaaaaacagtggaactttgtagcaagagaaatagatgattattctccgggttttatttcactgatacagagaagggaattagaagagaaaaagcagaatgctatatatgttggtttgtctcgtatgaaaggcggtgttgatatagatagccgagtctctaccccttggagaattaaacaaaaagatgccagacagtttatatcagtgatcaatgatgaattactaaggatagttgcgagaattgaggaggatgagttttatttcgagggaggcaaagggatggatgaggtgtttgattacgaaatatataaaaatcttttgcaatggcctcataaaagcggaatgagaaataacaggtggaggaagaaaaaccatctacaaaaataa

SEQ ID NO: 82860 - DNA, 528 bp, Citrobacter koseri
atgagaattccaactagtcgtaaccccaggttgatgtcgagcctcaatccaaacctgacgagcagtatcaatcctcaactaactagcagcattaacccaaagctgacgtcaagcatcaaccccaaactgacctcaagtatcaatcctgcgcttacatctagcataaaccccaagttggccagttcaatcaactacaagctcacgtcgagcaggaatccaaatctcacttcaagcatcaatcctaagctaacttcatcgatcaacccaaatatatcgtctaatattcctggattatatttatttgatctagcactaaatgcggtagggtttacagtgtcgccaactccgaactattggttgttattcgatccactctgtcaatttactggtgttgctgttaattgtcggaagaattttttcattgaatttgatctggataataattttgttggattctttgttcacgccaaagatcaaagctggttgcggttcaatataaataacgactggatggggctgaccacataa

SEQ ID NO: 82861 - DNA, 1776 bp, Citrobacter koseri
atgagtatcatcgtaggtgaggtcattgcagtgagtggagtacgtatctcccttcgaatttttgaagactctaatcatgagacaatttactacggaggagttaagtacagaggtatttcacttcgggagcacgtatcgattcagcgaggctttatagatattgtctgtcttgttgaaggtgaatttttggatgagaaaaggctagagacagatgccgagaagatccaatacgtacgaaaagtggatgttcgcccaattggttatatagtggatgataagttttttgaaggtgttaagtacatgccgatgatcagagacaaggcatctctactcagcgaatttatggtaggaaaaatttatggagcggacggacaaacaggcttttctattggctctatgcttaaggagaatgtacccatcaacctcccatggatgcgattattcaacagccatttgggcatatttggtaacactgggagtggtaaatctaatacgctagctaaactttatactacactttttaatgagcggctccaagcattacaaaacaagagccagtttgttatcatagattttaatggtgaatacacggaagatcagctactaccagccaagaataagcaaatcacagtgctggattctaaaaaatcaaagcacaaattcaagatcgaaggcgctcatttttgggatgtcgaaaccctaagtctcctatttcaggcaactacgaacacacaacagccatttctgcgtcgcgtcctatctggtaaggaaaaatttaaaactacgccactcaaaaggtatgtagaaaaggtttttgaaaaagtttttagtacaggtgaagcgaaatcagatgctttggacctgagccgtgaaattgcacgcatgattgactgcgaattgcttcaagagcatttgaaaggaattatttattacaataaagataagtattttaagcatgccagcggcacgtactataattcaaatggcaatggatttgacgcgaacatcaaacctattcttgatgagaatgttaatttagatggaattgatcaattcgacgaactaatcttgaggtgctatctccagctctgttcagatgttgtatttggctatgctcaatacgaacacattcaaccggtgctagccagggccaaatcatctatatcagctctgcgtaatgttcttgaaatcgttgatgtgccacaaccaccgcatctcttacatgtcatctctttaaagaaatgcaagaatgagataaaaaagattttgccactgcttgtagccaaaaatttctacacaaaccataaggatgcagagactcttaagagccctccaagccggactcttcaccttatcattgatgaggcacacaatattttgtcagagcagtccacccgtgagcatgaaatctggaaagactatcggcttgaactctttgaagaaataattaaggagggacgcaagtatggcgtatacctcacactatctagtcagcggcctgcggacatttcacctactattgtttcccagattcacaatttcttcatacaccgattggttaacgatcgcgaccttatgctgctagataatactattagcacgttagattccagttctaaggctctcataccgactctagccaagggctgctgcgtagtcactggaaccgcttttgatcttccaatgatattgaaaattgacccgctcttgaaacagcatcggcccagcagcgacgatgtgaaccttgaagaactttgggcgctacctctagcttaa

SEQ ID NO: 82862 - DNA, 1149 bp, Citrobacter koseri
atgtttgaggcgatccagccactggatatatacaataagaacatcaacatactgattggttcaggcgcttcagcagacttgttcccgacgctgtccctagccatcaagaatgcagatggacgacgagaaacgatcgagacgctcgccacacagtttgaaaactcgccagagaagcgaaccgctttattcatgcactactacaacacatgtatttttccagtgcagacattcaatccaagttccgttacatcggataaaggaaaagaaaacctcaagaattatgaggtttttttgacaacccttttggggttgttggatagaaggaaagatctcaaccgcaaaatcaatatttttaccaccaactatgatggatgtctgtcccatacagctgacagccttctcatgaagggctcacatgattttgtggtgaatgatggtacctccggttttcatacgaagcatcttcattccaaaaacttcagtacgtttcaatgtcaaactggagtatttgaacgaagcaactatggcatcccacagctaaacattatccaccttcacggttcggtttactggtcaaaaagcggtgataagattgaagtcaattaccgcaatgattttagtaaccttttgacagaagagacactcggaaatttgaatggatattccgaatttctaggtgccgatggcaacagaaccgaaggcattccatccttggcattcagtcaagatcagatagatattttctggggggagtacaataagctacctattgtcaaccccactaagtggaagttttacgaaactgtcttcgaagaacactactaccaaatgctcaggctattaagctatgagcttgaaaaaccaaattctatcctcatcacatttggcttttcgtttgctgatgaacacattctcaggcttatccaacgctccctctccaacccacaacttcatacttttatttgctgttatagcaacaatagtgcaaatagcatgcgggaagagttcaaatcttggaaaaacgtccaagtaattggacccgctgaagatatgaatatggacttcaccaatttcaataaatatgttttctcactcaagccagacacttatgaacctcaattaaaagctgaagaggaggatctgatatga

SEQ ID NO: 82863 - DNA, 687 bp, Citrobacter koseri
atgactgagcgcggaatgatttttaatgccgaaatggtgcgcgccattctcgacggccggaagacgcagacgcgacgtgtagttaaaggagtggaaggtgccgatagctttacaccagagtgggatattaacggcgaacagatttttgttgtttgcggtgaaaaagatcacacccaaatgaatcccgtgctgggtgccatttcctgtccgttcggtgccgtcggcgaccgcatctgggtgcgcgagacgttccaggggccgcttgtttctgaggaattattcgaggaataccgagcctatcctgaaaagttcgaaacgccgcaatactgcgaatatgccgccgatggtggtgccaggcctgaatactgtgatcttgacgataacctccgtcatggctggcgcccatccatacacatgccgcgctgggcatcccgtattctgctggaaatcaccagcgtacgcgtggagcggttgaacgatatcagccaggaagatgcgcaggctgaaggcatggagcttaccggatggaagtccacttactcagatcctgatagcggcggcgaagttttgacgccatacgacaactttgcagagttatggcaatccatttacagcgtcggatcttggctgtccaatccctgggtgtgggttatcgagttcaaacggattgaggagcgcgaagcatga

SEQ ID NO: 82864 - DNA, 411 bp, Citrobacter koseri
atgagctatagtgacatcgttgcaactattgcaatgattgtatccatcacagcagttcctgcaagtggttactttagctacaggtacgcaatcaaaggtgaaaagcgtaaagagttcaatgcaataagcgatataataaggctgaagttaagagatcaattgcgtttgatagattatggcgtgtttcctagtggtgacaatgtatcgatatctcagcgagagattgacacattcattgatgtcagcagcatcaggaacaaaaaacatcttttggtgatctggagtgactatcagtacgcgctgcaaaatagcattgatgccagtgacccgctaaaagatcctgacttccataacccttcaatgattcaatccgcgattgaaaaaatattgccgtattgtcagcgtcagtag

SEQ ID NO: 82865 - DNA, 198 bp, Citrobacter koseri
atggcgactttaaccgcagcagacactgaggcgctaaacaatcttccttccgggtggttcagggctgagcatcttccatttaaccgtcccatgtatcgctgcgaacggcttgaacagcgcgggaaattgcagcgccgggtgttgggtacttacccaaatatctggtccgaatacaaacgcattgatggtgaggactaa

SEQ ID NO: 82866 - DNA, 480 bp, Citrobacter koseri
atgaccactattaccaataacaaactaacaggcctcggcgagaatcatccggccaacggcccgcttacgaccgagcgccttactcacgttcgcgacgtgttacatcgcaatctcaaatactcaaatggcggaagtatggattacatcatcgctgacgctgtgaaagctattgatgaattgcttgaggcgaggaaggcggagccaatggcgtggttatggaccaacgaacagcttgataagcagagcgtttcactaaccgatccggccgatgaagaaaacactcaggatgcaatggcgtgtggctggaagcatcagcctctctacacagccccgccagcgccggtggggccattgaccgatgaacagatcgacgatgtgctcgattctcgcggcaatattttatacgtcattgccgacaaaagggagcgcctgcgtatgtttgcgcgtgaaatcctccgcgctgcaatgggggtgaaatag

SEQ ID NO: 82867 - DNA, 573 bp, Citrobacter koseri
gtggcagaacaaatcattctcgatatgtgctgcggtcctcgcatgttctggtttgataaagaagatcctcgtgccgtttttactgacatccgggcagagcaacacacattatgcgatggtcggcgactggttatcagtcctgaccttattgcagattttcgtgcgttgccatttgaggactcatcgttttctgtagttgtattcgatcccccacatcttgagcgagcagggccgaacggctggcagggtaaaaaatacggcaagttgaataaggatacttggcccaacgatcttcgggctggttttagagaagcgttccgagtgctgcgtccacatggtgttttaatttttaagtggaacgaagtgcagatcccggtgcgtgaaattctggcgcttactgatgagaaacctgttatctcccagcgcaccgggaagaatgacaaaacccactggatattgtttgttaaagggggcgaacgcgcgcgatctgttgacccattactggagtacgcaactaagcgaattctggagctggaaaacctgctgctggtggacgttgaggaaacggtctga

SEQ ID NO: 82868 - DNA, 870 bp, Citrobacter koseri
atgatacagtggccagactccttaatcgatgaactagctgcccgtagatgcgttatatttttaggttcgggagcatcggcaccagcagtcaaacagattggaaataaattattgcatcctccaacttgggcagggttgctcaaaatcttattagaaaaatgcccgaatgatacccaaggttctaaagagaacgctagcactttgttggaaaaaggaaattatctagattgcgcagaaataattaggaaaacatgtcttccaaccgcagagtacaatcgttgtattactcaaacattttcaggatatgaggcaacagatattcataaagcagtcgaaatattagaccaaaaagttgtaatcactacaaacttcgattgtctatatgaaaatcattgtcgccaaggcgatggccgagatggttatgccattttaagatattatgatggtggattaatagctcgcatgagatcgccgacacgattgataattaaggcgcatggatgtaccagtgaaccagaaagaacgattttaactaaatctgatttcttcaatgcgcgtagtgatcacaagggatttttcgacgccttagaaagtatattcctgactcacacaatactatttattgggtatagcattaacgatccagaaatacaactaatcttagagaacaacataattacttatccaagttcaaaccctcactatgctacaatgcctcaaggttctcattcatcaatattatctgcattcaagaatacaaataatatagatatattagaatatgacagttctaataatcatgctgagttattagaatgcttaagcatgctatgcgctcaagtagaagaaagacgatcaatcggagtctaa

SEQ ID NO: 82869 - DNA, 1038 bp, Citrobacter koseri
ttgaaatcagtggctatgtttaataacaaaggtggtgtgggcaagactactttgacttgcaatcttgcctcatttattgcaatgaatttcaataaacgagtgttggtcgttgattgtgacccacaatgcaactcgacacaacttataatgggggttgagcaatcagctgagttatatatatcgccaaataatcaaatcagtacgattaaagatgtactacaacctatcgaagatggcgattcaaccataaatactcaattaacattccttaagtcaagtgagaatcgattcggtgtcgatttattacccgggcacccttattttgccataattgaagatagactcggtgccgcctgggggcaactcagagccagagatcgacaaggttttaggcaaacaaactggaatactttactttgcaattatctagaaggtaaatatgacttagtaatgtttgacttaggtccaagccttgggtcgattaacaggtctgttttgatggggtgtcagcacttcttaacaccgctgggctctgatgtatttagtataattggcgtgaaaaatatatcagcatggctaaacaattggattgatgactatcatcattcttggtccgcattatctacagatgagaaaaatgatttacaaacaagattttctgtccttgatgccccaagaataaaaaaagggtttattggttatactgttcaactttatataacaaaatcgtatggtaaagaacgaagagcgaccaaagcttatgaagcgattatcggtgatgttgacaatgaaataaaagattccttaaaggatttttattgtgacaacttgctccgctcaccagagaaatcaaaacttggcgatatccaacatttatacagtctcgttccattagcacagaaacaatctgtgccgattcatgcactcacgagtagtgatgggctagttggctcacaattttctgcagtcagagagttttcgaataaaataagaccaattgccgaaaacctacttagaaatcttgggatgcaattttaa

SEQ ID NO: 82870 - DNA, 1086 bp, Citrobacter koseri
atgactaaagcagaactcccattaaaaacagagcgactacacacagtagccccgtacattgggaagatgcgacccgaaattgcaggttgggctattgacaccgtatccaaacccggcgatttggtatatgacccattctgcgggtctggcactgtacttcttgaagcatggctcaaagggcgagatactgttggtacagatttaaatccttatgcatgcttggtatctcgtgccaaacttaatccatataaacctcacagtgttgagaccgttaccgaactattggataactacactgcgtcggtagatttgataaaaccatcgatcaaacttgatgacatccctgattgggtaaaggaattttataacccacaaactttggttgaattattgtcttgggttaaagtattgaaagcaactaacgatgaattcgctctggcttgcttgctttccattgctcaccatcaacggccaggttttctttcatacccatcaagtcatacagtgccttatctcaggacaaagaagtttccccctagtgaatttcctgagctttatgaatacagaccagtgcgtccacgactcgaaaagaaaattttacgtgtatacaattcattaccttcagttgatttttcattagccagaaatgtataccaacaggatgcttcgacattgagtttagatcgtaaggttgatgcaatcatcactagtcctccatatatgggacaactcgattatgctcgtgataatagattaagactgtacctcatgggagttgaggagtggtctgtacttaataaaactatatcgccaagtgctacgaggtttgtcgaacaatttagcttatgtctcaattcatggcgtaacaatttgcgccatggagggaaattagcaatttttgtaggcacaacaacaaacagcacaaaaaggagactagatgatattgttattaatttgattaatgacaaatggcctgactatgaactgaccgatagtatttcaagcgagatacctgaagcccgacgcgccagaaaaaactgcaaaggaagtgttgctgaatctctattaatatttgagtataaataa

SEQ ID NO: 82871 - DNA, 261 bp, Citrobacter koseri
atgaaattccgtaaaaaaccggttgttattgatgctattcaatggactggaggaaatttaaaggactgcatttcatttctcggacactcatttggtgggcataacgctgaaagatgccctgccgggaaaagtgaaataacagttttaacgcttgagggaaagcatattgcgagtaagggtgactatcttattcgcggcgtgaatggtgaacactacccctgcaagccagatattttcgataaaacctacgagccaacgtaa

SEQ ID NO: 82872 - DNA, 393 bp, Citrobacter koseri
atgaccctcacagaaattcgtaacgctgtcatcaccagaatgacggcgcagaccactattgcctcagatgcggtggattatccaaatgggccgacatttgaccctgccgggagaaccatatgggctcgactgacaaatattccggggcaggctggtgcaaatgaaattggggccgggccggtagttcaccgtactggcatcgttatcattcagttattcgtccctgccggttccggctcgaaattaatcactcaaaccgccgatcagctccgggaacttttcgagttccaggacgatggcaggctcagctattttgccgtttctgcgtatgacgcaggggaaacggatggctgggcgcaaattaatttaaacatcccttaccgggccttgtag

SEQ ID NO: 82873 - DNA, 231 bp, Citrobacter koseri
gtgacaggggaaatcctcaacgcttactccgttatttcccgctcccggctgtatgccgggatggcgggcgcgccgctgccgatctcgcttcatgatattgagcgctttctttccgcccgacccgtactcattgatcgtgatgaatttgacgcggcgatatttgccctcgatgacgcatggcgtgagcagtgggcgcaggaacagaaaaaacacggtaaacagaaacaataa

SEQ ID NO: 82874 - DNA, 354 bp, Citrobacter koseri
atgttcagaacagaaggcatcatcgatgagataactcaatggattgattcaaacttacataagccgctgaagatagaggatgttgctgcgcgggcaggatacaccagatggcatcttcagcggatttttgtgcaggtgaaagaagttagccttgggaagtacataagagatacgaaacttagacttgcaggaatagatcttattaatatttttattccagtgttgggcatagcttataaatattggtttgactcaatacatacttttattaaacttttatctaaagaatataattttcaccaacaatgtatagaaacgcaaaaagaaaaatacagtaattatttaaatcattga

SEQ ID NO: 82875 - DNA, 804 bp, Citrobacter koseri
atgacatatgaaagtagcttaaattttatcaaagagcaaataaaggcttttgattttgttttattagattgtaacaaacaattgaaatttaaagaggctgaacagaaaaaaatagaatcaaaaatagctactttaaaatcagaaataagtaaactgaaaagcactgattatccttcagttgctcttcaagaggagtatctacgccataaaattaatttggaaaatgatattgaggatattgatgaggcgattatcaatataactaacattcgtcttgagctagatacgctccacaaaaagtacaaaaagctaatttcagatagaaaatccctgccggaaagaatactttcacataacgacacttcgaagttacggttgttaaattctggtgtagttgaaaggttaaggaaatataattttgatagttttgatgcagaacttatagggatatctgaagataattaccttccaaccagggaaggctatgacattggttttgatacctcagctagtgatggtatcagaataatttggggatatctgatcagcttgttcaccgttggccaacgctttacgactaatcaccctggattgatcatttttgatgaaccaaggcaacaagaagcaaataaagtgagctttgctgaattgcttagagatgcggctgaatcaacaaaggtcagtggtcagattatctttgctacatctgaagatgagagtgttttagtcgaagcgttgaagggttatgagtatacgattgtatccttcgataaaaaagacggaaaagtgataaggaagttataa

SEQ ID NO: 82876 - DNA, 960 bp, Citrobacter koseri
atgatgcacacctcaacatcgccaagctaccccatcgtggcgtcgattgagacggctgcggcaatgctgcgtggcaatccgggtaaacgattgatcaatcgctccgtggagcgggcgcttcattttcgcaaagaggtacagcggctgcgcgaagagtcggaaggctggttctttgatatctggcaaccggaagaggtggatgaagcggaatgctggcccgttgcgcccggcgaggagtggcacggttttaccgatgcggatgccgaccatatgtttctcgatccggtgaaagtcaccattttgacgcccggtatggatgagcagggcaacatgagcgaggaggggattcccgccgcgctggtggcgaagttccttgatgagcgcggcgtggtggtagaaaaaaccgggccttataacctgctgttcctgttcagtattggtattgataaaacccgggcgatggggttgctgcgcggcctgacggagtttaaacgcgcttacgatcttaatctgcgcgttaaaaatatgctgccggatctgtacgccgaagatcccgatttttatcgtaatatgcggattcaggatctggcgcagggtatccataaactgatccgccagcacgatctttccgggttgatgttacgggcgttcgacacattgcccgaaatgaaaatgacgccgcatcaggcctggcagaggcagataaaaggcgaagtggagaccatcgcgattgatcaactggtggggcgtatttccgccagtatggtgctgccgtatccgcctggtgtgccgttgctgatgccgggggagatgatcaccgaagcgagccgcgcggtactcgattttctgctgatgctgtgttccatcggccaccattaccctggctttgagaccgatattcatggcgcaaaacaggatgaagatggcgtttaccgagtgagagtcttaaaaacggcatga

SEQ ID NO: 82877 - DNA, 267 bp, Citrobacter koseri
ttgccgataggagagaagttttgtaggcccggtaagcaaagcgccaccggcataacgccggatggcggcgcaagcgccttatccggcctacgggagagaggttttgtcggcccggtaagcgaagcgccaccgggcatggcaccggatggcggcgcaagcgccttatccggcctacgggagagaggttttgtcggcccggtaagcgaagcgccaccgggcatggcaccggatggcggcgcaaacgccttatccggcctacgggagtga

SEQ ID NO: 82878 - DNA, 837 bp, Citrobacter koseri
atggcaaaaaaaatctctaaatggtttcgcatcggcgtcgagggtgacacctgcgacggtcgcaaaatcaccaagcaagatattcaggaaatggccgacggctttgacacgcgtgtctacggttgccgtatcaatctggagcatatccgcagcgttattcccgatacgccgttctgtcgctacggcgacgtcatcgacctgaaagccgaagtgattgacgatgattctgtgctcaacggcaagctggcgctgtacggcaaaatcgcaccgctcgacaacctgctagccatgctggagaaaggccagaaggtttatacctcgatggagattcgcccaaattttgccgaaaccggcaaatgccacctcatcggcctggccgtgacggatgacccggcaagcctcgggactgaatacctgcaattctgcgccgccggtaaaaaagaacagccgggcgacctgttttctgttgcgaccttcgccgaactggaatttgaagaccagcccgaaaccctgctcaccaaactgaccgactccgttaaagccattttcagccgcaagcaacaggacgatgacgcccgctttgctgatgtgcgcgaagcggtgacggcgattgccgaacgtgtccagagtggtggtgaagataccgaagcgcgtttcggcaagctggaaagcgaaattaccgcgcttaaacagaccgtgaccgaacaggccgaggcgaccagtcagcaattcagtgtgtttaaaaccaccctggacaacaccgaaagcagtgtgcaaccacgccgcaaactgagcaccggtggcgatagtgccgactcagcgctaactgactgctaa

SEQ ID NO: 82879 - DNA, 984 bp, Citrobacter koseri
atgccaaaagctgtatcattgttctcaggctgtggtggttccgatgcaggactagtgagagctggttttgatgtcgtaatggcaaacgatattttgccttatgcaagagaggtttatcttgccaaccagccagaaacagactatctcattcaagacattcgggaagtgcaaacgtttccgagtgctgagattcttgttggctgctatccgtgtcaaggatttagtcaaggaggcgctcgtctcgctgacaggagcattaattttttatataaagaatttgctcgagcattaacacatattcaacctaaagcattcatcgttgagaatgtttcaggcatgagaaacagtacattccagcacttgcttgatgatcaaattgaacgtttttccaatgcaggaagtaaaggctataaagtagtttggaatgtgctcaaagctcatcactatggggttccacaagaacgtaaaagattaataatcgtaggaattagaaacgattttaactatgaatataaattccccgaacccactcatggtgaagataaattaacaccttatgtgacaatcggtgaagcactcaaagatttacctgaatggccagtcggtgagttttgtgacgacccatttcattggtactatttatcgagaaatagacgccgcaactgggatgaagtcagtaaaacgattgtgagcaaccttcgtcatattccattacacccaatcagccctgagttaaggaaagttgacatcgataaatgggagtttgtaacagactcaccagcgagacgtttttcttataaagaagcggctattcttcaaggatttagtaaagattatacgcaccatggcggcaacctaatttttcctgaaatgaaagatttcggaccagctcgattactgaaagagcgttacaaggtcgtaggtaatgctgttccaccgccactgtttgaagcggtggtaaaaaatatccctgatatctggtaa

SEQ ID NO: 82880 - DNA, 957 bp, Citrobacter koseri
gtgaattatggattgcgctctaaaatgcagggattcgctacggatgcggatcaagctgaatttaatgcattacttgatgttaatgcaacgattgattcaggtattgaagacgataaaattgctggaactatatatgatgagctagatgaattagatgggcattttgaagaagattggatgaaagaagatcaagggaaagatattctagttggtcagattgctgaacatattcaatggcgttcagatattcttgaggatatgtatccttttgaatataaagcaaatcatttaactttaaaggattccccatcacctgtttatttattttgcttgtgtgtttcaatgataaataatttaactaaaggtgaaaatgttaagttgcctcgatatttcgaaattatggccggtcgtctttttacaaagtttttaagtgctcatgcaaaacatatgcatactggttggcctcgttcaacaggaaatcctgttagttataaagagttggctactaagttaaatggattgatttctccaaatacgaaagaatggtcttggcgtgttgaaaatggtttgaaggatgaagacgcattaaggataaaggattgtggtgttgattttgttacttgggttgatttccttgatggtcgagatggacgtttatttgcattagggcaatgtgcttgtggtaatgattggcctactaaatttaatgacataaaaatcgaacgattgacaccatggtttcaccctcttacttatatcaaatgcgtaaaagttttttctacgccttatatcttagttgatgaaatgattagagaagccagctctgaagctggcattatattcgatcgagttcgtttaactattgcccatgatcgctttaaagaagattttgacgatatgcgcgaagatttgaatacgttaattgatttttgtaaaaacttgaaaaaggcccagtga

SEQ ID NO: 82881 - DNA, 1176 bp, Citrobacter koseri
atgaagcaaaaaatgacaggtgtggaagaagaattaagacataaagaagttgaatatatttctattgaagatctagaacttgatgttgagaaccctcgttttggtgaggattcctcagtaacggatacacagatcgatgttttgaataatatcgtgaaaaattatggtgtcactgatgtaataagttctattgctgttaatgggtatttttctgctgaacctatggtggtcaggaaaaataataatcaaaaatataccgtaatggaaggcaatagaaggctagcggcttgtttaatacttaaaaacgatgatagagctagggatcaggtaaatttacatcaacaatatatagataagtatatttcacatgggcaaccaaagatagatcctattccagcaatcgtgtttgaaggtgatgatggggttgataaaaagtctcttatttcttatcttggtgttagacatattgtttccactaaagattgggactcatatgctaaagccgcgtggattgcgagaacaataaaagaaggagatatgagtgttagcgatatctcgactatgattggagatcgtaatagtacaataaaaaggcttttgtcgggttacaactttataaaacaaatggaatccacagggaaatataataaggatgatagtgtaaaaaaaggacggggaagtaatacaagctatcctttttcttgggtttatacattactcggctataagagtatacaggattttgttggattgtcggaagaccctacagattcaaatccaatagatgataaaaaactagataatgccaagcttcttatgacagctatgtttggcaataaaaataaagggcaaaattcacaggttaaagattctcgcaatcttggtgtgttggctgaagttgtggcatcaccagaaaagattgtgttgcttaagcaaggaaaagatgttgaagagatcaatgatttaacacagcctattggggaacggctgacaagcctaatgctagatattagaggaaggttagatgaatgtattactagagtgggccgcgaagacttaccaaggcaagatgccatagagttaaataattatcttgagcaaataagcaagcaatttagatcttttagagtgtcaattaatcaagctattagcgggaatgattcagagggcttttaa

SEQ ID NO: 82882 - DNA, 930 bp, Citrobacter koseri; identical to SEQ ID NO: 22804

SEQ ID NO: 82883 - DNA, 747 bp, Citrobacter koseri
atgtcatccaataatagtaatagtggttcaacactttctgtattaggctttgtcgatggattatgggatttagccaaagtagcaaaaataatttattttactttgtgttttgatgttctttttttttgtttaaaagggaatgggctatttggtataaagttaggtaaagagtttgacctttcgctagcagatttggcagggatgattattgctctggggatcttttcatcgattatattagaactagcaacgttattttttaatttattattaataaggataaagtatagcaagttactacaacgtaaagatgagaagatatatcaaaaatcctcgactgatgtattaatatctgaactgagagatgatgccttagtaaatggtgacgacatgtcatttaaattatatactgaggaaaaaaacagaagagaaaaaagcaataaggaaaaaagactaactgagataatttctttcggaactatttttgttttttctatagaatggtatttatctgtatccgacggctcaagcaagatgtttattgactggttatgggagcaattaaagcatagagaccctacaacgccacattatcttattggtttattagtatcatttgcattactcttttatgcaacatcgatatgttggccaactgatcatatccgtaaaatatattaccccaagcttgctaaaaaattgagaaaaaaagaagaggactggaagaaaaaacttgacaacatgtaa

SEQ ID NO: 82884 - DNA, 1248 bp, Citrobacter koseri
atgccaaagaaagccaaagaactctcaggacttgccgtatcaaaactaaaaaaagaaggttcttttgcagttggtggggttgatggcttatatctgcgtaacagagggcaatcccgttcatggatcctttgcgtagcgatgggagtcagagttaacggacaaggaagaaccgttcccagacgcttaaacttaggtcttggcccctaccctgaagtttctttagcggaagcacgtgacaaagctcgtgagctacgtaagcagatccgtaatggtattgacccgctggaagaaaaacacgcccataaagcgcatcaggagaagcaggcacataagaaaaaaacgtttgttgattgtgctgaagatgtcatcgaaattaagtccaaggaactaaagaatcagaaacatatcgcgcagtggcgttccactctggaaacctatgcctatccggttattggtcaaaaagctgtcagtgaagtcaccagagccgatctgctaactattcttgagcctgtctggttaacaaaaaacgaaaccgccagtcgcctgcgtggacgtatcgaaaccatcattgattacgcaaaagccagagaatattttgaaggtgataacccagcggcatggaaagggatgctcaagcccctcctgccaatgccaagtaaggttcagaaacaaaaacatcatgctgcactgccctacagtgaaatcggttcgttcatgtccgatttacgcgaacgagctggcatttcagcacgagcacttgagttctcagtgttaaccgttgcccgttctggtgaggtccggggcgctgaatggaatgaaatcgatttgaaagaaaaaacgtggaccattcccgccagcagaatgaaagccagtaaagaacatcgtgtaccgctgtctgacactgcagtagctctgttaaagtctttaccacgtttcaaggacaataaccttgtgttccctgcccctcgtggtggacagctttctgatatgtcattgctggcagtattaaaacggatgaatcactcaggattaacacagcatggattccgctctaccttccgcgaatgggcgggtgaaactacatcacaccagagggaagttatcgaacatgctctggctcaccagttggctgataaagcagaagcagcctaccagcgtggaacgctatggcctaaacgggtggatctcatgagggattgggcggggtattgtgtgggtgaaagcgtttcaaagtcagcggtgtcatag

SEQ ID NO: 82885 - DNA, 948 bp, Citrobacter koseri
atgatgaaagttgtttcattattttcaggagctggcggtcttgaccttggttttaaaaacgccggttttcaaatcgtctgggcaaatgatattgactctgacgctgtacaaacatataaaaaaaatattggcgatcatattgttctaaaagatttgtctcaggttgatatgaatgatatccctgattgtgatgttgttatcgggggatttccttgccaggggttttctcaagctaatctcttaagaaataaagatgatgaaaggaatcaattatatttagagtttcttagggttgtaggcgctaaaaaacctaagttcttttttgcggaaaatgtacggggtattttaagcctagataatggtacggctatagaaaaaatcgaaagtgactttaaagcgttaggctataaagttaaaaaacagcttttcaatgtggctgattatggtgtgcctcagatgcgataccgcgttattatcgtgggtgttagaaacgatataaatatagagtatatgtatccactgccaacgcatacctctcctaaaaaagtaaataaaatggggttagctccttgggtaaacattggtgatgctcttaatggcattcccgaacccgattctaattgtgatttattgaatcatgtatactcagcctataaaataacaaataggaatttcacaggtcatagggaaacagatccaaataaaccttcgcctacaattcttgcaagaggtaacggtaaaggaggggtttgtgctattcagcatcccaaaaatcaccgtagaatgtctgttagagaatcagcaacaatacaaacatttcctttagattatgagtttgtgggaagtatgacatcttgctatcggcaggttggtaatgctgttcctgttttatttgctgagtctttagccaagagtttaaaaaatattattgtaggtgataataaatga

SEQ ID NO: 82886 - DNA, 933 bp, Citrobacter koseri
atgaaagttgtttcattgttctcaggcgcagggggattagaccttggtttaaaactatctgggctagatatcatctgggcaaatgatatctatgaagatgcggtagatacctataagaaaaatataggtgagcatattgttttgggtgatgtatccaatatcagttcatctgatataccgaattgcgatattgtggttggcggatttccatgtcagggattctctgtcgcaaatatgaataggaagtctgaagatcctcggaataaattgtatttagaaatggttcgtattattcgggataagaaaccgtcatattttatagctgaaaatgtaaaaggtattttatccttggataaaggtcttgttatacaaaaaataacaagtgattttgaatcgttaggatataatgttaaatacagtcttctaaattgtgctgattatggtgttccacaaactcgaatgagggtcattatattaggcgtaaggaaagatttgcctgatattgaaaacttcccaccgcctaagactcatgaaaaagatgggataaatctacctaaatggatttctgtaggtcaggcattgaaaaggtttactgaaccgggggggaatagtgagttcaaaaatcatgagcattcgttgtataagcttacattcaatgggcatctaggacataggtttatggatccggataaaccagctccgacagtaacaggtcgtggagatgagaaaggtggtgtagttgtattacaccaccctaataatgagagaagaatgactgtcagagaaattgcggcagttcaatcattcccggatgacttctttttctgtggtagtaagacgtctggatatcgacaaatcgctaatgctgtcccaccaaaactaggtttagccttaggtaaaatgttaactgagcatcataaaacgatagaatag

SEQ ID NO: 82887 - DNA, 1257 bp, Citrobacter koseri
atgtattcttttgttaaaccatttcctcaatatcgttggagatgggcttcgatgacaccatccgaaagtttgaatattccagaagtctactttggctgtttacgtgttctttcattgaatgaaggtgaacatgtaaacagtaaacatgtttttaaattgctacaacaagtagaaaaagatattaaggattataatgacttaaacgtgtcattagcacgttctgaaaacaggaacctttttagaaactccggtcagtattggaaaaatacgggtaccctgttaagcacagaacatggaatagaactgactgattttgggcgttcttattcttcagggctaattactaaagatgagttttctgctattgtaattaagagtatggagcttcctaatccatttattgaagatgataaagttatttctgaatgggatcatgaaggtgttaagattaaaccattagaactaattttatgtattatttatcacctttacaatttcaaatgcgaacatggatatttaaccactaaagagttaattgaaatagtgataccaatggctggtaacaaagccaccgcttatgaaatctttaaagtaatacttgattgtcgacatggcacaactttaggacctgattcttggatagctaatgaaaaatctaatgataaaagaatagccagggaatttctgctttttctcgaaaattatggatatttaaattcgagacaatctcagaatgaaagggcaaccaatctaaatcaagagttttatctgacagactaccagtattctttagctaaatcactcattgattctcctgaaatatcatataaatcaatgtcgcctgaacaagctgtaccgaaacttgcagaagctacagaggtaattgctagaaaacgagttctcacagaaatcactttacgaccaaaacaggctgagttcagaagaaagctgatggaggcatattcagggaaatgtttattgtctaatgcaagtataagtgaggtgcttcaggcatgccatattatccctgtgaaaaacagtggtagtgattctgttggcaatggttttattttgcgctctgatctccatcttttatacgattcaggccatataaaaatacatgaagatggcacagttacattatctgattacttgaaaaaagacactttttacagtaagaccttacccggcaagataaagttaccgacattccttaatattgaaaatatacgaattaggaatgagtacaatatgtga

SEQ ID NO: 82888 - DNA, 126 bp, Citrobacter koseri
atgctgtacaaagatgagctatatggtacatttgagcgcaaaaataaagagctaggcccatttaaagtatttgcatatttactttatgaaaaatggtttatatcaccggaagtgacgtgtatttaa

SEQ ID NO: 82889 - DNA, 240 bp, Citrobacter koseri
atgaccacgttgaatacgaacattaatgtcagccctgacaccctgatttcagcccaggacccacttatcgacatgacctttatcaccatgtacaccggtatgatggacaagtggttctataaactgattggcgatggcctgtttcccaaacccattaatctgggccgcagctcccgctggcgcagaagcgaggtggaaacctggatgcagcagcgtatcgcaaattcccgtggcacttga

SEQ ID NO: 82890 - DNA, 621 bp, Citrobacter koseri
atgactaacaggaaatttgggcaaatcaatccgggttatatgaaacgtattacggatatcatcaacttcgcgacaaaagcccacgccaggacatccgtattcaccttcgtactcagactgcctgaatatcgagatacgggtgacagtattgcctgtgtccctgatctgagttcaggattgatggaacgagtatttggggcactgaaagcccgtatcgaagcccatcagaaacgacgtaagaggaaaggccatcaggtttgtccaacggacctgagatacgtctgggtgcgtgaggtaggaaccagcggtaaatcacattaccacatggcgatattcgttaacaaagatacgtttaatggattagggaattattcgaaagaagaccataatctggggagttacatctgcgaagcctggctaagtgcgctgggtctgctcgaatcccctgagtacaggacgctggttaacctcaccaatacgccgcactatctggagcgtcttcgggtggaccgctatggtcaacagatactgaacctccggagccatctggaatactatgccaaagaatacaccaaggcatactcaaaagaagagcgctcatttggggggagtatcagataa

SEQ ID NO: 82891 - DNA, 210 bp, Citrobacter koseri
atgcacacatcacctgccctgctgaacgaccagcttgtcgatatggcattcataacgacctacactcaatgcagtgataaatggttttacaaactcatcggcgaaggacgattccccaaacctatcaagctgggccgcagttcccgctggctaaagagcgaagtggaaacctggatgcagcagcgtattgttgactcgcggggtcactga

SEQ ID NO: 82892 - DNA, 882 bp, Citrobacter koseri
atgacaagccggaaccgcatcaccgtcaatctgccaacaaacgaactccaccgacatatcgaaaagctggctctgagcagaggcctgacctgctctggatttatccgggaccttatcagcgcatcgttgtcggataatgctgaagcggcgcagttcatggatgaaataagggggagtaagcatggcattagtaataacagcgaggaggatgtaacccgtattcttcggaacaccagaaaacagcaaggagcggaacagcaacttgtactgaatgcccgcgaacaacctcttgcagactataatttcaccatttcaattaatgagttcaggcaatttgagcagcaacatttaatgatgggaaaatcaagcaatgccctgaatgagctggtaaaggctaatcttaaaacccatataacagagaaggttcctgcaattgttggcaggtctggtggtgtaccagatattcttcatctgtttgttaaaaatgcgaaaataagatatgtcatgaatgataatggattatgggagttcaggtcgcgcatcgtattacatctgctgcctcttttcattgatgatgcgcagaagagcaggcttgatttttttaatataaaatttaaacagttcagacatgtggccgtgaatggctgggataagaaaaagtatgaacgacttgtctttatagaacaggcatccaggtcccgttccgggggatattttgtcgggttgtcgccttatgacattgattataccatggctgagtataacgatttcacaccagctcaaattactcatggagcgggttcgtatgcattaaattttataatacacatccaccacagagatataaaaatcagaaaacagaaaagcttttcatttctataa

SEQ ID NO: 82893 - DNA, 885 bp, Citrobacter koseri
atggaaaataactctcgcgataaaaccttactactcaagaaaattctttcagcattacctgaggatgtttaccgaaacctttgtttctatcttgatgagatgattacttatgaaccctgcatcgggatgatgggtaaaagtggcgcagggaaatccagcctgtgcaatactctgttcagtccgccgcccgccagggtcgatgccgtcagcggctgtacccgcactgttcagcgctatcaggtcactcacggtacgcataccctgaccctggttgattttccgggtaccggcgaaaccccggagctggacagtctttaccggcgtctgtatcaggcgtggtccggcaggctggacctgattgtctgggtgcttaaagccgacgagcgggcctggaacgaggatatccgctgttaccgcgagttactccgcagtggagcagaaccggagcgcttcctgtttgtactcagccaggcggacaaaatggagccctgccgggaatgggacgggctgaatcactgtccctcgccgctgcagcatcagaacctgcaggccaaaacccgactggccgaaacccttttcgctgctgcccaccctgtcattgctgtctccgctgcagagcactacaacatgcatcactgggtggaatccctgatactggcattacctgcgcacagcagcagcgctgtttcccgtcacctgcaactcgtgctgcggaccgacacggtcagggagaccgcgcgcgagggatttgtccgcgtgaccggggagatatttgatgaggcggtgaacgccctgaaaacctccggggaactggttcgctatcttcgtcaactccgccagcagttcctgtcggtcatccgtgccgtctggcatctcctgttctaa

SEQ ID NO: 82894 - DNA, 549 bp, Citrobacter koseri
atgaaatcatatccagtactgcgtcaggatatttttgcctggtgcctcgcggctgtactccctgcaatctgggtagtgctgttcctgaattttccacagactgccgcactcgttatttatatggtcgtcgcactggtctgggtattgctggaccggacaaacctgatgaagcagggcatcacaccaccttcctttatctggttctggttcccggtggtatatctgcgccagcgtgaccagatgcaggctaaaccctggcggctgatgcaggtctggttgctttgtaccgtgctgtcattcgtggcgatatatcagttcaggcaaacctcaggtatggaaaatctggcgcagagtgcctgtagcgtggtgacaaaaatcctgcatgacgagggagttgatgaacgctgtatccgtgtgacggagatgaaggaagaggtgaccggccgtttctggcgggcacaggcgttgctgaataccggagtaaaggagcctgtgaccattgaggtcagaggacgggatatttatgtcgttttaccggagatagagtaa

SEQ ID NO: 82895 - DNA, 516 bp, Citrobacter koseri
atgaaaaagagggatgtgttaacacgtatcatctgcctgatgctgccaggcacgggactgctgctcccggcaatgtccgcccgcgcgtcagagtcacctgcacaggtacaatccccgcactgtaccagccccgtgttttacgcgcagaccatgaaccacaagaaggaggtggaaatttgtctggtcatgcctggggtgtcctatacgttcggaaaagtgggcgcgaaaaataaggagatgaatctcaccgttccggcagacagcactacttacgcgtaccagagcaatcaggttattagtctccaggaatttacggtcagaaacggcgatacccgttaccaggtctcagcggggacgaacgatgacggcgggccggtggcctcactgtatgtttataaaggtaccccggagaccggaaaactgctggcagagataaagctcgaaccggggacagtggtgaacaatatcagccatgcgctggcggaaaagggtattcctgaggcagacagcctctga

SEQ ID NO: 82896 - DNA, 351 bp, Citrobacter koseri
atgtttaaagccctgcttaccaccctgctccttgccatcgcgcttccttcgctggcagatgatgcgccattgtccgtcaatgctcagaaagcttatctcccgaaagtcaattttccggtctggcaactaacgctgaccagcctcgaaaatgacatcaaggtgcagtcaatcaccctgaaccggggtaactgcctgatttccatgccgggaaggggacagaatatgaacaaacgtctggggtacggtcagacgctgtctttcaccacccccagcaacagcaccttcacgcagtgtcgtcctctggagttgacggtacaaaccagccagggggcttttacctttaactggtaa

SEQ ID NO: 82897 - DNA, 822 bp, Citrobacter koseri
atgcaactggcgagtcgttttggccggattaaccagatacgccgcgaccggccactgactcacgaagaactgatgagtcatgtccccagcgtcttcggggaaggcaaacatgcgtcccgcagtgaacgctacacctggataccgaccatcaccatccttgaaaacctgcagcgcgaaggctttcagccgttcttcgcctgccagacccgcgtgcgggaccagagccggcgggagcatacaaagcacatgctgcgtttgcgacgaaccggtcaaatcagcagcccgcaggtcccggaaatcgtcctgctgaacagtcatgacggctcatcaagctaccagatgctgcctgggctgtttcgtgccatctgcaccaacggcctcgtctgcggacagtcctttggtgaaattcgcgtcccccataaaggcaatgtcgtggcaagggtcattgagggggcttatgaagtcctcggtgtgtttgaccgggtggaggagaagcgtgatgccatgcagtcgctgatactgccgccatcggcacagcacgccctggcgaaagcggcgctgacgtaccgttatggtgaagaacaccagccggtgacggcctcgcagatactgacaccccgccggtatgaagaccgtcaggatgacttatggacaacataccagcgtctgcaggaaaacctgctcaaaggcggtctgcccggacgtaccgcgaagggcaaacgcagtcacacccgtgctgttaccggcattgacggcgatgtgaagctcaatcgcgccctgtgggttatggcagaaaacatgctcgaatttttcgggcgttaa

SEQ ID NO: 82898 - DNA, 171 bp, Citrobacter koseri
atgcagaacacaataaatgtagcaaaccatgatattgccgaaccgtggtgtggacttaaacccgctgtcacaccttgctttggcgcacgcctggtgcaggaagggaaccgactgcattacctggctgacatggggttgttgcgaggctgcaatcacactgcagcaatgtga

SEQ ID NO: 82899 - DNA, 921 bp, Citrobacter koseri
atgaaagcaagcgaagtcatgaaggcggtaaaaacgtggtttaaggtgagcaactatgatgctttgcaggagatcacgattgaagacctgaagagggaagcgtttgcccgatttaggttagctaaacatgattttgatggagagttgaatgacgacgatgaccgtaagattcgccagcgttatctggactatgaagctaaaattttggcgggaaagcctttattagtcagcccaagcaaagatccagcccctacctatggaaaagactatccactcagacaggcagtagaaaaccctctccagaacgcaaaaatatacatcaagcacattaccgtagcggatgctgcgaaatatgagcgtcaattaagagagataaagatccttcggcgtatggggcttaaggaggagggagtaaccatgccagcctcagaagagattggtcggcggcggttgactgatatcgaaatgcttcatccccataagccactttatctggaactcaacatcagaaggcttactgacgaagaagtcatcgagcatatgaagcgtatgcttccagaatggcgcaggacacacggtatcccggaaccgttaacgggaacattcaggttcgggcttagcacgatcaagaggctgattaacttcaggatcatccctctgctggatctgctgttctgggccaagagaaacaacgaaaaaatttcctatgaacagcttggcaggcttctttatcccaatgattctgaggatatccgaggtgggtctcaaatcaaagacacggacaagccattgggtgacaaagtgcttacccatgagtttgataggctgtttaacatctacctgagcaaaaatgacagcatgatacataccaaggttgctgatgccatgaagatgaacgaaaaagaggaagagaaaaagtag

SEQ ID NO: 82900 - DNA, 552 bp, Citrobacter koseri
atggggaaaattgatagtgctgaagaatggcttagggcactgattgtaaggcttgattttgtgttcaaggttggccggaatcaccctgtatcaacagattcccttgatgatcttatttgcctagattgcaataatgatgacgcctatctgagagaaaaaacaacgagtacatcttggattatccctactttgatgggattgactgttattatgaaaaaagaagaaggatataatgtactaattaaaggagtaaaaaaattttatccgaagatgtgctctcaattatggcacccaacaaatgatctttatcatcatttgtattttcaccaagctcaatatgccataggagagacagaagccccaattacatttccggatagtatgaatgactatcaagacagaatgaatgaattgagcggaatggatagatacaattttttcaaagaatcaagcgccgtaaaggctggcttatcagctttggactttatagcttatcgacatttcagaacaccagttcctcccgttctttggtatggtttgcaaaaaaaataa

SEQ ID NO: 82901 - DNA, 333 bp, Citrobacter koseri
atggtttctcgttttgttcctgattccggcgacttaatttggctggattttgaccctgtagtggggcatgaacagggaggacaccgccccgctgttgtgcttagtcccttcccctacaataaccttaccggactttgcttatacgttccctgcacaaaccgaagcaaagggtataaatttgaagtcgagttatctggcgatcatgaaagcgtggctcttgccgatcaagttacttgtgttgactggcgcagccgtaaggcaaccaagaaaggcaaagtaacagccgatgagttagagcttatcagagcaaaagccagagtcttgcttggttag

SEQ ID NO: 82902 - DNA, 252 bp, Citrobacter koseri
atgatagatgtcccggttaaaaaatgggggaactcacttgcaatacgacttccctcatcggttatgcaagcgtttggtatgacgtttaacgacagctttgacatggaaataagggaaacggaaattgccctgatccccaaaaaaaagccaaagtatcagttcacgctggatgagctgctggaagggatgaccgccgataatgttcatgagaaagtcgattttggcgcttcagtcggtaaggagctgctttaa

SEQ ID NO: 82903 - DNA, 246 bp, Citrobacter koseri
atgagaaatgaaaaagcacttaaacgatttatccgggtgccagaagtgctcaatcgggtggggttcagtcgtaccacattgtatgagcgtattaaagatggcagctttcctgacagagtaaaaatagggctaaggtcgatagcttttattgaaagtgaagtggacgaatggattgaaaaaacaatccagaacacacgatatgatttttcaaaaaataacatggcaaataatgaggtggttttatga

SEQ ID NO: 82904 - DNA, 300 bp, Citrobacter koseri
atgatattagaagtaaaaacaacaaagcagtttaatgaagtggcagaaaggctattcaatgaaaatattaataagctcaaaagagaaatgccatcgtatcataaggagcttatggtaaataaaaaggaaatgaaaaggttcattgatattattatcgacactacaaaggaatatttctatgaaggtcatgatgagaagagtggatattgtctgttcagaaatgttaatcagatcagggcaagagaacatttacagtcattagcttttacgcacagttatttgtataagctcatgcagtaa

SEQ ID NO: 82905 - DNA, 348 bp, Citrobacter koseri
atgaaaactatttttgtaaacgaagaaaatgaatcaactgcatttatgattacacttggtctggacatttattgtcatcttatacatggggaagcgaaatcagacaaggcaggcgcgttaaaatacgtgacagagattaagtatatcagtgacgcatttgattacgtcattgctcatatctgtgaacattttgatgcctacagtaaaagtaatggcaatggtaaggaaaagttagaagaagctgattttgaaaaagcaaaaaagacgatgatgtacctgcaggagcaatatctggcgcagtatttggtcagggatatacatcaaaacagacttttctttaataagtga

SEQ ID NO: 82906 - DNA, 366 bp, Citrobacter koseri
atgagtaagcaaacattaaaagataaaaaagaaataaacagacatatcgcgtggctgatgatgaaccagtatagtcagatggcatataatcttgtgaaaagcaatgaagtggatcttcccttcatgttatcaggggatacaccgcatatgatgtataccatctgcctgaataatattaaagccgactttgctaactttaaagcagagcagaatattgagtgcgaaaaactgagccgggccgatacaaaggccatcatcaacatgacgctttattttcatgaaagatttgttgttcctcatatactgaggatactttctgatgatgatacatactggaagctgaagattgactgggaagcgcgttaa

SEQ ID NO: 82907 - DNA, 825 bp, Citrobacter koseri
atgaataggtcaaacgaagaagatattgaaaaagccaaatcactaatttcgacaggcgcagagatagctggcgctgcagttggcggcgcaattggctttttcgcagctggccctgcgggagctgctggggctggttcggtaggggtgattgtcgcgaaagctggtgcaaaacttctcggtgatgtggcagatcgtgcgatgtctgcacgcgaaaaagtccgtgttggggctgctgctgcagttgcattcaataaaattgaaaaggctgctcagtcaggtaatgaacccagaaaagatggtttctttaactctgaagaaggaaaacgcagtaatgcagaagaaatcctagagggaacgttaagaagggcgcgtgaagagcatgaggaaaagaagattctacttctcgggaatttttacgcaaatatggtctactccccgggagtcagtaccgcagaagctaattattatctccggttgttcgattcactgacgtaccggcaactctgtattatgagtttgatcatgatgaaaccacattattctgactttcaaaatcttagaaagcatgactaccgaaccaaaaatgccaacatgcagacaagtactgtcgcactgctccaagaaatttatgccctgtataatttgggattagtctgcgctaggagtgctggcggaaatagctacgtatctttgctggcatggcatgacatcatccctttcggattagaattcacaggattaggtgaaaggttttacaagctttttatgggtggtggaagcatttcactttctgatatttctacaaccgcagaagctttgcgctaa

SEQ ID NO: 82908 - DNA, 765 bp, Citrobacter koseri
atgacggataaagcaacgttccgtgctgagtgtcctgaatgcttgggagaaagaaactgtatagttatcggagaaacaaagcggagttgggagagtggggacaggcgaaactttatgcaatgggttacagaatatcgcctgttacaatgtaaaggatgtgatacggtgttttatcattcaaaatcatgggacagcgaagatttggattacgattatgatgatgcaggtcagactgttagcacccctaactatagatatgaaacctatccgagatcacttgaacatcgaccgccgcaatggattgaaaatttagcagccattgactatcaactctatatcttacttaatgaagtgtatcaggcctattataatgaatcttatattttagcctccattggtttaagaaccgcctttgaccgcacttcagaggttctgaacatattacctacattacctttagggaaaaaagtcgaaaaactcgcagaggatggttatatcggtgaaactgaaaaaagtcagttgcttatagtcacagatgcaggtaatgccgctgcgcatcgcgcttggtcaccgacaaaaagcgagtttaaatctcttttaacaataacagaggattttattcgtcggtctgtgcttcgcgatgatggcattatgaaaattgccggaaaaatcccagccaaacaaaaaaaacatatcgaaaaagcctctaatgcagtcaatgcacttcccgatttattagttcagccttatacagaaggtgagtaa

SEQ ID NO: 82909 - DNA, 456 bp, Citrobacter koseri
atgaaaaaaacaaaaacagacaacagtgatattattgattatctgaacaccacgcaggaactaaagaaatatcccgatataaaatctttctggcaggagtatagacgattaagggaagatgcacccattggtaaaactaatcagttttattctgcccacaaagaactgcgccgtcttgataaaaaaagaaataaattattaagcacatttatttctgaacttaatccggtaaagcaagaaaagacatctgagagtgtcatgcgccgttctttagccagaacacttatccgtgagaaaagtgatgacgaaatcatctcaatgctgttaaagcagagaactgaggctttgcttgagtttcagagtgatattgagcacagtcttgctcaactttccgaaatcacgtcaaccttcaatacggcacatgaaaacacacctcaccgaaaatttagattatga

SEQ ID NO: 82910 - DNA, 726 bp, Citrobacter koseri
atgacaacaatagattttacttcccttaacactctgtctccctttgagttaaaactttatattgatgaccacgatttcagcagtgaacagaaagtgcagatattcgagcactattatagtacgcataaagacacaaccaatatctacacccgaaaggaaaatataaaatcgattaaaaaggatgttgattacgttcatatgttcacacagaacttccagaaactggcggagcttaatatttctaaaaatgaacttaaggtgatagccagaatcctgaacatcatggagttcgggaactgttttcatatctcgcaggcaaagctgtgccgtgatttagacataaaaaaatccaatatgtcccttgtctttaaaaagctcaaaagcaaagggattatcatagataaagacggtgatctctttatgaactcaaatatatttctgaaaggacaggcgcataccattaatgaaaagcaacgccctaacgttaaaaaggctcaacgctttgaggttaatgaccagctcacctttgagaatgtatatactttccatactaatgcagataatcagcataaaacaaaaaacgaaccagtttgtgtttctgattccgatgaaaatatttctctacagtatcctgaaaaaccaaactcggaagttaataaatatgatgaagaacattttcactatacttcaaaagaaaaagagaagatacattctgtgctaatttga

SEQ ID NO: 82911 - DNA, 276 bp, Citrobacter koseri
atggaaaacaatacaatccagtgtcctttttgctttaaagaaagccagcgcggcgttcatgtctgcaccggctgcatggcgactgtattatatggcacttatccgcaatggtatgctgttgttgttatcttactgtccttcggcctgtcgattctgatagggatgtcagcaggtatggctggagctactatcagcctaccaataatcgcagttgtgggttttgtatcgggcaaggctattttctctgataatgttgtgttcagacgaaggatgtaa

SEQ ID NO: 82912 - DNA, 531 bp, Citrobacter koseri
atgcgtaaatttttagtcgcagggagtcttgctgttctgttatccggctgtggtgaaaaaggcgacttcgaaaaagcgattaacgcaaagattggtcaatcgaagacttgtttctcactgagagacaacaatgtcagtttccctgtccagttatctaaaccgcgatttgacgagactggcactggaacgggttctgtgatccttgatagcctcgtagagcagggcttaatggcttttgttaaaggctgggataacaatacgcttgggataacagatgaaggtaaaagcgccaaaatctgggatgccaaagatggtgcctgtattggtcgccgcgttgttgatgaaattaaagaatggaccgaaccgggtaaaggaagccagcaggttgtccgggtatcctactcatggaaactggttgatgtgccgcgctgggtagataaagaagcgttttccagcgtaaaaggtatgaatgaacctgctgatggtaccatgacgcttgttaaaaccaataacggctggaaagccaattaa

SEQ ID NO: 82913 - DNA, 582 bp, Citrobacter koseri
atgaaagtaagaacagcaatgccactgttgttagcttctgtgtttctgtcgggatgccagcagctcaatgacggcgttaataaggttaatggggcaatcagctcgtccttgtcatcattaaacaatgctgttgataaaacgctgggtggctcaacctccagccaaagctcaggcccggcatcggctatttctggtcttggcactgtttgcaaagactatgaagaaaacgcaatggcagcggagaagaaatggaccggaaagcggatctcaatcgctaatgctactgtccttgaagttacgaagggccgaagtgcaagcgatatgatgacaggtatgccaaaagcagcccatgcgaactattacctgttgtttaagacctcagatacaaattactgcggtgggatggtctggattgattactactctggtcttgatgatgcggttcttacttacaaaaaaggtcagaaggtcagtgtcagcgggaccgtcaacaatttcgaagttcggggattcgctacagtcaataacgccgatatgccagttcgtctggtggtattaagaaacggcaccatcaaccattaa

SEQ ID NO: 82914 - DNA, 135 bp, Citrobacter koseri
atggagaattactttcccgtatttacaggaatgattcaaaagaccatattgatgctttattttatgggagagaactacctgaaacacagcttattccaccattgcaaaactctcattctccagaaaatggcctga

SEQ ID NO: 82915 - DNA, 201 bp, Citrobacter koseri
atgagcgtgagggtttctaccatcaagatcatgaaaaacgatatcagcaatcattcctttatcaacgaaattgttctggcagtattcagctaccagtttgattttctcctcatgattaagctcacagggaatagcaacatcaaaataacgagctgtttgaccgtctttctgacgctcaactttttctacttcattccataa

SEQ ID NO: 82916 - DNA, 258 bp, Citrobacter koseri
atgtataaaaataacgatgaggctattgactgggaaacgaagagacttcttgatgaaggaatctataccgatacagaacaagcctatttagcagcagaaaagatagtaaaccagataagggagcaggctaagcaacgacaaattaagcagcagtttagattgaaggttagatcaattaagaaacaactgaataatggttatgattatgcaaatatcccttacgctaaaaataaaaaatattgggggaatgacatatga

SEQ ID NO: 82917 - DNA, 357 bp, Citrobacter koseri
atgagtgacattgttgatgctctacaacgtgatgacctggtgctgtttaacgaatcgttctctgcgacaaacagtcgggaaggggccgaaatcatcagaggcgtggtaaccgcactggcagaaagcaacgtgaagctcttttttgttacgcatactgcggaatttgcatgttcgttttatcaggaggatcgccaggacacggtatacctgtgcgccgaacgacgcgacgatggagaaaggacatacaaaatagcagaaggcgtgcctctggatatcagctatggcgaagatctgtaccgggatgtttttgatgcctctcccgtataccggaatacgggagaggtttcagagcgttaa

SEQ ID NO: 82918 - DNA, 528 bp, Citrobacter koseri
atgcgccgtacctcaacaacatcgctgcaatttattaccgttttgtatgcctctggtcgtcgtcatacacccccttcgggcgatcgtgcccctgcatattttgtcgatctgaatcttgataaaatcgtcgatcgcattgttcaggggcgggaagagtacggcatcagcgctttcttttattcaccgctcgaatgtctggaggatatcctctatcgacaggaaattattcaggatgtgacaatacacgcgctctataaggcgctaatggcatattccgcagagatgaagaatatcagggagatttcagaagaaaaaacaaaccggttttacttctatcaacagcggcgctgggagcttgagtgcattttgttgtattgccaggccgttacggcgctgtatgagcgtatagcgccgctgtctttgtcttccgacggtatgattaatttcaggcattatcttcgtcagtatatcgagagtgaaaattttaccgggttatctggaagctgttcagtacggcctgaaaattaa

SEQ ID NO: 82919 - DNA, 438 bp, Citrobacter koseri
atgcataagaatgttatggcctctatgttaggtgtggttttgtttggtgctctaagcaatatcagttgggcagcggaccaggacgaccccaacgcaccaattaccaaaaaagaactatttaaccacctggttgaattagctcaaaccatttctcaaaaaggggagaattatcgagatgaggtggttagatttgtagacggacgtgtaagtaacgctacaaatacgacgaaaaattatattaatgaacaggttaatactcaaaatcgctcactggctttacagcaggaggcagtaaataagctaaaacaggacgtgaccgtaagcgttgggaaggttaataaagaactggatgaacaaaaggatgttctgcgcggcgaaatcggccaggccaaagctgatgcaattgcacagtgcgaaagttgtgcgtggcgagcttaa

SEQ ID NO: 82920 - DNA, 1524 bp, Citrobacter koseri
atggcacaagtcatcaatacaaacagcctgtcgctgttgacccaaaacaacctgaacaaatctcagggttccctgagctctgctatcgaacgtctgtcatccggtctgcgtatcaacagcgcgaaagatgacgctgctggccaggcgatcgctaaccgcttcacctccaacatcaaaggcctgactcaggcttcccgtaacgccaatgatggtatctccattgcgcagaccaccgaaggcgcgctgaacgaaatcaacaataacctgcagcgtgtacgtgaactgaccgttcaggcaactaacggtactaactccgacagtgacctgacctctatccagaacgaaatcactcagcgtctgaacgaaatcgaccgcgtttccggtcagactcagttcaacggcgtgaaagtactggctcaggataacaccctgaaaatccaggttggcgcaaatgacggtgaaactatttctatcgacctgaaaaaaattgacacccagagcttgggcgtgtctgacttccgcgtgaacggtgcagaaaaagcgactgccagcgacctgatttctaaatttggtgcgaccggtactgataactacaaagccaccgttggcggtactgcagataccgacgttactgttgatattaaatcccagacagttaaagccggtgcaaatgctctgtatgtcagtgctgcggatggtagcctggtaacaacggctacgacacctaatactgcatctggtgtttatactgctactgcggcccagaatggtagcgctgagagcctggcagtattaggtgcgaatgcgaaagtgggtgatacgttcactttcgacggcatggaattcaccaaaaaaaccgaaggtgcaaccgatccggaatttggtaacggtacttacaccgcgaaagtcgatggtaaaaccgttactttcaccatcgatgctgcgagtgatgatgctggtgctgatgcaacagttcagacagatgttgctctgtatgcctctcagaacggaacattaacgactagcgcaacaactgctaacaaagcggctacgctgactgacttgcagaatgcaaacgcaaccaaaacaggtagcacgctgaaatcaagcggtgctacttatgacgttgatattgacggtaatgtaactaacggcacaggtgctaataagaaaaccatgtatatcactactgataccaaaggtagcgctaaactggttaacgaagacgtggcgaaagccagcaccagcactgaggatccgctggctgtgatcgacgctgcgctggcacaggttgacgccctgcgttctgacctgggtgcggtacagaaccgtttcgattctaccatcaccaacctgggcaacaccgttaacaacctgacttctgcacgtagccgtatcgaagatgctgactacgcgactgaagtgtccaacatgtctcgcgcacagatcctgcaacaggcgggtacctctgtactggcacaggccaaccaggttcctcagaacgtgctgtccctgctgcgttaa

SEQ ID NO: 82921 - DNA, 213 bp, Citrobacter koseri
atggccctaaaaaaagtaaccataaagggcggttctgctgatggtcaaagttttatgcatgaagtaagtagcaagcctgatgataatggtgcttatggttacattgaaaaagaaacgagtagcttactttcaacgaaagtcacatacttcatagagaaggatgagagcggtaaagttgatacatactttgttgatttcacaaaaccacgttga

SEQ ID NO: 82922 - DNA, 258 bp, Citrobacter koseri
atgtataatacctctcaaagcatggaggggattcatcatgtcagactggaacatcgcagcaaaaccgaaagacgagcaagacaaaaagaacgcctgaacatgccggttatcgcagaacaggtggctcgcgagcagcctgagcacctgcgcgagtatttcatggagcgagtacgtttctaccgtgagcaaagcattcagctcccgcgcgccagtgacccgcgctacatcgaaatggcggagcagaacgccaaaaagtaa

SEQ ID NO: 82923 - DNA, 1272 bp, Citrobacter koseri
atgtcccttaatgattcaaaaatccgcaccttaaaacccgcatccaaacctatcaaactgtctgattcgcacggtctgtatttgcttgtcaatccacgcggctcgcgtacctggtatctcaaatatcgttttaatggcaaagaatctcgcatcagtctgggcgcgtatccgctgatctcgctcgccgaagcccgtcaacaacgtgacggtattcgtaaactgctggcgcagaatatcaatcccgcgcagcagcgtatgtctgaaaaagccgccgcttcaccagaaaaatgttttgaaatcgtcgcactaaactggcacaaaactaacaaaaaatggtcggcggattacgcagaccgcatccttgccagtatgaacaatcatatctttccggctattggccatctgcctgtcacgatgctaaaaacacagcattttacggcgctgctgagagttatcgaggataaaggttttctggaagtcgcatcacgcacccggcagcagatctgcaacattatgcgctatgccgtgcagcagggcctgacggaaaacaatccggcactgcatctggaaggtgtcaccgcgccaccggttaaaaatcactatcctgccctgccactggagcagttgcccgaattgtttgagcgtatcggcgattatcagcagggacgggagttaacaaggctggctgtagtgctgactcttcatctgtttattcgatccagtgaactacgctttgcccgctggggcgagatagatttcagacacaaaatctggaccatccccgccacccgcgaggcgatagataaagttcgtttttcaggtcgtggcgctaaaatgcgtactccacacattgtgccattgtcccggcaggctattgtcattctgaagcaaatacaggaaatctccggtcatctggagctggtcttccccggcgaccataacccgtataagccgatgagtgaaaataccatcaaccgggcgctgcgcctgatgggctacgataccaaaaccgatgtctgtggacatggcttccgggcaatggcctgtagcgcattagtggaatctgaactctggtcgcgggatgcagtggagcggcaaatgagtcatcaggaacgtaacagcgtgcgagcggcatatatacataaagcggaacatctggatgcccgcaaggccatgatgcagtggtggtctgattatctggatatgagtcgtgaagaatatatcgccccctggatttatgctcgagaaaataatacgacccggaataattaa

SEQ ID NO: 82924 - DNA, 1263 bp, Citrobacter koseri
atgcctttaaatgaccatataattcaaaatgcaatctcccaggagaagccttacagacttgccgactcactgggcctttatctcgttatatcaaatagtggttctcgtttatggtacttccgctttcgtttcaatggaaaacaaaaccgcattgcttttggtccttatcctcaaatcacaatcgcagaagcccgcagaaagcgtgataccgcaaggaggttgctggcatcaggcatatctccatccgagcatcgaaagtctgaaaaagcagcctccggcaaaacccgcacatttcagcatattgcccttgcatggcactccagttgcctgaaccgctggtcggagggacatgccaataaaattctggtctgcctccagcgatatgttttcccttatgttggtgagaaaaatatcgcgaagattgaaaccttccatctggctgaactcatcaaggcaatcgacaacaagggtgtacatgatgtcgctggtcgtgtgcgtcagtatttaactaaaataatgcgttacgccgtgcaacaaggattcatacactacaatccggcatttgatttagaagacattatcactccggttgtggttcgacattatcccgccctccccctcaggcgtctgcctgaattactgacagcaattagtgaatataaaggccatgaacttacccgcctcgcacttgagttgagtctccacgttttcttgcgcgcaagcgagttacggcttgcccgatgggatgaatttaatatgaaaatacatatatgggcgattccagcaaaacgcacagccatagacggaataagattttcaaatcgtggttcaaaaatgaaagaggaacatctggttcccctgtccgaccaggcgatgaagatactggaacgcataaaaaagatcagtgggaaatcggagtttgttttccacagcatcagaaatttaaataaacccatgagcgagaacactattaacaaggcactacgggttatcggatatagcacaaaaaatgatgtctgtgctcatggattccggacaatggcctgtagcacccttaacgagtcagggaaatggtcaaaagatgcaatagagcggcaaatgagccataaagaccgtaacactgtcagagcagcatacctgcataaagcagaatatctggaagaacgtttcgaaatgatgcagtggtggtcagattatctgagcacaagccgtgaggaatacatcgcaccctatatttttgcccgatggccaggtatcatctga

SEQ ID NO: 82925 - DNA, 3603 bp, Citrobacter koseri
atgaaaaattcgtctaaagatatcctcactgcatggcaggattatttgaaattcagcggtgcggaaaagagtaagataccggccagccaggtgcatgagcaccatcaacttatgctcggtgaagataactgtgaagaaaaccaaagcggcgtagtgctccgcattacgccagaaatgcgcgaaaactggcgcaggcgtttcgtcaaatatggtgaaaagggtgagattacccatattgagcctgtcaatctgctgtttccggtgttgcgctgtatcgaaaatgagcgcggcagagccaacgtaaagtacctgccgttgttctcttttccacttcccaaatccttctttgaacagggcaatacctcgctgctgattcctgttaaagacggacaactggtcagcgcattccccttcgcttttcgcgagatgtttggcatccagttggatgaactgggtgagaaccgccatatgatgagtatcgtcagtgcgctcaccgggtgtaaatatgacacctttcttgaggcatttgaggctcttcaggtatgggtcgctcagcaatcaaaccgtaaatatcagggactggaaactgcatttaacgccctggtggctccgttgcataatgaggattacaacctcaagcgggatgcggaagattttagctggctgtgcgataacacggctggtgacttccctctactggagcagtatctcaaccatattcaccatgataagaatgcccctgatatatacgaagtggtaaccggtggtttgtttgaaacacaatacccgctgggacatggacagatggcggcaatacaggccattaatcaggatgagcgcctgattgccgtgcagggtgcgccgggtacgggtaaaacaacactgttcaaatcactcatcgcacaacagctggttgccagagcgctggcaatcgctgatggaaaggaccagaactttggaatgctggtcacgtccacggcaataaaagcggtggagaatatcattgacgatctgcgcagtgacccggcaacccaggatcttgactggttatggtttcatagcggctcgaacgaacaggttcagtatgagcttacccggcttgagcaactgatcagccgctggcggcaggaaagctatgacgaacagcaccagcgcgattttttagctgttctgctcaggcatcgcgaagagttgaacgcctgttaccgggcgtatctgaatgaaaaggcaaccgcgatacagtctgttgtggattgtggtctgaacaccaccaacgcagaagagcttccggcacgtttcatggcaaaaatcccccaggtagccgctcaggcacagcagttgggaattgacgtttcactgcatcatcccgacgacctggacaacttaaccagccagctggagctatgcctgcaggaacttcgcgggataaaagcgcagcgtttgcaggccagcagaatttaccagacattgcaggcgacatggccacagcagcatgagctggcacagatactgcgctggatggattcaccactacgccccgctctggaactgcattaccgcgactatccgcgtaaagggataaagcgtcatctggcccgcctgttcgagggaaaatatccggcacggctgcaacaaatgaatcttgctgcaccggaggactttcagcatttcagtctttcttccctgccccatcgccagttagcggctcttgctgatgcgggagaaatgctgtcacatcagacagacaacctagccctgctggaactgctcatgcatgacgaacccgatgggcagcaggaagaaaatctggtgagcctgtgtgctgatatcgcaacactccggaaacaatggcagcaagtcacccgggcacaacaggttatggctcagtatcaacagcattaccccgaaggtaactggtgtgacattttgcgtaaacgcttcatcaggcaacaccgggaaatgtttgaagctgctatcggctatctctggcaggaacaactgaagcgaaaaattgagctggaagaggtgctgactcactggcgggctctgatgagtaatcgccgcagtgcaggctactatcgctggctggataagctggatgaattctatcgcgcactgtcactggtgtatccggtaatggcaaccacactggtctccgcgtggaaagtggcgggttatcgtaaacttgatgaactcaaggggcacaaaccctggcatctggcactgtgcgatgaagcaggcatgatttcgcttgaatctctggtgccactgttgagtcgcagcgagaaagcgatgattgtcggagatcctctgcaaatcgaacctatcaggaatctgtcagaaaacctgcaaacacaactgcgcgaacgtcattttgctgacaataatacgttatatgagcgggtttcacctgtaagcgttacaggctggcaccgcgcggcaggtacactttccggacgagtggatgataccggcaacggtattattcttgatgagcatcgccggtgccagaaacccattgccgatctctttatccggctggcgggctatcatgacgtcagcgtggaaacggcctccccttccgaccgcattgccagcgcctttgagaagtctggtgggcatcatttgatgttctacagcgtagagggccagaaaggcgatatggttaacaccaatctggatgaagtcgatgctattgagcaactgctgaataagctggaagaagccggttacgatctaactaccgatgtgggcatcgtcactccctacagcaatcagaaatcattactgatcaagcgccttgccctgcgtatgaatcactggcagaaaaactgcattggtacagtgcatcagttccagggagtgggctttgaggtcatcatttacagcccggtaatttttcatcctcttgataatccaaattttcagaacgatgcgccaaacatgctgaatgtcgtggtttcgcgcgcaaaacagcagtttatcgtggtaggaaaccaccaccggttgcggcaggcaggtggatacctgaaagttcttgcggacactgttgctgaagattttcttcttgaacagggtagccagcatccaaatttcgacagcctgagccagacaccgcgcctacagcgttattaccgtgactgtgaacatatcaccgcattcagtgcactggcgagccagtgtgaacaggagctggttattatcactccatggatccgtcggggcggtaaacaatatcaaaggccggaactggcacaactggtggcaacacagcggcgtggtgtcagcgttaaagtctactacggttactaccatcaacgtctggaccgtgcagaggataatgatgagatgctggttgctgaataccgcgaacaactgggaaaagacaatgttatccgcctgaccgaaggtactcatgagaaggtactgatgatcgatggccgctatattgttctcgggagctggaactggctgtctcatggttatcatgatggttgtgagcgtagcgagcagttcagtaatgctattcgtcatgagattagcgcggagctggatgatgtggcactggtgaaggaacttagggagaggctgaggctggaatag

SEQ ID NO: 82926 - DNA, 639 bp, Citrobacter koseri
atgaataagttcagcaaacatatagaaccaaatagatctattttcgccagcgatcccttcggatacagtgcattcgctcgccaaatgttaggaatggctagcactagtgcaggatttcctgtggatataacaaaaccagcgacaagtgatgaattaaagaacccaattctttggttatcacaggctcatgcgctatctgaagctgcggttgctgttttaagaaaagaccaagactttgaaagtatgcctgtattgatccgcggagtttgcgacagccaatactgcgctgtgggtttaatgcttgttggctatagcttagaaatatgccttaaatcgatgataattatgaaggaaggtatagaaggatacaaagccatggaggcacaaaaccggcatcacagattacatcagctagctactttcattcccgacttaagtgaaaaagagttggcaattcttcgtgggctgacacactttgtttattgggctggtcgatatccagacccaggttctggtaaagaaaatgatgcagaggatatttttaagatttcagaaaaatataaaatttcagcgcacgatgttttcaaattatcggataaaataatgaaacatactataaagataactaacaatatataa

SEQ ID NO: 82927 - DNA, 6279 bp, Citrobacter koseri
atgtctgacagcctgcttgttcgcaccagtagagatggcgatcagtttcattatctttgggcggctcgccgtgcccttcgactactggaacctcagtcaactcttgttgccctgaccattgaaggggcatcaacgacagaaatgggctcccagccagtggttgaggatggggaggagctgattgatattgctgaatattacggcagtaacgagctcgcaacagcaacaactgttcgttatatacagctaaagcattcaacactgcactcagatactccatttccccctagtgggttacaaaaaaccatcgaaggttttgccactcgttataaggcacttatacaaaaaataccggtagaaacgttacgcagtaaactcgagttctggtttgtgacgaaccgtccagtcagtagcagcttcagtgaagcgatcaatgatgccgcgaggcaacacgttacacgccatccacatgatctggcgaaacttgagaaatttaccggacttcaaggcgctgagttatcgatattctgccagcttttacatatagaaggtcagcaggacgatttatggagtcagcggaatatcctgctaagagaatcaactggatatctccccgacctggatactgaagcccctctgaaattaaaagagttggttaacagaaaagcgttaaccgaaagcgctgcaaatccttccattaccagaatggatgtgttgcgtgctttgggggtggatgaaacagatctttttcctgcgccctgtcgtattgaaagaatagaaaatgccgtcacaagaactcaagagacgacgctggttcaacgtgttgttgaagcatccggtgcacctgtgatcatccatgcagatgctggtgtggggaaatcaattttctctactcatataggggagcatcttccgactggttcagttagcatcttatatgactgtttcggactgggtcagtaccgtaacgcttcttcttaccgccaccaccatcgtacagcattggttcagatggctaatgaaatggcatctcgtggtctctgtcatccattgatcccaaatgctggtactggcatatcccagtatatgcgtgcgtttctgcatcgcctttctcagagcatttcaatactccgggcctctgagccactggccgtattgtgtattattattgatgctgcggacaatgcacagatggcggcggaagaaattggtgaaacacgttcttttatcaaagatttaattagagaaaagcttcctgatggagtctgccttgtcgcactttgccgaccttatagacgggaattgcttgatccacctcctgaagcactcacattatccctacaagcttttgatcgcgatgagacagccgctcatcttcaccaaaagtttccagatgccagcgaaagtgatgttgacgagttccatcgtctaagctcttgtaatccccgggttcaggctctgtcattatcacaaaatcttccactgaacgacacactgagacttttggggccaaatcccaaaacggtagaagatacaattggtgaagtgctggaaaaatccattgcacgcttacgtgatacggccggaatatctgaacgtgctcaaattgatacgatttgttccgcactggcaatattgcgtccattaattccattatctgtgctatctgccatttccggagtggctggttctgctattaaaagtttcgcacttgatctgggacgtccattaatcgttagtggcgagactattcagttctttgatgaaccggccgaaacatggtttcagaggcgttttcggccatcggccgctgctctgcatcagtttattactaaactgagaccactaacaaaagatagttcctatgcagcatctgttttacctgcattgatgctggaaggaaaccagctttctgaactgatcgagctagcgatatcctcacaagctctgcctgaaaccagcccggttgaacgcagagacatagaacttcaaagattgcagtttgcgttaaaagcggccttacgcacaggtcgataccaggatgcggctaaactagcactaaaagcaggtggagaatgcgcgggagacaacaggcaaagagtcctgctaagggacaatatcgatctggcagcaaaatttgtgggaagcaacggcgttcaggagctggtttcccgtaacgcatttccagatactggctggccaggctccagaaatgcttattatgcggcaatactttccgaatatcctgaactctcaggagaggcccgcagtcgccttcgactcaccatggagtggttaacaaactggagtcaactaccagatgatgagcggagcaggcaaaatgttaccgatcaggacagagcggcaatgctcattgcctgcctgaatattcatggcgcggaagcggcagcaagggatctcagaaggtggctgcctcgagaactatcttttgaagctggaaaaattgtcgccatgcaattactggcccacgcccgttatgatgaacttgatcagttagctattgcggctggaaacgatatcagcctggttatgggaattgtactggaagcaagaaaacttcaccatccagtcgctgaacaagcaatcagaagaacctggcgcttgttaaaaagtccgcgagtcagcattagagacagaaaccacgctaataaccagacaatagcagcaatcactggcatggttgaaatggcgcttattcaatctgtttgtactgaatcagaaagcatccagttgttggatcgttatttaccaaaggttcccccctatgctctaacttctcaatatagtaaagaaagagttgcttacgtccgggcatatgctctgcaggcaaacctgatgggctctcaattagcgcttagcgatttagcctccgcagaggttaaaaaagaacttatggctgaaaaacgccacggcgaatctgatgacctgcgtcaactgaagcagtatagcggagtattaatcccttggtataatttatgggccaaagtaattcttggtaaaacaaggaaagcagacttagaaagtgagctaagtgatactcaaaaagaatcgacggctattaagggtcattcttactctgagcattcattatcatcaaatgagatcgcaaatgtatggtttgatattctgatcgaagcaggtaatgcatcaaaagacgatgtagaaaacatcatcaaatggaatcagcataaagggaatagagtattcacaccaacgcttcaccgtttcagttctgtatgtgcagagatttcagggcttgaagagctttcatatcacttcgcagaacttgccttatccttatggagggatgagcactctgatgctcagatcaaagctgacggctatatagatctttcccgttcactcatttcacttgatgaaccagaagctaaagaatactttaaccaagcgatcgaagttacaaataagttgggcgatgaaaatttaagtcgatgggaagcgatacttgatcttgctgaatatgttgctggtaaagcgcaagtcccccctgaaattgcctataaactagcccgatgtgcggaactaaccagagaatatgttgatcgtgataaacattttgcatggagtgatactgttgagattttggctgagttatgtccatcttcagccatagcaataataagtcgttggcgtgaccgtacatttggcaatcatagaagcatactggcatggaccattgggcatcttgtaaagaaaaataaaattaatgcactcgatgcacttcctttaatcacatttgagaatggttggcataaatgcggcttgcttgactcatttttatcctcgtgtactgatgaaaaagataagagcatggcattcgaagtggtttatcaatatacaaaatttgatttgcaaaatatccaaaatcttaaaaatctggatactattgctacatcattaggtattgaacactcagaactgaaagaaagaatctcaggtcttcaacatactgaggcggtttcaaaaaaatccagtctctcatcggatgataatgagcaaggtcatgacaaggaatgggagttcatttttaaggattgtgatttatcgtctattgatggtattagtgcagcatacgaaaaatttcgtagcgttcctgaattctattccaaagaaaccttcatcaagaaagcaataagccgagttaaggcgggcaaagaatgtagtttcattactgccattggtgctatatttcactgggggctttatgattttaaatatattcttgaatctatacccgatgaatggacatctcgtttaagcattaaaacagtcctagcaggtttaataaaagaatattgccaacgcttctgtatgcgaatcagaaaaagtcgtgtttacgagatttttcccttcagtctggccagcagtctctctggtatgagtgaaaaagagattttcggtattgccctggaggccattgcggaatcgccagagcccgcaaattctgaccgtttatttagccttccaggccttcttgttagtaaactgaagagtaatgaagcattaaatgtattatcttatgccttggatttattcgacgaagtgctaaaagatgaggatggtgacggcccatggaacgagaaattatctccgccaactcatgtagaggattcacttgcaggttatatttgggcgcgactgggttctccggaggcagaaatgcgctggcaggcagcacatgcggttctggtactatgtcgaatgaatcgtacaagcgttatacaaggaattttccagcacgcgataaatgctaccactttacctttttgtgatcgcaatctgcccttttatacccttcatgctcaattgtggttgatgatcgctgctgcaagggttgcgctggatgatggaaaatcgctgattcccaatattgattatttctaccgttatgccactactgatcagccgcatgtattaatccgtctttttgctgccagaactttacttgcgctgcatgatagcggcctgatctctatcccagcacaagaagaggataaactccgaaatataaaccggtctacgactctccctgtgcttgatgaagttgaagatcatagaggtgaagattcatatacttttggtatcgacttcggcccttactggctaaaacctctgggacgttgtttcggtgtatctcaaaaacagttagaacctgaaatgcttcgcattattcgtgatgtccttggttttaaaggtagccgcaactgggatgaggatgagcgtaataaacgacgctattatcaagacagagataatcatcacagtcatggttcctatccacgggtcgatgactaccatttttacttgtcataccatgcaatgttcatgaccgctgggcagttattagcgacaaaaccattagttgctagtgactacgacgatgtcgaggatgttttccaggactggttaagaagacatgatatttctcggaacgatcatcgctggctcgccgatcggagagatattccccccaaagagcgctccagttggcttaatagcagttctgacaatagggatgaatggctggcgtcaatctctgaaaatgtatttaacaaaacactatgtcccagccccggactattaacgctatggggacgttggtctgacgtttgttcagatcgaaaagaatctattgttgtccattctgcgttagtatcgccggagcgatctttatcgctcctcagagcattacaaacaactaaaaacgtatatgactataaaatccctgatgctggagataatcttgaaatagatcacgcacactatcagctaaaaggatggattaaagatattgctgaatgctgtggaattgatgagtttgatccctgggcgggtaatgtaaggtttccaatcccagaaccagcctcatttattattgatgcgatgaaattaactactgataaagatcatcgggtatggtattcaccttctagtgttgaaccggcgatggtttccagtatctggggccatctatcaggtaaaaatgaggaggaaaaatcacatggttataggctatgtgcttcaatacacttcataaaatcagcattagaaacattcaacatggatctcattttagaagttgatgttgatcgctattcacgaaacagcagatatgaacggaataatgaaaatgagctcgacaatatcccttcaagcactcgactcttcctcttccgacatgacggaaccatccacacgctatacggcaattatcgagttggggaagaagttagttga

SEQ ID NO: 82928 - DNA, 726 bp, Citrobacter koseri
atgacggaaccatccacacgctatacggcaattatcgagttggggaagaagttagttgatgagcttaaactgaatgactctgttgatacgttgggccggtggatggcccactatattgcagaactcctttacgatgcggaacatagcccggatgaaattattcgttcaactaagcatgcggagctcagggactctatttgggcattctgggttaatcgctacgaattgccaattggcaataaaccttttcaggaacctgaacctattctgagagccttacaaagccttgatcctgaaaacgagcagcgaagatatttttcccccgcacaagaactgatagataccgaaaaagaaccagacgaagttaaaaaatggctctcaatcgctaatcatattgattctacggcgaaaatgctgattgattactgcctctctttagctgcagaaaatgctattgataaatctaaagaatgggttgaactggctcaacaggccggactcgacgaagacatcgatatgattgaattgcggatttttcgatttctggataatcctgtcaataaagatgatccgacagttgtacaaagaagagtactggagaaacgccagaaaaaactcgccgcgtttctctcgttagcttctcagttagatgaacaactcaaatcagaacttgaagctttgccagcatctgagaacgagccaacaggggatgatactggtgtttga

SEQ ID NO: 82929 - DNA, 681 bp, Citrobacter koseri
atgccaaatctcagatttttgatcgaaaatatcggttcgaatcaggacaatataaaagccgctttcagtaaagcttaccatctatgcaaagatgctgggcttcaacaaatcacgttggtgttccctgcaaaaggaatgtttttgcactctgatattgcaacatttctcggcgcacaaactgcaaaagcattgggaaaaggcaaaaccgtcgatctgggagataatatccgactagactttaagatccctaagagtttcttaccatatgataactatgacgtaatactggcaacgtatcttctgagcaaagacatggatattgttgatagtgcgcaaaatatcaacagcatcgtcttcttaccttggtcagaggaagaaggtaaacgctggttatctacatgggatcctgaaatagtcggtcagtctcactggaaagtacaaaagccacaattgccaacctatgtaggcgatgagattttgcgactaggtcgatgcatcaacatggcaacagggctcagccatccatgtgataaagacatggcaaagcgaattttttctgacctaaaaaagcaaagattcagagcaactgaagaggcaatcagacagtttgcagtcaataacggctgggaacctgccagggcgaaagaattggcaaattttgctaagaaatatatggaatag

SEQ ID NO: 82930 - DNA, 1860 bp, Citrobacter koseri
gtgagtttccctctagaattgatagcacaaatttctggtcataatgaaaacttccaccgcaaggtcactttaaacagaggccttacagttctactcggccctaatggttctggtaaaacgcaccttttgagggggttaaagcaaagtctaagtcagcatacaaatggaaagcgtgttcgctttctctctgctggccgaatggggatgttagagcaattcaggtcagactatgatggccgcaggggttctccacaatatgacagtgcaaattatggtagcaaaagtgatgcaactcgcagacatcagatggaaactataaatggtgatttccaaacccttgctcaacgggctgatattctaattaaaatccaagagaggcttagaaaattatttaagcgtgacattcttattgaatgggatggcgggtcattaaaaatattattttcgagattagatataaatgccagatcatactcttccggccgagaagcatcaggactgatgcatttagttggcattttagccgctctttatgatgatgatgtaggggcgcttcttttagatgaacctgaagtttccttgcatcctcagttacaggcatttcttcttcatgaaatcctgaccgtctcgggtcacccctctgatggaggtaataaaaagattgttatcatcgccactcattcaactgaaatgctccaaattcataaaccagaagacttactgtctctcgtcttctgttatgacttgatgagtgaaccagtgcaaattcaagctgacgctggcgaactcaagaataaaaaagtacaaaacttaatcgctcgtcttggacaagaacataagctatcactgttttctaagcggcctttattagttgaaggaccatctgacgtaattatctgcagtgcgcttgcaaacaagcttgatatacatcttgaagccgctggttcacagttattacctgtgattggtaaaggacagatgcccactgtggcaaaattgctacgactactcggcaaaagcccagttgcgttggctgatgctgatggtatcgctgatgggcttgaacttgtcaactcataccttaatgaaaatcccaccgcagaaatgcgtgcaaatatgctaggtttttcatcctctagccaaatggttagtgccatattcgcggatttttgcaaattagtagattgtcgatggaatgaaatttctgcaactgctgaatcgcacccgtattgggtgaacaaaaaaaccgaggaagagacacaagcaaagcgtcgttctgctttctgtacacttttcattatcgatgacaatgaattatcaaatttagctagtgatgatgcgtggagtagtataaaaacccgtttaactgtactgcttgatttgctggaacagtgtggtctatttattttacgcaaaggatcgatagagtcttactatcaaagttcagacccattcacttcgattgggaagccaagtgcagccgtagatgaaattgatcatatcaatcagttatcgcatcacgatatttacaccggatattctgatttgattcgctgcgtccagcacgcctcaagcactgaagtaatatgtgaggctgatgcaatgagagaccttttactttcgatagtagcacctgcacacgccagactaaagagtggagaatcctcagcaaatttcaatactttagctcattcaatattgggggatcgttcaaaaatatttggtttggctattgaaagtgaaaagcttattatctcaatcgagagtaatattctcaactttacaggttttcctgtagctattggaaaggatgatgacgtactaaaatgtatcaatacagcccttgccgctaatatttga

SEQ ID NO: 82931 - DNA, 558 bp, Citrobacter koseri
atggaataccaaacgtcattgcagaaaatattgtcagatgaccctgtaagaatgaagatcctatatgcggttcgagcactggaactcaatgatggttggattggagcgggatttgtacgagacgctgtctgggatcacttacatgggtatgggctaagtcctgtttctggtgatgtagatgtcgtctggtttgactgtgagcactgtagcccagaccatgatagctatctggaagacaggcttaggcaacaattaccttcgttagactggtcggtgaagaatcaagccagaatgcatcaacgtaatggtgatcatccctatacctcaacgggaaatgctttactgcactggcctgaaacagctacggccgtagctgtcagattggggaaggaaggtctcgatatcactgcgccttatggactttctgacttatttgaactgcgtttacgaccgactccatcatttgaacgtgaaaagttgaactcttttaaacaacgggtcactacaaagcagtggttggaacgttatcccaggttacagctaatcgtttccttataa

SEQ ID NO: 82932 - DNA, 252 bp, Citrobacter koseri
atggcattaaccgataaacaagtccgcagtgtaaaaccttctgacaaaccttataagctcgctgatacgctgggtctgtatcttcttgtaaaacccaacggttcccgcatctgggatctcaaatatcgctttgaaggaaaagagtccagggtatcatttggctcttatcccgaaacgtctcttgctgtcgcccgcgaaaaacgcgatgacacccggcgggtgctaaaatccggttttaacccttctcagtag

SEQ ID NO: 82933 - DNA, 276 bp, Citrobacter koseri
atgaattacgatattgtaaaaaaaaccacaatcacaaaacaaaagcctggttcaaatggaggcaaagttgttggcggctggcatccggcagacgtttcaggggcagggcgggtgatgttgggtcacaacaggggtcacgacgccatccagatcgaaagctggattatatttaatcaggcctttctgtatggcgtagcgcatgactttggtcagatactggcgaacctgcccggcgacatcatgtacgcctttatcatcaatagttctgacaagtag

SEQ ID NO: 82934 - DNA, 525 bp, Citrobacter koseri
atgaacccgctgatgggggatgtttatgagtgtgtctggtgcggtggtcgcgagttgtctaaatatgagacggatacatcaccgaatgccgtttattacggccacgcctgccagcaacggtttgtgtctgttgagaaaacgattttttataatattccggtcaaatgctggccccggttttatacggtggccgtgtctctctggacctcctggaaacccgtgcaggcgcgtgcggtgtgcctgatcccagcagtgagtagctattcgaagtaccgcaaacggctccggcctttggttgatgaattgtgcaaagacagggcggtgacaccgcatccccgtttgctggtgggattttctccgggggagcagggcgttcgctgtatttactgtggttcggcgcgcctgaaaacgtattgcgtgacaaaatattcgcaggaaaacccgaagatagattgcctggtgtgtgggaagcatttcaggctgtatgcgtggacaaaacctgaacttgtggcaccgaatgaatga

SEQ ID NO: 82935 - DNA, 591 bp, Citrobacter koseri
atgacggcggaaggccaccttcttttttccattgcctgctcagtgtttgccaaaaatgcggaattgacgccggttctcgctcagggcgactggtggcatattgtcccttcggccatcctgacctgcctgctgcccgatattgatcatccaaaatcatttcttggccagcgtctgaaatggatatcaaaatctgtcgcgcgcgcgttcggccatcgcgggtttacgcacagcctgttcgccgtgttcgctatgcttgcccttttctacctgaaagtgccggagagctggattattccggccgatgccctgcaaggaatggtgctcggttatttaagccatattctggccgatatgctgaccccggcgggcgttcccctgctctggccctgccgctggcgcttccgtctgccgatcctcgttccgcaaaaaggcaatcaactggagcgttttttatgcatggcgttattcgtgtgggctatctggatgccgcagacaatgcccgaaaacagtgcagtgcgttggtcgtcgcagatgattaatatgctgcaaatgcagttcgatcgctttataaatcaccagattgctgagtaa

SEQ ID NO: 82936 - DNA, 981 bp, Citrobacter koseri
atgaaattgcatcataaagcgctcaggctctttatctccgcaagcgtcattgtactgacgtcctcttttctggcttatgaattgatcgccagtgacagggcgatgaatgcctatatgggctatatcatcgaaaaggcagactcttcatttttgtatgacaagtaccagaatcagagcattgcagctcatttaatgcgcacgttcacggagcccaaaacaccgccatccgatgaacaacaatatgcgttatgccgcggatttgaaacaggtcgcaatacccacggcatcaatctcaccactcataataccccatcgctacatggaacactgcaaaccgccgaggcaaactgcgcgatcgtagctgacgacgctcctctgttgttcgcttttgatcaggcggtggccgcgaatcgtaaccagaaggattatggtaaagggctgggcactgtagaagataaattccactactatctggatattaaaaaacgctacgtctatttctataacctgattgactccagacaattttttatgcaccactggtcttttctgcgaaaaggaacactgggaatcaaccgtaacgatattgatggtcaattcacagggcgaacagtgctctcaagcatttatcaggacgatcttacggaaaaaaatgtgatgagttttttaactcccgtttatctacatggaaagttaaaaggcatagtaatggtggatattaaccaggataacctgaagaatattttttacactcaggatcgtccactggtctggcgctatctggacgcgactctgttcgacctgaattcagagaaaaaatcattgtccatcagagcgaaaataacctctttaattatgttaattatgttcacgacctgccaggcggaatccgtgtcacattatctctcgacatcctgtattttattgtctcatcatggaaactgttcgccttttacctgctcgttaccgctacgttactga

SEQ ID NO: 82937 - DNA, 504 bp, Citrobacter koseri
atggtcagaatgcattttcgcctttaccataatgtcaatcgtgaaaatatcagcgatgcgatgaccggcctctataaccgtaagatcctgacaccgcagcttgaacagcgtttgcagcgactggtcaacacaggcacctccgtgacgtttatcgccatcgatctggataggttgaaagtcattaacgacacgcaggggcatcaggaaggcgatcgcacaattacattgctggcaaaagccattgaagcatcggtgcgtaaaacagattatgcaataagattgggaggtgatgaattttgtgtaattcttatcgattcagttgtaccggcaacaactttacctgagcgtattgccaataagttgcgaatcatcgcgccagataaggtgattagtttttccgctggactttatcatatgcaacctgaggatacgatccaggacgcatacaaggcctctgatgagcaactctatctcaacaaacaacaaaatcatgcacgtttgtga

SEQ ID NO: 82938 - DNA, 780 bp, Citrobacter koseri
atgatcggtcgactgcttcgtggcggttttatgaccgctatctacgcgtacctgtatattccaatcatcatcttgattgtgaactcctttaacagttcgcgctttggcatcaactggcagggctttaccaccaactggtacagcctgctgatgaataacgacagcctgttgcaggcggcacagcactcgctgacgatggcggtgttctcggccacctttgccacgatcatcggctcgctaacggcagtggcgctgtatcgctatcgttttcgcggtaaaccgtttgtcagcggcatgctgttcgtcgtcatgatgtcgccggatattgtaatggcgatttcactgctggtgctgtttatgctgctcggcatccagttgggcttctggtcgttgctgttttcgcatatcaccttttgcctgcccttcgtggtcgttaccgtttactcgcgcctgaaagggtttgacgtgcggatgctggaagcggcaaaagacctgggagccagtgaagtcacgattttgcgtaagatcattctgccgctggcaatgcctgcggtctcggctggctggttgctcagtttcaccctgtcgatggatgacgtggtggtttcgtcattcgtcaccgggcctggctatgagattctgccattgaaaatttactcaatggtaaaagtcggcgtttcgccggaagttaacgcgctggcaacgattttgttggttctgtcgctggttatggtcatcgccagccagcttattgctcgtgataaaaccaagggccgttga

SEQ ID NO: 82939 - DNA, 456 bp, Citrobacter koseri
atgaaaaagaaaggaatattattattaatagcaatactaactataatttttttattgctgcttttgtttgccaaactaaattttaatgtaaatacggccctcgctatattttcattaattttaactgtattatcaggtacagacttcatcaaaaagcacacttcaattaaatcaacaaataaaagccctatagatatgtggatggtattcagtgtagctatcaccgctgtttctatatatggcctacttatcgaaccctcattattagatatagagcgttacactatctttatagcgtcaggtttgcttttattggctgttttcacttcagcatatttaaattataaaaaaataaagaaaccggatgtaagagaaataatcaaacagagtcattcagtattcagagaaagcgaagaaaccattactattacaacaaccataaaaaaagccccataa

SEQ ID NO: 82940 - DNA, 1143 bp, Citrobacter koseri
atgtatagaagccaagcatcattagaaactactgatcttaatacaattgatggattgaattgtggtttttattaccaaaccatgacggcttcagctactgcggaacgtaattatccattagtagaagctggtggtttaatagtttatcagacgggggctaatggtggcacctcatgtattcaagaatacacaacgttctctagtttgagaaagtttgtaaggtcgttatctagtggtgtttggtctgaatggatagaacaaccaaaattatccggtaataacgcttggactggtattaataattttagtaatgatttgcaaatcactgggaatattacaagtagtgcatcattcccattaaaattagtaagttcgagcccaactattcaatttatggaaacggattctggtggaagtacatatgcaatgattgcagacggtgccaacttcagactatctagggatagtacaaatggtgcaactatttttaactatgtacgtgatgataactcatttaatattggtcagggtgtacttagaatggtaggtaatactttacctacttcacagggtatcggtgttggtggttatcgtgctattgaacctggtaatgattatgctggcttcgataacatgaacaatatcaatattacttcatggtatgggatcggtttttgtactgcatatactgcccccctaaatggtatagtagctggtaaacctgctgtatatattaacacacgtaatggaactttagccgctaagaacgcagtatttgcaaacactacacagctaacatccgaccgaaacgcgaaagataatatcgaagaaatcccagatgatgatgaaactcttgaaaagattctaggactaaaaacctatactttcaattttaaaaattctggtcaaccgtcagcgggctttattgctcaggaagtacaggaagtatttccagactatgtacaatttgttgaagatattaaacactattcattagattatactgccgttaatgcctacctacataaagccgtagtacattacacagataaaactaaagtgttagaaactaaagtacaagatcaacaattacaaattgatgaacttaaagaactagtacaacaactattagataataaataa

SEQ ID NO: 82941 - DNA, 1320 bp, Citrobacter koseri
atggcaactatgatcacccaagacagacaggtagcaaacctgacgccagacgaagggaaagcacgtattgtagtcagtgttaagtcaaaagccggttcaggattatcagtcgaatcccgatcagggagtcgaacaaagagttggctgtatcgcccttatctcaatggtaaacaaatcaaaatcaccttgggtgcttatcctgcgatgacgctggctcaagcgcgtgaagcgcatgcagaagcagtagagttggttaagcaagggatcgatccacgctacgttcgaaaaacgacaaaacaacaaaacgaacaaatgccgattttctcccaattgtgggaaagctggctggccttcagagcggaaagcaaacccattggtgcacgtaccctgtcagattacgagggaacatttcgtcgtcatctggaaaaaggtttaggttcagtaagggtctgtgatttatcacgagcattaatctatgaacacttcatcagggtaagaaaaaccagcgctgaaggtgttcgtaaggggttgatcttgctaaacatgacccttgatcacgcaacattacaggggtttattgatcataatccagcacggttactcaagcctgcgatgtttggagcctcaatgggtaaaccgcgtgagaggtggttgccgcgggacgagttgcgaatgttatggcaagcattagacgaagcaggaaatggtggtggttctattgccgctggaggacaaggtatcgcatccagcgttatcctttcccaagctgttgccaatgcattacgcctcattattttcacaggagttcgtcgttctgaagcagtaaatatgcgctgggagcaaattaatggcgatcactggacaatacctgaaaccaaaaacggtaaaagtcatattgtgaccctgcacccactaactctagccttactgaaaacacagcgcatcatttcaacggggggttgggtattcgaatctgtcagcaaaccagggtttcccatcactggtgatgccataactcgtgctctcgaacggttgagaacaaaatatatggcagaaacagccccattttctccacacgacctgcgccgaacagctgccacaggttgcgcagaatatctggatgcgcctgagcggttgatcgagttacttctaaatcacatccctaaagaccgcttgatcagaacctatcaagttggtcagcaagcagagaaattgcggaacctgtttctaagatggggggatttcattgagcatgaaataattcagccctgtcatgatgtccctgataatgttgtcgaggttagttttagtaggaaatag

SEQ ID NO: 82942 - DNA, 618 bp, Citrobacter koseri
atgagccgataccatgtatccagcagtgaaggtcagtttgagaaagactctggcgagcaggttttggctaataagctggggatcgcgacttctgatgagatggatgaggctgaacttgtcctgttagaacaactctaccagtctgtttttgaagagcagttcccggaaggacagctcagcgtagccatgctaaaaagctggcatcgccgctggttaggtaacatctacgagtgggctggacaagaaagagcagttaatatcagcaaaggcggctttatgtttgccccctcaacgcagttgccaaaactgctgaacgaattcaacactaagtatctggctcaatacacaccgtgtagcggcatggacgaagaacaactcatcaccgctatcgccatcacgcatgtcgagctgatacttatccatccattcagagagggaaatgggcgcttgtcgcgactactagccgacgtgatggccgttcagggaggatacaaaccgctggattatcaaagctgggagcaaaacaaaacccagtatatctcggctatccatgcaggtttatcaatggactacaagccgatgaaacactgggtgagagaagcattaagaagggattaa

SEQ ID NO: 82943 - DNA, 171 bp, Citrobacter koseri
atgagcaacaacaaaaaaacgcaggcaagctacgctaagccgtctcgtgctgacatcgttcgctcagttacaacatctacggctgttgaaacaggacagtcctccgcgaagatcgaagcttcacttgaagccacgcgcaaaaaatttgctcatttgcgtcttgcggtttaa
